United States Patent Application Publication US 2019/0348154 A1 - sequence listing, part 10

SEQ ID NO: 35833 - DNA, 2313 bp, Escherichia coli
atgcctcgcctgttaaccaaacgcggctgctggataacgctggcagctgcgccctttctcctttttcttgcagcgtggggagcagataaactctggcctctaccgctgcatgaagtcaatcccgcacgagtggttgtggcgcaggatgggacgccgctctggcgctttgccgatgcggaaggcatctggcgttatccggtaacaatcgaagatgtttctccacgttaccttgaagcgctgatcaattatgaagatcgctggttctggaagcatccgggggtgaatccattctcggtggcgcgcgcagcatggcaagatctcacttcgggacgggttatttccggtggcagcacgctcactatgcaggttgctcgtctgcttgatcctcaccccaaaacatttggcggcaaaattcgccagctctggcgcgcgttgcaactggagtggcatctgtctaagcgtgaaattctgaccttgtatcttaaccgtgccccgtttggcggtacgttgcaggggatcggtgcggcaagttgggcttatctcggaaaatcgcctacgaatttaagctattccgaggcggcaatgctggcggttttgccgcaagctcccagccgtcttcgcccggatcgctggccggaacgtgccgaagccgcgcgtaataaagtgctcgaacggatggctgcgcaaggtgtgtggtcccgtgagcaggtaaaagaatcaagggaagaacccatctggctggcaccccgacaaatgccgcaactggcaccgctgttttcgcgcatgatgctcggtaaaagcaaaagcgacaaaatcgttactacgctggatgccggtcttcaacgacgtctggaagaactggcgcaaaactggaaaggacgattaccaccgctcagctcactggcgatgatcgtggttgatcataccgatatgcgtgttcgcggctgggtgggttctgttgatctcaacgatgattcacgctttggtcatgttgatatggtcaatgcgatccgatcgccaggatcggtgctcaaaccgtttgtttatggtctggcgctggatgaaggcttgatccacccggcatcactgctgcaagacgttccccggcgcaccggtgattatcgaccaggtaactttgatagcggttttcatggcccgatcagcatgagcgaggcgctggtgcgctcgctgaatttacctgctgtgcaggtgctggaagcctatggaccgaaacggtttgcggcaaaattacgcaatgttggattgccgttgtatctgcccaacggcgctgcgccgaatctttcgctcattctcggcggcgctggtgcaaaactggaagatatggcggcagcgtataccgcgtttgctcgccacggcaaggcaggtaaattgcgcttacagcctgacgatccgctgcttgaacggcctttaatgtcgtcgggggctgcgtggatcattcgccggattatggctgatgaagcgcaacccttgccggatggtgccttgccgcgcgtcgccccactggcatggaaaacgggcaccagctatggctatcgtgatgcctgggcgattggggttaacgctcgctatgtcattgggatctggactggcagaccggacggcacgcccgttgttggtcagtttggctttgccagcgccgtaccattgttgaatcaggttaataatatcttactgtcgcgcagtgcgaatctgccggaagacccacgtcctgactctgtaagtcgtggcgttatctgctggccgggcggacagtctttgccggaaggtgacggtaactgccgccgccgcctggcaacctggctgctggacgggagtcagccaccaactctattactgccggagcaggaaggcattaatggcattcgtttccccatctggctggatgaaaacggcaaacgtgttgccgctgattgccctcaggcgcgacaagaaatgataaatgtctggccgctaccgctggaaccctggttgcccgcatcagaacgccgcgctgtgcgcttaccaccggcctcgacaatttgcccgccatacggtcacgatgcacaactcccactgcagctgacaggtgttcgcgatggcgcgattattaaacgtttaccgggcgcagcggaagcgactttgccgttgcaatcaagtggaggggcaggtgaacgctggtggtttctgaatggcgaaccgttaactgaacgcgggcgcaacgtgaccctgcatttgatggataagggcgattatcaattgctggtgatggatgaggtggggcaaatcgcgacagtgaaatttgtcatgcaatag

SEQ ID NO: 35834 - DNA, 4962 bp, Escherichia coli
atgaaaaagttacgcgtagccgcctgcatgctaatgctggcgctggcagggtgcgacaacaacgataacgcgccaacagcggtgaaaaaagatgcgccttctgaagttactaaagcggcctcttcagaaaacgtgagttcagcaaaactttccgcgccggagcgacaaaaactggcccaacagagtgccggtaaggcgctgacattgctggatctctctgaagttcaacttgatggcgcagccacgctggtgctgacgttctccattcctctcgacccggatcaggatttctcacgcgttatccatgtcgtcgataagaaaagcggcaaagtggatggtgcctgggagctgtcagataatcttaaagagttgcgtttacgccacctcgaaccgaaacgtgatttgatcgtcactattggcaaggaggtcaaagcactcaacaacgcaaccttcagtaaagattacgaaaaaactataactacccgcgatatccaacccagcgtcggttttgccagccgtggttcgttgttacctggtaaagttattgaagggctgccggtaatggcgctcaacgttaacaatgttgatgttaacttcttccgtgtgaagcccgaatctctgcctgcattcattagccaatgggaataccgcaattcgctggcgaactggcagtctgaaaaactgctgcagatggcggatctggtttataccggacggtttgatctcaatcctgcgcgtaacacccgtgaaaaattattgctgccgctgggtgatatcaaaccgcttcagcaggcaggcgtgtatctggctgtgatgaatcaggctggacgttacgattacagtaatcccgcgacgctgtttacgttaagtgatatcggcgtttcagctcaccgttatcacaatcgtctggatatctttacccaaagtctggaaaacggcgcggcccagcaaggaatacaagtctctttattaaatgagaaagggcagactctgactcaggcaaccagtgatgctcaggggcatgtgcagctggaaaatgataaaaacgcggcattactgctggcgcgtaaagacggtcagacaacgctactcgatttaaaacttccggcgctggacttagcagaatttaacattgctggcgcgccaggctatagcaaacagtttttcatgtttggcccgcgcgatctttatcgccctggtgaaacagtcatcctcaatggtttattgcgtgatgcagatggaaaagcattgcccgatcaacccatcaagttagacgtgattaaacccgacgggcaggtactcaggagcgtcgttagtcagccggagaatggcctctaccactttacctggccactcgatagcaatgcggcaaccggtatgtggcatattcgcgctaacacgggcgataaccagtaccggatgtgggatttccacgtcgaagattttatgccagagcgcatggcgctgaatctgactggtgagaaaaccccgctaacgccgaaagatgaagtgagattttccgtggtggggtactacctgtatggtgcgcctgctaatggtaatactttgcaagggcaacttttcctgcgcccactgcgtgaagctgtgtcagccttacctggtttcgaattcggcgatatagctgccgaaaatctttcccgcacgctggatgaagttcagttgacgctggatgataaagggcgtggcgaagtttctacagaaagccagtggaaggaaacgcattccccattacaggttattttccagggtagtttgttggaatcgggcggtcgcccggtgacgcgccgcgctgagcaggctatctggcctgccgatgcattgccggggatccgtccgcagttcgcctcgaaatcggtttacgattatcgcactgacagcacggtgaaacagcccattgttgatgaaggcagtaacgccgcttttgacatcgtttatagcgatgcgcaaggcgtgaaaaaagccgtgtcgggcttgcaggtgcgcctgattcgcgaacgccgcgattactactggaactggtcagaagatgaaggctggcaatcacagtttgatcaaaaagatctgattgaaaatgaacaaactctggatctgaaagcggacgaaaccggcaaggtcagtttcccggtagagtggggcgcttatcgtctggaagtcaaagcgccgaatgaagcggtcagtagtgtgcgtttctgggctggctatagctggcaggacaacagcgacgggagcggcgcagtgcgtccggaccgtgtcacgctgaaactggataaagccagttatcgccctggcgacaccattaagttgcatatcgccgcgccaacggcgggtaaaggttatgcgatggtcgagtccagtgaagggccgctgtggtggcaagagattgatgttccggctcaagggctggatctgacgattccggtcgataaaacctggaatcgtcatgatctgtatttaagtacgctggtggtacgtcctggcgataaatctcgctctgcgacgccaaaacgcgcagttggggtgttgcatctgccgcttggcgatgaaaaccgtcgtctcgatctggcgctggaaacccccaccaaaatgcgccccaatcagccattaaccgtgaaaattaaagccagcaataaaaatggtgagatgccaaaacaggtgaatgtgctggtgtctgccgttgatagcggtgtgctgaatattactgattacgttacccccgatccgtggcaggcgttctttggtcagaaacgctatggtgcagacatttacgatatttacggtcaggtcattgaaggtcaggggcgtctggcagctctgcgttttggtggcgatggtgatgagctgaaacgtggtggtaaaccgccggtcaatcacgtcaatattgtcgcgcagcaggcgctgccggtaacgctcaacgaacagggcgaaggctcggttacactgccgattggcgattttaacggtgaactacgcgtcatggcgcaagcctggacggcagatgacttcggtagcaacgaaagcaaagtgatagttgccgcaccggtgattgctgaactgaacatgccgcgctttatggcgagtggcgatacctcgcgtctgacgctggatatcactaatcttaccgataaaccgcaaaaactgaacgttgccctgaccgccagtggtttgcttgaactggtcagcgtttcacccgcagccgttgaattagcgccaggtgtgcgtactacgctgtttatcccggtgcgagcattgccgggttatggcgatggagaaattcaggccaccattagcgggttagcgttaccgggtgaaaccgttgccgatcagcataagcagtggaaaatcggcgtccgtccggcgttcccggcacaaacggttaattacggtacggcgttgcagcctggtgagacatgggcgattccggcggatggattgcaaaacttctcgcctgttacactggaagggcaattgttgttgagcggcaaaccaccgctgaacatcgcacgttatatcaaagagttaaaagcgtatccgtacggctgtcttgagcaaaccgccagcggcttgttcccgtcactttataccaacgcagcccaactgcaggcgttgggcatcaaaggcgacagtgatgagaaacgccgtgcatcggtcgatatcggcgtttcccgtttgctgcaaatgcaacgtgataacggcggctttgcgctgtgggataaaaacggtgacgaagagtactggctgacggcttacgtgatggatttcctggtccgcgcaggtgagcaggggtacagcgtgccgacagacgtcattaaccggggaaatgagcgtctgctgcgctatttacaagatccgggcatgatgtcgatcccgtacgcggataatctcaaagccagtaaattcgccgtacagtcttacgctgcgctggtgctggcccgtcagcaaaaagcaccactgggtgcgctgcgtgaaatctgggagcatcgtgcagatgccgcttctggtttaccgctgctgcaacttggcgttgcgctgaaaaccatgggtgatgcgacgcgtggtgaagaagcaattgcgttggcgctgaaaacgccgcgtaatagtgatgagcggatatggctgggtgattacggtagtccactgcgcgacaacgcgttgatgctctccttgctggaagaaaataaactgctacccgatgagcagaacactttgctgaacacgctttcgcagcaggcatttggtgaacgctggctatcgacccaggaaagtaacgcgttgttcctggctgcccgtacaattcaggatttaccgggtaaatggcaggcgcaaacctctttctcagctgagccgctgacaggcgagaaaacgctaaacagcaatctgaatagcgatcaacttgccaccttgcaggtgaccaacagtggcgatcagccgttatggctgcgtgtggatgccagcggttatccgcaatccgcacctttaccggcgaacaatgtgctgcaaatcgagcgtcatattcttggtactgatggtcagagtaaatcgctggactcgttacgtagcggcgatctggtgctggtctggttgcaggtaaaagccagtaacagcgtgccggatgcgttagtcgtggatctgctgcctgcgggtctggaactggaaaaccagaatctggcgaacggtagcgccagcctggagcaaagtggtggcgaagtgcagaacttactgaaccagatgcagcaggcgagcattaagcacattgagttccgtgatgatcgctttgtggcggcggttgccgttgatgaataccaaccggtaacgctggtgtatctggcgcgggcggtgacgccgggaacgtatcaggtaccgcaaccgatggtggaatcaatgtatgttccccaatggcgggcgactggcgcggctgaagatctgctgattgtcagaccgtaa

SEQ ID NO: 35835 - DNA, 846 bp, Escherichia coli
atgtccacgacatggtttgtaggagccgactggctcgccgaacatattgatgacccggaaattcagattatcgatgcccgcatggcgtcgcctggacaggaagatcgtaacgttgctcaggagtatctgaatggacatattcccggcgcagtgttttttgatatcgaagcgctttctgatcacacttccccgcttccgcacatgctgccgcgcccggaaacgttcgccgtggcgatgcgtgagttaggcgttaaccaggataagcacctgattgtctatgacgaaggtaatcttttctcagccccacgagcatggtggatgctgcgcacctttggtgtagagaaagtgtcgattctggggggtggacttgcaggctggcagcgcgatgatctgctgttagaagaaggtgcagtagagctgccggaaggagagtttaacgccacgtttaatcctgaagccgtggtgaaagtcaccgatgtgttattggcaagccatgaaaatacggcgcaaattattgatgcccgcccggctgcacgttttaacgcagaagttgatgaacctcgcccaggtttacgtcgcggacatattcccggcgcgtttaacgttccgtggacagaactggtacgtgaaggcgaactaaaaacgaccgatgaactggatgcgatattttttggtcgcggcgtaagttatgacaaacctattatcgtcagttgcggttctggtgtaacggcagccgtggttttgttggcactcgcgacgctggatgtgccaaacgtgaaactgtacgacggcgcatggagtgaatggggcgcacgggcagatttaccggttgagccattgaaataa

SEQ ID NO: 35836 - DNA, 777 bp, Escherichia coli
atgtccgaaacaaaaaacgaacttgaagatctgctggaaaaagcagcaaccgaaccggcgcaccgcccggcctttttccgtactctactggaatccaccgtctgggtgccgggtacggcggcgcagggcgaggctgtggttgaagatagcgcgcttgatttacagcactgggaaaaagaagacggcaccagcgtcattcctttttttacctcgttagaagcacttcaacaggcggttgaagacgaacaggcatttgtcgtaatgcccgttcgcacattgtttgagatgacccttggcgaaacgctcttccttaatgccaaactgccaaccggtaaagaatttatgccgcgtgaaatcagtttgttgattggtgaagaaggaaatccgctgagcagccaggaagtactggagggcggtgaatcgctgatattatcggaagtcgcagagccgccagcacaaatgattgattcactcaccaccttatttaaaactattaagccggtgaagcgtgcttttatttgttcaattaaagagaacgaagaggcacagcctaatttacttattggcattgaagccgatggtgatatcgaagaaattattcaggcggcgggaagtgtagcgaccgatacattacctggcgatgaacccatcgatatttgtcaggtgaaaaaaggggaaaaaggaattagccactttattaccgaacatattgtgccattctatgaacgtcgctggggtggttttttgcgtgactttaaacagaaccggataatctaa

SEQ ID NO: 35837 - DNA, 1284 bp, Escherichia coli
atgacagaagcgatgaagattaccctctctacccaacctgccgacgcgcgctggggagaaaaagcgacttacagcattaataatgatggcattaccctgcatttgaacggggcagacgatctggggctgatccagcgtgcggcgcgcaagattgacggtctgggcatcaagcatgttcagttaagcggtgaagactgggatgcggatcgctgctgggcattctggcaaggttacaaagccccgaaaggcacacgtaaagtggagtggccggatctggacgatgcccaacggcaggaactggataaccgcctgatgatcatcgactgggtgcgtgacaccatcaacgcaccggcggaagaactggggccatcgcaactggcacagcgtgctgttgatctgatcagcaatgtcgcgggcgatcgtgtgacttaccggatcaccaaaggcgaagatctgcgtgatcaaggttatatggggctgcacacggtcggacgcggttcagaacgttctccggtattgctggcgctggattacaacccgactggcgataaagaagcgccagtgtacgcgtgcctggttggtaaaggcatcacctttgattccggcggctacagtatcaaacagaccgcatttatggactcgatgaagtcggacatgggcggcgcggcaacggttaccggggcgctggcgtttgccattacgcgcggactgaacaagcgcgtgaagctgttcctctgctgtgcggataacctgatcagcggcaacgcgttcaaactgggcgatattattacctatcgcaacggtaaaaaagttgaagtgatgaacactgatgcggaagggcgtctggtgctggccgatggcctgattgatgccagtgcgcagaaaccggaactgatcattgatgcggcgaccctcaccggggcggcgaaaactgcgctgggtaatgattatcacgcgctgttcagttttgacgatgcgcttgccggtcgcttgctggcgagtgccgcgcaggagaatgaaccgttctggcgtctgccgctggcggagttccaccgcagccagctgccgtctaactttgccgaactgaacaataccggaagcgcggcgtacccggcaggcgcgagcacggcggcgggcttcctgtcgcactttgttgagaactatcagcaaggctggctgcatatcgactgctcggcgacttaccgtaaagcgccggttgaacagtggtctgcgggtgctacgggacttggtgtgcgcacgattgctaatctgttaacggcgtaa

SEQ ID NO: 35838 - DNA, 201 bp, Escherichia coli
atgggacttaagtggaccgatagccgcgaaattggcgaagcactgtacgatgcgtatcccgatcttgatccgaaaacggttcgattcaccgatatgcatcagtggatttgcgatctggaagatttcgacgacgacccgcaggcatccaacgagaaaatcctcgaagcgattttgttagtctggctggacgaagccgaataa

SEQ ID NO: 35839 - DNA, 336 bp, Escherichia coli
atgccaaagattgttattttgcctcatcaggatctctgccctgatggcgctgttctggaagcgaatagtggtgaaaccattctcgacgttgcgctgcgtaacggtatcgagattgaacacgcctgtgaaaaatcctgtgcttgcaccacctgccactgcatcgttcgcgaaggttttgactcgctgccggaaagctcagagcaggaagacgacatgctggacaaagcctggggactggagccggaaagccgtttaagctgccaggcgcgcgttaccgacgaagatttagtggtcgaaatcccgcgttacactatcaaccatgcgcgtgagcattaa

SEQ ID NO: 35840 - DNA, 1851 bp, Escherichia coli
atggccttattacaaattagtgaacctggtttgagtgctgcgccgcatcagcgtcgtctggcggccggtattgacctgggcacaaccaactcgctggtggcgacagtgcgcagcggtcaggccgaaacgttagccgaccatgaaggccgtcacctgctgccgtctgttgttcactatcaacagcaagggcattcggtgggttatgacgcgcgtactaacgccgcgctcgataccgccaacaccattagttctgttaaacgcctgatggggcgctcgctggctgatatccagcaacgctatccgcatctgccttatcaattccaggccagcgaaaacggcctgccgatgattgaaacggcggcggggctgctgaacccggtgcgcgtttctgcggacatcctcaaagcactggcggcgcgggcaactgaagccctggcaggcgagctggatggtgtcgttatcaccgttccggcgtactttgacgatgcccagcgtcagggcaccaaagacgcggcgcgtctggcggggttgcatgttctgcgcttacttaacgaaccgaccgctgcggctatcgcctacgggctggattccggtcaggaaggcgtgatcgctgtttatgacctcggcggcgggacgtttgatatttccattctgcgcttaagtcgcggcgtgtttgaagtgctggcgaccggcggtgattccgcgctcggcggcgatgatttcgaccatctgctggcggattatattcgcgagcaggcgggcattcctgatcgtagcgataaccgcgttcagcgtgaactgctggatgccgccattgcagccaaaatcgcgctgagcgatgcggactccgtgaccgttaacgttgcgggctggcagggcgaaatcagccgtgaacaattcaatgaactgatcgcgccactggtaaaacgaaccttactggcttgtcgtcgcgcgctgaaagacgcgggtgtagaagctgatgaagtgctggaagtggtgatggttggcggttctacccgcgtgccgctggtgcgtgaacgggtgggcgaatttttcggtcgtccaccgctgacttctatcgacccggataaagtcgtcgctattggcgcggcgattcaggcggatattctggtgggtaacaagccggacagcgaaatgctgttgctggatgtgatcccgctgtcgctgggcctcgagaccatgggcggcctggtggagaaagtgatcccgcgtaataccacgattccggtggcccgcgcccaggatttcaccacctttaaagatggtcagacggcaatgtctatccatgtgatgcagggtgaacgtgaactggtgcaggactgccgctcgctggcgcgttttgcactgcgtggtatcccggcgctaccggctggcggcgcgcatattcgcgtaacgttccaggtcgatgccgacggtcttttgagcgtgacggcgatggagaaatccaccggcgttgaggcgtctattcaggtcaaaccgtcttatggtctgaccgatagcgaaatcgcttcgatgatcaaagactcaatgagctatgccgagcaggacgtaaaagcccgtatgctggcagaacaaaaagtagaagcggcgcgtgtgctggaaagtctgcacggcgcgctggctgctgatgccgcgctgttaagcaccgcagagcgtcaggtcattgacgatgctgccgctcacctgagtgaagtggcgcagggcgatgatgttgacgctatcgaacaagcgattaaaaacgtagacaaacaaacccaggatttcgccgctcgccgcatggaccagtcggttcgtcgtgcgctgaaaggccattccgtggacgaggtttaa

SEQ ID NO: 35841 - DNA, 516 bp, Escherichia coli
atggattacttcaccctctttggcttgcctgcctgttatcaactcgatacccaggcgctgagcctgcgttttcaggatctacaacgtcagtatcatcctgataaattctccagcggaagccaggcggaacaactcgccgccgtacagcaatctgcaaccattaaccaggcctggcaaacgctgcgtcatccgttaatgcgcgcggaatatttgctttctttgcacggttttgatctcgccagcgagcagcatactgtgcgcgacaccgcgttcctgatggaacagctggaactgcgcgaagaactggacgagatcgaacaggcgaaagatgaagcgcggctggaaagctttatcaaacgtgtgaaaaagatgtttgatacccgccatcagttgatggttgaacagttagacaacgagacgtgggacgcggcggcggataccgtgcgtaagctgcgttttctcgataaactgcgaagcagtgccgaacaactcgaagaaaaactgctcgatttttaa

SEQ ID NO: 35842 - DNA, 324 bp, Escherichia coli
atgtcgattacactgagcgacagtgcagcagcgcgagtaaatacctttctggctaaccgcggcaaagggtttggcctgcgtctgggcgtgagaacctccggatgttcaggtatggcttatgtactggaatttgttgacgaaccgacgccggaagacatcgtgtttgaagacaaaggcgtgaaagtcgtggtcgatggcaaaagcctgcaatttctggacggtacgcagctggacttcgtaaaagaaggcctgaacgaagggtttaaattcaccaacccgaacgtcaaagatgagtgtggttgcggcgaaagcttccacgtttga

SEQ ID NO: 35843 - DNA, 387 bp, Escherichia coli
atggcttacagcgaaaaagttatcgaccattacgagaatccgcgtaacgtgggttcctttgacaacaacgacgagaacgtcggcagcggcatggtgggtgcaccggcctgtggcgacgtaatgaagttgcagattaaagtcaacgatgaaggtatcattgaagacgcgcgttttaaaacttacggctgcggttctgctatcgcttccagctccctggtcaccgaatgggtgaaagggaagtctctcgacgaagcgcaggcgatcaaaaacaccgatattgctgaagaacttgaactgccgccggtgaaaattcactgttctattctggcagaagacgcgatcaaagccgccattgcggactataaaagcaaacgtgaagcaaaataa

SEQ ID NO: 35844 - DNA, 1215 bp, Escherichia coli
atgaaattaccgatttatctcgactactccgcaaccacgccggtggacccgcgtgttgccgagaaaatgatgcagtttatgacgatggacggaacctttggtaacccggcctcccgttctcaccgtttcggctggcaggctgaagaagcggttgatatcgcccgtaatcagattgcagatctggtcggcgctgacccgcgtgaaatcgtctttacctctggtgcaaccgaatctgacaacctggcgatcaaaggtgcagccaacttttatcagaaaaaaggcaagcacatcatcaccagcaaaaccgaacacaaagcggtactggatacctgccgtcagctggagcgcgaaggtttcgaagtcacctatctggcaccgcagcgtaatggcattatcgacctgaaagaacttgaagcagcgatgcgtgacgacaccatcctcgtttccatcatgcacgtaaataacgaaatcggcgtggtgcaggatatcgcggctatcggcgaaatgtgccgtgctcgcggcattatctatcacgttgatgcaacccagagcgtgggcaaactgcctatcgacctgagccagttgaaagttgacctgatgtcattctccggccacaaaatctatggcccgaaaggtatcggtgcgctgtatgtgcgtcgtaaaccgcgcgtacgcatcgaagcgcaaatgcacggcggcggtcacgagcgcggtatgcgttccggcactctgcctgttcaccagatcgttggtatgggcgaagcctatcgcatcgcaaaagaagagatggcgaccgagatggaacgtctgcgcggcctgcgtaaccgtctgtggaacggcatcaaagatatcgaagaagtttacctgaacggtgacctggaacacggcgcgccgaacattctcaacgtcagcttcaactacgttgaaggtgagtcgctgattatggcgctgaaagacctcgcggtttcttcaggttccgcctgtacgtcagcaagcctcgaaccgtcctacgtgctgcgcgcgctggggctgaacgacgagctggcacatagctctatccgtttctctttaggtcgttttactactgaagaagagatcgactacaccatcgagttagttcgtaaatccatcggtcgtctgcgtgacctttctccgctgtgggaaatgtacaagcagggcgtggatctgaacagcatcgaatgggcacatcattaa

SEQ ID NO: 35845 - DNA, 489 bp, Escherichia coli; identical to SEQ ID NO: 2622

SEQ ID NO: 35846 - DNA, 741 bp, Escherichia coli
atgctgcaaaatattcgaattgtgctggtggagacgtcacacaccggcaatatgggttctgttgcccgtgccatgaaaacaatgggattaaccaatctgtggctggttaatccactggtgaaacctgactcccaggcgattgccctggcagcaggggccagcgatgtgattggtaatgctcacatcgtcgatacgctcgacgaagcgttagccggttgtagcctggtggtgggcaccagcgcacgctcccgcacgctgccgtggccgatgctcgacccgcgcgaatgcggtctgaaaagcgtcgctgaagcggcaaataccccggtggcgctggtttttggtcgcgagcgcgtcggcttgaccaatgaagagttgcagaaatgccattatcatgtcgcgattgccgctaacccggaatacagttcgctgaatctggcgatggcggttcaggttattgcctatgaagtgcgcatggcctggctggcaactcaggaaaatggcgaacaagtcgagcatgaagagacgccgtatccgctggtcgatgatctggagcgtttttatggtcatctggaacaaacgctgctggcaaccggttttattcgtgaaaaccatccggggcaggtgatgaataaattgcgtcgtttgtttacccgtgcgcgcccggaaagccaggaattgaatatcctgcgcgggattctggcttctatagagcagcagaataaaggtaataaggccgaataa

SEQ ID NO: 35847 - DNA, 804 bp, Escherichia coli
atgcatccgatgctgaacatcgccgtgcgcgcagcgcgcaaggcgggtaatttaattgccaaaaactatgaaaccccggacgctgtagaagcgagccagaaaggcagtaacgacttcgtgaccaacgtagataaagctgccgaagcggtgattatcgacacgattcgtaaatcttacccacagcacaccatcatcaccgaagaaagcggtgaacttgaaggtactgatcaggatgttcaatgggttatcgatccactggatggcactaccaactttatcaaacgtctgccgcacttcgcggtatctatcgccgttcgtatcaaaggccgcactgaagttgctgtggtttacgatcctatgcgtaacgaactgttcaccgccactcgcggtcagggcgcacagctgaacggctaccgtctgcgcggcagcaccgctcgcgatctcgacggtactattctggcgaccggcttcccgttcaaagcaaaacagtacgccaccacctacatcaacatcgtcggcaaactgttcaacgaatgtgcagacttccgtcgtaccggttctgcggcgctggatctggcttacgttgctgcgggtcgcgttgacggtttctttgaaatcggtctgcgtccgtgggatttcgcggcaggcgagctgctggttcgtgaagcgggcggcatcgtcagcgacttcaccggtggtcataactacatgctgaccggtaacatcgttgctggtaacccgcgcgttgttaaagccatgctggcgaacatgcgtgacgagttaagcgacgccctgaagcgttaa

SEQ ID NO: 35848 - DNA, 855 bp, Escherichia coli
atggcgctgccagtgaacaaacgcgttctcaaaattctgtttattctctttgttgttgccttctgcatttatttaataccgcgcatcgccatcaattttttctattaccctgacgacaaaatctacggccccgatccctggtcagccgaatcagtagaattcaccgctaaagatggcactcgcctacatggttggtttatcccttctgcaactggccccgctgaaaatgccattgccaccattattcatgctcacggcaatgccggaaatatgtccgcccactggccgctggtcagttggttacccgagcgtaatttcaacgtttttatgtttgattatcgcgggtttggtaaatcaaaaggcacgccgtcccaggccggattgctggacgatacgcaaagtgccatcaatgtggtgcgccatcgcagtgatgtaaacccacaacggctggtgctgttcgggcagagtattggcggggcgaatattctggatgttattggtcagggtgatcgtgaaggcatacgtgcggtgatcctcgactccacatttgcctcttatgcgaccatcgccaaccagatgatccccggcagtggctacttacttgatgagagttgcagcggcgaaaattacatcgccagcgtcagcccgatcccgcttttactgattcacggtaaagctgatcacgttatcccatggcagcacagcgaaaagttgtatagcctggcaaaagagccaaaacggttgatcctaatcccggatggcgaacacattgatgctttttccgatcgtcacggcgatgtttatcgcgaacagatggtggattttatccttagcgcgttgaatccgcagaactaa

SEQ ID NO: 35849 - DNA, 1140 bp, Escherichia coli
atggttttgcaatccacgcgctggttggcgctcggctatttcacatacttttttagttacggcatttttctacctttctggagcgtctggcttaaggggattggtttaacgccagaaaccatcggcctgttattgggggcaggtttggttgcccgttttctcgggagtttgctcatcgcgccccgcgtcagcgatccttctcgcctgatttccgccttgcgcgtgctggcactgctgacacttctctttgctgtcgcattctgggcgggggcgcacgtagcgtggctgatgctggtgatgattggctttaacctctttttctcaccgctggtaccgttgaccgatgcactggcgaatacgtggcaaaagcagttcccgcttgattacggcaaagtgcgactgtggggctcggtagcgtttgtcattggctcggcgctgacgggcaaactggtcagtatgtttgattatcgggtgatcctcgcgctgttgacgttgggcgtggcatccatgctgctcggctttctcatccgtccgacgattcagccacaaggggcaagccgccagcaggagagcaccggttggtctgcgtggttggcgttggttcgccagaactggcgctttctggcctgcgtttgtttattgcagggggcgcatgcggcctattacggttttagcgccatttactggcaggctgctggctactcggcctcggcggtgggctatttgtggtcgctgggcgtggtggcggaagtcattatctttgcgctgagtaataaacttttccgccgttgtagtgcacgcgatatgctgttgatctcagcgatttgcggcgtagtgcgctggggcattatgggagcaactacggcgttgccgtggttgatagtggtgcaaattctgcattgtggcaccttcacggtctgccacctggccgccatgcgctatattgccgctcgccagggtagcgaagtcatccgtttacaggcggtttactctgccgtcgcgatgggcggcagtattgcgatcatgaccgttttcgccggtttcctgtatcaatatctgggccacggcgtgttctgggttatggcgctggtggcgcttccggcaatgtttttgcgcccgaaagttgttccctcatgctga

SEQ ID NO: 35850 - DNA, 891 bp, Escherichia coli
atggaactacggcatttacgctatttcgtcgcagtggcgcaggcactgaactttacccgtgcggcggaaaaactgcatacctcacagccttcgttaagcagccagatccgcgatcttgaaaactgtgtcggtgttccgttactggtgagggataagcgcaaagtcgcgttgacggcggcgggagaatgttttctccaggacgcgctggcaatcctcgaacaagcggaaaatgccaaattacgggcgcggaaaattgttcaggaagacagacaattaaccattggctttgtgccatcggcggaagtgaatttactgccaaaagtattaccgatgtttcgtctcagacagccagacaccttaattgagctggtgagtttaatcaccacggaacaggaagaaaaaattcgccgtggtgaactcgacgtcggcttaatgcgccatcctgtttatagcccggagattgattatctggagctttttgacgaaccattagtggtggtgttaccggttgatcaccctttagcacatgaaaaagagatcactgccgcgcaactggatggcgtgaatttcgtcagtactgatccagcgtattccggttcgcttgcgccgatcgttaaagcgtggtttgcgcaagaaaacagccagccaaatatcgtccaggtggcaacgaatattctggtgaccatgaatctggtggggatggggctgggcgtcactttgatacccggttatatgaataattttaataccggccaggtggtatttcgacccattgccggaaatgtgccttccattgctttactgatggcgtggaagaaaggggagatgaagccggcattacgcgatttcatcgccattgtgcaggaacgtttggcaagcgtaacggtataa

SEQ ID NO: 35851 - DNA, 1362 bp, Escherichia coli
atgaccacaccctcagatttgaacatttaccaactgattgacacccaaaacggtcgggtcactccgcgtatttataccgacccggatatttaccaactggagcttgagcgcattttcggtcgttgctggctatttctcgcccacgaaagccagatcccaaaacctggtgatttctttaacacctacatgggggaagatgcggttgtcgtagtgcgtcagaaagacggcagcattaaggcgtttctcaaccaatgccgccaccgggccatgcgtgtgagttatgcagattgcggcaacactcgcgcctttacctgtccgtatcacggctggtcttatggcattaacggcgagttgatcgatgtaccgctggaacctcgcgcctacccacaagggttgtgtaaatcccactggggactaaacgaagttccttgtgtggagagttataaagggctgatttttggcaactgggataccagcgcaccaggcctgcgtgattacctgggtgacattgcctggtatctggatggcatgctggatcgtcgcgaaggcggcaccgaaattgtcggcggtgtacaaaagtgggtgatcaactgcaactggaaattcccggcagagcagttcgccagtgaccaatatcatgctctgttcagccatgcttctgccgttcaggtattaggggcgaaagatgatggcagcgataagcgcctcggtgatggacaaaccgcccgtccggtatgggaaaccgccaaagatgcgctgcaatttggtcaggacggtcacggtagcggtttcttctttactgaaaaaccggatgctaatgtctgggtcgatggcgcagtttcaagctattaccgcgaaacctatgccgaagcagaacaacgtttaggtgaagttcgcgccctgcgtctggcgggtcataacaatatattccccacgctttcatggctaaacggcactgccacactccgcgtctggcatccgcgcggccctgatcaagttgaagtgtgggcgttctgtattactgacaaagccgcctccgatgaagttaaagccgctttcgaaaacagcgccactcgtgcttttggtcctgctggttttctcgagcaggatgactcggagaactggtgtgaaatccagaaattgctgaaaggtcaccgcgcccgcaacagcaaactgtgtctggaaatggggcttggtcaggaaaagcgtcgcgacgacagcattccaggcattactaactatatcttctcagaaacggccgctcgtggaatgtaccaacgctgggccgatctcctgagtagcgaaagctggcaggaagtgctcgataaaaccgccgcttaccagcaggaggtgatgaaatga

SEQ ID NO: 35852 - DNA, 519 bp, Escherichia coli
atgagtgcgcaagtttcactggagttacatcaccgcattagccagtttctctttcacgaagccagtctgctggatgactggaaatttcgtgactggctggcacagctcgacgaagagattcgttacaccatgcgcaccacggttaacgcacaaacgcgcgaccgccgcaaaggcgttcaaccgccgacaacctggatttttaatgacaccaaagaccagctggaacggcgaatcgcccgtctggaaaccggcatggcctgggcagaagaaccgccgtcacgcactcgtcacttaatcagcaactgccaggtaagcgaaaccgacatcccaaacgtatttgccgtgagggtgaattatctactttatcgggcacaaaaagagcgcgatgaaacattctatgttggaacgcgtttcgacaaagttcgccgtctggaggacgggaactggcgcttgctggaacgggatatcgtcctggatcaagcggtcatctcctcccataacctgagtgtactgttctga

SEQ ID NO: 35853 - DNA, 321 bp, Escherichia coli
atgaatcgaatttatgcgtgtcccgttgcggatgtgccggagggtgaggctctccggatcgatacctcgcccgtcatcgccctgttcaacgtaggcggcgagttttatgccattaacgatcgttgcagccatggtaatgcgtcgatgtcagaagggtatctggaagatgacgccacggtggagtgcccgctgcacgccgccagtttttgcctgaaaacggggaaagcgttatgcctgcccgccaccgatccgctaaccacttatccagtacacgttgaaggtggtgacatcttcatcgacttaccggaggcgcagccatga

SEQ ID NO: 35854 - DNA, 813 bp, Escherichia coli
atgagcgatctgcataacgagtccatctttattaccggcggcggatcgggattaggcctggcgctggtcgagcgatttatcgaagaaggcgcgcaggttgccacgctggaactgtcggcggcaaaagtcgccagtctgcgtcagcgatttggcgaacatattctggcggtggaaggtaacgtgacctgctatgccgattatcaacgcgcggtcgatcagatcctgactcgttctggcaagctggattgttttatcggcaatgcgggcatctgggatcacaatgcctcactggttaacactcccgcagagacgctcgaaactggcttccacgagctgtttaacgtcaacgtactcggttacctgctgggcgcaaaagcctgcgctccggcgttaatcgccagtgaaggcagcatgattttcacactgtcaaatgccgcctggtatcccggcggcggtggcccgctgtacaccgccagtaaacatgccgcaaccggacttattcgccaactggcttatgaactggcaccgaaagtgcgggtgaatggcgtcggcccgtgtggtatggccagcgacctgcgcggcccacaggcgctcgggcaaagtgaaacctcgataatgcagtctctgacgccggagaaaattgccgccattttaccgctgcaatttttcccgcaaccggcggattttacgggtccgtatgtgatgttggcatcgcggcgcaataatcgcgcattaagcggtgtgatgatcaacgctgatgcgggtttagcgattcgcggcattcgccacgtagcggctgggctggatctttaa

SEQ ID NO: 35855 - DNA, 1203 bp, Escherichia coli
atgaaagaaaaaacgatcattattgtcggtggcgggcaagcggcggcaatggctgcggccttgctacgccagcaagggttcaccggtgagctgcatctgttttccgatgagcaacatcttccttatgaacgccccccgctctcgaaatccatgttgctggaagattccccacagttgcagtctgtgttacccgctcactggtggcaggaaaacaatgttcatctgcattccggtgtaaccatcaaaacattgggccgcgacacacaagagttagtgttagctaacggcgaaagctggcactgggatcagctttttatagcaactggcgcggcagctcgaccgctgccgttgcttgatgcactgggagaacgctgctttaccctgcgccatgccggtgatgccgccagactgcgagaagttctgcagcccgaacggtcagtcgtgattgtcggtgccggaactattggtctggaactggctgccagcgccacgcagcgcggatgtaaggtgacagtgattgaactggcggcaaccgtcatgggtcgtaatgcaccaccgcccgtacaacgctatcttttgcagcgccatcagcaggctggtgtgcacattctgctcaataatgccattgaacatgtggtcgatggtgaaaacgtagaactgacgctgcaaagtggcgaaacgcttcgggccgatgtggtgatttacggtattggtatcagcgccaacgaccaactggctcgcgaggccaaccttgatactaccaatggcattgtcattgatgaggcttgccgcacctgcgatcccgcgatctttgccggtggcgatgtggcaatcacccgtcttgataatggtgcactacatcgctgcgaaagctgggaaaacgccaataaccaggcgcaaattgccgcttccgcaatgttggggctaccgcttccgcgactgccgccgccgtggttctggagcgatcagtacagtgataacttacagtttattggtgatatgcgtggtgatgactggctttgtcgtggcaacccggaaactcagaaggcgatttggtttaatctgcaaaacggcgtgcttatcggtgcggtaacgctgaatcaggggcgtgagattcgcttaatccgcaaatggatccagagcggcaaaacgtttgatgcgaaactgctgacagatgagcacatcgcgcttaaatcactgtaa

SEQ ID NO: 35856 - DNA, 423 bp, Escherichia coli
atgaacacactacgttattttgattttggagctgcccgccccgttttgttattaattgcccgtatcgccgtggtcttaattttcattatttttggttttcccaaaatgatgggttttgacggtacggtccaatatatggcctcgctgggcgcgccaatgccgatgctggcagcgattattgcggtagttatggaagtgcccgccgcgatattaatcgtgcttggctttttcacccgtccgctggcggtgctgtttattttctacacgctgggtacagcggtaattggtcaccattactgggatatgaccggcgatgcggttgggccaaatatgattaatttctggaaaaatgtcagtatcgctggcgcattcctgctgttggcaattaccgggccgggggcaatttctctcgatcggcgttag

SEQ ID NO: 35857 - DNA, 873 bp, Escherichia coli
atgaccatctatacgttatctcacgggccgctagagctggacgtttctgaccggggcggcgtcatcgaaggcttctggcgtgacgcgacgccgctcttacgtcccggtaaaaaaagcggtgtggcaaccgatgcctcctgttttccgctggtgccgtttgcaaaccgggtgagcggcaatcgttttgtctggcaggggcgtgagtatcaactgcaaccgaatgttgagtgggatgcgcactatctgcacggcgacggctggctggggcagtggcaatgtgtctcgcgcagcgaagatagcttgtgtctggtgtatgaacatcgcagcggtgtttatcactatcgggtaagtcaggcgtttcatttaacggcagatacgctgacggtgacgctctctgtcaccaatcaagggacagagacgctgccatttggtaccggctggcatccttattttccgttgtcaccacaaacgcggattcaggcgcaggcgagcggttactggctggagcgggagcagtggctggcgggtgagttttgcgagcagctaccgcaggagctggatttcaaccagctcgcgccgttgccgcaccagtgggtgaacaatggctttgccggatggaatggtcaggcccgcatcgagcagccgcaggagggttatgccatcatcatggaaacgacgccacctgcaccatgttatttcatctttgtttccgacccggcgtttgataaaggatatgcgtttgatttcttctgtctggaaccgatgagccatgcgccggatgaccatcatcgcccggaagggggtgatctcattgcgcttgcaccaggggaatcaacaacttcagagatgtcgttgcgggttgcgttactgtaa

SEQ ID NO: 35858 - DNA, 1062 bp, Escherichia coli
atgaaaacgatgctggcagcttatttaccaggaaattcgaccgtcgatctgcgggaagttgcggtgccgacgccggggattaaccaggtactgatcaaaatgaaatcctccgggatttgcggaagtgatgtccactatatctatcatcaacaccgtgccacggcagcggcacccgataaaccgttataccagggatttatcaacggtcatgaaccgtgcgggcaaattgtggcgatggggcaaggctgccgccattttaaagagggcgaccgcgtgctggtgtatcacatttctggctgtggtttttgcccgaactgccgtcgcggttttcctatttcttgtactggcgaaggaaaagcggcttacggctggcagcgtgacggcggtcatgccgaatacttgctggcggaagaaaaagatctgatcctcctgccggatgcgctgagctacgaagatggtgcgtttattagttgcggcgttggcacggcctatgaagggattttgcgcggcgaagtttccggcagcgataacgtgctggtggtcggtctggggccggtcggcatgatggcgatgatgctggcgaaaggtcgcggtgcaaaaaggatcatcggcgttgatatgctgccggaacgtctggcgatggcgaaacagttaggggtgatggatcacggctatttagcaaccaccgaaggtctgccgcagattatcgccgaactcacccacggtggcgcggatgttgcgctcgattgttccggtaatgccgcaggtcgcttactggcgttgcaatccactgctgactggggacgggtggtttacatcggggaaaccggaaaagtggagttcgaggttagcgccgatctgatgcatcatcaacggcggattattggctcctgggtgaccagtctgttccatatggaaaaatgcgcccacgatttaacggactggaaactgtggccgcgtaatgccattacccatcgcttcacgctggaacaggcaggagatgcctatgcgctgatggcgagcggtaaatgcgggaaagttgtgattaacttcccggattaa

SEQ ID NO: 35859 - DNA, 999 bp, Escherichia coli
atgtctgcttcgtcattaccattgccgcagggcaagagcgtctcgctcaaacaatttgtcagtcgccatattaatgagatcggtttgctggtggtgatcgccattctttatctggtcttttctctgaacgcgccgggttttatctcattgaataaccagatgaacgtgctgcgcgatgccgccaccattgggattgccgcctgggcgatgacgctgattattatctccggtgaaattgatgtcagcgttgggccgatggtggcttttgtctcggtgtgcctggcatttttgctgcaatttgaagttccgttggcgattgcttgtctgctggtgttgctgttaggcgcgctgatgggaacgctcgccggggtgctgcgcggcgtgtttaacgtgccaagtttcgtggccacgctggggctgtggagcgccctgcgcggaatggggctgtttatgacgaacgccttgccagtgccgattgacgaaaacgaagtgctggactggctggggggacaatttctcggtgtgccggtatccgcgctgatcatgatggtgttatttgcgctgtttgtgttcattagccgcaaaaccgccttcgggcgctcggtttttgctgttggcggtaatgccactgcagcacagttgtgcggtattaacgttcgtcgggtacgcattcttatttttaccctttcgggattattagcagcggtgaccggcattttgttggcggcgcgcctcggttccggtaacgcaggtgccgcaaacggtctggagtttgacgtcatcgccgcggtcgtggttggcggtacggcgctttccggtggtcgcggttccctgtttggtacattgcttggtgtgttggtgattacgctaatcggtaacggtctggtgctgctcgggattaactcctttttccagcaggtggtgcgcggcgtcatcatcgtggtggcggtgctggcgaatatcttgctgacccagcgtagcagtaaagcgaaacgctaa

SEQ ID NO: 35860 - DNA, 1512 bp, Escherichia coli
atgttcacggcaacagaggcagtcccggtagcaaaagtggtggcaggaaataagcgttatcccggcgtcgttgcgttggataacgttaacttcacgctcaataaaggcgaagttcgtgcgctgttaggcaaaaacggcgcgggcaaatcgaccctcattcgaatgcttaccggcagtgaacgtccggatagcggtgatatctggattggcgagacgcgactggaaggtgacgaagctacgttgactcgccgtgccgctgaactgggggttcgtgcggtttatcaggagttaagtctggtggagggactgactgtggcggaaaacctctgcctcggtcagtggccccgccgcaacggcatgattgattacctgcaaatggcgcaggatgcccaacgttgcttacaggcgctgggcgttgacgttagccctgaacaacttgtttcaacgctaagcccggcacaaaagcagctggtggaaattgcgcgggtgatgaagggcgagccgcgcgtggtcattcttgatgaacctaccagttcgcttgccagtgcggaagttgaactggtgatcagcgcggtgaaaaagatgtcggcactgggcgtggcggtgatttatgtcagccaccggatggaagaaatccgccgcattgcctcctgtgccaccgttatgcgcgatggtcaggtggcgggcgatgtgatgctcgaaaacacctccacgcatcatattgtgtcgctaatgctcgggcgcgatcacgttgatattgcgccggtttcccctcaggaaattgtcgatcaggccgtgctggaagtccgtgcgttacgccataagcccaagctggaggatatcagctttacgctccgtcgtggcgaagtactcggcattgctggcctgctgggggcagggcgcagtgaattgttgaaagccatagttgggctggagacgtatgaacagggcgaaattgttatcaacggcgagaaaatcacgcgccccgattacggcgacatgctgaaacgcggcattggctatacgccagaaaaccgcaaagaagcggggatcattccctggctgggcgttgacgaaaatacagtgctgaccaatcggcaaaaaatcagcgccaacggtgtgctgcaatggtccaccatccgccgcctgaccgaagaggtgatgcagcggatgacggtcaaggccgccagtagcgaaacgcccatcggcacgctttctggcggcaatcagcaaaaagtggtgatcggtcgttgggtctatgccgccagccagattttgttgctcgacgagccaacgcgtggcgtcgatatcgaagccaaacagcagatttaccgtattgtccgcgagctggctgccgaaggaaaaagcgtggtgtttatctccagtgaagtggaggagttgccgctggtgtgtgaccgcatcctgttattacagcacggtacgttctcgcaggagtttcactcgccggtcaatgtggatgagctgatgtccgccattctgtctgtgcactga

SEQ ID NO: 35861 - DNA, 984 bp, Escherichia coli
atgcctaaaaaaatgagaacaacccgtaatctattattaatggctacgctattaggtagcgctctatttgccagggcagcggataaagaaatgaccattggtgcaatataccttgatacccagggatattacgctggcgtgcgtcagggcgttcaggatgcggcaaaagattcttcagtacaggtacagttaattgaaactaacgcccagggcgatatttcgaaagaaagtacttttgtagataccctcgtggcgcgtaatgtcgatgccattattttatcggcagtatctgaaaatggcagtagccgtaccgttcgtcgcgccagtgaagcgggtattccggtgatttgctacaacacctgtattaatcaaaagggtgtcgataaatatgtctcggcatatctggttggtgacccgctggaatttggtaaaaaactgggtaacgctgccgccgattattttattgccaacaaaattgaccagccgaaaattgccgtcatcaattgcgaagcctttgaagtttgtgtgcaacgacgtaaagggtttgaagaagtattaaaagcccgcgttcccggcgcgcaaattgtcgctaatcaggaagggactgttttagataaagcgatttccgttggtgaaaaactaattatctccacgtcggatctcaacgccattatgggggaatcgggcggtgcgacactcggcgcggtaaaagcggtacgtaatcaaaatcaggccggaaaaattgctgttttcggttcggatatgaccactgaaattgctcaggagctggaaaacaatcaggtgctgaaagcggtggtggatatttccggtaagaaaatgggcaatgctgttttcgcgcaaactttgaaggttatcaataaacaagccgacggtgaaaaagtgattcaggtgccaatcgatctctataccaaaacggaagacggtaaacagtggctggcaacgcacgttgatggtctgccctaa

SEQ ID NO: 35862 - DNA, 3282 bp, Escherichia coli; identical to SEQ ID NO: 9459

SEQ ID NO: 35863 - DNA, 1194 bp, Escherichia coli
atgagagcctgcattaataatcaacagattcgccaccataacaaatgcgtgattctggaactgctgtaccggcaaaagcgcgccaataaatcaaccctggcccggctggcgcaaatttcgattccggcggtcagtaatattttgcaggaactggaaagcgaaaaacgggtggtgaatatcgacgatgaaagccagacgcgcgggcatagtagcggtacatggctgattgcgccggaaggtgactggacgctgtgcctgaacgtgacgcctaccagtattgagtgtcaggtcgctaacgcctgtttaagtccgaaaggcgaatttgagtatttacagattgatgcaccgacgccgcaggcgctgctgtccgaaatcgaaaaatgctggcatcgccaccgtaaattgtggccggaccgtaccatcaacctggcgctggcaatccacggtcaggttgatccggtgactggcgtgtcgcaaaccatgccgcaagcaccgtggacaacgccggttgaggtgaagtatctgctggaagagaagctcggcattcgggtgatggtcgataatgactgcgtgatgctggcgctggcggagaaatggcaaaataattcgcagggccgggatttctgcgtgatcaacgttgattacggtattggctcgtcgttcgtgattaacgagcaaatttatcgcggcagtttgtatggtagcggacagattggtcacaccatcgttaatccggatggcgtcgtctgcgactgcggacgttatggctgcctggaaaccgtcgcctcgttaagcgcattaaaaaaacaggcgcgggtatggctaaaatcacaaccggttaatactcagcttgatcctgaaaaactgacaacagcgcagttaatcgctgcctggcagagtggagaaccgtggatcaccagctgggttgatcgctctgccaatgccattggtttgagtctgtataacttcctcaacatcctcaatattaatcagatttggttgtacggtcgcagttgtgcctttggtgagcactggcttaataccattattcgccagacgggatttaacccgttcgaccgcgacgaaggaccgagtgtgaaagcgacgaaaattggctttgggcaattaagccgcgcacaacaggtgctggggattggctatttgtatgttgaggcgcagttacggcagatttga

SEQ ID NO: 35864 - DNA, 1254 bp, Escherichia coli
atgttaaagcgtgaaatgaacattgccgattatgatgccgaactgtggcaggctatggagcaggaaaaagtacgtcaggaagagcacatcgaactgatcgcctccgaaaactacaccagcccgcgcgtaatgcaggcgcagggttctcagctgaccaacaaatatgctgaaggttatccgggcaaacgctactacggcggttgcgagtatgttgatatcgttgaacaactggcgatcgatcgtgcgaaagaactgttcggcgctgactacgctaacgtccagccgcactccggctcccaggctaactttgcggtgtacaccgcgctgctggaaccaggcgataccgttctgggtatgaacctggcgcatggcggtcacctgactcacggttctccggttaacttctccggtaaactgtacaacatcgttccttacggtatcgatgctaccggtcatatcgactacgccgatctggaaaaacaagccaaagaacacaaaccgaaaatgattatcggtggcttctctgcatattccggcgtggtggactgggcgaaaatgcgtgaaatcgctgacagcatcggtgcttacctgttcgttgatatggcgcacgttgcgggcctggttgcagctggcgtctacccgaacccggttcctcatgctcacgttgttactaccaccactcacaaaaccctggcgggtccgcgcggtggcctgatcctggcgaaaggtggtagtgaagagctgtacaaaaaactgaactctgctgttttccctggtggtcagggcggtccgttgatgcacgtaatcgccggtaaagcggttgctctgaaagaagcgatggagcctgagttcaaaacttaccagcagcaggtcgctaaaaacgctaaagcgatggtagaagtgttcctcgagcgcggctacaaagtggtttccggcggtactgataaccacctgttcctggttgatctggttgataaaaacctgaccggtaaagaagcagacgccgctctgggccgtgccaacatcaccgtgaacaaaaacagcgtaccgaacgatccgaagagcccgtttgtgacctccggtattcgcgtgggtacaccggcgattacccgtcgcggcttcaaagaagcagaagcgaaagaactggctggctggatgtgtgacgtgctggacagcatcaatgatgaagcggttatcgagcgcatcaaaggtaaagttctcgacatctgcgcacgttacccggtttacgcataa

SEQ ID NO: 35865 - DNA, 1191 bp, Escherichia coli
atgcttgacgctcaaaccatcgctacagtaaaagccaccatccctttactggtggaaacggggccaaagttaaccgcccatttctacgaccgtatgtttactcataacccagaactcaaagaaatttttaacatgagtaaccagcgcaatggcgatcaacgtgaagccctgtttaacgctattgccgcctacgccagtaatattgaaaacctgcctgcgctgctgccagcggtagaaaaaatcgcgcagaagcacaccagcttccagatcaaaccggaacagtacaacattgtcggtgaacacctgttggcgacgctggacgaaatgttcagcccgggccaggaagtgctggacgcatggggtaaagcctatggcgtactggctaatgtatttatcaatcgcgaggcggaaatctataacgaaaacgccagcaaagccggtggctgggaaggtactcgcgatttccgcattgtggctaaaacaccgcgcagcgcgcttatcaccagcttcgaactggagccggtcgacggtggcgcagtggcagaataccgtccggggcaatatctcggcgtctggctgaagccggaaggtttcccgcatcaggaaattcgtcagtactctttgactcgcaaaccggatggcaaaggctatcgtattgcggtgaaacgcgaagagggtgggcaggtatccaactggctgcacaatcacgccaatgttggcgatgtcgtgaaactggtcgctccagcaggtgatttctttatggctgtcgcagatgacacaccagtgacgttaatctctgccggtgtcggtcaaacgccaatgctggcaatgctcgacacgctggcaaaagctggccacacagcacaagtgaactggttccatgcggcagaaaatggcgatgttcacgcctttgccgatgaagttaaggaactggggcaagcactgccgcgctttaccgcgcacacctggtatcgtcagccgagcgaagccgatcgcgctaaaggtcagtttgatagcgaaggtctgatggatttgggcaaactggaaggtgcgttcagcgatccgacaatgcagttctatctctgcggcccggttggcttcatgcagtttgccgcgaaacagttagtggatctgggcgtgaagcaggaaaacattcattacgaatgctttggtccgcataaggtgctgtga

SEQ ID NO: 35866 - DNA, 339 bp, Escherichia coli
atgaaaaagattgatgcgattattaaacccttcaagctggacgatgttcgcgaagcactggctgaagtcggcattaccggcatgacggtcactgaggtgaaaggttttggccgccagaaaggccataccgagctgtaccgcggcgcggagtatatggtggattttctgccgaaagtgaaaattgagattgtcgtaccggacgacattgtcgatacctgtgttgataccattattcgcacggcgcaaaccggcaaaatcggtgacggtaaaatcttcgtcttcgacgtggcacgggtcattcgcatccgtaccggtgaagaggacgacgcggcaatttaa

SEQ ID NO: 35867 - DNA, 1335 bp, Escherichia coli
atgagccataaacctgcgcatttattattggtcgatgacgatccgggattgctgaaactgcttggcctgcgcctgaccagcgaaggctacagcgtggtcacggcggaaagtggtgctgaaggattacgggtactgaatcgcgaaaaagtagatttagttatcagcgacctgcggatggatgaaatggatggtatgcagctgtttgctgaaatccagaaagtgcagccgggaatgccggtaattattcttaccgcacatggttctattcccgatgccgttgctgcaacacagcagggagtgttcagtttcctcaccaagcctgtcgataaagacgcgctatatcaggcaattgacgatgcgctggaacaatccgcgccagccaccgatgaacgctggcgcgaggcgattgtcacccgcagcccgctgatgctgcgtttgctggaacaggcgcggctggtggcgcaatcagacgttagcgttttgattaacggtcagagcggcaccgggaaagagattttcgcccaggctatccacaacgctagcccgcgcaatagcaaaccatttattgctattaactgtggtgcattgcccgagcaattgctggagtcggagctgtttggtcatgcgcgtggcgcgtttactggcgctgtcagcaatcgcgaaggtttattccaggcggcggaaggcggtacgctatttctcgatgagattggcgatatgcccgcaccgttgcaggttaaactgctgcgcgtgttgcaggagcgtaaagtgcgcccgctgggcagtaaccgcgatattgatatcgacgtgcggattatttccgccactcaccgcgacctgccaaaagcgatggcgcgcggggaattccgtgaagatctctattaccgcctcaacgttgtcagcctgaaaattccggctctggcagagcgcacagaagacattccgctactggcaaatcacctgttgcgccaggcggcagagcgacataaaccgtttgtccgcgcgttctccaccgatgcgatgaaacgcctgatgaccgctagctggccgggtaatgtacgccagttggtcaacgtgattgaacagtgcgtggcgctgacctcatctccggtgattagcgatgcattagtagagcaggcgctggagggcgaaaacacggcgctgccaacctttgttgaggcacgtaatcagtttgaactcaactatttgcgtaagctgctgcaaattaccaaaggcaacgtcacccacgcggcgagaatggcggggcgcaaccggacagaattttataaactgctttcccgacacgagctggatgcaaacgatttcaaggaatga

SEQ ID NO: 35868 - DNA, 714 bp, Escherichia coli
atgcgacacatttttcaacgattattgccccgacggctgtggctggcagggctgccatgtctggcattgctgggttgcgtgcagagtcacaataagccagccattaatacgccagcagaagaaaaaattccggtttatcaactggctgactatctttctactgaatgtagcgacatctgggcgctgcaaggtaaatcaaccgaaaccaatccgctttactggctgcgggcgatggattgtgctgatcgtttaatgcctgcgcagtcgcgtcagcaagctcgccaatataacgacggcagctggcaaaatacctttaaacaagggattttgctcgccgatgccaaaattacgccgtatgagcgccgccagctggtcgcgcgcattgatgcgctaagtaccgaaatcccggcacaggttcgccctctgtatcaactttggcgcgacggtcaggcgctgcaactgcaactggcggaagagcgccaacgctacagcaaactccagcagtccagcgacagcgagctggatactttgcgccagcaacatcacgttctacagcagcaactggaactcaccacccgcaagctggaaaacctgactgatattgaacgccagctctcgacccgcaaaccggctggaaatttctcgccggatacgccgcacgagagtgaaaagcccgcgccatccacccatgaggtcactcctgatgagccataa

SEQ ID NO: 35869 - DNA, 1383 bp, Escherichia coli
atgctggcatttttgctgattctgctacccctgttggtgctggcatggcaagcctggcaaagcctgaatgcgcttagcgatcaggcggcgctggttaaccgcactacgcttgttgatgcccggcgcagtgaagcgatgaccaacgcggcactggaaatggagcgcagctaccgtcagtattgcgtgctggacgaccctacgcttgcgaaggtttatcaaagccagcgcaagcgttatagcgaaatgctcgatgcccacgcaggcgtactgccagacgataaactttaccaggcattgcgtcaggacttgaacaatctggctcaacttcagtgtaacaacagcggtcccgatgccgccgccgccgcgcgtctggaagcctttgccagtgccaataccgaaatggtgcaggccacgcgcacagtggtgttctctcgtgggcagcaacttcagcgtgaaatcgccgaacgtgggcaatattttggttggcaatcgctggtgctatttctggtgagtctggtgatggtactgcttttcacgcggatgattatcggtccggtaaaaaatatcgagaggatgatcaaccggttgggagaagggcgttctctgggcaatagcgtttcgttcagtggaccgagtgagttacgctcggttgggcaacgtattctttggttaagtgagcgcctgtcatggctggaatcccaacgtcatcaattcttaagacatttatctcatgaattaaaaacgccgctggcgagtatgcgtgagggcactgaattactggctgaccaggttgttgggccgcttacgccagagcaaaaagaggtggtgagcattcttgatagcagcagccgcaatttgcaaaagttgatcgaacaactgcttgattacaaccgtaaacaggcggacggtgcggtggaactggagaatgttgagttagcgccactggtggaaatggtggtttctgctcatagcctgcccgcacgggctaaaatgatgcataccgacgtcgatctcaaagcaacagcttgcctggcggagccaatgctgctgatgagcgtactggataatctttactccaatgcggtgcactacggggctgaatccggtaacatttgccttcgcagcagcttacatggtgcgcgggtttatattgatgtcatcaatacaggcacacccattccgcaagaggaacgcgccatgatcttcgaacccttttttcaaggaagccaccagcgaaaaggggcggtgaagggcagcggtctgggattaagcattgccagggattgtattcgccgtatgcaaggggaactgtatctggtcgacgagagcgggcaagacgtttgtttccgcattgaattgccgtcgtcgaaaaacacgaaataa

SEQ ID NO: 35870 - DNA, 3888 bp, Escherichia coli
atgatggaaattctgcgtggttcgcctgcattgtcggcattccgaatcaacaaactgctggcacgttttcaggctgccaggctcccggttcacactatttacgccgagtatgtccattttgctgacctcaatgcgccgttaaacgatgatgagcacgcacaacttgaacgcctgctgaaatatggcccggcactcgccagccacgccccgcaaggcaaactcctgctggtgaccccgcgtcctggcaccatctctccctggtcttcgaaagcgaccgatattgcccataactgcgggctgcaacaggtaaaccgtcttgagcgcggcgtggcttactatatagaagccggtacgctgaccaatgaacaatggcagcaggttaccgctgaactgcacgaccgcatgatggaaacggtcttttttgctttagatgatgcagagcagctgtttgcacaccatcaaccgactccggtcaccagcgttgatttgctggggttgggccgtcaggcgctaatcgacgctaacctgcgtcttggcctggcactggcggaagatgaaattgactatttgcaggatgctttcacaaagcttggtcgtaacccgaacgacatcgaactgtatatgtttgcccaggcgaactccgagcactgccgccacaaaatttttaacgccgactgggttatcgatggtgaacagcagccgaaatcgctgtttaagatgatcaaaaacaccttcgaaactacgccggatcacgttctctctgcttataaagataacgccgccgtcatggaagggtctgaagtgggccgctactttgctgaccacgaaacgggccgctacgatttccatcaggaaccggcgcatattctgatgaaagttgaaacccacaaccacccgacggcgatttctccgtggccgggcgcggcgaccggttccggcggtgaaatccgcgatgaaggtgccaccggacgcggcgcgaagccgaaagctggtttggttggtttctccgtttccaacctgcgaattcctggcttcgaacagccgtgggaagaagatttcggtaagcctgagcgcattgtcaccgcgctggacatcatgaccgaaggcccgctgggtggcgcggcatttaacaacgaatttggtcgtccggcactgaacggctacttccgtacttatgaagaaaaagtgaacagccacaatggcgaagagctgcgcggttatcacaaaccgatcatgctggcgggcgggatcggcaacattcgtgccgatcacgtacaaaaaggcgagatcaacgttggtgcgaagctggtcgttctcggcggcccggcaatgaacatcggtcttggcggcggcgcggcgtcttccatggcgtctggtcagtctgatgccgacctcgacttcgcttccgtacagcgcgacaacccggagatggagcgtcgctgccaggaagtgatcgaccgttgctggcagcttggtgatgccaacccaatcctgtttatccacgacgttggcgcaggcggtctttctaacgccatgccggaactggtgagcgacggcgggcgcggcggtaaattcgaactgcgcgatatcctgagcgacgaaccgggcatgagcccgctggaaatctggtgtaacgaatcccaggaacgctacgtgctggcggttgctgccgatcagttaccgctgtttgacgaactgtgtaagcgtgagcgcgcgccatacgcggtgattggtgaagcgaccgaagaactgcatctttctttgcacgatcgtcattttgataatcagccgatcgatctgccgctggacgtactgcttggtaaaacgccgaagatgacccgcgaagtacaaacgctgaaagcgaagggtgatgcgctggttcgtgaagggattaccattgctgacgcggtgaaacgcgtgctgcacctgccgaccgtggcggagaaaactttcctggtgaccattggtgaccgcagcgtaaccggcatggtagcgcgcgatcagatggtgggtccgtggcaggtgccggtcgctaactgcgcggtcactaccgccagcctcgacagctactacggcgaagcgatggcgattggcgagcgtgcgccggttgcgctgctggatttcgccgcctctgcccgtctggcggtcggtgaagcgttaaccaatattgccgcaacacagattggcgatatcaaacgcattaaactttccgccaactggatggcggcggcaggccaccctggtgaagatgcgggcctgtatgaagccgttaaagctgtgggcgaagaactttgtccggcgctgggcctgacgatcccggtgggtaaagactctatgtcgatgaaaacccgctggcaggaaggtaacgaagagcgcgaaatgacgtcgccgctgtcgctggtgatttctgcatttgcccgtgtggaagatgtgcgtcacaccatcacgccgcagctttctaccgaagataacgcattactgctgattgatctgggcaaaggcaataacgcgctgggcgcaacggcgctggcgcaggtttatcgtcagcttggcgacaaaccggcagatgtacgcgacgtcgcgcaactgaaaggtttctatgacgcggttcaggcgctggtagcacagcgtaagctgctcgcgtaccacgaccgctctgatggcggcctgctggtaacgctggcggaaatggcctttgctggtcattgtggcattgacgcagatatcgccactctgggtgacgatcgtctggctgcattgtttagcgaagaactgggtgcggtgattcaggttcgagccgctgaccgtgaatcagttgaagcggtactggcacagcatgggcttgctgattgcgtccattatgttgggcaagcggtttccggtgaccattttgtgattactgccaacgggcagactgtatttagcgaaagccgcaccacgttgcgtgtctggtgggcagaaactacctggcagatgcagcgcctgcgtgacaacccggagtgtgctgaccaggagcaccaggcgaaatccaacgacgccgatccgggcctgaatgtgaaactgtcgtttgatatcaacgaagatgtggcagcaccgtttattgccactggcgcgcgcccgaaagttgccgtgctgcgtgagcagggtgtgaactcgcatgttgaaatggcggcagctttccaccgtgcaggcttcgatgctatcgacgtgcatatgagcgatctgctggctggacgcacgggcctggaggatttccacgccctggtcgcgtgcggcggtttctcctacggtgatgtgctgggtgccggtgaaggttgggcgaagtctatcctgttcaatgaccgtgtacgcgatgagtttgcaaccttcttccatcgtccgcaaacgctggcgctgggggtatgtaacggttgccagatgatgtctaacctgcgcgaactgatcccaggtagtgagttgtggccacgttttgtgcgcaatacctccgatcgctttgaagcgcgtttcagcctggttgaagtaacccaaagcccgtctctgctgttgcaggggatggtgggctcgcaaatgccgattgctgtctctcatggtgaagggcgcgtggaagtgcgtgatgcggcgcatctggcggcgctggaaagcaaagggctggtggcactgcgctatgtcgataacttcggtaaagtcactgaaacctacccggctaacccgaacggttcaccgaacggtattacggcagtcacgactgaaagtggtcgagtcaccattatgatgccgcacccggaacgtgttttccgtactgtcagcaactcctggcatccggaaaactggggcgaggatggcccatggatgcgcattttccgcaatgcgcgtaagcagttggggtaa

SEQ ID NO: 35871 - DNA, 1557 bp, Escherichia coli
ttgaaaaaattaaagattaattatctgttcatcggcattctggcactgctgctcgcggtcgctctctggccatccattccctggtttggtaaagccgacaaccgtatcgccgccattcaagcgcggggagagttgcgtgtgagcaccattcatactcccctgacgtataacgaaatcaacgggaaaccttttggcctggattacgaactggcgaaacagtttgccgattacctcggcgtaaaactgaaagtgaccgtgcggcagaatatcagccagctgtttgacgacctcgataatggtaacgccgacctgctggcggcaggcctggtctataacagtgagcgtgtaaaaaattatcagcctggccctacctattattccgtgtcacaacaactggtttataaagtgggtcagtatcgcccacgtacactgggcaacctgacggcggagcaactcaccgttgcaccgggtcatgtggtggttaacgatctccagaccctgaaagaaacaaaattcccggaattaagttggaaggtagacgacaaaaaaggctctgcggaattaatggaagatgtcatcgaaggaaaactcgattacaccattgctgattctgttgccattagcctgtttcagcgcgttcatccggaactcgccgtagcgctcgacattaccgatgaacaaccggtgacctggtttagcccattagatggcgataataccctttccgccgctctgctcgatttcttcaacgaaatgaatgaagacggtacgctggcacgcattgaagagaaatacctggggcatggcgatgattttgattacgtcgatacgcgcacatttttacgcgccgtcgatgcggtactgccgcagttaaagcccctgtttgagaaatacgccgaagaaattgactggcgtttgctggccgctattgcttatcaggaatcgcactgggatgcgcaggccacttcaccgacgggtgtgcgcggcatgatgatgctaaccaaaaataccgcgcaaagcctcggcattacggatcgtaccgatgccgaacagagcatcagcggcggcgtgcgttatttgcaggatatgatgagtaaagtgccggaaagtgtgccggagaacgaacggatttggtttgccctcgccgcgtacaatatgggctatgcgcatatgctggatgcccgcgctctgacggcaaaaaccaaagggaatcctgacagttgggctgacgtaaaacagcgtctgcctttacttagccagaaaccctattacagcaagctgacttacggctacgctcgtgggcatgaagcctacgcttatgtcgaaaatattcgtaagtatcagattagcctggtgggttatctgcaggagaaagagaagcaggctacagaagcggcgatgcaactggcgcaggattatccggcggtatcgcctacggagctgggcaaagagaaatttccttttctctcgtttctttcccagtcgtcatcaaactatttgacccactctccctctctgctgttttccaggaaagggagtgaagagaaacaaaattaa

SEQ ID NO: 35872 - DNA, 504 bp, Escherichia coli
ttgtctgaagtcgaatttagccacgaatactggatgcgtcacgcgctgacgctggcaaagcgtgcctgggatgagcgggaagtgccggtcggcgcggtattagtgcataacaatcgtgttattggcgaaggctggaaccgtccgattggtcgacatgatcccaccgcacatgcagaaatcatggctctgcggcagggcggtctggtgatgcaaaattatcgtctgatcgacgccacgttgtatgtcacgcttgaaccctgtgtaatgtgtgccggagcgatgatccacagtcgcattggtcgcgtggtctttggtgcgcgtgacgcgaaaactggcgctgcgggatctttaatggatgtgctgcatcatccgggtatgaatcaccgagtggaaattaccgaaggaatactggcggatgagtgcgcggcgttgctcagtgacttctttcgcatgcgccgccaggaaattaaagcgcagaaaaaagcgcaatcctcgacggattaa

SEQ ID NO: 35873 - DNA, 636 bp, Escherichia coli
ttggcaactcacgagcgtcgtgtggtgttttttgacttagatggaacattgcatcagcaggatatgttcggcagttttttgcgttatttactgcggcgccaaccgctgaatgcgttgcttgtcctgccgttgttgccgatcatagccattgcgttattgataaaaggccgtgcggcacgctggccgatgagtctgcttctgtggggatgcacttttggtcacaatgaagcgcgtttgcaggcgttgcaggccgatttcgtacgctggtttcgtgacaatgttaccgcctttccgctggttcaggagcgattaaccacctacctgttaagttccgatgctgatatctggttgattaccggctctccgcagccgctggttgaagcggtttatttcgatacgccctggctgccgcgggttaatcttatcgccagtcagattcagcgtggctatggtggttgggtattgacgatgcgttgcctcgggcatgagaaggtcgcgcaactggagcgtaaaatcggcacgccactgcggttgtacagtggctatagcgacagtaatcaggacaacccgctgctttatttctgtcagcatcgttggcgagtaaccccgcgcggtgaactccagcaactggaatag

SEQ ID NO: 35874 - DNA, 849 bp, Escherichia coli
atgaacggcttacttcgtatccgtcagcgttaccaggggcttgcccagagtgataaaaaactggcggattatctgctgctacaacctgatacggcgcgccatttaagctctcagcaactggccaacgaagccggagtcagtcagtccagcgtcgtgaagttcgcgcaaaaactcggctataaaggttttccggcgcttaagttggcgttgagtgaagcgctggcaagccagccggaatcgccctccgtgcccattcataaccaaatccgcggtgatgatccgttacggctggtcggcgaaaaactgattaaagaaaatactgccgctatgtacgcaacgctaaacgttaatagtgaagagaaactgcatgaatgcgtaacaatgttgcgctctgcgcggcggataattctgaccggtattggcgcttcgggtctggtggcgcaaaactttgcctggaagctgatgaagattggcttcaatgctgccgcagtgcgcgatatgcatgcgctactcgctaccgtacaggcgtcgtcccctgacgatctgttattagccatttcttacaccggtgtacgacgcgagttaaacctggcggcagatgagatgctgcgagtgggcggaaaagtgctggcgattaccggctttactccgaatgccctgcaacagcgtgcttctcattgcctgtataccattgccgaagaacaagcgacaaacagtgcttcaatctctgcttgtcacgcgcagggaatgttaacggatttgctgttcattgcgctgattcagcaggatctggaactggctccagaacgtattcgtcacagtgaagcgctggtgaaaaaactggtctga

SEQ ID NO: 35875 - DNA, 261 bp, Escherichia coli
atggcgctgttaatcactaaaaaatgcatcaattgtgatatgtgtgaacccgaatgcccgaatgaggcgatttcaatgggcgatcatatctatgagattaacagcgataagtgtaccgaatgcgtagggcactacgagacaccaacctgccagaaggtgtgcccgatccccaatactattgtgaaggatccgcaacatgtcgagacggaagaacagttgtgggataaatttgtgctgatgcatcacgcggataaaatttaa

SEQ ID NO: 35876 - DNA, 381 bp, Escherichia coli
atggcaatattaggtttaggtacggatattgtggagatcgctcgcattgaagcggtgatcacccgatccggtgagcgcctggcacgccgcgtattaagcgataacgaatgggaaatttggaaaacgcaccaccagccggtgcgttttctggcgaaacgctttgccgtaaaagaagccgcagcaaaagcgtttggcaccgggatccgcaatggtctggcgtttaatcagtttgaagtatttaacgatgagcttggtaagccacggctgcgactgtggggcgaggcattaaaactggcggaaaagctcggcgttgtaaatatgcatgtaacgctggcagatgaacgccactatgcttgcgccacggtaattattgaaagttaa

SEQ ID NO: 35877 - DNA, 732 bp, Escherichia coli
atggctgaattactgttaggcgtcaacattgaccatattgcaacgctgcgtaacgcacgcggtactgcttacccggatccggtgcaggcggcgtttattgctgagcaggcgggagcggacggcattaccgtgcatttacgtgaagatcgccgccacattactgaccgtgatgtgcgcatcctgcgtcagacgctggatacccgcatgaatctggagatggcggtgaccgaagagatgctggcgatcgccgttgagacgaagccacatttttgctgtctggtaccggaaaagcgtcaggaagtaacaaccgaaggcggcctggacgtcgcagggcagcgtgacaaaatgcgcgatgcctgtaaacgtctggcggaggccgggatccaggtttctctgtttatcgacgccgatgaagggcagatcaaagctgcggcagaggttggcgcaccgtttatcgagatccacaccggttgctatgctgatgccaaaactgacgccgaacaggcgcaagagctggcgcgtatcgccaaagccgcgacctttgccgctagtctcggtctgaaagttaacgctggtcacggtctgacctatcacaacgtgaaagctattgccgccatccctgagatgcatgaactgaatatcggtcatgccattattggtcgtgcagtgatgaccggactgaaagatgcggtggcagaaatgaagcgtttgatgctggaagcgcgtggctaa

SEQ ID NO: 35878 - DNA, 729 bp, Escherichia coli
atggaaggctggcagcgcgcatttgtcctgcatagtcgcccgtggagcgaaaccagcctgatgctggacgtcttcacggaggaatcgggtcgcgtgcgtctggttgccaaaggcgcacgctctaaacgctctactctgaaaggtgcattacagcctttcacccctctcttgctacgtttcggcgggcgtggcgaagtcaaaacgctgcgcagtgctgaagccgtctcgctggcgctgccattaagcggtatcacgctttacagcggtctgtacatcaacgaacttctctcccgcgtactggaatacgagacgcgcttctctgaactctttttcgattacttgcactgcattcagtctcttgcaggtgccactggtacgccagaacccgcgctgcgccgctttgaactggcactgctcgggcatctgggctatggcgtcaattttacccattgtgcgggtagcggcgagccggtagatgacaccatgacgtatcgttatcgcgaagaaaaagggtttatcgcaagcgtcgttatcgacaataaaacgttcaccggaaggcagttaaaagcgttaaacgcgcgggaatttcctgacgcagacacactgcgcgccgcgaaacgctttacccgcatggcgcttaagccgtatcttggcggtaaaccattaaagagcagggaactgttccggcagtttatgcctaagcgaacggtgaaaacacattatgaatga

SEQ ID NO: 35879 - DNA, 906 bp, Escherichia coli
atgagcatcgataaaagttactgcggatttattgctatcgtcggacgtccgaacgttggcaaatccacattgttgaacaaactgctggggcagaagatctccattacctcccgcaaggcgcaaacaactcgtcaccgcattgtggggatccatactgaaggcgcgtatcaggcgatctacgttgataccccaggcctgcatatggaagaaaaacgcgccattaaccgcctgatgaacaaagcggcgagcagctctatcggcgacgttgagctggtgatttttgtcgtagaaggcacccgctggacgccggacgatgaaatggtgctcaacaaactgcgcgatggcaaagcgccggtaatcctcgcggtgaacaaagtggataacgtgcaggaaaaagccgatctgctgccacacttacagttcctggcaagccagatgaacttcctcgatatcgtgccgatctctgccgaaaccgggttgaatgttgatactattgcggcaatcgtgcgtaagcatctgcctgaagcgactcatcacttcccggaagattacatcaccgatcgctcacagcgttttatggcgtctgaaatcatccgcgaaaaactgatgcgtttcctcggcgctgaactgccgtactccgtgaccgtggagatcgaacgtttcgtctctaacgaacgcggcggttatgacatcaacggtttgattctcgttgagcgtgaagggcagaagaagatggttattggcaacaaaggggccaagatcaaaaccatcgggattgaagcgcgtaaagacatgcaggaaatgttcgaagcgcctgttcaccttgagctgtgggtaaaagtgaaatccggttgggccgacgacgaacgcgcactgcgcagtctcggttacgttgacgatctttaa

SEQ ID NO: 35880 - DNA, 681 bp, Escherichia coli
atgaaccccatcgtaattaatcggcttcaacggaagctgggctacacttttaatcatcaggaactgttgcagcaggcattaacccatcgtagtgccagcagcaaacataacgagcgtttagaatttttaggcgactctattctgagctacgttatcgccaatgcgctttatcaccgtttccctcgtgtggatgaaggcgatatgagccggatgcgcgccacgctggtccgtggcaatacgctggcagaactggcgcgcgaatttgagttaggcgagtgcttacgtttagggccaggtgaacttaaaagcggtggatttcgtcgtgagtcaattctcgccgacaccgtcgaagcattaattggtggcgtattcctcgacagtgatattcaaaccgtcgagaaattaatccttaactggtatcaaacccgtctggacgaaattagcccaggtgacaaacaaaaagatccgaaaacgcgcttgcaagaatatttgcagggtcgccatctgccgctgccgacttatctggtcgtccaggtacgtggcgaagcacacgatcaggaatttactatccactgccaggtcagcggcctgagtgaaccggtggttggcacaggttcaagccgtcgtaaggctgagcaggctgccgccgaacaggcgttgaaaaaactggagctggaatga

SEQ ID NO: 35881 - DNA, 975 bp, Escherichia coli
atggcgaatatgtttgccctgattctggtgattgccacactggtgacgggcattttatggtgcgtggataaattctttttcgcacctaaacggcgggaacgtcaggcagcggcgcaggcggctgccggtgactcactggataaagcaacgttgaaaaaggttgcgccgaagcctggctggctggaaaccggtgcttctgtttttccggtactggctatcgtattgattgtgcgttcgtttatttatgaaccgttccagatcccgtcaggttcgatgatgccgactctgttaatcggtgattttattctggtagagaagtttgcttatggcattaaagatcctatctaccagaaaacgctgatcgaaaccggtcatccgaaacgcggcgatatcgtggtctttaaatatccggaagatccaaagcttgattacatcaagcgcgcggtgggtttaccgggcgataaagtcacttatgatccggtctcaaaagagctgacgattcaaccgggatgtagttccggccaggcatgtgaaaacgcgctgccggtcacctactcaaacgtggaaccgagcgatttcgttcagaccttctcacgccgtaatggtggggaagcgaccagcggattctttgaagtgccgaaaaacgaaaccaaagaaaatggaattcgtctttccgagcgtaaagagacactgggtgatgtgacgcaccgcattctgacagtgccgattgcgcaggaccaggtggggatgtattaccagcagccagggcaacaactggcaacctggattgttccgccgggacaatacttcatgatgggtgacaaccgcgacaacagcgcggacagccgttactggggctttgtgccggaagcgaatctggtcggtcgggcaacggctatctggatgagcttcgataagcaagaaggcgaatggccgacaggtgtgcgcttaagtcgcattggcggcatccattaa

SEQ ID NO: 35882 - DNA, 1800 bp, Escherichia coli
atgaagaatatacgtaacttttcgatcatagctcacattgaccacggtaaatcgacgctgtctgaccgtattatccagatctgcggtggcctgtctgaccgtgaaatggaggcgcaggttctcgattccatggatcttgagcgtgagcgtggcattaccatcaaagcgcaaagcgtgacgctggactacaaagcgtctgacggcgaaacctatcagcttaactttatcgacaccccgggccacgttgacttctcttatgaagtttctcgttcgctggctgcctgtgaaggtgcattgctggtggtcgacgccgggcagggcgtagaagcgcaaaccctggcaaactgctacaccgccatggaaatggatctcgaagtggtgccggtactgaacaagattgacctgccggcagccgatcctgaacgcgtggcggaagaaattgaagatattgtcggcatcgatgccaccgacgcggtgcgctgttcagcgaaaaccggcgttggcgtgcaggacgttctcgaacgtctggtgcgcgacattccgccgccggaaggcgatccggaaggcccgttacaggcactcattatcgactcctggttcgacaactacctgggcgttgtttcacttatccgtattaaaaacggcaccctgcgtaagggcgacaaagtgaaagtcatgagtaccgggcagacctataacgccgaccgtctgggcatcttcacgccgaagcaggttgaccgcactgaactgaaatgtggcgaagtaggctggctggtatgtgcgattaaagatatccacggcgctccagtaggcgataccttaacgctggcgcgtaatccggcagaaaaggcgctgcctggctttaagaaagtcaaaccgcaggtatacgccggtctgttcccggtaagttccgacgactatgaagccttccgtgacgcgctgggcaaactcagcctgaacgatgcttcactgttctatgagccggaaagctccagtgcgctgggctttggtttccgctgcggcttcctcggcctgctgcacatggagatcatccaggaacgtctggaacgtgaatacgatctggatctgatcaccactgcgccgaccgtagtgtatgaagttgaaaccacgtcaagagaagttatctacgtcgacagcccatccaagctgccagcggtaaataacatctacgaactgcgcgagccgattgcagaatgtcacatgctgctgccgcaggcatatctcggcaacgttattacgctgtgcgtagaaaaacgcggcgtgcagaccaatatggtttaccacggtaatcaggtggcgctgacgtacgagatcccgatggcggaagtggtgctcgacttcttcgatcgcctgaaatctacctcgcgtggttatgcgtctctggattacaacttcaaacgcttccaggcgtccgacatggtacgtgtagacgtattaatcaacggtgaacgtgttgatgcgctggcgttgatcacccaccgtgataattcgcaaaaccgcggtcgcgagttggtggagaagatgaaagatctgatcccacgccagcagtttgatatcgccattcaggcagcgattggtacgcacattattgcgcgatccaccgtgaaacagctgcgtaaaaacgtactggctaaatgttatggcggcgatatcagccgtaagaaaaagctgctgcagaagcagaaagaaggtaagaaacgcatgaagcagatcggtaacgtcgagctgccgcaggaagcgttcctcgccattctgcacgtcggcaaagacaacaaataa

SEQ ID NO: 35883 - DNA, 480 bp, Escherichia coli
atgatcaaagagtgggctaccgtcatctcctgggaaaacgggcaggcgctggttagttgtgatgttaaagcctcatgcagcagctgcgcttcacgcgccggttgcggtagccgcgtgttgaataaacttggcccgcaaaccacgcataccattgtcgtaccctgtgatgagccgttagtgccggggcaaaaagtagaattaggaatcgccgaaggcagcctgcttagctccgcattactggtttatatgtcgccgttgatgggactattcctcatcgcttcactatttcagctactctttgcttcagatattgcagcattatgcggtgcgattctcggtggcgttggtggattcctgattgcacgtggctgctctcgaaagtttgctgcccggtctgaatggcaaccgatcatcttaagcgtggccttgccgcctggccttgtgcgatttgaaacatcttcggaagacgcgagccagtga

SEQ ID NO: 35884 - DNA, 957 bp, Escherichia coli
atgaagcaactttggtttgccatgtcattagtgacaggtagcctgttattctctgctaacgcctcggccactcccgcgtccggggcgttattacagcagatgaacctggccagtcagtcactgaattacgagctgtcattcatcagcatcaataaacagggtgttgagtctctgcgttatcgacatgcacgcctcgataaccgtcctcttgcacaattgttgcaaatggatggcccgcgccgggaagtggtacagcgcggcaatgaaatcagctattttgaaccgggacttgaaccgttcacgcttaatggcgattacattgttgattctctaccatcgctcatctataccgatttcaaacgcctttctccttactacgactttatctccgtcgggcgcacgcgtattgctgatcgtctttgcgaagtcattcgtgtggttgcccgagatggtacacgctacagctacatcgtgtggatggacaccgaatcgaaattaccgatgcgggttgatctccttgatcgcgatggtgaaacgctggaacaatttcgcgtgattgcttttaatgtcaatcaggatatcagcagcagtatgcagacgttggcgaaggcaaatttgccgccgttgctttctgttcctgtaggtgaaaaagctaaattcagctggacgccaacctggttgccacagggttttagcgaagtttccagtagtcgacgtccgctaccgacgatggacaacatgcctatcgaatcacgtctctattccgacggattattcagcttttcggtaaacgttaaccgcgctacgccatcgagcaccgatcagatgttgcgcaccggacgcagaaccgtcagtacaagcgtacgtgataacgccgaaatcaccattgtcggtgaactgccgccgcaaacggcgaaacgcattgccgagaatattaagttcggggcagcgcaatga

SEQ ID NO: 35885 - DNA, 651 bp, Escherichia coli
atgcagaaagaacaactttccgctttaatggatggcgaaacgctggatagtgagctgcttaacgaactggctcataacccagaaatgcagaaaacctgggaaagctatcacttaatccgtgactcaatgcggggtgatactcccgaggtgctccatttcgatatctcttcacgcgtgatggccgccattgaagaagagccagtacgtcaaccggcgacattgatcccggaagcccagcctgcgccgcatcaatggcagaaaatgccattctggcagaaagtacgtccgtgggcggcacagcttacccaaatgggcgtagcagcatgcgtatcgcttgcagttatcgttggggtccagcactataatggacaatctgaaacgtcccagcagcccgaaacgccggtatttaatacactgccgatgatgggtaaagccagcccggttagcttgggagtaccttctgaagcgaccgcaaataatggtcaacagcagcaggtacaggagcagcgtcgtcgcattaatgcaatgttgcaggattacgaactgcaacgccgactccactctgaacagcttcagtttgagcaggcgcaaactcagcaagccgctgtacaggtgccaggaattcaaactttaggaacgcaatcgcagtaa

SEQ ID NO: 35886 - DNA, 576 bp, Escherichia coli
atgagcgagcagttaacggaccaggtcctggttgaacgggtccagaagggagatcagaaagcctttaacttactggtagtgcgctatcagcataaagtggcgagtctggtttcccgctatgtgccgtcgggtgatgttcccgatgtggtacaagaagcttttattaaagcctatcgtgcgctggattcgttccggggagatagcgctttttatacatggctgtatcggattgctgtaaatacagcgaaaaattacctggttgctcaggggcgtcgtccaccttccagtgatgtggatgccattgaagctgaaaacttcgaaagtggcggcgcgttgaaagaaatttcgaaccctgagaacttaatgttgtcagaagaactgagacagatagttttccgaactattgagtccctcccggaagatttacgcatggcaataaccttgcgggagctggatggcctgagctatgaagagatagccgctatcatggattgtccggtaggtacggtgcgttcacgtatcttccgagcgagggaagctattgataacaaagttcaaccgcttatcaggcgttga

SEQ ID NO: 35887 - DNA, 1623 bp, Escherichia coli
atgaatactctccctgatcattcatgtgacgtgttgattatcggtagcggcgcagccggactttcactggcgctgcgcctggctgatcagcatcaggtcatcgttctaagtaaaggcccggtaacggaaggttcaacattttatgcccagggcggtattgccgccgtgtttgatgaaactgacagcattgactcgcatgtggaagacacattgattgccgggggtggtatttgcgatcgccatgcagttgaatttgtcgccagcaatgcacgatcctgtgtgcaatggctaatcgaccagggggtgttgtttgatacccacattcagccaaatggcgcagaaagctaccatctgacccgtgaaggtggacatagtcaccgtcgtattcttcatgccgccgacgccaccggtagagaagtagaaaccacgctggtgagcaaggcgctgaaccatccgaatatttgcgtgctggagcgcagcaacgcggttgatctaattgtctctgacaaaattggcctgccgggcacgcgacgagttgtaggcgcgtgggtatggaaccgaaataaagaaacggttgaaacctgccacgcaaaagcggtggtgctggcaaccggcggtgcgtcgaaggtttatcagtacaccaccaatccggatatttcttctggcgatggcattgctatggcgtggcgcgcaggctgccgggttgccaatctcgaatttaatcagttccaccctaccgcgctgtatcacccacaggcacgcaatttcctgttaacagaagcactgcgcggcgaaggcgcttatctcaagcgcccggacggtacgcgttttatgcccgattttgatgagcgcggcgaactggccccgcgcgatattgtcgcccgcgccattgaccatgaaatgaaacgcctcggcgcggattgtatgtatctcgacatcagccataagcctgccgattttattcgccagcatttcccgatgatctatgaaaaattgctcgggctggggattgatctcacacaagaaccggtaccgattgtgcctgctgcacactatacctgcggtggtgtgatggtggatgatcatgggcgtacggacgtcgagggcttgtatgccattggcgaggtgagttataccggcttacacggcgctaaccgcatggcctcgaattcattgctggagtgtctggtctatggctggtcggcggcagaagatatcaccagacgtatgccttatgcccacggcgtcagtacgttaccaccgtgggatgaaagccgcgttgagaaccctgacgaacgggtagtaattcagcataactggcacgagctacgcctgtttatgtgggattacgtcggcattgtgcgcacaacgaagcgccttgaacgcgccctgcggcggataaccatgctccaacaagaaatagacgaatattacgcccatttccgcgtctcaaataatttgctggagctgcgtaatctggtacaggttgccgagttgattgttcgctgtgcaatgatgcgtaaagagagtcgggggttgcatttcacgctggattatccggaactgctcacccattccggtccgtcgatcctttcccccggcaatcattacataaacagataa

SEQ ID NO: 35888 - DNA, 738 bp, Escherichia coli
atgtcacagtctacatccgtgcttcgtcgtaatggatttacttttaaacagttttttgttgctcacgatcgttgtgcgatgaaagtgggaacggatggcattttgctgggcgcatgggcaccggtggctggggtaaaacgttgccttgatatcggcgcgggtagcgggttgctggcattaatgctggcgcagcgaaccgatgacagcgtaatgattgatgcagttgaactggaaagtgaagctgccgcgcaggcacaggaaaatatcaaccagtccccgtgggcaaagcggattaacgtccatacggcggatattcagcagtggatcacacagcagacagtacgcttcgatttaatcatcagtaacccaccttactatcagcagggagtagagtgctcgacacctcaacgggaacaggctcgctataccactacgcttgatcacccatcgttgctgacctgtgcggcggagtgcattaccgaagagggatttttctgcgtggtgctgccagagcagattggtaatggttttactgaactggcattaagtatgggctggcatttacgtttgcggacggatgtggcggaaaacgaagcgcgactgccgcatcgggtgctgctggcattctccccgcaggcgggagaatgctttagcgatcgcttagtcattcgtgggccagaccagaactattccgaagcgtatacggcgctgacccaggctttttatctgtttatgtaa

SEQ ID NO: 35889 - DNA, 1335 bp, Escherichia coli
atgactgtaacgactttttccgaacttgaactcgacgaaagcctgctggaagccctccaggataaaggtttcactcgcccgaccgccattcaggctgccgccattccgcctgcgctcgatggccgtgatgtactcggttctgcgccgacaggcaccggtaaaacggcggcgtatctgctgccagcgttgcagcacctgctcgatttcccacgtaagaaatccggtccgccgcgtattttgatcctcaccccaactcgcgagctggcgatgcaggtggccgatcatgcccgcgaactggcgaaacatacgcatctggatattgccaccatcaccggcggcgtagcctatatgaaccacgcggaagtgttcagcgaaaatcaggacatcgtggtcgccacgaccggacgtctgctgcaatacataaaagaagagaacttcgattgccgcgcggttgaaacgctgatcctcgacgaagcagaccgtatgctggatatgggcttcgctcaggatatcgaacatattgctggcgaaacgcgctggcgtaaacagaccctgctcttttcggcaactctggaaggcgatgcgattcaggactttgccgagcgtctgctggaagatccggtggaggtttctgccaatccgtccacacgtgagcgcaaaaaaattcatcagtggtattaccgcgccgatgacctggaacataaaaccgcattgctggtgcatctgttaaaacagccggaagcgacccgctcaattgtgtttgtgcgtaagcgtgagcgtgtgcatgagctggcaaactggctgcgcgaagcgggcatcaacaactgctatctcgaaggtgagatggtacagggcaagcgtaacgaagcgatcaagcgtttgaccgaaggtcgcgtaaacgtactggttgccaccgatgttgccgcgcgcggtatcgacattcctgacgtcagccacgtctttaacttcgatatgccgcgcagtggcgatacttatttgcaccgtatcggacgtaccgcgcgcgccggtcgtaaaggcaccgcaatttcgctggtagaagcccatgaccatctgctgctgggcaaagttggtcgctatattgaagagccaattaaagctcgtgtaattgatgagttacgcccgaaaacgcgtgcgccaagcgagaagcagaccggcaagccatcgaagaaagtactggcaaaacgcgccgagaagaaaaaagctaaagagaaagagaagccgcgggtgaaaaaacgccatcgcgacaccaaaaatattggtaagcgccgtaaaccgagcggaacgggcgtgccaccgcaaacgacagaagagtaa

SEQ ID NO: 35890 - DNA, 882 bp, Escherichia coli
atggatctgcgccgttttattacgcttaaaaccgtggtggaagaggggtcctttttgcgagcttcgcaaaaattgtgctgcacacaatcgacggtgacttttcatattcagcagcttgagcaggagttctcagtccagttatttgagaaaattggtcgacgaatgtgccttacccgcgaaggaaaaaagctgctgccgcacatctatgaactcaccagagtgatggatacccttcgtgaggctgccaaaaaagagtcggatccggacggggaactacgcgttgtttcaggcgaaacgttgctttcttaccgaatgccgcaggtgttgcagcgttttcggcaacgcgcaccaaaagtgcgtttatcgttgcagtctctgaactgttacgtgatccgtgatgcgctactgaatgatgaggctgatgtcggcgtcttttaccgcgtagggaatgatgatgctctgaaccgacgagagttgggtgaacaatcactggtgctggtggcttcaccgcaaattaaagatgtcgattttactgagccgggaagacataacgcctgtagttttattatcaatgaaccgcaatgtgtctttcgccagctatttgaaagtacgctgcgccagcgacggatcacggtggaaaacaccattgagcttataagtatcgaaagcatcaagcgttgtgtcgcggcaaatatcggggtcagttacctgccgcgctttacagtggcaaatgaacttgcgagtggcgaattaatcgaattgccttttggcgaacagtcgcagaccattacggcaatgtgcgctcaccatgccggaaaagcggttagcccggcgatgcacatttttattcagtgtgttgaagagtgttttttgccgggataa

SEQ ID NO: 35891 - DNA, 588 bp, Escherichia coli
gtgacaccgacccttttaagtgctttttggacttacaccctgattaccgccatgacgccaggaccgaacaatattctcgcccttagctcagctacaacgcacggatttcgtcagagtactcgcgtgctggcagggatgagtctgggatttttaatcgtcatgttgctatgcgtgggaatttcgttttcactggctgttatcgacccggcagcagtgcatctgttgagctgggcaggagcggcatatattgtctggctggcatggaaaatcgctaccagtccaacaaaggaagacggacttcaggcaaaaccaatcagcttttgggccagctttgctttgcagtttgtgaacgtcaaaatcattttgtatggcgttacggcactgtcgacgtttgtcctgccgcaaacgcaggcgctaagctgggtagttggcgtcagcgttttgctggcgatgattgggacgtttggcaatgtgtgctgggcgctggcggggcatctgtttcagcgattgtttcgccagtatggtcgcccgttaaatatcgtgctggcgctgttgctggtctattgtgcggtacgcattttctattga

SEQ ID NO: 35892 - DNA, 384 bp, Escherichia coli
atgattacaggtatccagattactaaagccgctaacgacgatctgctgaactctttctggctgctggacagcgaaaaaggcgaagcgcgttgcatcgttgcgaaagcaggttttgcagaagacgaagtggttgcagtaagcaaactgggtgatattgaataccgtgaagttccagtagaagtgaaaccagaagttcgcgttgaaggtggtcaacacctgaacgttaacgttctgcgtcgtgaaactctggaagatgcagttaagcatccggaaaaatatccgcagctgaccatccgtgtatccggttatgcagttcgctttaactctctgactccggaacagcagcgcgacgttatcgctcgtacctttactgaaagcctgtaa

SEQ ID NO: 35893 - DNA, 690 bp, Escherichia coli
atggcaaacgaattaacctggcatgacgtgctggctgaagagaagcaacaaccctattttcttaataccctacagaccgtcgccagcgagcggcagtccggcgtcactatctatccgccacaaaaggatgtctttaacgcgttccgctttacagagttgggtgacgttaaagtggtgattctcggccaggatccttatcacggaccgggacaggcgcatggtctggcattttccgttcgccccggcattgcgacaccgccgtcactgctgaatatgtataaagagctggaaaatactattcccggtttcacccgccctaatcatggttatcttgaaagctgggcgcgtcagggcgttctgctactcaatactgtgttgacggttcgcgcaggtcaggcgcattcccacgccagcctcggctgggagaccttcaccgataaagtcatcagcctgattaaccagcatcgcgaaggcgtggtgtttttgttgtggggctcacatgcgcaaaagaaaggggcgattattgataagcaacgccatcacgtactgaaagcgccgcatccatcaccgctttctgcgcatcgtgggttctttggctgcaaccattttgtgctggcaaatcagtggctggaacaacgtggcgagaaaccgattgactggatgccagtattaccggcagagagtgagtaa

SEQ ID NO: 35894 - DNA, 1038 bp, Escherichia coli
atgaacgatgaaatgaaaggtaaaagcggcaaggtcaaagtgatgtatgtccgcagtgatgatgattctgataaacgtacccacaacccgcgtaccgggaaagggggcgggcgtccaggaaaatctcgtgctgacggtggccgtcgccccgcccgcgatgacaaacagagtcacccccgtgaccgcaagtgggaagattcgccgtggcgcacggtttcccgcgcgccgggtgatgagacgccggaaaaggccgatcacggtggcatcagtggtaaaagttttattgatccggaagttttgcgtcgtcagcgtgcggaagaaacccgcgtctacggcgaaaatgcctgtcaggcactgttccagagccgtccggaagcgattgttcgcgcctggtttatccagagtgtaacgccgcgttttaaagaagccttgcgctggatggcagcaaaccgcaaagcgtaccatgtggtagatgaagcggaactgacaaaagcgtcaggcacggaacatcacggcggcgtttgcttcctgatcaaaaagcgtaacggtacaaccgtgcagcagtgggtaagccaggcaggcgcgcaggattgcgttctggcactggaaaacgaatctaacccgcataacctgggtggcatgatgcgcagctgtgcgcacttcggcgtgaaaggcgttgtggtgcaggatgaggcactgctggagtcgggggcggctatccgtaccgcagaaggcggcgcagagcacgttcagccgattactggcgacaacattgttaacgtgctggatgatttccgtcaggcaggttacaccgtagtgaccacttccagcgagcaggggaaaccgctgttcaaaaccagtctgccagcgaaaatggtactggtgctgggtcaggaatatgaagggttaccggatgccgcacgcgatccaaacgatctgcgcgtgaagattgacggtactggcaacgttgccgggctaaatatctctgtcgcaactggcgttttgcttggtgaatggtggcgtcagaataaagcctga

SEQ ID NO: 35895 - DNA, 420 bp, Escherichia coli
atgaataccgtttgtacccattgtcaggccatcaatcgcattcccgacgatcggatcgaagatgcggcaaaatgcggacgctgcggtcacgacttgtttgacggagaggtgattaatgcgaccggtgaaacgctcgacaaattgctgaaagatgatctacctgtggtgatcgacttctgggcaccgtggtgcggcccctgccgtaatttcgcaccaatttttgaagatgtcgcgcaagagcgtagcggtaaagtgcgctttgtgaaagtgaataccgaagctgaacgtgaattgagcagtcgctttggaattcgtagtataccgacgatcatgattttcaaaaacggtcaggttgtcgacatgcttaatggcgcagtaccgaaagcgccgtttgatagctggctgaacgaatctctttaa

SEQ ID NO: 35896 - DNA, 699 bp, Escherichia coli
atgaccgaaaacgctgttctccagttacgcgccgagcgtattgcgcgcgcaacacgtccttttcttgcccgcggtaatcgcgttcgtcgctgccaacgctgtcttttgccagagaaattatgtctctgttcgacaattaccccagcacaagcaaaaagtcgcttctgtttgctgatgttcgacaccgagccaatgaagcccagtaataccgggcgtctgattgctgatattttgcctgataccgttgcgtttcaatggtcgcgtaccgaaccctcgctagatttgctggatctggtacaaaacccggactatcagccaatggtggtctttcccgcctcgtatgctgatgagcaacgggaagtgatcttcacaccacctgccggtaagcctccgctatttatcatgctcgatggtacctggcctgaagctcgcaagatgtttcgtaaaagtccgtatctggataatcttcccgtcatttccgtcgatctttcccggctttctgcctatcgcctgcgtgaagcccaggctgaaggccaatattgtactgccgaggtagccatcgcactgttagatatggccggcgataccggggcggcggcagggttaggcgagcattttacccgctttaaaacacgctatctggcaggaaaaacgcaacatctgggtagcatcacagcagaacagttagaaagcgtttaa

SEQ ID NO: 35897 - DNA, 2661 bp, Escherichia coli
atgagtcagcgaggactggaagcactactgcgaccaaaatcgattgcggtaattggcgcatcgatgaaacccaatcgcgcaggttacctgatgatgcgtaacctgctggcgggaggctttaacggaccggtactcccggtgacgcctgcctggaaagcggtgttgggtgtgttggcctggccggatattgccagcttgccctttacacccgaccttgcggttttatgtaccaatgccagccgtaatcttgctcttctggaagagctcggcgagaaaggctgtaaaacctgcattattctttccgccccggcatcgcaacacgaagatctccgcgcctgcgccctgcgccataacatgcgcctgctaggaccaaacagtctgggtttactggctccctggcaaggtctaaatgccagcttttcacctgtgccgattaaacgcggcaaactggcgtttatttcgcaatcggctgccgtctccaacaccatcctcgactgggcgcaacagcgtgagatgggcttttcctactttattgcgctcggcgacagcctggatatcgacgttgatgaattgctcgactatctggcgcgcgacagtaaaaccagcgccatcctgctctatctcgaacagttaagcgacgcgcgacgctttgtttcggcggcccgtagtgcctctcgcaataaaccgattctggtgattaaaagcggacgtagcccggcggctcaacgtctgttgaacaccacggcaggaatggatccggcgtgggatgcggctattcagcgtgccggtttgttgcgggtacaggatactcacgagctgttttcggcagtggaaaccctcagccatatgcgcccactgcgtggcgaccggctgatgattatcagcaacggtgctgcgcctgccgcgctggcgctggatgccttatggtcacgcaatggcaagctggcaacgctaagcgaagaaacctgccagaaactgcgcgatgcactgccagaacatgtggcaatctctaacccgctcgatctacgcgatgacgccagcagcgagcattatgtcaaaacgctggacattctgctccacagccaggattttgatgcgctgatggttattcattcgcccagcgccgctgctcccgcaacagaaagcgcgcaagtattaattgaagcggtaaagcatcatccccgcagcaagtatgtttctctgctgacgaactggtgtggcgaacattcctcgcaagaggcacgacgattattcagcgaagccgggctgccgacctaccgtaccccggaaggaaccatcactgcttttatgcatatggtggagtaccggcgtaatcagaagcaactacgcgaaacgccggcgttgcccagcaatctgacctccaataccgcagaagcgcatcttctgttgcaacaggcgattgccgaaggagcaacgtcactcgatacccatgaagttcagcccatcctgcaagcatatggcatgaacacgctccccacctggattgccagcgatagcaccgaagcggtgcatattgccgaacagattggttatccggtggcgctgaaattgcgttcgccggatattccacataaatcggaagttcagggcgtaatgctctacctgcgtacagctaatgaagtccagcaagcggcaaacgctattttcgatcgcgtaaaaatggcctggccgcaggcgcggatccacggcctgttggtgcaaagtatggctaaccgtgctggcgctcaggagttgcgggttgtggttgagcacgatccggttttcgggccgttgatcatgctgggcgaaggcggtgtggagtggcgtcctgaagatcaagccgtcgtcgcactaccgccgctgaacatgaacctggcccgctatctggttattcaggggatcaaaagtaaaaagattcgtgcgcgcagtgcgctacgcccattagatgttgcaggcttgagccagcttctggtgcaggtttctaacttgattgtcgattgcccggaaattcagcgtctggatattcatcctttgctggcttctggcagtgaatttaccgcgctggatgtcacgctggatatcgcgccgtttgaaggcgataacgagagtcggctggcagtgcgcccttatccgcatcagctggaagaatgggtagaattgaaaaacggtgaacgctgcttgttccgcccgattttgccagaagatgagccacaacttcagcaattcatttcgcgagtcaccaaagaagatctttattaccgctactttagcgagatcaacgaatttacccatgaagatttagccaacatgacgcagatcgactacgatcgggaaatggcatttgtagcggtacgacgtattgatcaaacggaagagatccttggcgtcacgcgtgcgatctccgaccctgataacatcgatgccgaatttgccgtgctggttcgctcggatctcaaagggttaggcttaggtcgacgcttaatggaaaagttgattacctatacgcgagatcacggactgcaacgtctgaatggtattacgatgccaaacaatcgtggcatggtggcgctggcccgcaagctcgggtttaacgttgatatccagctcgaagaggggatcgttgggcttacgctaaatcttgcccagcgcgaggaatcatga

SEQ ID NO: 35898 - DNA, 1356 bp, Escherichia coli
atgttgtcaaaatttaagcgtaataaacatcaacaacaccttgcccaactacccaagatttctcaatcagttgatgatgtcgatttcttttacgctcccgccgacttccgggagacgctgctggaaaaaatagccagcgcgaagcagcgcatttgcattgtcgccctgtatctcgaacaggatgacggtggcaaaggcattctgaacgcgttgtatgaggctaaaaggcagcgtccggaactggatgtgcgggtgctggtcgactggcatcgtgcacaacgtggacgcattggcgctgcggcatctaacactaacgctgactggtactgccgcatggcgcaggaaaatccgggcgtagatgttccggtttatggcgttccaatcaatacccgtgaagcccttggtgttctgcactttaaaggctttatcatcgacgatagcgtactttatagcggtgccagcctgaacgatgtttacctgcatcagcacgataaatatcgctacgaccgttatcatcttatccgtaaccgtaagatgtcagacattatgtttgaatgggttacacagaatattatgaatggccgcggcgttaatcgtctggatgatgttaatcggccaaaaagcccggaaatcaagaacgatattcgtctgttccgccaggagctgcgtgatgccgcttatcatttccagggcgatgccgacaacgatcagctttccgtaacgccgttggtaggtctggggaaatcgagtctgttgaacaagaccattttccatcttatgccttgtgccgagcagaaactaaccatctgcacaccttacttcaacctgccagcaatccttgtgcgcaatattatccagttgctgcgcgaagggaaaaaggtcgaaattattgttggtgataaaaccgcgaatgacttctacattccggaagatgaacctttcaagataattggcgcattgccttatctctatgagatcaatctgcgtcgtttcctgagccgtttgcagtattacgtcaacactgaccagttagtggttcggttatggaaagatgacgacaacacctatcacctgaaagggatgtgggttgatgataagtggatgttgatcactggtaataacctgaacccgcgcgcctggcgtctggatctggaaaacgctattttgatccacgatccgcaactggagcttgcgccacagcgagagaaagaactggagctgatccgcgagcataccaccatcgttaagcactatcgcgacctgcaaagtattgccgattatccggtgaaggttcgtaaactcatccgtcgtttgcgccgtatccgcatcgaccgattaattagccgcatcctgtaa

SEQ ID NO: 35899 - DNA, 273 bp, Escherichia coli
atggctaacgatagctggagcgggcaggataaagctcaacactttatcgcctcggcgatgctttccgccgccggaaatgaatatgcacagcatcaggggatgagtcgcgatcgcagtgccactttcgggctgatgttctctgttgggctgggggcgtcaaaagaactttgggatagccgccccgaggggagcggctggagctggaaagattttacctgggatgtcgccggtgcaactactggctataccgtctggcaactgacccgtcactaa

SEQ ID NO: 35900 - DNA, 1299 bp, Escherichia coli
atggctgaaagtactgtaacggcagacagcaaactgacaagtagtgatactcgtcgccgcatttgggcaattgtgggggcctcttcaggtaatctggtcgagtggttcgatttctatgtctactcgttctgttcactctacttcgctcacatcttcttcccttccgggaacacgacgactcaactactgcaaacagcaggtgtttttgctgcgggatttctgatgcgcccaataggcggttggctatttggccgcatagccgataaacatggtcgcaaaaaatcgatgctgttatcggtgtgtatgatgtgtttcggctcactggttatcgcctgtttgccaggctacgaaacaatcggtacctgggctccggcattattgcttcttgctcgtttattccagggattatccgttggcggagaatatggcaccagcgccacctatatgagtgaagttgccgttgaagggcgcaaaggtttttacgcatcatttcagtatgtgacgttgatcggcgggcaactgctagctctactggttgtcgtggttttacaacacaccatggaagacgctgcactcagagagtggggatggcgtattcctttcgcgttaggagctgtgttagctgttgtggcgttgtggttacgtcgtcagttagatgaaacttcacaacaagaaacacgcgctttaaaagaagctggatctctgaaaggattatggcgcaatcgccgtgcattcatcatggttctcggttttaccgctgcgggctccctttgtttctataccttcaccacttatatgcagaagtatctggtaaatactgcgggaatgcatgccaacgtggcgagtggcattatgactgccgcattgtttgtattcatgcttattcaaccactcattggcgcgctgtcggataagattggtcgtcgtacctcaatgttatgtttcggttctctggcagccatttttaccgttcctattctctcagcattgcaaaacgtttcctcgccttatgccgcttttggtctggtgatgtgtgccctgctgatcgtgagtttttatacttcaatcagtggaatactgaaggctgagatgttcccggcacaggttcgtgcattaggtgttggtctgtcatatgcggtcgccaatgctatatttggtggttcggcggagtacgtagcgttgtcgctgaaatcaataggaatggaaacagccttcttctggtatgtgaccttgatggccgtggtggcgtttctggtttctttgatgctacatcgcaaagggaaggggatgcgtctttag

SEQ ID NO: 35901 - DNA, 600 bp, Escherichia coli
atgagtttttccgttgatgtgctggcgaatatcgccatcgaattgcagcgtgggattggtcatcaggatcgttttcagcgcctgatcaccacgctgcgtcaggtgctggagtgtgatgcctctgcgttgctacgttatgactcgcggcagtttattccgcttgccatcgacgggctggcgaaggatgtactcggtagacgctttgcgctggaagggcatccacggctggaagcgattgcccgcgccggggacgtggtgcgctttcccgcagacagcgaattgcccgatccctatgacggtttgattcccgggcaggagagtctgaaggttcacgcctgcgttggtctgccattgtttgccggacaaaacctgatcggcgcattgacgctcgacgggatgcagcccgatcagttcgatgttttcagtgacgaagagttacggctgattgccgcgctggcggcgggagcgttaagcaatgcgttgctgattgaacaactggaaagtcagaatatgctgccaggcgatgccgcgccgtttgaagcagtgaaacagacgcagatgatcggtctgtcgccaggtatgacgcaattgaaaaaatag

SEQ ID NO: 35902 - DNA, 189 bp, Escherichia coli
atgaatactaacgtttttcgactgctcctgctgggaagcctgttcagccttagcgcctgtgtgcagcaaagcgaagtgcgacagatgaaacacagcgtcagcacgctgaaccaggagatgacgcaactcattgacatcctccacgccctgaaggacgtggatccctgctacgttcaggctgtcgcctga

SEQ ID NO: 35903 - DNA, 201 bp, Escherichia coli
atgaccactgagggtgaaaagattggatttgcccctatatttccagacacctgttatcacttaacccatcactggcccactgccgcagatattcccgtggcgagcgataacccagcgcactatgcggatgccattcgttataatgctcgaacgcctctgcaaggttctttgctgccgttaacccgtctggtttgggcatga

SEQ ID NO: 35904 - DNA, 702 bp, Escherichia coli
atgaaaaacatcgccgcacagatggttaactttgaccgtgagcagatgcgtcggatcgccaacaacatgccggaacagtacgacgaaaagccgcaggtacagcaggtagcgcagatcatcaacggtgtgttcagccagttactggcaactttcccggcgagcctggctaaccgtgaccagaacgaagtgaacgaaatccgtcgccagtgggttctggcttttcgggaaaacgggatcaccacgatggaacaggttaacgcaggaatgcgcgtagcccgtcggcagaatcgaccatttctgccatcacccgggcagtttgttgcatggtgccgggaagaagcatccgttaccgccggactgccaaacgtcagcgagctggttgatatggtttacgagtattgccggaagcgaggcctgtatccggatgcggagtcttatccgtggaaatcaaacgcgcattactggttggttaccaacttgtaccagaacatgcgggccaatgcgctgactgacgcggaattacggcgcaaggctgccgatgaactgacctgtatgacagcgcgaattaaccgtggtgagacgatacctgaaccagtaaaacaacttcctgttatgggcggtagacctctaaatcgtgcacaggctctggcgaagatcgcagaaattaaagctaagtttggactgaaaggatcgatgaaatag

SEQ ID NO: 35905 - DNA, 594 bp, Escherichia coli
atggatttcatagggacttcgttttatcacaaatatagatgtgaattaaaatatgataatcatttttatatgtgtgattttagctcatctgatatgacatgcaaacgaaatggaattcgcaaagatttactggattttgatcccagagaatatttcaaaaaggatggaggtaaacttaatctggataaacacatttcaaaccttatctacgttaatcttttccctaatatgagtggcggtcgttatataaatgataaatacgttgctgatgatatagataaatatttaaaacttagtaattgcaatttacttaaaacttgtttgggcgagtcaatcaatggaattaaattggatgattgtgctattgatccttcaaccacttggttaagtggtaatcttgctgcgaatagccagattagaattcctgtttatatggacatgaaaggagctatagctgaaaatggcatttcagatttcatggaaaatttaatggaagttaattcatgggtagaagaattcaataattatggcaagattgtaaatataacagttccttttcgtaatgacttatcgcatccttgccataattattga

SEQ ID NO: 35906 - DNA, 516 bp, Escherichia coli
atgccagttagccattatctctgcattttcataaacgttggtttgggagaaggctctgcattgcctgttggtgtgcctgttccgtggccttcagccactccgccaacaggctggctgaaatgcaatggtgcggctttttctgctgaagaatacccggaactggcaaaggcttacccgacaaataaattgcctgatttacgcggtgaatttattcgcggctgggatgacgggcgcggggttgatgttgggcgtgcaatcttatcatcgcagggcgatgccatcagaaatataattggcaagtttggtaatactcaattgtacccaagtatctattgtgatggtgcatttggcgtcactgttgagaatgtgtcacaaactttaggattaactcttgcgccttcagggacaggtaatgggactgtaaactttagctttgatgcatctaaaatcgttcctgttgccactgaaaaccggccgcgcaacgtcgcatttaacttcattgtgagggctgcataa

SEQ ID NO: 35907 - DNA, 858 bp, Escherichia coli
atgagcaaaccagtaatgattgattctgataattctgggcgttatattgttctggcagcggcaaaatccgttgccgggattggcgtcctgaaattgattactgagcataaccgcgctcatgcggttttttcgtgtcatgagcattgctacgcccaaattatggtggggcgtacagggccgacttcggtcgggccgggttcggtagtctccggtaacgccaaccctgtacgtctcaccacctctgtgattggcgtcccatgtggtgagttttctaaaaaactgactaccggggctgtcactatgactactctcccaaccctctctcaacctgaaattgccatcgttgatggtcaggctgttacatcttctttggctgttgctgacttcttctctaaacgtcatgacgatgttctgaaaaagattcgcattttggattgttctccagagttttgtgcccgcaattttgcggagacatcaattttggtacgccagcccaacggcggtactcgcaaactaccttgctatcaaataacccgcgatggctttgcgtttcttgctatgggtttcacgggtaaacgtgctgcccagttcaaagaggcatacatcaatgcctttaaccagatggaacaggcgctgatcggaaaggttgatacttcatgtgtcgcgcacaatgcccacgttgtttacctctacatggctgaaattcaccgcgtttggttagaacaactttatccgatgctggtttcagttcagtctccgctggcttcatcgctctacgactacatcaacgatggtgtattcgttgccgggctggtggactcggaactgaacgaaaagcataaggaggtgcgtaagtga

SEQ ID NO: 35908 - DNA, 228 bp, Escherichia coli
atgctggttgccgcaggacagtttgctgttacatctgtgtgggaaaagaacgctgagatttgtgcctcgttgatggcgcaggcggcggaaaacgacgtatcgctgtttgtcctgccggaagcattgctggcgcgcgatgatcatgatgcagatctatcggttaaatcagcacagctgctggaaggcgaattcctcggactttacggcgagaaagtaaacgtaacatga

SEQ ID NO: 35909 - DNA, 621 bp, Escherichia coli
atgctctccggcgtgaaacaggaaaatctcgacctgcatacgcttaaccagccgttgattgcggatgtgcgtgcgcgtctgcaaccgcagcagaaatacattcgtggcctgttctgcggcggcacgctgtgcgacgaaaccatgttcgcggtgatggaaaaacatggcgatgtctacagcaacattcagcccgatccggaattccgcctgaaagatatcaaccgcagcatcaaacacaccttcctcgactttggcgatgacgacttcaccaacggcaagccgcacccgatgattgaccccaccaaccgcatcagtcgcttgatcgaagaggcgcgcgatccagaagtggcggtgatcgtgatggattttgtgctcggatttggatcgcatgaagatccggtcggctccaccatcgagacgatcaaagaagcgaaagcgatcgccgctgccgaaggacgcgagttgatcattctcgcctatgtgctgggtaccgatcttgatacgccatcgttagaacaacaaagccagatgctgcttgatgccggagtgattctggcgagcagcagcaccaataccggattgctggcgcgtgaatttatctgcaaaggggaggaagcctga

SEQ ID NO: 35910 - DNA, 852 bp, Escherichia coli
atgctggaaaaatctctggcaacacttttcgcgttgttaattttagcaacgctgataaaccgttttctgctatggcggttaccggagagaaaagggggtgaggttacattacgtattcgtacctggtggggcatcgtcatttgtttttcaatggtgatttcaggtccacgctggatgacgttgacgttttttgcgctgataagttttctggcattgaaagaatattgtacgcttatatctgtacattttccgcgttggttatattggggtattcctcttaactatttgcttatcggttttaattgctttgagctgtttctgttatttatacctttggctgggtttctgatattagccaccgggcaagttttagtgggtgacccctctggttttctgcataccgtgagcgccattttttggggctggataatgaccgttttcgccttgagtcatgccgcctggttattaatgttgccaaccacaaatatccagggcggggcgttactggtgttatttcttttggcattaaccgagtcaaacgatattgcacagtatttatggggaaaatcctgcggcagaagaaaagtggtccctaaagtcagcccgggaaaaacattggaaggtctgatgggcggcgtcatcaccatcatgattgcgtcactgattatcggaccgttactgacaccgctaaatacattacaggcattattagcgggtttgttaattggtattagtggtttttgcggcgatgtcgtgatgtcagccatcaaacgagatattggtgttaaagatagcggaaaactattgccaggacatggcggactccttgacaggattgactggctttgttga

SEQ ID NO: 35911 - DNA, 1494 bp, Escherichia coli
atgaaacgccccaattttctgttcgtcatgaccgatacccaggccaccaatatggtcggttgctatagcggtaaaccgctgaatacgcaaaatattgatagtctggcggcggaaggtattcgctttaattccgcctacacctgttcaccggtttgtacgcctgcacgggccggactatttaccggtatctacgctaaccagtccggcccgtggaccaacaacgtcgcgccaggcaaaaacatctccactatggggcgctactttaaggatgccggctatcacacctgttacatcggcaaatggcatctcgacggtcatgactatttcggcactggcgagtgtccgccggagtgggacgctgattactggttcgatggggcgaactatcttagcgaactgacggaaaaagagattagcctgtggcgcaatggcctaaacagcgtcgaagatttacaggcgaaccatatcgacgaaaccttcacctgggcgcatcgtatcagcaatcgggcggtggattttctgcaacagcctgcgcgcgcagacgagcctttcctgatggtggtttcgtatgatgagccgcatcacccgttcacctgtccggtggagtatttagagaaatacgctgatttttactacgagctgggcgagaaagcacaggatgacctggctaacaaaccggaacatcaccgcttatgggcgcaggcgatgccatcgccagtcggtgatgacgggctttatcaccatccgctctattttgcctgtaatgactttgttgatgaccaaatcggacgggtcatcaatgccttaacgccagagcaacgtgaaaatacgtgggttatttatacctccgatcacggcgaaatgatgggcgcacataagctgatcagtaaaggggcggcgatgtatgacgacatcacccgcattccgctgatcatccgttcgccgcaaggggagcggcgacaggtcgatacgccagtcagtcatatcgatttactgccgacaatgatggcgctggcagatattgaaaaaccagagattctgccgggggaaaatatccttgccgtgaaagagccacgcggcgtgatggtggaatttaaccgctacgagattgagcatgacagctttggcggttttattccggtgcgttgctgggtgacggatgactttaaactggtactcaacctcttcaccagtgatgaactttacgatcgccgtaatgacccaaatgaaatgcataacctgatcgatgatatccgttttgcagacgttcgcagcaaaatgcatgacgccttattggattacatggacaaaattcgcgatccgttccgcagttaccaatggagtctgcgtccgtggcgtaaagatgcacggccgcgctggatgggggcgtttcgtccacgtccacaagatggctattcgccagttgtacgcgactatgacaccggcctaccgacacaaggggtgaaggtggaggagaaaaaacagaagttctga

SEQ ID NO: 35912 - DNA, 801 bp, Escherichia coli
atgaggtataaaaataaagttgatgttgtaaagtttctaaaagtttttgagtcaaagaagactcctgaaaatggcaaaattagtttaatgtatgagagtgccattcattacgatatgtattccgtttacattaaggatgacgagggtaatgactatctttttgatagttattcaaacggaattataaaggttaagaagtggaatcatcagaataaaactttcaatattgatacaattcttaaaccagaacgacttacatcaaattccttttctggaatttattattatcatgcgcatgaattgaagtttgactcattggacgacttatctttttttaatgtgcttagatttagaagaatagcgaatcgtcaaaataaaaagctaagtcgtgagaagtatttgtatcgacaacgcaagcaggagataaccgatgtaatgacggtattggctgcaattgtcagaatttatcgagagcagcaaggggaaaaaccattcagtgagactctaattatgaatgatgtggcaggacgtttatggatctaccatgatgattattctcgactcataaaagaacttcgcttatgtctggattcccttgtagagagtggggacatttcaaagactcgagatggttataagcccactggaaaagcaattaatacgttaaatcacttcaataatgaagaacaacgatataatgagaatattcgtagccaaaaaagcatgttttgggcaacgttatttgctgctattggtgcattgggtagcatgacagcagcttttataggactgatgaaatag

SEQ ID NO: 35913 - DNA, 951 bp, Escherichia coli
atgaaaaaaaggattaaactgaaggtttcaactaaaaataaatcttatcctattacggattcgccactttataaacttaaaagtaaaaaaaagttggctagcttgctctgcgttagtatcaatgatctatcagctttgaagagggatgagggtaattactctatttttgaacagctttctaaaaaaaataaaatacggaaaatacaaaagcctttagaaaaattagatgtagtgcatacacgtattgcgagtttattattgcgtatagctatgccagagtatttgcactctggtaaaaaaagttgctctaacataacaaatgctaaagcacatctcaatcatcagaagttgatgactacagatattaaatctttttttccgtcaacaacaagagaaatgatattttctttctttttctcaataatgaaaatgtcgccagatgtggctgatattttatctcatatatgtacctgtcatgaacgattgccaacgggtagtcggattagtatgccattagcatattttgcaaattccagaatgtttgatgaaatgaatcaactttgtgagaagtttcgtgtgaaaatgacagtttatgtcgatgatcttactttttctggagataatgtaaatcgattgttttgcagcgtgattcgtaagattattaataagcatggacacgtgatgcatccaactaaaacgaaattatatgctggggataagcctaaactggtgacaggagttatagtatttggggatagcttaaaggttaggaacgaacagcattatcttatggctagagaaatagagctttggaaaataataaaagatgtagaacaagctaaagatacaagaacagcaaagaaattatttggtcgtttatattcaatgggggttattgaaaaacgttacagatcgaaagtattgacgttgaaagcaaatacatcggtttaa

SEQ ID NO: 35914 - DNA, 303 bp, Escherichia coli
atgttgcataaagcccttcgtttaataaggcaataccataaagaatcaatagttgacttatcatcatctttaggtattccaaaaagcagaatagtagagattgaaagcggactatgggtgccgtcgattgatattttacagcgttatgcttcccatttcgacatgccagtatcctctttagtctttttttcagaatcattagggacacaaggacggttatccaaaagtttacgtttaaaactggcagggaaagttctggatatactagagtgggtaagtaaaagaaatgaaaaaaaggattaa

SEQ ID NO: 35915 - DNA, 156 bp, Escherichia coli
atgaaaaatgataaagtaaccaacgaacagcaggcgcaaaacaagttaaaccggaaaaagaagactcctaacgcttggggtgtaattaagtggcttattagactactttattggatcactcgcgcagttgacttctttgaagggggagatgagtaa

SEQ ID NO: 35916 - DNA, 156 bp, Escherichia coli
atggcgctttatgcagaccgctggctggaagaagcaaaaaagaatgtcagaaaaagcggcattattattactgctatatcaggtctgctggtatttctcttcatcatcaatatggtcagtgccatttacggcatcagtgacatgctgaagcagtaa

SEQ ID NO: 35917 - DNA, 159 bp, Escherichia coli; identical to SEQ ID NO: 11309

SEQ ID NO: 35918 - DNA, 216 bp, Escherichia coli
atgaccgttcacaggattttttacggtgatgttcggcgcgggagcgttccggtcgctccagtcaatcgcagccccctcgcggtcaatgtcaaaaaccagccagaactgcgcatgtggctggttctgctggatgtagcgcgcaagaagagcgcgccctttgccggagatgcgaaggccgaaagcgagatcatccgtgtgatagggacgatgaggtaa

SEQ ID NO: 35919 - DNA, 261 bp, Escherichia coli
atggaactgaagcatagcattagtgattatacagaagctgaatttttacagcttgtaacaacaatttgtaatgcggacacttccagtgaagaagaactggttaaattggttacacactttgaggaaatgactgagcaccctagtggtagtgatttaatatattacccaaaagaaggtgatgatgactcaccttcaggtattgtaaacacagtaaaacaatggcgagccgctaacggtaagtcaggatttaaacagggctaa

SEQ ID NO: 35920 - DNA, 936 bp, Escherichia coli
atgagcgccgcgcttcaatacttcgaagaaaatttacctcatcgtccctatcacacggatgatctcgctttcggccttcgcatctccggcaaagggcgcgctcttcttgcgcgctacatccagcagaaccagccacatgcgcagttctggctggtttttgacattgaccgcgagggggctgcgattgactggagcgaccggaacgctcccgcgccgaacatcaccgtaaaaaatcctgtgaacggtcatgctcacctgctctacgcgctcaatatcgccgtgagaaccgcgccggacagctcggttaaggcgctgaaatacgccgctgcgattgaacgttcgctgtgtgagaaactttgtgctgatgtgaactacagcggactgatttgcaaaaacccgttccacctggaatggcaggtgatggagtggcgagaggaagcctataccctcgatgaactggctgattatctcgatttgagtgcctcagcgcgccgtagcatcgataaacattacgggatggggcgaaactgccacctgttcgaaatgacgcgcaaatgggcttacagggcgattcgtcagggctggccagcattctcacaatggcttgatgccgtgatccagcgtgtcgaaatgtacaacgcatcacttcccgttccgctttctccggctgaatgtcgggctattggcaagagcatagcgaaatacacgcacaggaactttacgccggaaactttcgcacagtatgtggcgacaacgcacacgccggaaattcaagctgcccgaggccgtaaaggtggtatagccaaaggggctggctatgaggataagcgcagcaccgcgctggaaatgttggtgaatgggtgtactcaaaaggctatagctgaaatgttaggtgtttccgatcgcactattcgaaactggaaaagcggaaaatag

SEQ ID NO: 35921 - DNA, 234 bp, Escherichia coli
atgacagagctggaaagccatttgctgaacgccttagagcaatttcagcaggactatacgcagcggctgaaagactgggagagcgccttcacggatttgcagcatatgttcgagctgacacgacaggagaacgggcaactgagggaacagtgcgacgacttgagtcagcaggtgcagagattagccgggcaggtggaccgtttgagtcggttatttatcacgaacagcagataa

SEQ ID NO: 35922 - DNA, 354 bp, Escherichia coli
atgacgtcagcaaaagtaaaacgccgcaaagattcacgggcacttcttgagggattctggcctcaggctttcagattcagcaaaccacagccgctgaaggtcgggatcatggcggatataatggcagacattgaaaagcggggactgcctttcaccacagagatggtgaagtcagcgatggcgttatacacgaaccagattgattactataaggcgctggcgaaggggatgcagagaatcgatctggacggaaatccggcaggagagccgacggaggaagagcggaccagggcaaggaagctgatgaggaaggcatttgtgaaaacagcccggggcgcggctgaggcaaagtga

SEQ ID NO: 35923 - DNA, 213 bp, Escherichia coli
atggatattgaaatgaataacactgaagagctgttcagcaaactggggatgcggttaggggctgagatggcaatccctttgaagaatggtgataattttgcgccaactggatgcatcgttacgaagcttgataaagagaatggccttctgatctgccgaccagttcagaaggaaatcaacggcacgtggtgcaccgtcgatttaagtaagtaa

SEQ ID NO: 35924 - DNA, 288 bp, Escherichia coli
atgactggctcgggaacacgggaagaaacacaacatacagtgtcatgtcagcggagcgggacaccacatcctgtgaaagcggaccagcgggcggcagcgaaggatccgcggatccgtaaccaccagaaaccggatctgcgtgatgagaaaagagtagtagatatgattttatataaaaaacataaaatcataccaggcgtgatgtttgtcataatatataaattcatacctgatatgatatttaccaaagtagagataaattattcgctgtatgattttacctattaa

SEQ ID NO: 35925 - DNA, 525 bp, Escherichia coli
gtgaaaacacagcccctgcagcagcgcatcaatagcccgacgacgcagtaccggtggcatgcgccgacgcagaccacgggaacgggcatgcgccacatgaatggcgaaatcaaaacgggaggtgaagcccaccgccttttccatcagtttttcgcagaatttcagcgttccggcaccttcacggggtgtaaataccggattcgggttctttacctggcggtaatacgtttgttgaagatcagtcacaccttcctgcacttacaatgcgcagaaggagtgagcacagaaagaagtcttgaacttttccgggcatataactatactccccgcatagcgcaacagcttctatacggtttcttgttagccccggtaatctttctgtactcgccaaagttagagaagattatcggggttttcacttttctggctcctgtaaatccacatcagaaccagttccctgccaccttacggcgtggtcagccacaaaattccttaaacgatcagcaatctaccactcactcctga

SEQ ID NO: 35926 - DNA, 2055 bp, Escherichia coli
atggaatatctttcgccaggactgaaagctgcgccagagcagatggccagagggattgctaatataccgtttgatgtaatggacgcaggcgtgggggtagtcaatgcggcgcaatcagccggagcatgggcagctcagaagcttggtgtgggtgatggcacatacacgcccatatcacctgtctttcgcccagtagaccaacctacagatccatacgcgcaggctggtgagcagctagcaccttaccttattacaggattaggtgcaggaaaggcagctaccgcagcttcttcagttgccaacgctccacgtgctgaacgtgcggccacaaaggtggctagtatgttggcagaaaacctgccaggtacattggtgaacgcccaaaagaacgggcagatcagcccagaagacctagcaaaagagacaggtattggcctagcaggatcgctaggagcacgcgctttaataaagagcggacagacagccagtgacgtaatgcgagatgtattgcggagtaatacaaatcaatcaggccatgtgttaggggcagcaaatactctggaaaccgccaatgatgtatcgaaagcagcgcgttctgccgtaggccgagagcatatcgcatcgcaggcatcaaacgtcagagatgatgtcgctaaggcggcgaaaatcactggtattaatatcaacaccctgacgcctggaatgcgctcaggtagtcgtggaattgcccaagcagaaggtgttctggcatcaactcctgggaatgttcaggatgctcaccttacggccttcaatgaaatatcctcaaagttgaataagcagttgtctgatttcggtgctgagtctggaagcgcatcagaaaaaagcgcagcaattaaagagcgcatcatcgcgagcctcagtgatatgaaaacagcagagaatatggcatgggcagaactgcgaagcacgatgccacgcgaaaggatgaaaatgagtaatgggatggctgtcgtccaagcagaaaaagcagccaatgttccactcagcccggagatgaaacagtttcaggctgccaacaaccaaggtggcggcataaccttcgacgggatgaaggcatggcgtgctaagtttgctgatgctgaacaagcaaacacccgggcaggtaaggccaatgccgcccggattgccggagaaatgcgcagagctatcactgatgacatgcgcatcatggctgaaaaaggaaacttcctcacagaatggcagaaagctaacgatctctctaaaagttacattatcgccaaacaaaatgccgaatctgtttttggtcgagatctcgcatcagacgctatggtaagaaaaggtgccgatacgcttaaggcatccgcaaacactggaactggagcttttcaccgtcttatctccgcgctgccggaagcagaacgccaaccagcaatagcatctattcttcagcatgctgtggcgcagggagagaagggaggaatcggtgaagagtctggtatccagtattttgccaagctcatgacccagcagaatgtaaacgccatcagtcgtcatgcgccagatctcggtagaatgatgaaagagttcggtgtactcgctaaagccagcaccagaccgcagcgatacgtagagcgcacgggaagaacaactgaggctctcaaaacgctcgattcaggccttccaaagatcgtcggcgtgattatgaacggagttcaacagtcaggtgcgatcgctggaggctttggcggtggtgtaattggttcgattagtggtttggttgctggtggcgcgctgagaaatactgtggctaagattggggcgacaagaagtggtaggtatgcgatagagaaagccgttcaggaagctacaaaagcagtgcgcgcaggggcatcaccagcagcgatcgccgcagcagagaaacgattttcggccaataaaattgccatgaaagcaattcgtgatgccgttggggctgaagaattcgtgaaactgacaagggccgggattgtagctaccctcagtggcatgaaagatgttagcgaatgggaatag

SEQ ID NO: 35927 - DNA, 492 bp, Escherichia coli; identical to SEQ ID NO: 21665

SEQ ID NO: 35928 - DNA, 423 bp, Escherichia coli
atgtactgtactgttaaagaaatcatccgcgatgtactggatacagacgtgccggacagtgaatgcgtttttgccgtggtgctgacccgtggggatgtgcgtcacatagcccaggactggaacctgtcagacgatgagctggaaaccgtcatgcagcggctggacgatgcctttgagcatggtgcggatgtcagcgttgttcacgacgttgttcgtgaactgatggaagaaaagcgcgccagccgtcatgtgacagtcccggcggtgatgctggaaaaagtgatggcgctggcaggtagtgaaatgaagcgcctgtatgccgtcgggagtgagaacgggggcgacggtgacgcattcgtcagggaggaactcgaagcaatggacgttgtgttgcaggcgctggacggggagacgatgtcatga

SEQ ID NO: 35929 - DNA, 915 bp, Escherichia coli
atggataagggatggctggaaggtattaagtactcgtgttcattttccaatattcgcttaggttttttgcgtcgcgcgaaacatattcatgctttaagcaaatggcttcatgattatcagccagatgttgttatttgtattgacgtgatctcgtgtttgtatgcggccaaagctcgtaaaaaatcggggattgatgtacctgtattttcatggccgcatttttctttagatcataaaaaacatgccgaatatatcacctgtgccgactatcatttagccatcagctctggtattaaacagcaaatgattagccggggtgtaccagaatcgacaataaacgttatttttaatcccgttgaggcgaaaaattcagtcattcctgcacccggggaaggcgaaacggcaacattcatttatgttgggcgcatgaaatttgaaggccaaaagcgcgtaaaagatctgcttgatggcttatcacaagtgcaaggtgactggaaacttcatgtattgggagatggctccgatttcgaaaaatgccaggcttatggtagagaattaaatattgatgatcgaattgtctggtatggttggcaacaacatccctggaaattagttcagcaagatattaaaaaagtgagtgcattattactcacgtcatcttttgaaggtttcccaatgactctacttgaagccttgtcgtgggggatcccttgtatcagtgcagattgtgtctccgggcctgttgatatcattcagcctgatgttaatggtcatttatatcaaccgggggatatgaccggttttgttgctcttctcaataaatacatagccggtgaaattcacatcgcacatgaaccgaaatattacgacagattgcaaaagataattatttctgttatttcccggaggaaataa

SEQ ID NO: 35930 - DNA, 720 bp, Escherichia coli
atggaagattactggctgcgcccaattcgattttatgaatctgaacgacgtaattttctcggaacattattcagtgaaggtggtttacctttccggctactcaaagaatcagacagtcgctttctggctgttttctccaggatccttggacaatatgagcaagcaaagcagtcaggtttttctgccctttcgctggcaagagctgtcatagaaaaatcagcgctgccaactgtttttagcgaagatacctctgtagaacttatcagtcatatggctgataacctcaattccttagtacttactcacaacctaacaaatcacaaagaaccagtacaacagcttgataaggttcaccctacctggcgaagcgagtttccaataccgttagatgatgaaacaggaacgcattttttgaatggactgctatgcgcagcctctgtagaggctaagcctcgactacaaaaaaataagagtacgcgttgccaattctattggtcagaaaagcatccagatgagcttagggtgatagtatctcttcctgacgaagtttcctttcctgtaactagcgagccgtcaactacgcgctttgaacttgccatttatgaagatggtgaggaagtctctggccttgggccagcctatgcttccctggaaaacagacaggcaacagttcgattacgtaaaagcgaagtgaaccgccccgggaatcctggagactaa

SEQ ID NO: 35931 - DNA, 435 bp, Escherichia coli
atgtacggaacatgcgaaacgctctgccgggcgctggcagcaaagtatccgggagatacgccgctgatgctggttatctggtccccggaagaaattcaggccctcgctgacggaatggatatttccctgtccgatcatgaaatcaggactgtcctggcgcgcctggaggacatcccggaagaccagcggactgaatccggtatttcttccggtgcggcgatggagatcatcaataacgtgagagaaaaccgccaggtgaccgtccctgctgaactgctggcgtccctgattcagaccgccgaacaggcactgtggaaacgtgagtgggccgcccgtgataacggcctcgccgtcccggaatgcgtcacccgccgacaggcggtggttaatcaggcccgcgccctgctgaaaaacaacacacgcgaaaacgactga

SEQ ID NO: 35932 - DNA, 924 bp, Escherichia coli
gtggcaaagcaaaagttcaaaatcaccaactggcccacctacaataaagccctcatcaaccgtggctccataactttctggctggatgatgaagctattcaggcctggtatgagtcagcaacaccttcttcacgaggcagacctcagcgctattctgaccttgccatcactactgtgctggtcattaaacgcgtattcaggctgaccctgcgggctgcgcagggctttattgattccattttttctctgatgaacgttccgctacgctgcccggattacagctgtgtcagcaggcgggcaaagtcggttaatgtcagtttcaaaacgcccacccggggtgaaatcgcacacctggtaattgattccaccgggctgaaggtcttcggtgaaggcgagtggaaagtcaaaaagcatggccaggaacgccgccgtatctggcgtaagctgcatctcgccgttgacagtaaaacacatgaaatcatctgcgctgacctgtcgctgaacaacgttacggactcagaggccttccccgggttaatccggcaaacccaccggaaaatcaggtcagccgccgccgatggcgcttacgatacccggctatgtcacgatgaactgcggcgtaagaaaatcagcgcgcttatccctccccgaaaaggtgcgggttactggcccggtgaatatgcagaccgtaaccgtgcagtggctaatcagcgaatgaccgggagtaatgcgcggtggaaatggacaacagattacaatcgtcgctcgatagcggaaacggcgatgtaccgggtaaaacagctgttcgggggttcactgacgctgcgtgactacgatggtcaggttgcggaggctatggccctggtacgagcgctgaacaaaatgacgaaagcagatatgcctgaaagcgtgcgtattgcctga

SEQ ID NO: 35933 - DNA, 633 bp, Escherichia coli
atggcacgcatctgcctttacggggatttgcaacgatttggccgccgcatcgaccttcgtgtgaaaacgggggccgaagccatccgggcgctggccacacagctcccggcgtttcgtcagaaactgagcgacggctggtatcaggtgcgtattgccgggcaggatgtcagcacgtccggattaacggcgcagttacatgaggctctgcctgacggcgctgtgattcatattgttcccagagtcgccggggccaagtcaggtggtgtattccagattgtcctgggagcagccgccattgccggatcattctttactgccggagccacccttgcagcatggggggcagccattggggccggtggtatgaccggcatcctgttttctctcggtgccagtatggtgctcggtggtgtggcgcagatgctggcaccgaaagccagaactccccgtacacagacaacggataacggtaagcagaacacctatttctcctcactggataacatggttgcccagggcaatgttatgcctgttttgtatggtgaaatgcgcgtggggtcacgtgtggtatctcaggagatcagcacggcagatgaaggggacggtggtcaggttgtggtgattggtcgatga

SEQ ID NO: 35934 - DNA, 603 bp, Escherichia coli
atggcacgcatctgcctttacggggatttacaacgatttggccgccgcatcgaccttcgagtgaaaacggggtccgaagccatccgggcgctggccatgcagatcccggcatttcgtcagaaactgagcgacggctggtaccaggtacgcattgccgggcgtgatgcaggtgaaaccgaattgtctgcccgtcttaatgagccgctggaaaatggtgccgtgatccatatcgtgccgcgtctggcaggagccaaaagtggcggtgtgtttcaggctgtgctgggggcggctgttatggcggttgctatatggatgccgggggtaggaattatggcgagtaatctgctgttttctctcggtgccagtatgacgcttggcggtgttgcacagatgctggcccctaaacccaaaaccccccgcacacagacaacggataacggcaaacagaacacctatttttcttcactggataacatggttgcccagggcaatgttctgccggttctgtacggtgaaatgcgcgtggggtcacgcgtggtttctcaggagatcagcacggcagacgaaggggatggtggtcaggttgtggtgattggtcgctga

SEQ ID NO: 35935 - DNA, 603 bp, Escherichia coli
  misc_feature (175)..(175): n is a, c, g, or t
atggcacgcatctgcctttacggggatttacaacgatttgtccgccgcatcgatctgcgtgtgaaaacgggggccgaagccatccgggcgctggccatgcagatcccggcgtttcgtcagaagctgagcgacggctggtatcaggtacgcattgccgggcgtgatgcaggtgaancggaattatcagcccgtctgaatgaaccgctggcaaatggtgctgtgatccatatcgtgccgcgtctggcaggagccaaaagtggcggtgtgtttcaggctgtgctgggggcggctgttatggcggttgctatatggatgccgggggtaggaattatggcgagtaatctgctgttttctctcggtgccagtatgacgcttggcggtgttgcacagatgctggcccctaaacccaaaaccccccgcacacagacaacggataacggcaaacagaacacctatttttcttcactggataatatggttgcccagggcaatgttctgcccgttctgtacggtgaaatgcgcgtgggatcacgtgtggtatctcaggagatcagcacagcagatgaaggtgatggtggtcaggttgtggtgattggtcgctga

SEQ ID NO: 35936 - DNA, 315 bp, Escherichia coli
atgagaagagtcttctggctggtcgccgccgctctgttactggcagggtgtgccggcgaaaaaggcattgtcgagaaagagggatatcagcttgatacccgacgccaggcgcaggcggcgtatccgcgcattaaagtgctggttatccactacaccgcagatgattttgatagctcgctggcgacactgaccgataagcaggtcagttcgcattatctggtgcctgctgtgccaccgcgatacaacggtaaaccgcgcatctggcaactggtgccggaacaggagctggcctggcatgcgggaattagcgcctga

SEQ ID NO: 35937 - DNA, 1401 bp, Escherichia coli
atgctcaaaggattgcgtacattattttcacgcagggttttgtttaacgtcgaaatgaataattctgttgactgtgaattatttcttatccagcaacaactccaggcattgatagccgaaccaggcaattatttagcacatgattgtgatctcaacgatactctggttctttgccagcttacccatcaccacaatggacatatacgagaaaaggccgtgcaatgtctgggacgcaaagaggatatgtcagctgtagaagaattgttacctgcagctaatgactgggtaaaagaggttcaccttgcagcaaccatagcgttacgtcatttgatgaaggataagaatgcagcggcatttgccgttaatcttcccatgatacgtaaccttctccaatgccagcgttacgatcaccgtgcatttgtagacgagatacttagatatttattgacagaaaataaccgcccacaattaacgtgttggcttacttgccctgataaaaagctctcccgcgcggtattacaaacgctgattgaatacggttactttaatgatgaatcttcgctgctttcaatactcgataagcccgatgaggggttgcgaatgctggcggccacccattggctgcgccaacaattacctttaagcgaagcggtattaacacggctattaaaagaccgctggccgcgtattcgacaagcaacgttgtttagccttactgaccgagctatagaaattcctccggcgttgtacagcgcattactgctggataacaatatgttgatccgtctacgcgctaaaaacatgcttaatgacgtcatggatgttgcgcaattctggcgtcatattgtcacctcgactgaatatactccctcacagcgccgggcagctttatacgggctggactccattcatgatgccaatattttaaaactggcagaatggggattatcacaggatgtgttcccactgcaattagccgctatgcacattcttgcgaaagcgaatcctgatggtggcgtcaaagagactattctgaccacactggctaatcaggacgcctccggactgcgttttatgattaatatctgtgtatggtgtcgcgttccgctcacgttcgaggaaatacgtcagttgcaggtaaacgcgccgtcagttaaacatgcttgcgcatattgtcggctgtatcataacttgaacaaatgggcctgtttaattcttcttctgcaatcgcaacacaagctaactgaagaatttgcaggtaaacagctcgcgatatggcaacgcaatttcaatctttcgggcattcaaccgaatgctccccagcgtcagcaacttcaggcgctttttacccgcaatccggaacttcacaacagattatggggttacataccttttaaatag

SEQ ID NO: 35938 - DNA, 582 bp, Escherichia coli
atgagcaacatcctgattatcaacggcgcgaaaaaattcgcccactccaatggtcaactgaacgacaccctgaccgaagtcgcggatggcacactgcgcgacctcgggcatgatgtccgcatcgttcgcgccgacagcgactacgatgtcaaagcggaagtacaaaactttctctgggctgatgtggtgatttggcagatgccaggctggtggatgggcgcgccgtggacagtgaaaaaatacattgatgatgtattcaccgaaggtcacggcacgctgtacgccagcgatggtcgtacccgcaaagatccgtcgaaaaaatacggttccggcggcctggtacagggaaaaaaatatatgctttctctgacctggaacgcaccaatggaagccttcaccgaaaaagatcagttcttccacggcgttggcgttgacggtgtgtatctgccgttccataaagcaaaccaattccttggcatggaaccgctgccgacatttatcgctaatgacgtgataaaaatgcctgatgttccccgctatactgaagaatatcgcaagcatcttgtggaaatttttggttaa

SEQ ID NO: 35939 - DNA, 1233 bp, Escherichia coli
atggatggcatgggatggatgattattttggtacttccctttctttggatggggtatggactggcgttgttaatcataacggggtgcgcttttgaatctaagaggattcgtcgcgttctgctatggggtgttgcgccccagtttattattctttgtattacgaccttattgctttattggattaactctcggttaatttatgtttttgtcttttttcagccagttttatgcatcaccacggcaattttcttatttgctggtaaaaaaacacaatattccagattgctgtttactctgtctcatgtgatttttctcgcgggagttttatatcaggggtatagggaaaatctgcaacacataattaatagcgactggaaggaatataaaataacgcgtttatttgagcaagtgcaggagaatggagcgcatgcgctgaataacgatgtaacttgttcagaattaatgcaactactcaccctggcagcggaacgtgatgacgtcaaagaagagacgttacgtactcttattgcaaagagagtatcgccatttctgacaatgtcagataactgtacgggtgagaattcagtagagatttattctgtagatactacaccttttatggcggctattcggaatcataatatacattctgttcgtttttttagtcaattgcttatgggaaactcaccaaaagcaaaaaataatcgtgatattgtgcgccgggcaaaccctttgatcgaagtgtataaatatagtcatggttcaaaaaaacaacgtaagtcagggttagacataagtaagcaattaatggctattatgccagaactattaacagatgccgtctggcgtgcagtgctcaatgtatatgatgccgatgcagcacgatggttctggcgtaagcaaccaccagaaaatcggttgtatcgcttaaaggctatggcattaatactacaaacagatgcactgttggcggagattcgacatactccagaggtactgaatatctcgtctgaggggggcctgaatgaagaggagtttctccatttcttaatttatggaggagataccgctgtaatacatgcactggttgaaaaaggaatagttaactggcagcaccttatgaacattgaggggtttgataaggaccccttaatatggtctatttcaaaactgggagaaaatgacaatgaccggaaggttttggcattaatggtaatgctgccaacttactga

SEQ ID NO: 35940 - DNA, 531 bp, Escherichia coli
atgacgctggtgtttaatgccaatggcgttctgacttcaaatccaacagagaatattactactggcgcaattaacggcgcagatcccgccacgtttagcctgagcttcctcaactccatgcagcaaaataccggcgctaacaacattgtggcaaccacccagaacggctacaaaccgggcgatctggtgagttatcaaatcaatgatgacggtacggttgtcggcaactattccaacgaacaaacccaactgctggggcagattgtactggcgaactttgccaacaacgaaggtctggcatccgaaggcgacaacgtctggtctgcgacgcaatcttctggcgtggcgctgttagggacagccgggacgggcaactttggcaccctgaccaacggtgcgctggaagcgtccaacgtcgatctcagtaaagaactggtcaatatgatcgttgcccagcgtaactatcagtctaacgcccagaccatcaaaacccaggaccagatcctcaacacgctggttaacttacgctaa

SEQ ID NO: 35941 - DNA, 678 bp, Escherichia coli
atgaaactttcactctcacctcccccttatgctgatgcgcccgtagtggtgttgatttcgggtcttggcggtagcggcagttactggttaccgcaactggcggtactggagcaggagtatcaggtaatctgttacgaccagcgcggcaccggcaataatcccgacacgctggaagaagattacagtatcgcccagatggcagcagaattgcatcaggcgctggtagctgcggggattgagcattacgcggtggtcggccatgcgctcggtgcgctggtgggaatgcagctggcgctggattatcccgcgtcggtaactgtgctggtcagcgttaacagctggctacgaataaacgcccatacgcgccgctgttttcaggttcgcgagcagttacacaggcatgggtggaagcgcagccgttgttcctctatcccgccgactggatggcggcccgcgcacctcgcctggaggcagaagacgcgctggcactggcgcattttcagggcaaaaataatttactgcgtcgacttaacgccctcaaacgcgctgactttagtcgccatgcggatcgcatccgctgcccggtgcaaatcatctgcgccagtgatgatctgctggtgccaacagcatgttccagtgaacttcatgccgccctgcccgatagccagaaaatggtga

SEQ ID NO: 35942 - DNA, 234 bp, Escherichia coli
gtggacagagctgtaagagaggtttttgatttcgtagaagataacttgcgattcaaatatgtgcaacttggcaaggcatatattgacttattgcgccaagctttaattgaaaataaccaagaaaaaaaatccgaagaaatctatgattttccattatcacttgaactaggagtttcatctatcgcagggcaagtattcatcgaactagggttatctagaactagggttatctag

SEQ ID NO: 35943 - DNA, 1323 bp, Escherichia coli
atgatattacaggactgccttgataaaattagcacacaaaaccctaatgcaaaatatgttttcctcgcgcctggtgctgaaggttttgatgatttagcagatattattggaatcgatgcaatccatattgaaaaaacaaatctatctcctgtagttcaaaacaaaattatcgtcaaagttgatccatcaaaagaaaacaacttacaattatcattattagacaattcagacatattaccgatcggagaaatagaatcgacaaggggtttcgccaatgaaaatacaagattggcggctgtcgcattagaattaggaaaaaatgaggggtctttagtttacggaaccggagctgaaaatgcagaagatgtagctaagcaaatatcttctggattacctcttttagaggatgacagtgaattacaagaactctcaaaatttataaaaaaacatgtccacgaggattactctcttgcaaacctcgtattgagaggggttggataccattatggtaaaatgccaagtttattaagagaaacattagaaaaaaatttcacgaataataaactgaagtttttagtttgcacaacaaccctttttcaaggggttaatctgcctgcaaagaatgtttttattgatacacctacacgaggaaacaggggagaaaaattagatccagcatcgctatggaatttcgcagggcgggcaggtagattaggttatgcattttcgggaaatgtttatcttattgactatgatgattgggtaaccaagcctttagattccaaaatagacttcaaaattacttcatctttaaagaaagtaattaatgaagattttgacacagtaatatcacggttagacaaaaataatcattcaggagtgacgccatatagtaatattgatgcagcggcaggtcttttaatctccagagccgcaaaaggagatttgcataattttcttaaaagatctattgataatgccacttatatctcattagaatcacttaaaatacctcatgaggttttaactctgaactggacagttgatccatttggacaggaacgattgtacaatagatttatccagaaaataaaggaaggtaaagttgacgaacttatacctcgccatccttcaggtgatgtttacaaaaattatgttggtgtttttagcagaataaataaatacatccttaaccataacacatctaaattttctaactatctaacttcaattgctttgaattggatgaggggtaaatctctgccggagataatctctctctccataaataagaaaaaagaaaaaaatccactaggcctgtaa

SEQ ID NO: 35944 - DNA, 204 bp, Escherichia coli
atgcaaatcgtctctgtcgatattggttcgacgtggaccaaagcagccctcttcacccgggagggggacgcgttaacgttggttaaccacgttctgaccccaaccaccacccatcatctggcgaaggggtttttctccagcctggaccaggtgttaaacgtagatgatgccctccccctgttaaacagtggtgaggttgcatga

SEQ ID NO: 35945 - DNA, 1380 bp, Escherichia coli
atgggggctggcattgctgaagttgccgccagtcatggacatcaggttttactgtatgacatttctgctgaagcgctgacccgcgcaatcgacgggatacacgcgcggctaaattcacgagtgacgcggggaaaactgactgctgaaacctgtgaacgcacattgaaacgcctgatcccggtgaccgatattcacgcgctggcagctgcggacctggtcattgaagcggcgtctgaacgtctggaagtcaaaaaagcgctctttgcacagctggcggaagtttgcccgccacaaacgctattgaccactaacacttcgtcaatctctataaccgcgattgctgcggaggtaaaaaatcctgaacgtgttgcggggctgcatttttttaacccggcaccggtgatgaagttggtggaggtggtcagtgggctggcaacggcagcggaagttgttgagcagttgtgtgaactaacgttgagttggggtaagcagcctgtgcgctgtcattcgactcctggatttatcgttaaccgtgttgcgcgtccttattattccgaggcctggcgggcactggaagagcaggttgctgcaccagaagtgattgacgctgcacttcgcgatggcgctggtttcccgatggggccgctggaattaaccgatctgattggtcaggacgtcaattttgctgtcacctgttcggtgtttaacgctttctggcaggagcgtcgttttttaccttcgctggtgcaacaggaactggtgattggtggacggttgggcaagaaaagtgggctgggcgtgtacgactggcgcgcggaacgtgaggcagttgttggcctggaagcggtaagcgacagttttagccccatgaaagtagaaaagaaaagtgacggtgtcacggaaattgacgatgttttattgattgagacacaaggcgagacggcacaggcgctggcaatacgactggcacgcccggtggtagtggtcgacaaaatggcgggcaaggtggtgaccattgctgcggcagcggtgaacccggactcagcgacccgcaaggccatttattacctgcaacagcagggcaaaacagtgctgcaaattgcagattacccaggaatgctgatttggcgaacggtagcaatgatcatcaatgaagcccttgatgcgcttcaaaaaggcgtggcctctgaacaggatatcgataccgccatgcgtcttggggtgaattatccatatggcccgcttgcctggggagcgcaacttggctggcagcgaatattaaggctcttggaaaatctacaacatcactatggcgaagaacgctatcgcccatgttcattgctgcgccaacgagcgcttctggagagcggttatgagtaa

SEQ ID NO: 35946 - DNA, 336 bp, Escherichia coli
atgacaacgtttcattccttaacggtggcaaaagtggagccagaaacccgtgatgcggtaaccattacctttgcggtaccccagcctttgcaggaggcgtatcgctttcgtcccggtcaacatttgaccttaaaagccagccttaatggtgaagaattacgccgttgttactccatttgccgtagctacctgcctggcgaaattagtgtggcggtgaaagccattgaaggcggacgtttctcccgctatgcccgcgaacacatccgccaggggatgacgctggaagtcatggtgccgcaggggcatttcggctatcagccacaggccgaacgctag

SEQ ID NO: 35947 - DNA, 522 bp, Escherichia coli
atgattgaaccgatgaaagagatggcgggatttatcgtgatggtttttcccctcgcccagtttgtcgccatgtttaactggagcaacatggggaaattcatcgccgtggggctgaccgatatactggaaagttcagggcttagcggcatcccggcgtttgtcggtctggcgttgctttcctctttcttatgcatgtttatcgccagcggttccgcaatctggtcgattctggcccccattttcgtaccaatgtttatgctacttggctttcacccggcatttgcgcaaatcctctttcgtattgccgactcatccgtattgcctttagcgccagtatctccttttgttccactgtttcttggattcctgcaacgttacaaaccagacgcgaaactgggtacttactattcgttagttttgccctatccacttatctttttggtggtatggctgctgatgttgctggcgtggtatcttgttggcttgccgataggtccgggtatttacccacgtttgtcttaa

SEQ ID NO: 35948 - DNA, 327 bp, Escherichia coli; identical to SEQ ID NO: 16555

SEQ ID NO: 35949 - DNA, 228 bp, Escherichia coli
atgctgcctcgaaatgagggcgggaaaataagggtgtcagccttgttttctccctcattacttgaaggatatgaagctaaaacccttttttataaagcatttgtccgaattcggacacaatcaaaaaagcttaattacgatcaatttgatctacatctctttaaccaacaatatgtaagatctcaactatcgcatccgtggattaattcaattataacttctctctaa

SEQ ID NO: 35950 - DNA, 363 bp, Escherichia coli
atggattttatccgtaaaactttgggtggattaaaagcaagttattatatccgtcacttcgtttttggtgcattaatttcaactttctttatttacatgtcaatgcaaaatcctggaggggtgaaggttgaaaatataattttcttttttatcaatgcgttactctacccttacgcaaggtttgtatatgagcaaatcattgggttcatcatgggtgaaaatgtctttttcatcaacgtcatagtgatgctaactgccaagataattacgatgtgtttatgctggatattttcagtattcatagcgccagttggactgatatatctctactattatcattcaaaagctgataaacaattatag

SEQ ID NO: 35951 - DNA, 396 bp, Escherichia coli
atgaacaaaacagtgtatgtaccaagctacttccagcctatctacaaagaagtaaccatcaaagttcctaccggaaacacaaaacgattcctgggtctcatcgacattgaagaaaaaatccgaaaaagagaagttattcaggatggctggtctgattgccagattgacggggaaagactcaatgaagatgttggtcgagccattaataaacttaatcgggaagggtatgaggttatttcaataacccctgctacctcaggaagctgggcttataaatataaacaaaacagtattcgtaatggaaacggtgatggcagttatggatatggttacggttattcatacaccgaaggcgttatgattctggcaaagaaaattgagaaagaggaagtctga

SEQ ID NO: 35952 - DNA, 453 bp, Escherichia coli
atgagcaacaacttcaacagtaatggctacccggaagaaatggcagaagacatagacttacagcgggcagaaaggataaaaaaagcgatcctaagcaaattcacatacgaaaggatggaagaactgtctggcatcaacattggcacactgaaacggatcgcaaacgcacagagggatgcgaaaatcagtgagctggaaaaaattgctgaaatcactcagacagacatatttgaactgatttttggctccagtagcagtgatatctacgattccagcaaacgcttctttgagacgagaagtaaagatgcggctcaggcggctcaattcatcatctacaatcttcgtacccttgatgatgaggacatcctttgtttggggagggtttcgagtgccttgcaaacagcaacaacatcaagaaaatgggatgagcttttcgggaagaagaaaggctga

SEQ ID NO: 35953 - DNA, 246 bp, Escherichia coli
atggacttatcatatctagctgaaatgacgatatcagaggaaacacagttcttgactgtttttgagcagcaactagaacatgatgtcggtgaagcagcccgagcctgtcttcttcgtggcgtccctatttattacgctgaaaaaaatacgccagaaggatgtgtcattaaagagtatcccgatggtcgcaagaagctggttagttttatgactggcactgaaaaagtagttaagattaaagtctga

SEQ ID NO: 35954 - DNA, 363 bp, Escherichia coli; identical to SEQ ID NO: 35950

SEQ ID NO: 35955 - DNA, 396 bp, Escherichia coli; identical to SEQ ID NO: 35951

SEQ ID NO: 35956 - DNA, 453 bp, Escherichia coli; identical to SEQ ID NO: 35952

SEQ ID NO: 35957 - DNA, 1110 bp, Escherichia coli
atgctagatccacagcttgttaatgatgaacgaatgattacattcaggttaacacctgatattgatgaacgggaatttgtaacccgttatcttggcaatatgaacattcgaatatggacgaaaaagggtgttgattttatcgcgccctatacgccgaaagagccggttaagccacgttatacatggacttatacgcctcagtaccgttctgttgcctacctgtctgatattcttggcggctacgtttcaggctccttcaataacagtggagccgtgatttctgacgattcgctaaaaggttcatcaggggcaagcaactacatcaatcgaaccggtgatattctggtttattatggtacgaaagaggacatcgccatcctgaaaacactggtcacttcgctggatacgatgagggatgaagtggttgtttctggttatgtttttgaggttcagacctcgcagtctgacggctccggtattcttttagcggctaaaatcttgtctgataaattcaatatttcagtaggtgctgccggactggataattttatcaatattcgaaccggctccattgatgccattttcaatctgctgaaaaccgacagtcgttttactgttgtcagtgcgccacgactacgggtaaaaaataatgcctcagcgtctttttcagtcggctctgatgtgccagtactgggcagtgttacggtgaataacaatacgaccacgcaatccgttgaatatcgttccagcggtgttttatttaacgtgacgccatcaatcaaaagtcggacaatggatctcaagattcagcagcagctttccaactttgtgaccactgaaaccggcgtcaataactcgccaacccttatcaagcgtgatgtaacaaccgaagtcagccttgcagatggtgatattattttgcttggtggccttgctgaacagaaagacagtaaggccagttccggctggagcgtcttcggttcccgtaccagtgaaagcaacaagactgatattatggtgatgcttcaggtcagaaaggttgaccggagcagggcgacgccccgcagcgccgcgaggagcggtgaactgttccgggacaacctgaactga

SEQ ID NO: 35958 - DNA, 249 bp, Escherichia coli
atgtctgtaaaaaataaggcgcgtgaccgacttcccagtggccgccttaagtcttatcgtcgtgtaggttcacattttgccagttgtgccagatggtttgataaatcgccgtcctggtatcgcaatatgatgatgacccggccagagcgccgtgcagtcagaaagcttctcaatcaggttgtacgtggtcgtgacgctgacggaatcgcatttccggtcagcaacaagccgtttgcatggtggtggtga

SEQ ID NO: 35959 - DNA, 246 bp, Escherichia coli; identical to SEQ ID NO: 35953

SEQ ID NO: 35960 - DNA, 204 bp, Escherichia coli
atgataatggctaccatcgtggctgggataagcgtaaagcgtatgagcgtggctatcgtgaaggctggcgcgatcgtgacgatcatcgcggaaaaggccgcggacatgggcatcgccattaaacgcgtccgtcaatggagcacaatgcctgatgcgacgctagcgcgtcttatcagacctacaaaccgtctctttaacgcatag

SEQ ID NO: 35961 - DNA, 417 bp, Escherichia coli
atgcgtgttgccgacagtcgctggccggaaagcctgcagcagcagcagcagcaggcctcgacacattggaatgaagcactcaaaacccgcgcacagagtagcccgcagttgcgtggctggttgcagacccgtcaggacttacatgcttttgcagatctcgtgatgcggcgcgagaaagagggactaaccctttcctatatcaaaaatgtcatctggcaggcggagcggggactggggcaggaaacacccgttgagtctctgttgacgcagtaccaggatgcccgtgcgcagaagcagaatatagatgcgctggaaaaacaaattaatgagcgactcgaaggcgtgttaatccgctggctgctgctgaagaataacgtcatgccagaggcggcaaccgggaccacggccgaaaaataa

SEQ ID NO: 35962 - DNA, 147 bp, Escherichia coli
gtgaccgcactggacggtctgttctggtctggtagtcagcgtattgcggaagatattctgtgtcgttacggggaagtcatcttcacagcgattttcagtcagttagcattaccgacattcattcatcaacttaccggagataattga

SEQ ID NO: 35963 - DNA, 480 bp, Escherichia coli
atgaagaaaatcgcggggttgtaccgtcttgagaagaagatcagtagccgccccgtggaaaaaatccgccagtggcgacagcgttatgcccgtccgatactggaagaactgtggtcatggcttgaagagcaggaaccgcaatgttttccgggaagggcattacacaaagccattgtctatgcgctgtctcatcgcgtggaactgagctgcttcctggaagatggtgcggtgccgctggataataatgtgtgtgaacgggccatcaaaaacgtggctctgggcagaaaatcgtggctgttcgccggttcgcagatggcgggagaacgcgccgcgcaaataatgagcttgctggaaaccgcgaaacgcaacggtctggagccacatgcctggctgacagacgtcctgacgcgtctgccggagtggccggaggaccgactggcagagttgctacctcttgagggctttaccttctccgggtga

SEQ ID NO: 35964 - DNA, 552 bp, Escherichia coli
atgctcatcggctatgtacgcgtgtcaacaaatgaccagaacactgcattgcaacgaaacgcgctggagtgcgcaggatgtgaactgatattcgaggataagatcagcggcagaacgtctgacaggccgggcttgaagaaagtactcaggactctgtctgaaggcgatacgctggtggtctggaaactggatcgactcggtcgcagcatgcggcatcttgtcgttttggtggaggagcttcgggaaaagggtattaactttcgcagcctgaccgacagcatagatacgtcttcaccaatgggacgctttttcttccatgtcatgggcgcacttgcagaaatggaaagggagctgatagtcgaacgtaccagggcgggattggctgcggctcgtgaagaagggcgaataggtgggcgtcgatcaaagctaactgatgaacagtgggcgcaggcaggcaggttgattgcagcaggtgaatcacgacagcgtgtggcattaatttacgatgttgggatatcgacgctatataaaaaatttccggcaaccaggtaa

SEQ ID NO: 35965 - DNA, 204 bp, Escherichia coli
atgtgtggacgattttcacagtcaatgacgcgtgaagattatcttgccctgctcgctgatgaatcagaacgcgacatcccatacgatccagaacccatcggaagattcaacgtagcgccgggaacaaaagttctgcttctgagcgaacgtgatgagcagttgcacctggatccagttatctggggagacgcccccggttggtag

SEQ ID NO: 35966 - DNA, 219 bp, Escherichia coli
atggatatcccgaagccggatggcggcgtgagaaccttaggcatcccgacggtggtggacaggcttatccagcaggcggtgcaacaggcacagcgttacatacggggtggcaaacggtgggtggtggatatggatctggagaagttcttcgaccgggtggatcacagactcctgatgacgcgtctggccagaacgataaaggacaggcgggtgctgtga

SEQ ID NO: 35967 - DNA, 1470 bp, Escherichia coli
atgaaattatctccagcagaattgaagttagaaaggggtaaggttcaagataataaattcaatcaatatgttaaacgtatcacattaaaaaatgtcagagggtttgatgaggaaattgtggagtttaaaacaccagttacagcccttatcgggactaatggtggagggaagtcgactatattaggtgctgtagctctcgcttataaaaatgttaagccaagcaagtttttccctaaatcattttatggggatgattcaatgagtgattgggaaattggattcgaattgactgacaagcctatttcaaaagataaaaatattaacaggactgcaaaatttaaacagatgaaatggcgcagagataatttcccagagcgaaatgttgtatatgtagaaatacaaagaactgttcctgcaggcgaactaactaagtttaataaatttttatctggcgatgctaaacaatttgaagaaaaaaatctcaaccctgagacaataaaatattgctctgccgttttagataaaaagatagaagattatagatgtataataaataagcacgatccatcttcaagaatgtttgtaggtaaggcaattaatggttctggttattctcagttccattttggtgcaggtgaagcatcaataatagatactattgatagaatagagactgctgctgataattctcttgttttaattgaagaaattgaaaatggactgcatcctgttgcagtgcggttgtttgttaactatttgacaaatgtagcaaagaggaaaaagctgcaaataatatttacaacacattcgcaggatgcagtaaacgagctagagccagaagctgtttgggcttctattaacaaaaaagtatggaatggcaaactaagtattgaaagtttacgcgctataacggggcagaagataaattcgaaagttatatatgttgaagattcttttgcaaaagagtgggttgaaaatgcgatggatcgatatattccagaactagcctcaacaataaaagtctacacggcaggtggttaccccagcgtggttaaagtaagtcaatatcataatgagaaccctactataaattatccatcaatcgcattagttgatggggatattaaaggtagacccggaactaaagatctgcctgataatgcaatgttcatcggggatgattatcctgacgctacggtttttcattatattgcaaataacatagaagaaaatgcctcagttttgaggcaaagatgtttgttaacaagatttgacgctgaaaagattaaatcggaagttgagagtgtgatgcattctgcatgtgatcaccatgtttattttactagattaagtgataaattagattttgcctcagaactattcattcgggctggtatgatagatttatttaatgagaaaaatccagaattttggtccccaattatggacttcattaaaaaaggtctatag

SEQ ID NO: 35968 - DNA, 336 bp, Escherichia coli
atgaaaattgagatgataaaaagtaaatacacacataatttaaaaagaacaggttgtgtgcttatccggctgataaatgaaacattaaaatggtttccttttaatctggtaatggtacctgcaatattgttttattttgttcctgatagtgtcctcagtgaggttatttatgaatggcaacagtcagatatgtcaggaaaaatgtttctggtccggctatatctgaaagctgcatttgtgtgtgcttttgcagctgtgttttttaaatgtttgtgctctgatgcgtttatgccaggtaagtgtgtaaacaaaaacagaggaggatgtaatgagtaa

SEQ ID NO: 35969 - DNA, 255 bp, Escherichia coli
atgaatattatttttgatgcctgtattgattcgtggaaagcggccccggaattaaataattcgatttatatgtggagcatcctgatgtatgccattccgtgtacgttatgggcgctggcatccggtttttttgttgcgggttatctgctgcctttatgtgcattatcaggcagaaatatcatgatattcctgctgaaacgccgtatgcgccgggagaacacattaagggagggcagcaataatgtttcgcattaa

SEQ ID NO: 35970 - DNA, 225 bp, Escherichia coli
atggcgcgtctggaactactttttgttaacgtcaaacatggtggcatcggtcgccatgtcatcaataacttgtttaatattttcgaaagccattggcgtactttcgttattcaggtctttaccttcgccctgacgaacgactttgataaccggtttattagtcgctgcatcaatcagctcaccttcaaaatagaggcgggtgatgctgccaacttactgatttag

SEQ ID NO: 35971 - DNA, 309 bp, Escherichia coli
atgggactgaccagccagttcaccacgtattcactctatgactgcggaaaaataaacagtgttagggtcattcgactgtatgaaagcctgtgccagtaccgttccagcggagtatgggttactactcaggaatggctgtcagagcgattcatgcttcctgaatcgcaaagatcaaacttcgctgaaatgaagagaacgtttatcaatccggcactgaaaaagataaacgcaaatacaccacttaaagccgcaatgacacagaatgaagatggcaggttagtcttcaccattgttgattcgaaaaactaa

SEQ ID NO: 35972 - DNA, 318 bp, Escherichia coli
atgaaacttttaaaagtagcagcaattgcagcaatcgtattctctggtagcgctctggcaggtgttgttcctcagtacggcggcggcggtaacggcgcagatgttggccaaggttctgatgacagctcaatcgatctgactcagcgtggtttcggcaacagcgctactcttgatcagtggaatggtaaagattctactatgactgttaaacagttcggtggcggtaacggtgctgctgttgaccagactgcatctaactccagcgttaacgtcactcaggttggctttggtaacaacgcgaccgctcatcagtactaa

SEQ ID NO: 35973 - DNA, 330 bp, Escherichia coli
atgttgatgtgtgatgcgaccggtctgtcgcaacgtcgtgcctgcaggcttacaggtttatccctgtcgacctgccgctatgaggctcaccgtccggctgctgatgcgcatttatcagggcgcatcactgagctggcactggagcgcaggcgttttggctaccgtcgtatttggcagttgctgcgccgtgaagggcttcatgttaatcataagcgcgtgtaccggctttatcacctcagtggcctgggcgtaaaacgcagaagacgtcgtaaagggctggcaacagaacgtctgccgctgctccgtccggcggcgcccaatctgacctag

SEQ ID NO: 35974 - DNA, 147 bp, Escherichia coli
atgattgatgtcttaggaccggagaaacgcagacggcgtactacacaggaaaagatcgctattgttcagcagagttttgaaccgggaatgacggtctcccttgttgcccggcaacacggtgtggcagccagccagttatttctctga

SEQ ID NO: 35975 - DNA, 411 bp, Escherichia coli
atggtaacaagtatgattcttagcagatatgtgggaactcctccccgtgatggcgaggacagaaagattcaaggtggtccgctttatttagatatcattgatttgattgatgaatgtgacacactgccttggaccagacggtgtatcagggatgttcaatcgctttctttagatgcagatgacatcaaatctatggtgataaaagcagtcactaaagggagatttctaggttcagaatggtgtcaaggcagtaaaccaggtgtatgggcagcttgtgatgcttatagctttgagcactcattttggtgccaagctatgcataaagaacttaataacgagttctacattaaattttttgtaaacattactggcaatgtagtgcttacagtatctcttcatctctctaattga

SEQ ID NO: 35976 - DNA, 588 bp, Escherichia coli
atgagaaacaacaacatatgtccagtttgtggtgtaggtcatctcaccgtggagatggagtatgatgatgttacttataaaggggaaacaaaaaatctcccaataaggttttctgtgtgtgatcaatgtggttcggaaactgccacaccagtcgatttacgagaaaacaaacgaattttcaatgaatacaaaaagtctatcgatggacttttaacaggaaaagaattaaaaaaaattagaactgaagtatggatgataacccagcaaaaggcatcctctatatttggtggggggcctaaggcattttccaagtatgaatctgatgatgtcattcaatcagaagcaatggataaactgatgcgtttagcagcagaagttcctgatgcattcaaaaggttacgggaattatctggcgaaatcaaagttgaaagaacagtctcatcatctaaatctttacctatatggaaatctgaagcaaaagcacaatttgaaaacgatgatcagggatttgacagcaaatcaccagcccaaacaaaaatgaatcaaacatcaataaagataaaaactgttgctaagcgggtagcatga

SEQ ID NO: 35977 - DNA, 504 bp, Escherichia coli
atgatgaatgaacttcttagatcagcaatagacgcattatcaataatgcatatcaatatcagagaatctaactttgctttttctgaagggtataatagctttaacttcaacagcataaataagcaaacacaatcatttcgtaagataaaaaaaatcgaagctattgaattagtaagtgacgatgactcattaaaaaatgagctatattactcttttcactactcagttgggcttagatttattgcaaaatccgaagaaacatctaaagacgaaaatgatgttgatacaattttttctatagaagcaatttttgaggcgatatatcgctcaaagagagaattatctaaagaagagttagaagaatttgctaagcaaaatgtaggttttaatgtatggcctttttggcgagagtatgttcaaaacagcacatccagaatgggaattactacaatagctataccattctttaaattcaataaatcagacataccttcattagattaa

SEQ ID NO: 35978 - DNA, 153 bp, Escherichia coli
atgcgattggtcatgagtggcaagggctacatcatgtttaccgacatctcacgcaaaaataccctgattattaatagcgaaaatcagtttcttattttggcggtagctttttgcggttctttgccaactggaatccttcaggtaacggtttga

SEQ ID NO: 35979 - DNA, 423 bp, Escherichia coli
atgaaaatgactgaattaacaaaagaacaattaatcgaagaagccaaattaaaaatagcgattacgaaatgccaccccaattcagggatggcgcgagtagagggcgagttattcaaaattgcactggcatcgctggaagcagagccgatagcgtggcgatatcgctacgtgaaaaaaggtgttatggactctcagggggagttgtgggttggtgactggaaatatgtaccgaaaaaagaggattgtaacgacaggccgaactatgaaattcaggccttattcactgccccaccagtcccggttacatcagaagaactggttaaagctgtgcacttttatgaacaactaaaacgcgaaaatccaccagcatccggcaaccagattaatgggttaactatgccggttaaacgaccagccgactga

SEQ ID NO: 35980 - DNA, 276 bp, Escherichia coli
gtgaatatcgacgcaacaatgacgattggtacggccctcaatacggggttggcgcttcttggttggtgctacatcatgttctgctcatggcggtggctgtcactgatgttactgaaagaatggaataaacgctgtaaacagacgcagcggcagaaggcaatgaatgcgttttttgagaccttcgatattgacagtatagaaccaggagagccagctcgcgtgattagcagaggtgacgttgtaattcttgtataccggagtgaagagaaagcataa

SEQ ID NO: 35981 - DNA, 282 bp, Escherichia coli
atgatactccggcagtgtgcgggaacgatgacggtcgaaagcattgggaggctgaccggtcgtacaggtgatgctgtcagaacgaaagcgcgggaactgggtgtcagcctgatgttacggggtgattatcaccagtcaacaaaatatccgcagagtgatattgaactggcgcgacagctgcatcagcgtggcgtacccaggagagaaatcgccagaaaatttggaatgccgttgcgcacagtgaataactacgtttatttcgacaggagagttcaggagtga

SEQ ID NO: 35982 - DNA, 348 bp, Escherichia coli
atgcaacaacctgtagttcgcgttggcgaatggcttgttactccgtccataaaccaaattagccgcaatgggcgtcaacttacccttgagccgagattaatcgatcttctggttttctttgctcaacacagtggcgaagtacttagcagggatgaacttatcgataatgtctggaagagaagtattgtcaccaatcacgttgtgacgcagagtatctcagaactacgtaagtcattaaaagataatgatgaagatagtcctgtctatatcgctactgtaccaaagcgcggctataaattaatggtgccggttatctggtacagcgaagaagagggagaggaaatatag

SEQ ID NO: 35983 - DNA, 903 bp, Escherichia coli
atgaatgctgaagatactaattcattacataaaatatacaatcctgtatatgggttgagtaatatcgtattacttgctaaagagtgtcagtctacagatccagtaaaagttaatcttctatgcctcggattcaaagaagatctacctaaagacaaagagcttgcggaaactctatttttagaattagttcattattgcattcctcatccagtgttagttaaacgaaaagagttagcacgaagtgagggaaaggatgaggcaagactttatagtgaacttgcaagggaagcacgcagcctttttatgaaatacaaattagaaagtgctgtaaaaataaaaaatggtgaaccccctgaaaagttcgaacaacgagtgaaaaatgctaacttacgttatggtgaagttggtgagctaatatcatattgtatagcaattcattttttaaaagcgtcacaattagtctcaaaaatggctcttaagacatcctctgaaatgcctgtctttggtcttgatggcattcatgcaaccatagacagtaaaggaacattgacggtattttacctagaatctaaaatgaccagggagtttgatagcggttctgaacaattttcaaaatcagttagtgggtttgaaagcgatagaaatagtcgtagaaatgaatacagaatactgcaggacttgagtaatttagagtctcttgaaggagaagaacgaaaaaaggcaatacaatactttgatccttactctaatgaatcatcaaatgtcagagagcgtttcgttagaataattgcctacaatgaagaaagctataaatctaaaatagctattgatgatgagtccccactttccattcatttagaccactttaaaaaaattacgtcagcacttttgaagaaaaaataa

SEQ ID NO: 35984 - DNA, 357 bp, Escherichia coli
atgattactggtacgtacttgtgcgcccaaatatgcctggtttgcaactaccgagtcggcaataaaacattgcggaccaatcgttgcttccgcttcaataaccgcatttttaatttcggtggcgaaaccaatttttacgccattgctgattattgtgccaggacgaataaacgcataattacctatcaggcagtttgcgccaatcactaccggaccctgaataacggcaccgtgacaaatacgggtattcgcgccgataacaacttcacctgcagtttcatcaataattacctggtctgcaatctgaatatttttctctttaacattaagcttcagatagtttttcagttcctgtga

SEQ ID NO: 35985 - DNA, 141 bp, Escherichia coli
atgcaattacaccactctgacaattcagtaagttactgcacttcatttttattaatgcataaacaagcagaacataatgtcttttattttattaacagcaatacatataatgaaatcattatattcacattgcatatataa

SEQ ID NO: 35986 - DNA, 906 bp, Escherichia coli
gtggactggcttcttgatgtttttgctacctggctctacggcttaaaagtaatcgcgataacgttagcggtcatcatgttcatcagcgggctggacgatttttttattgatgtcgtctactgggtacgccgcattaaacgcaagttgagtgtttatcgccgctacccgcgaatgagttaccgcgaactgtataaaccagatgaaaaaccgttagcgattatggttccggcgtggaatgaaacgggcgtcatcggcaatatggccgagctggcggcgaccacgctcgactatgaaaactatcatatctttgttggcacctaccccaacgaccccgatactcagcgtgatgttgacgaagtgtgcgctcgcttcccgaacgtgcataaggtagtctgcgcgcgtcctggccccaccagcaaagccgactgtctgaacaacgtgctggacgccatcacccagtttgagcgtagcgccaatttcgcttttgctggttttattctgcatgacgccgaagatgtgatttcaccgatggaattgcgtctgttcaactatctggtcgagcgtaaagatctgattcagatcccggtgtatccgttcgaacgcgaatggacgcacttcaccagcatgacttacattgatgagttttcagaactgcatggcaaagatgttccggtgcgtgaagccctcgccggacaggtgcccagcgcaggcgtcggcacctgtttcagccgccgcgccgtgaccgcactgttagctgacggtgacggtattgctttcgacgtgcagagtcttactgaagattacgacattggcttccgcctgaaagaaaaaggtatgacggaaatttttgtccgttttccggtggtggacgaagccaaagaacgcgaacagcgtaaatttttatag

SEQ ID NO: 35987 - DNA, 1038 bp, Escherichia coli
atgaaggagaataaccttaatcgcgtcatcggatggtctggtttactgctgacgtctttattgagtaccagcgcactcgcagacaatatcggcaccagcgcagaagagctggggctgagcgattatcgccattttgttatttatccccgtctcgataaggcgctgaaggcacagaaaaataacgacgaagcaaccgccatccgcgaatttgaatatatacaccagcaggtgccggataatattccgctgactttataccttgcggaagcctatcgccattttggtcatgatgcccgggcgcggctgttgcttgaggatcaactgaaacgtcatccaggagatgcccgacttgagcgcagtctggcggctattccagttgaagtgaaaagcgttacgactgttgaagaactgcttgcccagcaaaaagcgtgcgatgctgcgccgaccctgcgttgtcgcagtgaagtcgggcagaatgccctgcggctggcacaattacctgtcgccagagcgcaactgaacgatgcgacgtttgctgcatcgccggaaggaaaaacgctgcgaaccgatctgctgcaacgcgcaatctacctgaaacaatggtcccaggcagatacgctatacaatgaagcacgccagcagaacacattaagcgcggcagaacgccgtcagtggtttgacgtgcttcttgccgggcagctggatgatcggatcctggcgctgcaatcacaggggatcttcaccgatcctcagtcatatattacttacgcgaccgcgctggcttatcgtggcgaaaaaacacgcctccagcattatctcattgaaaatacgccgctatttaccacggacgcacaagagaaaagttggctctatctgttatctaaatacagcggcaaccccgttcaggcgttggcgaattatacggtacagtttgccgacaaccgccagtatgttgttggcgcgacgctaccggtgctgttaaaagaaggtcagtacgacgcagcgcaaaaactgctcgccaccctcccccgcgaatga

SEQ ID NO: 35988 - DNA, 792 bp, Escherichia coli
atgaataataagggctccggtctgaccccagctcaggcactggataaactcgacgcgctgtatgagcaatctgtagttgctttacgcaacgccattggcaaatatattacaagtggcgaattacctgatgaaaacgcccgcaaacaaggtctttttgtctatccatcactgaccgtaacctgggacggtagcacaactaatccccccaaaacgcgcgcatttggtcgttttactcacgcaggcagctacaccaccacgattactcgccctactctctttcgttcgtatctcaatgaacaacttacgttgctgtatcaggattatggtgcgcatatctctgtgcaaccctcgcagcatgaaatcccttatccttatgtcatcgatggctctgaattgacacttgatcgctcaatgagcgctggtttaactcgctacttcccgacaacagaactggcgcaaatcggcgatgaaactgcagacggcatttatcatccaacggaattctccccgctatcgcattttgatgcgcgccgcgtcgatttttccctcgcgcggttgcgccattataccggtacgccagttgaacattttcagccgttcgtcttgtttaccaactacacacgttatgtggatgagttcgttggggatgcagccagatcctcgatcctgatagtccctacattgccctttcttgtgctggcgggaactggatcactgccgaaaccgaagcgccagaagaagccatttccgaccttgcatggaaaaaacaccagatgccagcatggcatttaa

SEQ ID NO: 35989 - DNA, 3693 bp, Escherichia coli
atgggaaaaggtggcggtaaggcacacacgcctcgtgaggcgaaggataatctcaaatccacgcagatgatgagcgtgattgatgcgattggtgagggaccgatagaaggtccggtgaagggactgcagagtatcctggtgaacaaaaccccgctgacggacacggacggtaatcccgtgatacacggtgtgacggcggtctggcgcgccggggagcaggagcagacaccaccggaaggctttgagtcctccggtgctgaaaccggactgggcgtggaagtgacgaaggcaaaaccggtgacgcgcaccattacgtccgcgaacattgaccgcctgcgggttaccttcggggtgcagtcactggtgcagaccacgtcaaagggcgaccgtaatccttcctctgtccggattctgattcagttacagcgtaatggccgctgggtgacggaaaaggatgtcaccattaacggcaagaccacctcgcagttcctggcctcggtgattctggataatctgcctccccggccctttaacatccggatggtcagggagacggcggacagcaccacggaccagctgcagaataagacgctgtggtcgtcatacaccgaaatcatcgatgtgaaacagtgctacccgaacacggccattgtggggctgcaggtggatgcggagcagttcggcggccagcagatgacggtgaactaccatatccgcggtcgcatcatccaggtgccgtcaaactatgacccggaaaaacgcacgtacagtggtatctgggacggcagcctgaaaccggcatacagcaacaacccggcctggtgtctgtgggacatgctgactcacccgcgctacggcatgggaaaacgtctgggggcggcggatgtggacaagtgggcgctgtatgccatcgggcagtactgcgaccagacggtcccggatggtttcggggggaccgagccgcggatgacctttaatgcgtacctggcacaacagcgtaaggcgtgggacgttctcagtgatttctgctctgcgatgcgctgtatgccggtatggaacggccagacgctgacgttcgttcaggaccgtccgtcggatgtggtgtggccgtacaccaacagcgatgtggtggtggatgataacggcgtgggtttccgctacagcttcagtgccctgaaggaccggcacacggcagtggaggtgaattacaccgacccgcagaacggctggcagacctccacggaactggtggaagacccggaagccatactgcgctacggacgcaacctgctgaagatggacgcgttcggctgtaccagccgcggtcaggcccaccgtgccgggctgtgggtgataaagaccgaactgctggaaacgcagacggtggatttcacgctcgggtcacaggggctgcgtcacacacccggtgacatcattgaaatctgtgataacgactatgccgggaccatgaccggcggacgtgtcctgtccatcgatgccgccagccgtaccctgacgctggaccgggaggtgacactgccggagaccggcacggccactgttaatctgattaacggcagcggtaagccggcgagcgtggccatcaccgcacaccccgcgcctgaccggatacaggtcagcaccctgccggatggtgtggagacatacggtgtgtggggactctccctgccgtcactgcgtcgtcgcctgttccgctgtgtctccatccgggaaaacacggacggcacctttgccatcacggcggtgcagcacgtacctgaaaaagaagccatcgtggataacggggcccgctttgagccgcagtcaggcaccctgaacagcgttatcccaccggcagtgcagcacctgacggtggaggtgagtgcagctgacggtcagtatctggcacaggcgaaatgggacacgccgcgggtggtgaagggtgtgcgcttcagtctgcgtctgaccagcggaagcggagaagacagccgtctggtgagcaccgccagcaccgcagacacggagcaccgtttcagcggcctgccactgggggaatacaccctgacggtcagggcgattaacagttatggccagcagggcgaaccggccaccaccacgttcaggattaacgcacctgcaaaacccgccaccattgagctgacgccggggtattttcagataacggcggtcccgcgtcttgcggtgtatgacccgacggtacagtttgaattctggttctcagaaaaacgcatcacgaacacagcacaggtggaaaaatctgcccgttatctggggaccggcagtcagtggactgtccatgggagccggattaagccggggacggatttctggttttacgtgcgaagcgtcaacctggtgggaaaatctgcttttgtggaagccagcgggcagcccagcaatgatggtgaagggtatctggaaattttccgggggctgatagatgagacgcttctgggccaggcactgaaagagcgcattgatgcttcagcgctgcgtacggaggtcacgcaactggaagaagacatccgtcagcggatggacacggatatcgcagaagtgacccggaaaatcgggaaggcggaaaacagcctcacgcagctggttgcgaaaaagaatgaggaccagacactggccatcgcgcaggtgagccagaaagtggaccgggtgagcagtgaaatctcacagactgtcagccaggggcagtcagaaaacgcccgacagatagcacaggtccgccagtacgtggataaaaaagggagtgaaattacctcgaccacggataaaaagctgggtgaccaggccgtgaccatacagcaaatccagcgggttcagtcagacacgcgcaatgagctgaatgccatgtatatgctgaaggtgcagaaaacaaaaaacggtattccctatgtggccgggattggcgcggggattgaggatgttgatggtcagacgctgagcagtattctgctgcaggcggaccgtatcgcgatgattaccccggagaacggcaacaccacgccgctgtttgtggcgcaggggaatcagctgttcatgaacgacgtgttcctgaagcgactgtttgcggtgagcatcacgtcatccggcaatcctcctacgttttccctgacgccggatggcaggctgacagcccgcaatgcggatatcagtggagccatcacggcgaataccggcacgctcaataatgtcaccattaacgagaactgtgtcatcagagggaaactgtctgcaaaccagattgaaggcgatctcgttaaaacagtgggtaaggctttcccccgtgactcccgtgcaccggagcgttggccatcaggaaccattaccgtcagggtttatgacgatcagccgtttaaccggcagattgttattccggcggtggctttcagcggtgccagacatgagcgggagaacagcgatacttattcgtcatgccgcctgatagtacggaaaaacggtgctgaaatttataaccgtaccgcgctggataatacgctgatttacagtggtgttattgatatgcctgctggtcgcggccacatgacgctggagttttctgtatcagcatggtgggtaaatggctggtatcccacagcaagtatcagcgatttgctggttgttgtgatgaagaaagccactgcaggcatcacgattagctga

SEQ ID NO: 35990 - DNA, 1410 bp, Escherichia coli
atgcgtaacgatgaatttcttcaccattttatgctgacactgttcatggtgggtggctatctactgactctgttcatcgttatcgtactttcttttttcagcctgaagtggcgaaaaatggccttcattggtgcattaccgcaactggtgctggcgctgctggtatcgctcggtttgtattatttaacgcgatattccattgcaattttgaccttaatggaatcagtgtgggtattattaccgtgcctgttattgatattagtgataaataagtggtcacagcgtcccctcttagggacgtgcgtttgccatgctttttgcttgttatcgttattttggcgggtcgagcccacattatttgacattagctttaaccaccaacaattaagccagttggctcaggcagagcaggaaaacttccgcacactggatgcgattcacgatacgcaacgtctggaagagatgttgctggtagcgttgaaatccccggaaaataaaacctctgaaaatgcctttcgctatccgtcagggcgaatctcaccatttgctataccttccattggcgatgaacagtattctacccgcactttttttacgattgcgttggaacattacaacgcccgcgccatccgcgcgtttagccgctttctgcaaggaaattcctcaaaagcgcaggaatatcgcgcgattgttcatcaaaaaaatccactgcagcagatgtaccggggaataagtttgccaattcgttatagtgaagaagagatcgcccgccacgttgttgccgctcgtgagataagcctcaccttgctgcccctgatgccagaattattaaacgaagaggcgtatgcaaatgtcattgatgctaatgacagcgcaacgctgaaggctttttggcagatccagctgccgcccacgccggtgttacgcctggaagcgatgtcggtaattcctatgacagcggcactggttcaacaggtgagggagtcaccaaagcggcttgaactggaagataaaagtggcaggacagtactaacttacatcgtgcgctttggaaatattgccgcagtacaggcactgattgacgctaatctgatcgactggcaacggcttcgccaatcgacaggaaggtcaacaccattattactggcgacctggcgacaaaaatacgacgatgatcatgtaatcttcccattgattttaaaggacatgctggcaaaaaatgcgccaccctcagcagaggaaataatgaactgcattaaggatggtatgaccgcagatgattttttatctgccggaatgagcaacacgcaattctgttctgcgattgaacaaagcctccaggcaaaaacgtcagtattaccggcgaatcgattacgccatctgcaatcctcgcggtgtgcaaagctgtaa

SEQ ID NO: 35991 - DNA, 285 bp, Escherichia coli
atggggcagatcgccatatacttcatcggtagaaatatggtggaagcgaaaggccgccttgctcaactcgcccagactgctccaataggcgcgagccgcttccagcaatgtataggtgcctacgatattggtttcgataaagtcggctggccctgtgatagaacgatcaacatggctttcagcagccagatgcatcacggcatctggctggtgcagagcaaacacccgatccaactcagcacgattacagatatcaacttgttcaaacgaataacgctcacttga

SEQ ID NO: 35992 - DNA, 1491 bp, Escherichia coli; identical to SEQ ID NO: 31059

SEQ ID NO: 35993 - DNA, 2649 bp, Escherichia coli
atgaccgtcaccgatccggagtccatcggtattcagatcgacggcgacaaggcggttgttaacaacgaaggcgacagcaccatcagcaatggtggcaccggcacacagattaacgatgacgatgccacggcgaataacaacggcaaaaccaccgttgacggcaaggattccaccggtacagaaatcaacggtaataacgggaaggttatccaggatggcgatctggatgtcagcggtggcggtcacgggattgatattaccggcgacagcgcaacggtggacaacaagggcaccatgaccgtcaccgatccggagtccatggggatccagatcgacggcgacaaggccatcgtcaataacgaaggcgagagcaccatcaccaacggcggcaccggtacgcagattaacggtgatgacgccacggcgaacaacaacggcaaaactaccgttgacggtaaagattccaccggtacagaaatcaacggtaataacggaaaagtgattcagggcggcgatctggatgtcagcggcgggggccacggcattgatatcaccggtgacagcgcgacggtggataacaagggcaccatgaccgttaccgatccggagtccatcggtatccagatcgacggcgacaaggcggttgtcaataacgaaggcgacagttccatcagcaacggcggcaccggtacgcagattaacggagatgacgccacggcgaacaacagcggcaaaaccaccgttgacggtaaagactccaccggcacggaaatcaacggtaataacggaaaagttatccaggacggcgatctggatgtcagcggcggcggtcacggcattgatatcaccggtgacagcgcaacggtggacaacaagggtaccatgactgtcaccgatccggagtccatcggtattcagatcgacggcgacaaggccatcgtcaataacgaaggcgacagcaccatcagcaacggcggcaccggcacacagattaacggtgatgacgccacggcaaacaacaacggcaaaaccaccgttgacggtaaagattccaccggtacggaaatcaacggtaataacggaaaagtgattcaggacggcgatctggatgtcagcggtggcggtcacgggattgatattaccggtgacagcgcgacggtggataacaagggcaccatgaccgtcaccgatccggagtccatggggatccagatcgacggcgacaaggccatcgtcaataacgaaggcgagagcaccatcaccaacggcggcaccggcacgcagattaacggtgatgacgccacggcgaacaacaacggcaaaactaccgttgacggcaaggattccaccggcacggaaatcaacggcaataacggaaaagttatccaggacggtgatctggatgtcagcggcggcggtcacggcattgatatttctggcgataatgccgccgtcgataacaaaggcaatatgaccgtcacggacgcagactcgatcggtgtactgatcaatggcgacaacgcgacacttgccaatactggtgatgtggatgtcagtaattcagcgacgggatttgctattaccagcgacgaggggaaaatctccctcgcgggaagtatgcaggtcggtgatttttcaacagggctgacattaactggcgataataatagcctgacaatggcaatgcaggatcttaatgtcgttggtcagaaagctacaggtattaacgtctccggtgatgccaacacaattgatataactggtaatattctggttgataaagatcagagcgcagacaatgcggcagagtatttttatgacgcttccgtgggcgtaaatgtcagtggtcataataacaatgtgacactggatggtaaattaacgcttgttgcggatggtgaaactaccacacgtgatgtctcgaattttgatggtagccaggaaaatatttctggtcttattgtttccggtgatggtaacaacatcaatctgaatggcgggattgcatttgttggtgaaataaatgcgctgaccgatggttcagccattgctaacaaacggactttcttcggtaatacgccacttattggtattgatggtgaatcgaaggtatatctgaatggtgactcaacgatcagtggtgatctgcaactaggatatgcaagccttatccagttaaaaaataaagcagctattgagattggcagtgaagctactttcaatatgcgggatattgaaaattatgatcattactatgcacaaacaccacagattataaaggcagaaagtagctctgaggtcataaataacggtaatgttgatatctggaatatcagttttgctggtatctttggcgaaaataccacaggtatcaataacgggaatatcacactttctctgtatgattatgcctcaactaatacgccagcaccggaaccagataacacggccttcttgacctctaacggcggcagcgcagtaaacaaaggggtaattacctcaaaagtaatggagcaacatagcgttgttaatatggctgcactcacggggtcaacggatcagtggatttgcccctatatttccagacacctgttatcacttaacccattactggcctgctgccgcagatattcccgtggcgagcgataa

SEQ ID NO: 35994 - DNA, 381 bp, Escherichia coli
atgctgggagcggtggaacgccgctttggcaacgagcttccggcgtctccagtagagtggctgacggataatggttcatgctaccgggctaatgaaacacggcagtttgcccggatgttggggcttgaaccgaagaacacggcggtgcggagtccggagagtaacggcatagcagagagcttcgtgaaaacgataaagcgtgactacatcagtgtcatgcccaaaccagacgggttaacggcagcaaagaaccttacagaggcgttcgagcattataacgaatggcatccgcatagtgcactgggttatcgctcgccacgggaatatctgcggcagcaggccagtaatgggttaagtgataacaggtgtctggaaatatag

SEQ ID NO: 35995 - DNA, 504 bp, Escherichia coli
atgaaactttccctgacgctggaagcagacagcgttaacgtgcaggcgctgaacatgggacgaattgtcgttgacgtcgatggtgttaatctcgctgaactgattaacgtggcctgcgacaatggctactcccttcgtattgttgatgaatctgaccggacatcagcagagcgcacgccaccatttgctgccctgaccggcatacgctgcagtaccgctcatatcacggcaaaggacaacgcctggttgtattcgctgtcacatcagacaaatgacaccggcgaatcagaatggattcatttcacaggtagcggatatctgttacgtaccgatgcgtggtcatacccggttttgcggcttaagcgtggatttgcccctatatttccagacacctgttatcacttaacccattactggcctgctgccgcagatattcccgtggcgagcgataacccagtgcactatgcggatgccattcgttataatgctcgaacgcctctgtaa

SEQ ID NO: 35996 - DNA, 540 bp, Escherichia coli
atgcgtaaacataacgaaccttccctggaggcagaacgcgatgcgttgcgggaggaagtcgcccgactgaatcaggaaatacgccgccggcagatggagctggatattctgaaaaaggcggaggaaatcataaaaaaagacccgggcatcagtatcagtcacctgaacaacagagaaaaaacaaagatcgctgatgccctgaggcaaacatatcccctgacagaattacttcatgttctgggccttacccgtagcagttatttttatcaccgggctgcactgaaagccggtgataaatacgccacgatacgtacgatgctggcagatatatttaacagtaattaccagtgttatggctatcgtcgcctgcatgcgatgctcaggcatgagggggggcggctatcagaaaaggttgtacgcagacttatggtggaggaacagcttgtcgtcagccgtaaccgtcgtcgtcgctacaactcatattgcggagaaatcggaccggctccggataaccttatcgccagagattttaaggcgtag

SEQ ID NO: 35997 - DNA, 198 bp, Escherichia coli
atggcggtcagatattatatcagttctgttgatttaaccacagagaagttcgttaccgcgatccgaaatcactggcatgtggagaataagttacactggcgtttggatgtggtgatgaatgaagaagactgcaaaacaagaagaggaaacgcagcagaattatttcagggatacggcacatcgctattaatattttga

SEQ ID NO: 35998 - DNA, 861 bp, Escherichia coli
atgccactggaacgggcaattcgcgatgccaaaattaatattagccaattagaccaggttgttcttgtgggtggcactacacgtatgccactgattcgcaaacttgtgacacgactatttggtcgtataccggcaatgcatttaaacccggatgaggtcattgcccagggcgcggctattcaggccgcacttaaagcgcgccacagcgaattacgagatgttgtagtgaccgatgtttgcccttatacgctgggcgttgatacctctaaatcgctggggcatacccgcgaatcaggctattttgcacccgttattgagcgtaaccgaagtattccttgtagtcgcgttcgtgccttttacacagcacatgatcaacaaacagaggttaattttaaaatctaccagggtgaaagcaggatggtggctgataatattttccttgcggagttgtcagtgaatgttccgccaaaaccggccggtgatgtgcgtattgatgttcgttttacgtacgacattaacggtattcttgatgtcgatatcagcgtgccactgacaggggctaaaaatagtctggttattgaacagaatccaggggcattaacggaagaacaaatacagcagtcgttgtccaaattaagcctgttaaaaattcacccacgcgatgaacagataaaccaggcctttattgcccgtcttgataatctctatcaactcaccctggcggaaacacgagactggataagcaattgctctcgtcaattcagttatctactcgagaagcaggatcctgatcaactagctgattttcgggctaaagttgaactgacattagactctctggaatgggagcgtctacaatga

SEQ ID NO: 35999 - DNA, 210 bp, Escherichia coli; identical to SEQ ID NO: 7061

SEQ ID NO: 36000 - DNA, 1038 bp, Escherichia coli
gtggaaaaagaaaatatcaccatcgatccgcgttcttcatttactccatcttcgtcggcagatattcccgtgccaccagatggattagttcaacgcagtacccgaattaaacgcattcaagccaccgccatgttgttattattttttgcggcggtaatcaattatctcgaccgcagttcgctgtcggtagtaaatttaacgattcgtgaagaattgggattaagtgccaccgaaatcggcgctttgctctccgtgttttcactcgcttacgggattgcgcaacttccttgcggcccactattggatcgtaaaggcccacgcctgatgctgggactggggatgttcttctggtcactgttccaggccatgtctggcatggtgcacagctttacgcagttcgtgttggtgcgtattggtatggggattggtgaagcgccgatgaacccatgcggtgtaaaagtcattaacgactggttcaacatcaaagagcgcggacgcccgatgggctttttcaacgcagcttctaccattggcgttgccgtaagcccaccgattctggcggcgatgatgctggtgatgggctggcgcgggatgtttattaccattggtgtactggggatttttctcgccatcggctggtatatgctctatcgcaaccgcgagcacgtagaactgactgccgttgaacaagcttatctcaatgcaggtagcgtcaatgcccgccgagatccgctcagttttgccgaatggcgcagcctgttccgtaaccgcacaatgtggggaatgatgctcggattcagtggcatcaactacactgcgtggctgtatctggcctggcttcctggttacctgcaaacagcctataacctggatttaaaaagcacaggattgatggcggctatccctttcctgtttggggctgccgggatgctggtcaacggttacgttaccgactggctggtcaaagggggaatggctccgattaaaagccgtaagatctgcattattgccgggatgttctgttctgccgcctggtga

SEQ ID NO: 36001 - DNA, 381 bp, Escherichia coli; identical to SEQ ID NO: 35994

SEQ ID NO: 36002 - DNA, 681 bp, Escherichia coli
ttggagtcattaccggccataagcatcaagggtgttaataccggtgttattcgcaagagtaataatttcattgcactggcgctgaaaattaaagagcctcgcaataaagaatcgttgttctttctgtctgtcatggaactgcgcgaccttctgattgcgctggaaagccgtctgcatcaaaagcataaactggatgctgctgcacgccttcagtatgagcaagctcgcgataaagtcattaagaaaatggcagaaaacatcccagaaattctggttgatgagcttaaaaatgccgatattaatcgtcgggttaacacgctggaacttaccgataatcaaggcgaaaatcttaccttcgtattaacgctacatgacggtagcaaatatgagttagtcgtcaatgagttgcagattgaaatgctggcgcgagcaatcattcatgcaattaataatgcggaaatgcgtgaactggcattacgtattacctcactgttagatttcctgccgttatatgacgttgactgccaggaaaatggcaatctggaatatgacacctattcccaaccggaatggaaacataacttgttcgaccattatctggcggtgctttaccgctttaaagatgaaagtggcaaagaacaatttagcggcgcaggtgatgctgccaacttactgatttag

SEQ ID NO: 36003 - DNA, 303 bp, Escherichia coli
atgggattgaatcctatttttgttgatgtagaggaaggtgggtttaatattgattatcgcaaaatagaagaagcaattacacctaatacatcagctattttacctgttcattgctatggatttccatgtgaaaatgacaaaatcattgagattgctaaaaagcataacctcaaggtaatatatgatgcagctcatgcatttcatgtaaaggaagatggtcaaagtattttaaattatggtgatctttctatacttagtttccatgcaacgaaggtttttaatacatttgagggaggtgcttaa

SEQ ID NO: 36004 - DNA, 219 bp, Escherichia coli
atgcgtaaaacctgctttactaagtatcaaatccccgctgtgattagtcggttgaagccggatggacagttaaatatgtataccgactttagcccggaaaaactgacgctgaatggtattatcaaaaaaactttaaaaccaacctttaagcgtgagctggtaactcttctaataacgatatttggagtatccttcagtactggtagagtttgtatctga

SEQ ID NO: 36005 - DNA, 213 bp, Escherichia coli
atggtcagtctgggccgcaaaaactacctgttcttcggttcggatcatggaggagagcggggagcgctgctgtacagcctgatcgggacgtgcaaactgaacggagtggagccagaaagctacctccgctatgtccttgacgtcatagccgactggccgataaaccgggtcggcgaactgctcccctggcgcgtagcactgccgactgaataa

SEQ ID NO: 36006 - DNA, 315 bp, Escherichia coli; identical to SEQ ID NO: 35936

SEQ ID NO: 36007 - DNA, 414 bp, Escherichia coli
gtgcatccacgtagtgccgacaatattgataatctgaaaaggtccgcagagtatataaaagaggtctttatcagtagcggtgccagagttaccgcgcaggacgtccccattacgggaggtccctacaaaaacattgttgctgattatggtcctgccgatggaccgctgattattattggtgcgcactatgactctgtcagcagttatgaaaacgatcaattgacctatacgccgggcgcggatgataacgccagtggcgtggcaggattactcgaactggcacgtttgttacagcacagcaagcaccgaaaactggcgtgcagctggtcgcctatgcgtcggaagaaccgcccttctttcgtagcgatgaaatggggagcgcggtacatgcagcttcgcttgagcgtccagtga

SEQ ID NO: 36008 - DNA, 645 bp, Escherichia coli
atggatgctcatagaactataaaagaacaaaatcaacaaaatggtgctactaaaataacttgctgcggtgttgagttaagtaaagatattcttaaaatatttgcagagaaaattgaaataattgaacaagatacaaagaatagtcaaaacacacttgaacaaatggttgaactggtttactttaatgataatgactgtgctcgggcaagggaattattaaagaaatcaaatggtaacattgcggatgataagattgatgaaataatcgcttgcttatccagtcatcaggggattacatgtttttattattcttccgtacaaggctatcagagctatttaaaaaatacatctcaagatgttagcgagttactctcaaagagtttggatggtgccatttcatcaatatcgggtttaaaaaactcaggaaataccttttttgggactgggaaatatattaaagaaattgattttactataaatgggtttagtcagaagatgtattcgatggcggttaataatgttggaaatgaagttaagcttcagtgttctcgttattttactaccggtagggtcgacgaacaaaactccaaaatcgataaagtcacttttacatttttcggtgccgcaacaactgctgatttatga

SEQ ID NO: 36009 - DNA, 522 bp, Escherichia coli; identical to SEQ ID NO: 35947

SEQ ID NO: 36010 - DNA, 417 bp, Escherichia coli; identical to SEQ ID NO: 35961

SEQ ID NO: 36011 - DNA, 360 bp, Escherichia coli
atgacggtttgcagcaataaagtccgctgtcgcgccacgggtattcatacaatacgaaaacaggtgatgtaccggatttccctttctgtgtcccgtatattcagaagatttaatgatttgtgctgtgttcatcttattatttttaatgactcatcgggatatgtcatatcctgcaagtgttttatttacgtcctgttgtgtttctgtgtcttatatattcacgatgaaaatataaatcagtgttttatatccatgatcttaatttcacaaattaattttaccttatttatttggtttttacttttcatgaaaaatataacttgttttttgaaagatcgtgcaatgtatatttttaagtaa

SEQ ID NO: 36012 - DNA, 1710 bp, Escherichia coli
ttgcactcgaatgtccctcaagctatatcagctccaacatcagccggaaaatcgttcttagttgtggaaatgctcgccaacggaataattagcggcgaattaaattccgccatttatatagcaccaacccgtgctttagtaaatgaaataacacaaaaatttataatcaagactttaccatatcaaaatgaggtcagagttacatccataccaacaattaataacgaatataataagcagatatttgtcttaacacaggaaagacttcaagtattgcttgataattttgaagaaaaaatagacttggtagttattgacgaagcacaatcaatttctgacgaaattaggggaatgatattacaggactgccttgataaaattagcacacaaaaccctaatgcaaaatatgttttcctcgcgcctggtgctgaaggttttgatgatttagcagatattattggaatcgatgcaatccatattgaaaaaacaaatctatctcctgtagttcaaaacaaaattatcgtcaaagttgatccatcaaaagaaaacaacttacaattatcattattagacaattcagacatattaccgatcggagaaatagaatcgacaaggggtttcgccaatgaaaatacaagattggcggctgtcgcattagaattaggaaaaaatgaggggtctttagtttacggaaccggagctgaaaatgcagaagatgtagctaagcaaatatcttctggattacctcttttagaggatgacagtgaattacaagaactctcaaaatttataaaaaaacatgtccacgaggattactctcttgcaaacctcgtattgagaggggttggataccattatggtaaaatgccaagtttattaagagaaacattagaaaaaaatttcacgaataataaactgaagtttttagtttgcacaacaaccctttttcaaggggttaatctgcctgcaaagaatgtttttattgatacacctacacgaggaaacaggggagaaaaattagatccagcatcgctatggaatttcgcagggcgggcaggtagattaggttatgcattttcgggaaatgtttatcttattgactatgatgattgggtaaccaagcctttagattccaaaatagacttcaaaattacttcatctttaaagaaagtaattaatgaagattttgacacagtaatatcacggttagacaaaaataatcattcaggagtgacgccatatagtaatattgatgcagcggcaggtcttttaatctccagagccgcaaaaggagatttgcataattttcttaaaagatcatttcgaactttatctgataaatcaaaacttgaaactattgataatgccacttatatctcattagaatcacttaaaatacctcatgaggttttaactctgaactggacagttgatccatttggacaggaacgattgtacaatagatttatccagaaaataaaggaaggtaaagttgacgaacttatacctcgccatccttcaggtgatgtttacaaaaattatgttggtgtttttagcagaataaataaatacatccttaaccataacacatctaaattttctaactatctaacttcaattgctttgaattggatgaggggtaaatctctgccggagataatctctctctccataaataagaaaaaagaaaaaaatccactaggcctgtaa

SEQ ID NO: 36013 - DNA, 843 bp, Escherichia coli
atgaccctgccctctgaaaaaccagccacagatgtggctgcgcagtgcttcctgaatgcactgattcgtgaaaccacagactggaaactgacagaatacccgccagacgaattgctcatcccgctggatgagcagaaatcgctccatttcagagtggcttatttctccccaacccagcatcaccgctttgcatttcctgcacgtctggtcacggcatcaggcagttatcctgtcgactttaccactctctcccggcttattattgataagctacgccatcaactgtttctgcccgttcccctctgcgaaactttccaccagcgcgtgctggaaagccatgtccatacgcaacaggcaattgatgcccgtcatgactgggccgctctgcgtgaaaaagcgttgaattttggcgaggctgagcaggcgctgctgacaggacacgctttccaccctgcgcctaagtctcatgaaccgtttaaccggcgggaggctgaacgctacctgcctgatatggcaccccacttcccactgcggtggttttcggtggataaaacgcaaatcgccggtgaaagtttgcatctcaaccttcaacagcggctgacgcgatttgccgcagagaatgcgcctcagttactcaacgaattaagtgacaaccaatggctgttcccgttgcacccgtggcagggggaatatcttttgcagcaggggtggtgccaggcacttgttgctaaagggctgattaaagacttaggtgaggccggcacgtcgtggctgccgaccacctcttcccgttccctctactgtgccaccagccgcgatatgatcccaccagccgcgatatga

SEQ ID NO: 36014 - DNA, 480 bp, Escherichia coli; identical to SEQ ID NO: 35963

SEQ ID NO: 36015 - DNA, 549 bp, Escherichia coli
gtggccgtgaaagaaagcaatcaacgatggtgctctgacgggttcgagttccgctgtgataacggagaaaaactgcgagtcacgttcgcgctggactgctgtgaccgtgaggcactgcactgggcagtcactacgggcggcttcgacagtgaaacagtacaggacgtaatgctgggagcggtggaacgccgctttggcaacgagcttccggcgtctccagtagagtggctgacggataatggttcatgctaccgggctaatgaaacacggcagtttgcccggatgttggggcttgaaccgaagaacacggcggtgcggagtccggagagtaacggcatagcagagagcttcgtgaaaacgataaagcgtgactacatcagtgtcatgcccaaaccagacgggttaacggcagcaaagaaccttacagaggcgttcgagcattataacgaatggcatccgcatagtgcactgggttatcgctcgccacgggaatatctgcggcagcaggccagtaatgggttaagtgataacaggtgtctggaaatatag

SEQ ID NO: 36016 - DNA, 933 bp, Escherichia coli
atggcaaacttttttattcgacgaccgatatttgcatgggtgctggccattattctgatgatggcgggtgtactggcgatcctacaattgcccgtcgcccaatacccaaccattgcgccgcctgcagtttctgtttcggcaaactatccgggcgctgatgcgcagactgtgcaggatacggtgacgcaggttatcgaacagaatatgaatggtatcgataacctgatgtatatgtcctccaccagcgattccgccggtagcgtgacaattacccttaccttccagtccgggaccgatccagatatcgcgcaagtgcaggtgcagaacaaactccagctcgccacgccgttgctgccgcaggaggtacagcagcaggggatcagtgttgaaaagtccagtagcagctatttgatggtggcgggctttgtctctgataacccaggcaccacacaggacgatatctcggactatgtggcctctaacgttaaagatacgcttagccgtctgaatggcgtcggtgacgtacaacttttcggcgcacagtatgcgatgcgtatctggttggacgccgatctgctaaacaaatacaaactgacgccggttgatgtgattaaccagttgaaggtacagaacgatcagatcgctgccggacagttgggcggaacgccagcgttaccagggcaacagttgaacgcctcgattattgctcagacgcggttaaaaaatccggaagaattcggcaaagtgaccctgcgcgtaaacagtgacggctcggtggtacgcctgaaagatgtcgcacgggttgaacttggcggtgaaaactataacgttatcgctcgcatcaacggtaaaccggcgcgaatgctctcgataccgcgaaagccattaaggcaaaactggcggaattacagccattcttcccgcagggaatga

SEQ ID NO: 36017 - DNA, 906 bp, Escherichia coli; identical to SEQ ID NO: 35986

SEQ ID NO: 36018 - DNA, 228 bp, Escherichia coli
atgattgatgtcttagggccggagaaacgcagacggcgtactacacaggaaaagatcgctatcgttcagcagagctttgaaccgggaatgacggtctcccttgttgcccggcaacatggtgtggcagccagctatttctctggcgtaagcaataccaggagggaagtcttactgctgtggctgccggagaacaggtcgttcctgcctctgaacttgctgccgccatga

SEQ ID NO: 36019 - DNA, 861 bp, Escherichia coli; identical to SEQ ID NO: 35998

SEQ ID NO: 36020 - DNA, 933 bp, Escherichia coli
atgaatatgaaaagagcatttcaggaatgtagtggtgactatattgccatttgtgaaggtgatgactattggctttcggacgtgaagatactgaaacaattggctgtgatgttaaaaaataaaaattactctatgtgctttaactggattttgttagaatatattaataatggttcatttattccacatcctcaacaagctaatttaaatttaagcagtataaatttccatgatattgtaaaaacgccaattacaggaaacttttcatgttgcttttataaagctgatgtaattagaactataccggatatttactttgaggagaaaggcgctgcagactggctctttaatgtatgcgctgcaaaacagggcgatattggctttatacgggaaatattatctgtttatagaattcacaataaaggacaatggtctgggttagatataataaaacaaaaagagaaaattggcatagcgaaagatacgtttagaagatttttcccagaaatgtatcctgaagatagcagtataggtgatgttatattaccaacaaaaatagatttgagcattaataactcaatgaagtttaatattgatagacttatgatccaggattactatgttgagatctctgggtgggtatttaaagtcggtgaaaactgtcatgcaaatgacaaaataaggatcttattagttgactcaaacggcaatgtgaaaaaatctgctccagcaaaaattatagaaagaccggatgttgatagatacgctaaaaagacctaccctagctataaagaaaatgactatagatgctctggctttaagtctactatacctattgaaaagtatggggaacagttatatattgcagtatacattattagagtcagtggtactaatgacgttgcgatatcaacctcaatttataatttttaa

SEQ ID NO: 36021 - DNA, 279 bp, Escherichia coli
atgacggtctcccttgttgcccggcaacacggtgtggcagccagccagttatttctctggcgcaagcaataccaggagggaagtcttactgctgtggccgcaggagaacaggtcgttcctgcctctgaacttgctgctgccatgaagcagattaaagaactccagcgcctgctcggcaaaaaaacgatggaaaatgaactccttaaagaagccgttgaatacgggcgtgcaaaaaagtggatagcgcacgcgcccttattgcccggggatggggagtaa

SEQ ID NO: 36022 - DNA, 894 bp, Escherichia coli
atgagcgccgtacttcaacgcttcagggaaaaattaccgcacaaaccgtattgtacgaacgatttcacgtacggcgttcgcatctccggcaaagggcgcgcgcttcttgcacggtatatccagcagaaccagccatatgcgcagcactggctggtttttgacgtggaccggatgggagctgcgattgactggagcgaccggaactgtccgcccccaaacatcaccgtaaaaaatccctgtaacgggcatgcgcatctgctctacgcgctctggcttccggtgagaaccgcgccggatgcatcggcttcggcgctcaaatacgctgccgcgattgaacgttcgctgtgtgagaaacttggcgcagatgtgaattacagcgggctgatttgcaaaaatccgttccaccgggaatggcaggtggctgaatggcgggaagatgcctacaccctcgatgaactggcggattatcttgatttgagcgcctcagcgtgccgtagcatcgataaaaactatggcatggggcgaaactgccacctgttcgaaatgacgcgcaaatgggcttacagggcgattcgtcagggctggcctgtattctcacagtggcttgatgccgtgatccagcgtgtcgaaatgtacaacgcatcgcttcccgttccgctttcaccgcctgaatgtcgggccattggcaagagcgttgcgaaatatacacacaggaaattctcaccagagggattttccgcagtacaggctgctcgaggtcgtaagggcggaactaaatccaagcgcgtagccgttcctacatcagcacgttcgctgaagccgtgggaggcattagggatcagtcgagcgacgtactaccgaaaattaaaatgtgatccagatctcgcaaaatga

SEQ ID NO: 36023 - DNA, 513 bp, Escherichia coli
atggcctttatatacgtgttatactgtgcatttgattttgaccagagtgttaaagataactctggctggttatctattttaagtataggagtactaatagttgttatttcagccataataaacacgaggtatcttgaatatgacttatcgtttaaaaataatagaatgaaactgttgagacgtgttcagatctatcttgtcattccgttgtctattgctttactggtgcatcttcaggtaattccactggagatggtttttaggaatattgaaacttcagataagagtattaatttcaaagtgatagctgaactggctttcatgtcatattttatttttattctgacaatacttcccggcctcatttatctaaaaatgaatccacagcataaactttctaaaagaattagttctgcatttgtcgcatccttgatgatattattagttatatcgactcaaataaccgtattaccagtaatttttacccattcagttattaagctctcagggtaa

SEQ ID NO: 36024 - DNA, 210 bp, Escherichia coli; identical to SEQ ID NO: 7061

SEQ ID NO: 36025 - DNA, 747 bp, Escherichia coli
atgaaaaacattgcggcagttggggttcttgaacgtattcgcagacttgcaccacagggggcggttccaccgtaccggacggtggaggagtggcgggaatggcaacttgctgaaggacgaaaacgcagcgaggagattaaccgccagaatcgccagttgcgggtggaaaaaatcctgaatcgttcgggcatccagcctctgcacagcaaatgctcgtttgcaaattatcaggtgcagaacgacgggcaaaaatacgcgctgagccaggccaaatccatagctgacgaactgatgaccgggtgcacgaattttgtgttcagcggtaaaaccggcaccgggaaaaatcaccttgcagcggcgatgggcaaccggctgatggtgaaggggcgcagcgtgattatcgtcaccgtgtctgacgtcatgagcgtgttgcatgacagctacgacaacggcaaatccggggaaaaatttttacaggagctttgcggggttgatttgctggtcctggatgaaataggcgttcagcgggagacgaaaaacgagcaggtggtattgcaccagataattgatcgccggacagcatcactgtgcagtgtcgggatgttaacaaacctgaatcatgccgcaatgagtacgcttcttggtgagaggattatggaccgcatgaccatgaacggtggtcgatgggtgacgtttaactgggatagctggcgtccaaatgtcagcaatatgagggttgtgaagtaa

SEQ ID NO: 36026 - DNA, 438 bp, Escherichia coli
atgcctcatgtatgtgatgaatcgatttcatacttactgggcgaaaaaggtatacttgaagaaatagataagctctacgcattaaatgatcacggaattgataatgacaaagtaggtaacaatgaaattaatgacatcaaagttaacctgtctcatattcttattgattccttagatgatgcaaaggttaaccttacaccggtcatcgattcgattctggagactttttcaaaatccccatatattaatgatgtaagaatactggattggtgttttaataaaagcatgcaatattttgatgatactaaaaagataaagcatgcatgctccgtaataaatcatattaatcttcgcagcgatcagtctaaaatagctgagacattatttttcaatctcgataaagaaccctataaaatagccctgaattacaggggttga

SEQ ID NO: 36027 - DNA, 294 bp, Escherichia coli
atggatataagccccttacttcatgcactttgtgctgtggctgcgcagatactggttggtctttttaccggaaactgggcttacggagcgatagccggttgtacgttcttcattgcgcgtgaacatacccaggcagaatatcgctggattgaaatgttcgggcatggcaagcgaatgaatatgccgtggtggggcggttttgatccgcgtgcttgggatgtggcaagcctgatggattttgctgtgccggtggtggcgtgtctgctggtctgggtatttatccgttcaacataa

SEQ ID NO: 36028 - DNA, 177 bp, Escherichia coli
atgcccgtgccgcacgccgcgctgggcgatgacgtcatcggcaaaatgctgcacgtcgcccatgtcacctttcaacacggcgatttccagacagtcgtcgtgattaatgtgcacatgcagagtagcaaccgagagatcgtggtgatgatgctgggtggcgacaatacggctggctaa

SEQ ID NO: 36029 - DNA, 366 bp, Escherichia coli
atgaagcgcttagctctcttatctcttgtttttatgtcgtatagcgtgcttgcagcgcctgttttgcgctttaagtgcggtgacgataaatttgtaatgtatgtgaatgcctcaatgagtaaacaggcagtcataatgaacgatcagctaacagaaaattcagccactgaccagtatccgtacggtgacttgggggattcggtggtcatcacatttgatgtatggggggcgaatggtgggatgcataaccactacacaactgttttccctaacgattcaaaaactattaaacaaatagttcagattttagacgcagatgatcgcccccgtggtgatgccatctataagacctgcacgaaaatgtag

SEQ ID NO: 36030 - DNA, 747 bp, Escherichia coli
atgagccaatatctgatttttcagcttcatgggccgatggcatcctggggcgtcgatgcccccggtgaagtgcgtcatacccatgaactgccttcgcgctcagcattgctggggctgctggctgccggggtagggattcggcgtgatgataccgaacgcttaaacgcgtttaatcgccactattcactggtggtttgcgccagccgtaacccgcgctgggcacgggattatcacacggtccagatgccaaaagaggtgcgtaaagcgcgttatttcagccgtcgcgaagagttgagcgaccctgatcttctgagcgcgattatctcccggcgcgactactacaccgatgcctggtggatggtggcggtggcaacaacagccgatgcgccttacagcctcgaacagttgcaggaaggtttacgccatccggtttttccgctttatctggggagaaaaagtcatccgctggcgttaccacttgcgccgttactgctcgaaggcaacgcgtctgatgtcttacgtaacgcataccaacagtatcaggatcgtttccacgaactgaaagtctcactcccgaaacttcaggatgaatgctggtgggaaggggagcacgatggcctggtcgcgagcaaaatattacgccgccgggatgttcctttaaatcgtcagcagtggctgtttggggaacgcaccgtcaatcaggggccgtggctcagcaaggagaaaccatgtacctctcaagaataa

SEQ ID NO: 36031 - DNA, 171 bp, Escherichia coli
atgggtttgaaaatgagagctgggagttccccgctggcgcggggaacacttgccgcgaagaccagtgaactggaaatctggccggtttatccccgctggcgcggggaacacactaagcatacatatctgtttttaaacaactttatttcacatcaacaatctaccaactaa

SEQ ID NO: 36032 - DNA, 468 bp, Escherichia coli
gtgccttaccgccaccttttcccatacagccttcccctgaataaattaaccgccacttgccattccgtacagaagtcggatatccttcgcccgaaaagcatgaaacacatttctgccatgctaaagagaaaccccggtatcagcagataccggggttttctttcatgcccaccgataatcctgttggttaaaaccggtaatggcataaaaattctgaatatcttcacattttcacaaactgactgtggcgcgtataatttcgctgcgttagtgtttttttgcccgagtaacaaaaacaactccttaactctaatctttgtctgtccccgcagctccgcgatcactgcgggatttttttattctttttacccctgccgcccgataaccacgacctttccgcccccgccttcatcacgggtactgatgtcctgggatatacggcgggagccaaccagcatttccccgtaa

SEQ ID NO: 36033 - DNA, 927 bp, Escherichia coli
atgagtgaaaaagaacatgacatgacaaacgacggtggagagagcgtaacgtataccctgcggaacatccccgctgacaccgaccgggtgatcaccgacctggcaagccacgcccgtaagccaaaggcgacgtttctgcgtgagttcctggaagacagcttccgcgacgtcatcgacagctttgccctgaagaacccgctcatcgcctccctggatgaggagctggccagttatctggacgctaaggtcatggagcagcgctaccagagccattttatcacccgctggaatcaggaataccagaagctgctggggatctcgacggaagaggagctccgccggttggtactgaacaacacccccttcctgcaggtccgtgccgaccaggtgcttaaggggtggaaaaatatcccgcgcgggatctccctgaccttctccctgtttgccgagatcgccggccgggacagggaaaccatcgaccaggcctggaaaaatatcttctactcgcaactgagggaaaaaaaacaccgcttttaccaagatatcgaggccatccgcgccctgaaaaaactgcctgccctcaccggcgacagctggacgcgggatggcatcacggtgcgtatctaccgcccggaaaattacgcccgcggcgcatggcgcgttacactgagcctcccggaaaattacgccacccagatgtggaacatcccgttcccggagcttgaataccgcctctttaccgccgatccgggctacagcgccctgatcagcgccgaacccgacaggtgggacaaggccttccgttttgtggacggggtgtgtgagcttcacctttacaccaacggtgtggaagaagatcacaatcccaccccgctcggggatgtcgctcaggcgctgatcaacgtggtggaagaaaacctgctgtaa

SEQ ID NO: 36034 - DNA, 255 bp, Escherichia coli
atgaaaggacgacagagccgctatgttaccggcggagagagtttcgcggagattgcccgtctcccttcaggggcggtggtgaggctctgtctgaacaccggtcttgaggatgcgctgcgggaggcctccaaatcgctcaagtcagccttcacccgttccgggcgaaaatgccggctgtcagcgggtacggcgcaggggccgtttaccggacgccggcagggcgtggccacacatctcttcgtctcggtactctga

SEQ ID NO: 36035 - DNA, 345 bp, Escherichia coli
atgaaaaacttgttagacaccgagggaacggttctattcccattccagactgaaatccattttatttggacgattttctccaccgttaaacgcctggttatcggaaccagggaccatatttgccagaagcaatactggagcgcctgtctctgtattttgcttcttatggcctatgtgggtctctgtgctgcggtggtctggtttgtagtgccctggctgaaggcctttatagtgtcgaaatttgcggtttcggcactatgggtcacgccagtaaagcgcggactactctggggtatcggtaaagtggttaccgccacttgccgaagatttactctgctaaagtaa

SEQ ID NO: 36036 - DNA, 1002 bp, Escherichia coli
atggccgatccattcaatctgcagaccgatgtggtcaggcagcatacggttccccgttttttactgaagcatttcagtacgccgggaaagggtaagcggcagcgcttatacgcctttgacaaggctgccgggcgcgcctatgccaccacgccggatgacgcgaccgtccgcaacacgttctacaacctcgataatcacccggaccgtctgagtcttgaaccactgctggggatttacgagcaccacgcggcaccggtaattgcagccctgctggcgcacagggatattcgcaggctgacagatgatgaacgctacaggctggccgtgtttgttgccgtgcagcgcgcacgaaccttcggtgaactggagcgtatctcaggcatgatttcggtgcttaccgataagatggaggccatcggctcgactaaagagcaggccatggaaaccctgggcctgtcgtccgggggcgataccaaggatatttttctgcggcagctcgtccagcaggtgtcacatattgatctcctgctgaaaaaggactggtaccttctggaaaccaagccagaacgtccgttttacgtatcagacaatcccgtagtgcttaagaacagcaatgacttcggtccgtacggtaatcttggtctggccgttcgcgggatacagatttacctccccctgtcatcgacgctgatgctggccatgtattgcccctccatccgtgaacagatggttcgtcaaaagcagcatcttcaacatctgctcgccagggcgccgcatcttatcccccgtcacattcggccttttgaaagactggaacatatccggaggtatacggactatcttcttatgccgcttaccccggagcatgtcacgcattacaattccctgcaggtggagttcgcggagcagtacgtgttctgcggtgaaaaggatttctctctggttgagagaatgctggccgatagtgaacgctaccggactggcccgcggtttacgttttag

SEQ ID NO: 36037 - DNA, 795 bp, Escherichia coli
gtgaagtcactattattagccatttttcgatatcgcggctttattgttgacagtattaagcgggattttcagtcccgttaccaggctagttttttaggcgctgcctggttagtacttcaaccaattgccatgatatctgtatatacgctgattttttcagaactcatgaaagcgaaattctccggagtcagtggtcaatatgcttatagtatatatctctgttccggtgttttgacatgggggcttttttcagaaactcttaataacttggttaatgtttttattagtaatgccaatgttttaaaaaaaataaattttcccaaaatatgtttgccaataattgtctcggtttcagcttttcttaattttttaattatttttacgctatttgttatttttctgattttaacccacaacttccccggatggattatattagcgataattcctgttttgatcatacaaatgatctttactgttgggttaggtgtattgctgggcgtagtgaatgtatttgttcgtgatgtagggcaatttgtaatcatactaacgcaattttggttctggtttacccctatagtatacgtaaggaacattctgcctgattggtccaggggattaatcgatttgaacccaatggctgttttgatcgaagcatatcagaaaatcattctcttccagcagcaacctgattggtataagttactccctgttgcaattatcgcaataataatattcatgttttcatggtctttatttagaaaacatgctgccgatattgttgatgagatttga

SEQ ID NO: 36038 - DNA, 771 bp, Escherichia coli
atgttgtggaataaacatctatcagtttataaaaatattagatggttccctacacaaaattcaggacctaaatggtcagaaatttcgtatttatcaaacaaatataatcaaaatactgatgctatttactatgcacgtgtagacgaaaaaaaacttagtgcgacaatgaagaaagtttctctccagttattgtttggtaattatgaatttaatactgcttatttaatggataaggattattcaagtttaattaaattaaaaaaaggtgatgcgatttataaatataaagatctatatatattaatgcctggtaataattcttgtgatgactgtgatattgttaatacctctaatgtgcaacaaagagattttgatttttcaatcggtggtataggcaggatattattaggggatggttggtattctcctgaagcatggggggtatggagccaaggtgatgtctctgagatttttataccaggcgataccaaaaatgttgagatatatttcgatggctttttggttccaggcaaacgagagcactttaatgtttctttttattgtgggcaagaaaaaatatcacaactggatgtaacccctaaatcaactcgggaagtcttattaaacgtaagtggatgcatcaaaaacgaagataatgctattaaacttacagtgaggaatgataacccaggtattcctaaaatgctttttcctaataatgaagattcaagattgattgcgtttggcttgaaaaaaatcattatgcattaa

SEQ ID NO: 36039 - DNA, 324 bp, Escherichia coli
ttggctttgacatatcaggggctattccatttcatcgtccaacaaaatgggtgcagtacaaacctgtatcaatccagtgaaggctatctgctctactcgaaaggcaatggctgtccaaaagatattacatcaggcgggtgctacctgatcggtaataaagatctcgatccggaaatcagtgtcaataaagaaattgggctggagttcacctgggaagattaccacgcaagtgtgacctacttccgcaatgattaccagaataagatcgtggccggggataacgttatcgggcaaatcgcttcaggcgcatatatcctcaagtag

SEQ ID NO: 36040 - DNA, 924 bp, Escherichia coli; identical to SEQ ID NO: 31716

SEQ ID NO: 36041 - DNA, 570 bp, Escherichia coli
atgcagccggtactccgtccgccgtcctgccgcatccgtctgcgccttcagcctccccgcctcatcatactcgctgcgggtgatgctcccgtcggcatgctccttcttcaccacacgcttcaggccacccccgccttccgtgtacagcacctcccgccggttcaggctgtccgtgatggtcacacggtcctgcccgtactcaaagcggtagtccagcccctccgggttgacctgctccgtcacccgcccggtatcatcataccggtagcggctctccggcctccctgcataatggtgcgccaccatccgcccggcgtgctccgcatcataagtaaacccgcgcacctgcgtcccgctgcggtcatacaccgcccgcagttctccgctggccgtgtacgtgtagcgcgccagcggcgcagtcggcagttcatccgggtatgccgggtcgtgtgtcagccataccgcctccagccggataccgttatcggcaccgtactctgtaccggtgggcagcgtgtcggggaaaaactgagaagaggaaacagaacggggactggccggagaagataa

SEQ ID NO: 36042 - DNA, 738 bp, Escherichia coli
atgggactgaataaaatacataacatatcaatttgcaatgatggactcgattatggaataaatatagacaatcatttctatattagaaatcatatcattagtaggcctagcattagagactctgacgatgaagagttagttgcaaatatcttgggctatatatttttagatgataagccaacatcaggatcaacatcgctcgatacattttacggtgaaggttcgacgagtcatgcaatccatacacgaactcaattagagaattacattcagacaaatggtgcagataaaattgtcaataattacctcttcgtttatgagatgattcaaaaattatttgatgcaaataatttgaactttagatcacacattctgggcaatgcatcttcatctcaagaatgtcctcgttactatcaagctgtttttcttgctttgtatgaattaatcataaatgaaaacatgcaacttgacgatgaacagaaatttatcgctcagttaggagacagtgtacaacgttcaatggtgcaaaccgaagggggccgttgggcagctagcgctcgtcagaaaagtgtcgaagatttatgtgctttaatcagacgatattttaaagaatcagaaaataaatttatcaatcatgcttggcaaacactgataagaactctacttaataactcaagaacagaacaaccaaattatgattttaaacagggaggtgatgctgccaacttactgatttag

SEQ ID NO: 36043 - DNA, 237 bp, Escherichia coli; identical to SEQ ID NO: 20817

SEQ ID NO: 36044 - DNA, 1449 bp, Escherichia coli
atgtttgatcccagaaatccggatgcaatatgcactttaatatgtaaggcattaacagatgaagagtattactcggcattaaaagagaatgctcggatccaggcacaaaaattttcgtggaatatttctgccgagcgagcaattgcagctatggagaaattattagacagtcagtcgcagagcacaaatcgaacagatattcacaataatatagtgaatatatcagagataactgagttaacacctaatgagcaattaagagcagcttgggccattgccagaaataatttcactcagcataaacgcaaaattttagttgatatctcggtgcttgtgcaccatgatgcaaaaacagggattcaaagggtttctcgtagtatattaactcaattacgtaaaattgacttgcatggatatgaagtctatcccgtttactatacacatggcgaatattatcgctatgccaatcgttttacagctgataactttgactccggtttaaaaagtgataatccggtattatttacaaaagacgatatattacttgtcgcggatttaacggcacatttattcccggatattattcctgaaattaattacatacgaaaggcaggggctaaggcagtatttattgtatatgatatactaccaattcttcatcctgaatggtgtgcggaaagtatcaggcaagcatttcctctatggttgaaaggcttagtgagctgcgctgatcagctaatttgtatttctgaaagtgtagctaatgaagtaagaaactggattgatgcacaggagacagatgttaacccttacctgatggtagatagtttccatttgggtgcagattttgaaggtagtttgccatctaagggaatgcctgagacagccacggcttttcttgcaggtatgagctcagttcctactttccttatggtagggacccttgaaccgcgaaaaggtcattctcaaacacttgcagcatttaagcaactttggtcggaaggatatgattttcaattatgtatagttggaaaacagggttggaatgttgagagtttaatctctgaaattgaaaatagcgatgaacttaataataagttgttctggctacaaaatatcagtgatgaatatttggatgctatatatgctaatgcctgcgctctaatttttgcatccaatggtgaaggatttggtcttccgttaatagaagcggctcaaaagaatattcctttaattattcgtgatattcctgtatttaaagaaattgcagagtctaacgctttctattttcatgggcaaaaacctgatgatcttaagaatgcaattattgaatggcataaactttacactaaccacactcatcctacatccgcaggtataaaatggcagacatggcggcagagtgtagaacagttattaaataaacttcctattactaaagagtgctaa

SEQ ID NO: 36045 - DNA, 891 bp, Escherichia coli
atgaagtccgcaattattactggtatcactggacaagatggtgcttatcttgctgaacttttgcttggtaaagggtataaagtatatggtacataccgccgtaccagctctgttaatttctggcgaattgaagaactaggtatcaaaaacaatcccaatttgcatcttgttgaatatgatctgacagatctttctgccagtattcgtctaatgcaaacaacgaatgctacggaagtatacaaccttgctgcacaaagttttgtcggtgtttcttttgaccaaccggtcacaactgctgaaatcacaggtcttggtgcagtaaacctgcttgaagcaattcgaattgttaacccgcagatccgttactaccaggcttcaacttctgaaatgtttgggcttgtacaagccgttccgcaaaaagaagacacaccattctatccacgcagtccgtatggtgttgctaaactgtatgctcactggatgactgtaaactaccgtgagagctataacatttttgcttccagcggtatcctgtttaaccatgaatctcccttacgtggtcaggaatttgtaacacgcaaaattacagattccgtagcaaaaattaagcttggtaagcaagatgttctggaactagggaacatggatgccaagcgtgactggggttatgcaaaagaatatgttgaaggtatgtggcgtatgctgcaggctgataagcctgatacctttgttctggcaacaaatcgaaccgagaccgttcgtgactttgtcagcatggctttcaaagctgctgggtttacgctgcgctttgaaggaaaagatgagaatgaagtaggtattgatgtcgcgactggtaaaactttggtccgcgtaaatccgttgatctgttga

SEQ ID NO: 36046 - DNA, 903 bp, Escherichia coli
atgactgatgccggaaaacatgccttaattacagggatcaatgggtttaccggccgttatgtggcagcggaactttccgctgccggatatcgcgttttcgggctaggagcagggtctgtcccttatgacggacctgattattatcaggtagatctaatggatgttacggcattaaccaatgtcgttacctcgataaaacccaatgtagtcgtacacctggccgcaatcgcttttgtaggtcacggtgatgcagatgcattttataatatcaacttgcttggcacccgtaatttattacaggcacttagtcactgtgataactcattagatgcggtacttcttgccagtagtgcgaatgtttatggaaacggtacagccggaaagttaagtgaaacaacggcacctaatccggcaaatgactatgcagttagtaaattggcgatggaatatatggctcgcctctggatggacaaactaccggtatttattaccaggccttttaactatacaggtgttggtcaggctgataattttttattgcctaaaattgttaaacattttaaagccaaagctccggtgattgagcttggtaatattgatgtgtggagagatttcacagatgttcgtgcgttaagtcaggcttatgtgaagctacttcaggcaaaacccactggagaagtgataaacatttgctcagggcgcacatactcactaagaaaaattattgaattatgtgaaaaaattaccggtcatcacctcgaaattcaggttaaccaagcctttgtacgtgctaatgaagttaaaacattaagtggagataccactaagcttcagtcttttatacctgagtgggatgtcccaccccttgaagacaccttacgttggatgttggaaagtgactaa

SEQ ID NO: 36047 - DNA, 1137 bp, Escherichia coli
atgaaagtaatatttggaactgatgctattaaattcccattaactggtatcggccgctatgcgtttgaattagctaatcatttagctggcagcccggaaatatccgagctgctttatttacgtggaaaaacgctcagtactcatattcctattgcaaaagaggcacattcttctgctgagggtattaagcattttttgaaaaaaaaccgtttggcatctgagttctaccgcattaccgcaccatggtttaaaacaaatgttcttagaaaacataaagatgcaatatatcatgggccaaatttttatttaccccctaaagttgggcgatgcgtagtcacttttcatgatttatctgtatttaccttaccgcaatgtcatccgcctgaacgggttagatatatgcgtaaagagttactgcaaaccgttagaagggctgaaatttttttaacagattctgattttacgagaagtgaattgattaattactttaatctgccagaatcacaagtttataccgcaaaactggcatgtagcagggattatcgaccttattcctactttgaagctactgaaactttacgcaaatacaatcttagttttaaaaattatactttatttattggatctattgagcctcgaaaaaatattagtactcttttaaccgcatacaaccgtctacctttatctctaagacaaagggtgcctctggttataagtggctttaaaggttggaatagtgatgatctccataagcgtttcatgaagggcgagcgagaagggtggttacgttatctcggatttaccccttatgcagatctacctgctttgtatgcaggtgctacaacattcattttcccgtcaatttatgagggttttggtcttccagtacttgaggctatggcctctggtacacctgttgtttgttcaaacagttcctcactaccggaagtagttggggatgtcgctttgatgtgtgatgctttggatgtcgagacgcttacaactttgataataaaaagtcttgaagatgacccctggagactgtgggcaggggaacatggaatacaacgtgccagtcaattttcttgggaaaggtgtgctagcgaaacaatcactgcatataaacaggtaatataa

SEQ ID NO: 36048 - DNA, 729 bp, Escherichia coli; identical to SEQ ID NO: 31717

SEQ ID NO: 36049 - DNA, 642 bp, Escherichia coli
ttggttgattctagaaacaaaagacttaaagaagtaataactagagaaaacattgatgaaatatttaaactcacctataccaatgaaattggagaggaaagagactttaatgaaataaaaagcagtgagtattttgacttgcttaaataccttattcgtgatggttatattgatgaaacctataccgactatatgacctatttttatgaaaatagcctgagtcgaattgataagatgtttttacgcagcattaccgatcaaaaaggcaaagagttcacttatcaactcaagaaccccaagctggtcgttgcccgccttcgagaagtggattttgaacaggaagaggcgcttaattttgatttattagcttatctgcttcaaacgccagcccaggtaaacttaataaaacgtttattcaaacaactaagaaaagatagaagagttgagtttattcgtggttactttgaaactgagagggctcagcctgtcttcattaatcgattaaatacacagtggcctgagtttttttcttatgcgctgacagagagtgaattttctgctgattgggttaaactctactctataggcacgttttattattctgccaatgagtcatccagtccatcaacatgttcaaaataa

SEQ ID NO: 36050 - DNA, 1224 bp, Escherichia coli
ttggttgattctagaaacaaaagacttaaagaagtaataactagagaaaacattgatgaaatatttaaactcacctataccaatgaaattggagaggaaagagactttaatgaaataaaaagcagtgagtattttgacttgcttaaataccttattcgtgatggttatattgatgaaacctataccgactatatgacctatttttatgaaaatagcctgagtcgaattgataagatgtttttacgcagcattaccgatcaaaaaggcaaagagttcacttatcaactcaagaaccccaagctggtcgttgcccgccttcgagaagtggattttgaacaggaagaggcgcttaattttgatttattagcttatctgcttcaaacgccagcccaggtaaacttaataaaacgtttattcaaacaactaagaaaagatagaagagttgagtttattcgtggttactttgaaactgagagggctcagcctgtcttcattaatcgattaaatacacagtggcctgagtttttttcttatgcgctgacagagagtgaattttctgctgattgggttaaactctactctataggcacgttttattattctgccaatgacgccatcgaggccattaatattgatgattgtctgactgattacatctctgattcggcaggttatttagcaatatcagaaccgaaggttgacaaattaattagtggttttaagttgcttaacgtttcttttgtcagtattaaatttgaaaacgcaaataaagtactctttgatgcggtttaccagcattcactttatgatattaatttttccaacctgaccttaatgctgagtaaggtttacacgcttaatagtgaagatgatattcgccataagaactatacactagtgatgtcacaacctgattctcccttggctagttatgttaataaccatattagggactatctggatatggttttatctagttgtgatggttcaatcgtggatgatgaatccattgttttatccgttcttaataatgagggaatatctgatgaacaaaaaggccagtatataaacgctttgcaaactttcgtgacatctctgagtgaggttgagagcgaatctttatggtcatctttgttggataaagatagagcagtgtgctctgaggaaaatattgtctcttattttgaacatgttgatggactggatgactcattggcagaataa

SEQ ID NO: 36051 - DNA, 288 bp, Escherichia coli
atgatactttggtctgtgaaaaaagaaaccgatatccggcgtggaaggcattgtgttttcctgatgcatgttcacctggtctttgtcaccaaataccgacgtcagatttttgaccatgacgcgacagaaaaactacgcacttacttttcaaaggtatgtgctgattttgaagctgaactggttgaaatggatggcgaaccagatcacgtccatttgttaattaactatcctcccaaactggcgatatccagtctggtaaacagcctcaaaggcgtatcgggtaggtga

SEQ ID NO: 36052 - DNA, 1149 bp, Escherichia coli
atgaggcgcttcgcaggcgcatgtcgtttcgttttcaatcgtgctctggcgcttcagaatgagaatcatgaggccggtaataaatacatcccttacgggaaaatggcttcctggctggttgagtggaaaaacgccactgaaacgcaatggcttaaagattcgccctcacagccattgcaacagtcactgaaagaccttgagcgggcttacaaaaacttcttccagaagcgggctgcttttccccgattcaaaaagcggggacagaatgatgcattccgctacccgcagggcgttaagctcgatcaggaaaacagccgtatttttctgccgaaacttggctggatgcgctaccggaatagccgtcaggtcacgggtgttgtgaaaaatgtcactgtctgccagtcctgcggtaagtggtacatcagtattcagacagaaagtgaagtatcaactccggttcacccttcagcatcaatggtcgggctggatgctggcgtggctaaactcgccacgctgtcagatggcacagtctttgagcctgtaaacagttttcagaaaaaccagaagaagctggcgagacttcagcgacagttaagccgcaaggtcaaattcagcaacaactggcagaagcagaaacgcaaaatacagcgactgcattcctgtatcgcaaatatccgcagggactaccttcataaagtcacaacgaccgtcagcaaaaaccacgcaatgatagtcattgaggatttgaaggtcagtaacatgtcaaagtcagcagcgggtacggtcagccagccgcggcgcaatgtccgggcaaaatcaggtttaaaccgttcgatactggatcagggcaggtatgaaatgcgccgccagcttgagtacaagcagctctggcgtggcggtcaggtgcttgctgttccgccagcgtacacaagccagcgttgcgcgtgctgtggtcatacagcgaaagaaaatcgcctgtcacaaagtaaattcagatgccaggtatgtggatatacagcgaacgccgatgtaaatggcgctcgtaacattttagcggcggggcacgccgttcttgcctgtggagagatggtgcagtcaggccgcccgttgaagcaggaacccaccgaaatgattcaggcgacagcctga

SEQ ID NO: 36053 - DNA, 156 bp, Escherichia coli
atggtctttgaagtgacttctctagtttttgatattgttctgttattattgcaagtcggatgctgcaatcacgtgaagatgcgtcgttccatttttcatgtccaaaaattgtttgataaatttctggcaagtcagatattaaagactctaaattag

SEQ ID NO: 36054 - DNA, 459 bp, Escherichia coli; identical to SEQ ID NO: 35145

SEQ ID NO: 36055 - DNA, 135 bp, Escherichia coli; identical to SEQ ID NO: 10665

SEQ ID NO: 36056 - DNA, 135 bp, Escherichia coli; identical to SEQ ID NO: 10665

SEQ ID NO: 36057 - DNA, 528 bp, Escherichia coli
atggactctatagtggtaattcgtaacaaccattacgatgttttgtccgcgcaagttatatcatccaccgataacatttatgatgagttgaggctgcttctttcagaagtcgctatacgaggtaataatgattattaccgaatgcaattggaagagttaattcatttgtttgatggttgtgttaaagagaagcatcttcaagatgaagtaaatgagtttttgagtaaactctatccgatcgttttagagattagaaataatcttcagaaaatgaatattgaagatttaacaactacttgtgatgtgattatttcgaggcttcctacaggtgaattaaattatattcttcagaagatgttttcttgtctccactcagatagggatgatccattgaaggattattactttgatactttaaataaatatactgaaggctggtataatttttgctctgcagataatgatagtacaaccttgctaaaacttagaatgatgctgtatcggtatcatcagcaaaaacttgattaa

SEQ ID NO: 36058 - DNA, 849 bp, Escherichia coli
atgaaaaaatggaccctatttttcgcgagcctgatgctgcttgtcctgaatgttgtcggcacacccaagagttatgctggagataaacttatgagttcaagtttcgacagtgtgagaatttattatgcgatggacacgataacagggatagcttcgtctattgttctcaatgttacggtggtaacaccaggggaggttgcatatggaaaatatagttttcttgcgcgtaagggggatacgcttccgcgtatttcctggacggggtcgggcccggcaccaactctggttataacggattatgatacgattaataattcaaattgccccggtattgatacggatattttccgttgtgcatatatgaccttaaagatcaccgttgcatctgataattatggttgcccgtggatcgcgtccttttattcatatacaaacttatctggatttggaagctacacgagcccgactgtgcataactcaatatgcccaacgataccggtcgcctcctatgatatctcctggagtgaaaattatgtcagtcataataaagcgctacagctacagtccacggggtcgacaattaccaccacgctttcgacctacctgatggaaaacggcaaactctgtgacggcagcgtttttgatagtagaggtgcatactgccgtgcggtatcagaactgttaacctttacctcttatggctgcgacaaatcaacggtaacggtgacccccacacgtcatccggtaaccgataaagagttacatgatatcgttgtgaaggtgaataccagcagtcggcaaccgattgattctacgtgtcgttttcagtatgtattgaatgagttgtag

SEQ ID NO: 36059 - DNA, 552 bp, Escherichia coli
atgaaaaagaaaacaacacttagcgaggaggaccaggcgctgtttcgccagttgatggcggggactcgcaagattaagcaggacacgattgtccaccgaccgcagcgtaagaaaatcagcgaagtgccggtgaaacggttgattcaggagcaggccgatgccagccattatttttccgatgaatttcagccgttattgaataccgaaggtccggtgaaatatgttcgcccggatgtaagccattttgaggcgaagaagttacgccgtggcgattattcaccggagctgtttttggatttgcacggtttgacgcagctgcaagccaagcaggagttaggcgcattgattgccgcctgtcgccgcgaacatgtgttttgtgcctgcgtgatgcatggtcatgggaagcatattttgaagcagcaaacgccgctgtggctggcgcaacatccgcatgtgatggcatttcaccaggcaccaaaagagtacggtggtgatgcggcattgctggtgttgattgaagtggatgagtggttgccgccggaattaccgtga

SEQ ID NO: 36060 - DNA, 933 bp, Escherichia coli
gtggataaaattttcgttgatgaagcagtaaatgagctgcaaaccattcaggacatgttgcgctggtcggtgagccgcttcagcgcggcgaatatctggtacggccacggcactgacaacccgtgggatgaagccgtacagctggtgttgccttcactctacctgccgctggatatcccggaagatatgcgcaccgcgcgtctgacctccagcgaaaaacaccgtattgttgaacgcgtgatccgccgcgtcaatgaacgcattccggtggcttacctgactaacaaagcgtggttctgcggtcatgaattttacgtcgatgaacgcgtgctggtgccgcgctcgccgattggtgaactgatcaacaataaatttgccggacttatcagcaagcaaccgcagcatattttagatatgtgtaccggtagcggctgcatcgccattgcctgtgcttatgccttcccggatgcggaagttgacgcggtggatatctctcccgacgcgctggcggttgctgaacagaacatcgaagaacacggtctgatccacaacgtcattccgattcgctctgatctgttccgtgatttaccgaaagtgcagtacgacctgattgtcactaacccgccgtatgtcgatgcggaagatatgtccgacctgccaaacgaataccgtcacgagccggaactgggcctggcatctggcaccgacggcttgaaactgacgcgtcgcattctcggaaacgcggcagattacctcgctgatgatggcgtgctgatttgtgaagtgggcaacagcatggtacatcttatggaacaatatccggatgttccgttcacctggctggagtttgataacggcggcgatggtgtgtttatgctcactaaagagcagctgctggcggcccgtgaacatttcgcgatttataaagattaa

SEQ ID NO: 36061 - DNA, 1086 bp, Escherichia coli
atggctggaaacacaattggacaactctttcgcgtaaccaccttcggcgaatcgcacgggctggcgctcggctgcatcgtcgatggtgttccgccaggcattccgctgacggaagcggacctgcaacatgaccttgatcgtcgtcgccctgggacatcgcgctataccacccagcgccgcgagccggatcaggtcaaaatactctccggtgtttttgaaggtgttactaccggcaccagcattggcttgttgatcgaaaataccgaccagcgttctcaggattacagcgccattaaagacgttttccgtccaggccatgccgattacacctacgaacaaaaatacggcctgcgcgattatcgcggcggcgggcgctcttccgcccgcgaaaccgccatgcgcgtggcggcaggggcgattgcaaaaaaatatctcgccgagaaatttggcattgagattcgcggctgcctgacccagatgggtgacattccgctggaaatcaaagactggtcgcaggtcgagcaaaatccgtttttctgcccggacccggacaaaatcgacgcgttagatgcactgatgcgcgcgctgaaaaaagagggcgactccatcggcgcgaaagtcaccgttgttgccagtggcgtccccgccggacttggcgagccggtctttgatcgcctggatgccgacatcgcccatgcgctgatgagcatcaacgcggtgaaaggcgtagaaattggtgatggttttgacgtggtagcgctgcgtggcagccagaaccgcgacgaaatcaccaaagacggtttccagagcaaccatgcgggcggcattcttggcggtatcagcagcgggcagcaaatcattgcccatatggcgctgaagccaacctccagcattaccgtgccagggcgtaccattaaccgctttggcgaagaagttgagatgatcaccaaaggccgtcacgatccttgtgtcgggatccgtgcggtgccgatcgcagaagcgatgctggcgatcgttttaatggatcacctgttacggcaacgggcgcaaaatgccgatgtgaagactgatattccacgctggtaa

SEQ ID NO: 36062 - DNA, 825 bp, Escherichia coli
atgaacaaaaccgcgattgcgctactggccctgcttgccagtagcgccagcctggcagcgacgccgtggcaaaaaataacccaacctgtgccgggtagcgcacaatcgataggcagtttttctaatggctgtatcgtcggcgctgacacgctgccgatacagtccgaacattatcaggtcatgcgtaccgatcagcgccgctatttcggacacccggatctggtgatgtttatccagcgtctgagtagccaggtgagcaatctgggcttgggcacggtgctgattggcgatatggggatgcctgctggtggtcgtttcaacggcggtcacgccagccaccagaccggactggatgttgatatcttcctgcaactgccaaaaacacgctggacctccgcgcagctcttgcgcccgcaagcgttagatttagtttcccgcgacggtaaacacgttgtcccgacgctgtggaagccggaaattttcagcttgatcaaactcgccgcccaggacaaagacgtcacgcgcatttttgttaatccggcgattaaacaacaactttgccttgatgcgggcaccgatcgcgactggttgcgcaaagtgcgaccctggttccagcatcgcgcgcatatgcatgtacgattacgttgtcctgccgatagtctggagtgtgaagatcaacctttaccgccaccgggcgatggttgcggggcagaactgcaaagctggtttgaacctccaaaaccgggaacaacaaagcctgagaagaagacaccgcctccgttgccgccttcctgccaggcgctactggatgagcacgtgatctaa

SEQ ID NO: 36063 - DNA, 810 bp, Escherichia coli
atggaaacgtttaatagcctgtttatggtttccccgctgttgctgggagttctcttttttgtcgccatgctggcgggatttatcgactcgattgccggtggcggtgggttactcaccattccggcattgatggcagcggggatgtctcccgctaatgcgctggcaaccaataaactgcaagcctgcggcggctctatttccgccactatctactttattcgccgcaaagtggttagtttaagcgatcagaaactcaatattgccatgacctttgtcggctcaatgagcggcgcactgttggtacagtacgttcaggctgatgtcttacggcagattttgcccattctggtgatttgtatcggcctctatttcttgctgatgccaaagctgggtgaagaagatcgccagcgccggatgtacggtttacccttcgcgttaattgccggtggctgcgtcggtttttatgacggattctttggtccggcagccggatcgttttacgcgctggcctttgttacgctgtgcggattcaacctcgccaaagccacggctcacgccaaattactcaacgcaacgtcaaatatcggcggtttactgctgtttattctcggtggcaaagtgatttgggcgacaggattcgtgatgctggtggggcagttcctcggcgcgcgcatgggttcacgactggtgttgagcaaaggacaaaagctgatccgcccgatgattgttattgtctcagcggtgatgagtgccaaattactttacgatagccacggacaggagatcctccactggttggggatgaactaa

SEQ ID NO: 36064 - DNA, 549 bp, Escherichia coli
atgaacagtacacaccactatgagcagttgattgaaatttttaatagctgctttgccgatgattttaatacccgtctgattaaaggcgacgacgaaccgatctatcttcctgctgatgcggaagtaccgtataaccgaatcgtctttgctcatggcttttatgccagcgcaattcatgagatttcgcactggtgtattgccgggaaagcgcgccgtgagctggttgatttcggctactggtattgtcccgacggacgcgatgcccaaacgcaaagccagtttgaagatgttgaagtgaagccgcaggcgctggactggttgttctgtgtggcggcgggatatccgtttaacgtcagttgcgacaatctggaaggcgacttcgaaccggatcgtgtggtgtttcaacggcgggtacatgcacaggtgatggattatctggaaaacggcattcctgaacgcccggcacgcttcattaaagcattacaaaattattatcacacgccggaacttacggcggaacagttcccgtggccggaagcgctcaactaa

SEQ ID NO: 36065 - DNA, 279 bp, Escherichia coli
atgatcgcggagtttgaatcacgcattctggcattaatcgacggtatggttgaccatgccagtgatgatgagttgtttgccagtgggtatttgcgtggccacctgacattagccatcgcagaactggaaagtggtgatgaccactccgcccaggcggtacatacaaccgttagccagagtctggaaaaagccattggtgccggtgaattgtcgccgcgtgaccaggcgctggtgaccgatatgtgggaaaacctgtttcagcaggcgtcacagcagtaa

SEQ ID NO: 36066 - DNA, 2007 bp, Escherichia coli
gtgaaacacaacgccatacaacctgccaacctcgaatttaatgctgagggtacacctgtttcccgagattttgacgatgtctatttttccaacgataacggactggaagagacacgctatgtttttctcggaggtaaccaattagaggcacgctttcctgagcatccacatcctctgtttgtggtagcagagagcggcttcggcaccggattaaacttcctgacgctatggcaggcatttgttcagtttcgcgaagcacatccgcaagcgcaattacaacgcttacatttcatcagttttgagaaatttcccctcacccgtgcggatttagccttagcgcatcaacactggccggaactggctccgtgggcagaacaacttcaggcgcagtggccaatgcccttgcccggttgccatcgtttattactcgatgaaggccgcgtgacgctggatttatggtttggcgatattaatgaactgaccagcaaactggacgattcgctaaatcaaaaagtagatgcctggtttctggacggctttgcgccagcgaaaaatccggatatgtggacgcaaaatctgtttaacgccatggcaaggttggcgcgtccgggcggcacgctggcgacatttacgtctgccggttttgtccgccgcggtttgcaggacgccggattcacgatgcaaaaacgtaagggctttgggcgcaaacgggaaatgctttgtggggtgatggaacagacattacccctcccctgctccacgccgtggtttaaccgtacgggcagcagcaaacgggaagtggcgattatcggcggcggtattgccagcgcgttgttgtcgctggcgctattacgtcgcggctggcaggtaacgctttattgcgcggatgaagcccccgcgctgggtgcttccggcaatcgccagggggcgctgtatccgctcttaagtaaacacgatgaggcgttgaaccgctttttctctaatgcgtttacttttgctcgtcggctttacgaccaattacccgttaaatttgatcatgactggtgcggcgtcacgcagttaggctgggatgagaaaagccagcataaaatcgcacagatgctgtcgatggatttacccacagaactggctgttgcggtcggggcgaatgaggttgaaggcgttacaggtgtagtaacaaattgtggcggtattacatatccgcaaggtggatggctgtgtccagcagaactgacctgtaatgtgctggaactggcgcaacagcaaggtttacagattcgttatcaacaccagttacaggatttatcccgtaaggatgactgttggttgctgaattttgcaggagatcagcaagcaacgcatagcgtggtggtactggcgaacgggcatcaaatcagccgtttcagccaaacatcgtctctgccagtgtattcggttgccgggcaggttagccatattccgacaacgccggaactggcggagctgaagcaggtgctgtgctatgacggttatctcacgccacaaaatccggcgaatcaacatcattgtattggtgccagttatcatcgcggcagcgaagatacggcgtacagtgaggacgatcagcaacagaatcgccagcggttgattgattgtttcccgcaggcacagtgggcaaaagaggttgatgtcagtgagaaagaggcgcgctgcggtgtgcgttgtgccactcgcgatcatttgccaatggtaggcaatgttcccgattatgaggcaacactcgtggaatatgcgtcgctggcggagaagaaagatgaagcggtaagcgcgccggtttatgacgatctctttatgtttgctgctttaggttcgcgcggtttgtgctctgccccgctgtgtgccgagattctggcggcacagatgagtgaagaaccgattccgatggatgccagtacgctggcggcgttaaatccgaatcggttatgggtgcggaaattgttgaaagggaaagcgattaaggctgggtaa

SEQ ID NO: 36067 - DNA, 1221 bp, Escherichia coli
atgaaacgtgcagtgattactggcctgggcattgtttccagcatcggtaataaccagcaggaagtcctggcatctctgcgtgaaggacgttcagggatcactttctctcaggagctgaaggattccggcatgcgtagccacgtctggggcaacgtaaaactggataccactggcctcattgaccgcaaagttgtgcgctttatgagcgacgcatccatttatgcattcctttctatggagcaggcaattgcagatgctggcctctccccggaagcttaccagaataacccgcgcgttggcctgattgcaggttctggcggcggttccccgcgtttccaggtcttcggcgctgacgcaatgcgcggcccgcgcggcctgaaagcggttggcccgtatgtggtcaccaaagcgatggcatctggcgtttctgcctgcctcgccacgccgtttaaaattcacggcgttaactactccatcagctccgcgtgtgcgacctccgcacactgtatcggtaacgcagtagagcagatccaactgggcaaacaggacatcgtgtttgctggcggcggcgaagagctgtgctgggaaatggcttgcgaattcgacgcaatgggcgcgctgtctaccaaatacaacgacaccccggaaaaagcctcccgtacttatgacgctcaccgtgacggtttcgttatcgctggcggcggcggtatggtggtggtcgaagaactggaacacgcgttggcacgtggtgctcatatctacgctgaaatcgttggctacggcgcaacgtctgatggcgcagacatggttgctccgtctggcgaaggcgcagtgcgttgcatgaagatggcgatgcacggtgttgataccccaatcgactacctgaactcccacggtacttcgactccggttggcgacgtgaaagagctggcggctatccgtgaagtgttcggcgataagagcccggcgatttctgcaaccaaagcaatgaccggtcactctctgggcgctgctggcgtacaggaagctatctactctctgctgatgctggaacacggctttatcgccccgagcatcaacattgaagagctggacgagcaggctgcgggtctgaacatcgtgaccgaaacgaccgatcgcgaactgaccaccgttatgtctaacagcttcggcttcggcggcaccaacgccacgctggtaatgcgcaagctgaaagattaa

SEQ ID NO: 36068 - DNA, 1179 bp, Escherichia coli
atgactgctgtaagccaaaccgaaacacgatcttctgccaatttttcgctcttccgcatcgcttttgcggtttttctcacctacatgaccgtagggctgccgttgccggttatcccgctgtttgttcatcatgaactgggctatggcaacaccatggtcggtattgccgtcggcattcagtttctggctacggtgctgacgcgtggttacgccgggcgactggccgatcaatatggcgcaaaacgttcggcgcttcaggggatgttagcttgcggtctggctggcggcgcgctgctgttggcggcgattttgcccgtctccgcaccgttcaaatttgccctgttggtcgtcgggcgtttgattcttggctttggtgaaagccagttactgacgggcgctctgacctggggattaggcatcgttgggccaaaacattccggcaaagtgatgtcatggaacggaatggcgatttacggtgccctcgctgttggtgcgccgcttggcctattgattcatagccattacggttttgccgcactggcgctcaccacaatggcattacccttactggcgtgggcctgtaacggcacagtgcgcaaagtaccggccctggcgggagaacgtccatcgctgtggagtgttgtcggacttatctggaaacctgggttaggtctggcactacaaggtgttggttttgcggttatcgggactttcgtttcgctctactttgccagcaaaggatgggcgatggcgggctttactcttaccgcgtttggcggcgcatttgtcgtgatgcgcgtcatgtttggctggatgccggaccgttttggtggcgtgaaagtggcgattgtctctctgcttgtagaaacggtgggcttgttgctgctctggcaagccccaggtgcgtgggtcgcattagcgggcgcggcgttaaccggagccggatgttcgcttatctttcctgcgctgggcgtggaggtggttaaacgcgtcccctcacaagttcgcggcaccgcactgggcggttacgccgcgtttcaggatatcgccctcggcgtctccgggccgctggcgggaatgctggcgaccacgtttggttactcttcggtatttcttgccggggcgatctctgcggtgctgggaattattgtcacgatactgtcgtttcgtcggggttaa

SEQ ID NO: 36069 - DNA, 996 bp, Escherichia coli
atgatacaacctatttccggccctcctcctgggcaaccaccaggtcagggagataacctgccgtctggcgcgggcaatcagcctttatccagtcagcaacgtacttcgctggaaagcttaatgacgaaagtgacctcactgacgcaacaacaaagagcagaactgtgggcgggtatcaggcacgatattggtctgtcgggagattcaccgctgctttcgcgtcactttcctgccgctgagcataatctggcgcaacgtctgctggccgcgcaaaaaagccattctgcccgccagcttttagcgcaattaggggagtatttacgtctggggaataatcgtcaggcggtcacggattatatccgtcataactttggtcagacgccgctgaatcagctctcaccggagcaattaaaaaccattctaaccctgttgcaggaagggaagatggttattccgcaacctcagcagcgcgaggcgaccgaccgtccgttattaccggcggagcacaatgcgctcaaacagctggtgaccaaacttgcggcggcaacgggagaacccagcaagcagatctggcaatcgatgctggaactttccggggtgaaagatggcgagttaattccagcgaaactgtttaaccatctggtgacctggctacaggcgcgtcagacgctaagccagcaaaatacgccgacgcttgaatcactccagatggcgctaaaacaacctttagatgccagtgaactggcggcgttatcggcatatatccagcaaaaatatggcctttctgcgcaatcatcgctttcttcagcccaggccgaggatattcttaatcagctttatcaacggcgggttaaagggattgatccgcgagatatacaaccgctgcttaatccttttccaccgatgatggacacgttgcaaaatatggcaacgcgtcccgcgctgtggatactgttagtcgcgattatcctgatgctggtctggctggttcgttaa

SEQ ID NO: 36070 - DNA, 1137 bp, Escherichia coli
gtgaaaatccttgttgatgaaaatatgccttatgcccgcgacttatttagccgtttgggtgaggtgaccgcggttcccgggcgtccaattcccgtggctcaactggcagacgcggatgcgatgatggtgcgttcggtcacgaaagtgaatgaatctttgctggcaggaaaacccattaaatttgttggcactgccaccgcggggaccgaccatgtcgatgaagcgtggttaaagcaggcgggaattggtttttccgcggcacctggctgtaatgcgattgcggtggtggaatatgttttctcctcactgctgatgcttgccgaacgcgatggattttcactgcacgagcgtaccgtggggatcgtgggcgttggtaacgttggtcgccgtttacaggcgcgactggaagcgttagggattacaaccttgctttgcgatccgccccgcgccgaccgtggggatgagggggatttccgctcgctggatgaattagttcagcatgcggatattctgactttccatacgccactctttaaagatggtccgtacaaaacgctgcatctggcggatgaaaaactgatccgcagcctgaagccgggagcgattctgattaacgcctgccgtggcgcagttgtcgataataccgccctgctgacctgcctgaacgaaggccagaagttaagcgtagtgctggatgtctgggaaggcgaaccggaacttaacgtggaattgctgaaaaaagtggatatcggcacgccgcatatcgcaggctataccctggaaggtaaagcacgcggtactacgcaagtgtttgaagcttatagcaagtttattgggcatgaacagcacgttgcgctggatacattactgcccgcgccagagtttggtcgcattacgctgcatggcccgctcgatcagccaacgctgaaaaggctggtgcatttggtgtatgatgtgcgccgcgatgacgcaccgctgcgtaaagtcgccgggataccgggtgagttcgataaactgcgcaaaaactatcttgagcgccgtgaatggtcatctctgtatgtgatttgtgatgacgccagcgcggcatcattgctgtgtaaactgggttttaacgccgttcatcatccggcacgttaa

SEQ ID NO: 36071 - DNA, 1014 bp, Escherichia coli
atgtctgaaggctggaacattgccgtcctgggcgcaactggcgctgtgggcgaagccctgcttgaaacgctggctgaacgtcagttcccggttggggaaatttatgcactggcacgtaacgaaagcgcaggcgaacaactgcgctttggtggtaagacaatcaccgtgcaggatgctgctgaattcgactggacgcaggcgcagctggcgttttttgtcgcaggcaaagaagctaccgctgcctgggttgaagaagcgaccaactcaggttgtctggtgatcgacagcagcggattgtttgctctcgaacctgacgtaccgctggtggtgccggaagtaaacccgtttgtactgaccgattaccgcaaccggaatgtcatcgccgtaccggacagtctgaccagccaactgctggcggcactgaaaccgttaatcgatcagggcggtttgtcgcgtatcagcgttaccagcctgatttcagcctccgcccagggcaaaaaagcggtcgatgcgttagcggggcagagtgcgaaattactcaatggcattccgattgacgaagaagatttcttcgggcgtcagctggcgttcaacatgctgccgttactgccggatagcgaaggtagcgtgcgtgaagaacgtcgtatcgttgacgaagtacgcaaaatcctgcaggacgaagggctgatgatttcggcaagcgtcgtccaggcaccggtattctacggtcatgcccagatggtcaactttgaagcactgcgtccgctggcagcagaagaagcgcgtgatgcgtttgctcagggcgaagatattgtgctctctgaagagaacgaattcccgactcaggtgggggatgcttctggtacgccgcatctttccgttggctgcgtacgtaatgactacggtatgccggagcaagttcagttctggtcggtggccgataacgttcgctttggcggcgcgctgatggcagtaaaaatcgccgagaaactggtgcaggagtatctgtactaa

SEQ ID NO: 36072 - DNA, 813 bp, Escherichia coli
atgtccgaccagcaacaaccgccagtttataaaattgcgctgggcattgagtacgacggcagtaagtattacggctggcaacggcagaacgaagtccgcagtgtgcaggagaagctggaaaaggcgctctcccaggtggcgaacgaaccgatcaccgtcttctgcgccgggcgtactgacgcaggtgtacacggcaccgggcaggttgtgcatttcgaaacgaccgcgcagcgcaaagacgctgcgtggacgttgggcgtaaatgcgaatttacctggtgacatcgccgtgcgttgggttaaagctgtacctgatgattttcatgcccgatttagcgccacggctcgccgttatcgctacatcatctacaatcatcggctgcgcccggcggtactgagtaaaggggtaacccatttttacgaaccgctggacgctgaacggatgcatcgggccgcgcaatgcttgctgggcgagaatgatttcacctcgttccgtgcggtgcagtgccagtcccgaaccccgtggcgcaacgttatgcatattaatgtcacgcgtcacggtccttatgtggtggtagatatcaaagcgaatgcctttgtacatcatatggtcaggaatattgtcggcagcctgatggaagtcggtgcccacaaccagccggagagctggatagcagagttgctggcggcaaaggacagaacgctggcggcagcaacggcaaaagcggaagggctgtatctggtcgcggtggattaccctgaccggtatgatcttccaaaaccgccaatgggcccgctatttctggcggactaa

SEQ ID NO: 36073 - DNA, 660 bp, Escherichia coli
atggacctgatttatttcctcatcgattttatcctgcacattgacgtgcatctggcagaactggtcgcggagtatggcgtctgggtttatgccattttgttcttaattttgttctgtgaaaccggtctggtggtaacgccgtttttaccgggtgattcattgctgtttgttgccggtgcgttggcatcactggaaaccaacgatctcaacgtccatatgatggtggtgctgatgctgatcgccgcgattgtgggtgacgcggtgaactacaccattggacggttatttggtgacaaactgttcagtaatccggattcgaaaatctttcgtcgcagttatcttgataagactcatcagttttacgagaaacatggcggcaaaacgattattctcgcccgttttgtgccgatcgtcagaacgttcgcgccgttcgttgcgggaatgggccacatgtcgtatcgtcatttcgccgcttttaacgtcatcggcgcgttgctatgggtactgatttttacctacgcgggttatttcttcggaacgctccccttcattcagagcaaccttaaactgatgattgttggcattatttttgtttcaatattgccaggtgttttcgaatttattcgccacaaacgcgctgcggcacgcgccgcaaaataa

SEQ ID NO: 36074 - DNA, 915 bp, Escherichia coli
atgagctggattgaacgaattaaaagcaacattactcccacccgcaaggcgagcattcctgaaggggtgtggactaagtgtgatagctgcggtcaggttttataccgcgctgagctggaacgtaatcttgaggtctgtccgaagtgtgaccatcacatgcgtatgacagcgcgtaatcgcctgcatagcctgttagatgaaggaagccttgtggagctgggtagcgagcttgagccgaaagatgtgctgaagtttcgtgactccaagaagtataaagaccgtctggcatctgcgcagaaagaaaccggcgaaaaagatgcgctggtggtgatgaaaggcaccctgtatggaatgccggttgtcgctgcggcattcgagtttgcctttatgggcggttccatggggtctgtggtaggtgcacgtttcgtgcgtgccgttgagcaggcgctggaagataactgcccactgatctgcttctccgcctctggtggcgcacgtatgcaggaagcactgatgtcgctgatgcagatggcgaaaacctctgcggcgctggcaaaaatgcaggagcgcggcttgccgtacatctccgtgctgaccgacccgaccatgggtggtgtttctgcaagtttcgccatgctgggcgatctcaacatcgctgaaccgaaagcgttaatcggctttgccggtccgcgtgttatcgaacagaccgttcgcgaaaaactgccgccaggattccagcgcagtgaattcctgatcgagaaaggcgcgatcgacatgatcgtccgtcgtccggaaatgcgcctgaaactggcgagcattctggcgaagttgatgaatctgccagcgccgaatcctgaagcgccgcgtgaaggcgtagtggtgccaccggtaccagatcaggaacctgaggcctga

SEQ ID NO: 36075 - DNA, 1269 bp, Escherichia coli
atgattatcaaacgcactcctcaagccgcgtcgcctctggcttcgtggctttcttatctggaaaacctgcacagtaaaactatcgatctcggccttgagcgcgtgagccaggtcgcggcgcgtcttggcgtcctgaaacctgcgccatttgtgtttaccgttgcgggtacgaatggcaaaggcaccacttgccgtacgctggagtcgattctgatggcggcagggtacaaagtgggcgtctacagttcgccgcatctggtgcgttataccgagcgcgtacgtgtgcagggccaggaattgccggaatcggcccacaccgcctcttttgcggagattgaatcggcacgcggtgatatttccctgacctatttcgagtacggtacgctgtcggcgttgtggctgttcaagcaggcacaacttgacgtggtgattctggaagtagggctgggcggtcgtctggacgcaaccaatattgtcgatgccgatgtcgcggtagtaaccagtattgcgctggatcataccgactggctggggccagatcgcgaaagtattggtcgcgagaaagcaggtatctttcgcagcgaaaaaccggcaattgtcggtgagccggaaatgccttctaccattgctgatgtggcgcaggaaaaaagtgcactgttacaacgtcggggcgttgagtggaactattccgtcaccgatcatgactgggcgtttagcgatgctcacggcacgctggaaaatctgccgttgccgcttgtcccgcaaccgaatgccgcaacggcgctggcggcactgcgtgccagcgggctggaggtcagtgaaaatgccattcgcgacgggattgccagcgcaattttgccgggacgtttccagattgtgagcgagtcgccacgtgttatttttgatgtcgcgcataatccacatgcggcggaatatctcaccgggcgtatgaaagcgctaccgaaaaacgggcgcgtgctggcggttatcggtatgctacatgataaagatattgccggaactctggcctggttgaaaagcgtggttgatgactggtattgtgcgccactggaagggccgcgcggtgccacggcagaacaactgcttgagcatttgggtaacggcaaatcatttgatagcgtggcgcaggcatgggatgccgcaatggcggacgctaaagcggaagataccgtgctggtgtgtggttcgttccacacggtcgcacatgtcatggaagtgattgacgcgaggagaagcggtggcaagtaa

SEQ ID NO: 36076 - DNA, 651 bp, Escherichia coli
gtggcaagtaagtttcagaatcggttagtgggcacgatcgtgctggtggcgctgggggtgattgtacttccagggctgctggacgggcagaaaaaacattatcaggatgagttcgcggctatcccgctggtgccgaaagcgggcgatcgcgatgagcctgatatgatgccagccgccacccaggcgttgccgacgcagccgccggaaggcgcagcggaagaggtgcgggcaggtgatgccgcagcaccgtcgctcgatccggccactattgcagccaataacaccgagtttgaaccggaacctgcaccggtcgtcccaccgaagccgaaaccggtggagccgcctaagccgaaggttgaagcaccacctgcgccgaagccggtcgtggaagaaaaagcagcgccaacgggtaaagcctatgttgtacaactgggcgcactgaaaaatgccgataaagtgaatgagattgtcggtaagctgcgcggtgccggttatcgggtttatacgtcgccatccacgccagtgcagggtaaaattacccgtattctggttgggccagatgcctcgaaagataagctgaaaggttcgctgggtgagttgaagcaactttctggcttaagtggcgtggtaatgggctatacgccgaattaa

SEQ ID NO: 36077 - DNA, 489 bp, Escherichia coli
atggtctggattgattacgccataatcgcggtgattgctttttcctctctggttagcctgatccgcggctttgttcgtgaagcgttatcgctggtgacatggggttgtgctttctttgttgccagtcattactacacttacctgtcagtctggtttacgggctttgaagacgaactggttcgaaatgggattgccatcgcggtactgtttatcgctaccctgattgttggtgctatcgtgaacttcgtgataggccagttggtggagaaaacggggttgtcaggcaccgatcgggtgctgggcgtctgtttcggtgcgttgcgcggtgtgttgattgttgccgccattctcttctttctcgactcctttaccggggtgtcgaaaagcgaagactggagcaaatcacagctgatcccgcagttcagttttatcatcagatggttttttgattatctgcaaagctcgtcaagtttcttgcccagagcgtaa

SEQ ID NO: 36078 - DNA, 1518 bp, Escherichia coli
atgtgcggtattgtcggtatcgccggtgttatgccggttaaccagtcgatttatgatgccttaacggtgcttcagcatcgcggtcaggatgccgccggcatcatcaccatagatgccaataactgcttccgtttgcgtaaagcgaacgggctggtgagcgatgtatttgaagctcgccatatgcagcgtttgcagggcaatatgggcattggtcatgtgcgttaccctacggctggcagctccagcgcctctgaagcgcagccgttttacgttaactctccgtatggcattacgcttgcccacaacggcaatctgaccaacgctcacgagttgcgtaaaaaactgtttgaagaaaaacgccgccacatcaacaccacttccgactcggaaattctgcttaatatcttcgccagcgagctggacaacttccgccactacccgctggaagccgacaatattttcgctgccattgctgccacaaaccgcttaatccgcggcgcgtatgcctgcgtggcgatgattatcggccatggtatggttgctttccgcgatcctaacgggattcgtccgctcgtactgggaaaacgtgatattgacgagaaccgcacagaatatatggtcgcttccgaaagcgttgcgctcgatacactaggctttgatttcctgcgtgacgtcgcgccgggcgaagcgatttacatcactgaagaagggcagttgtttacccgtcaatgtgctgacaatccggtcagcaatccgtgcctgtttgagtatgtatactttgctcgcccggactcgttcatcgacaaaatttccgtttacagcgcgcgtgtgaatatgggcacgaagctgggcgagaaaattgcccgcgaatgggaagatctggatatcgacgtggtgatcccgatcccggaaacctcgtgtgatatcgcgctggaaattgctcgtattctgggcaaaccgtaccgtcagggcttcgttaaaaaccgctatgtaggccgtaccttcatcatgccgggtcagcaactgcgtcgtaagtccgtgcgccgtaaactgaacgccaaccgcgccgagttccgcgataaaaacgtcctgctggtcgacgactccatcgtccgtggcaccacttctgagcagattatcgagatggcacgcgaagccggagcgaagaaagtgtacctcgcttctgcggcaccggagattcgcttcccgaacgtttatggtattgatatgccgagcgccacggaactgattgctcacggtcgcgaagtagatgaaattcgccagatcatcggtgctgacgggttgattttccaggatctgaacgatctgatcgaagccgttcgcgctgaaaacccggatattcagcagtttgagtgttcggtgttcaacggcgtctacgtcaccaaggatgttgatcagggctacctcgatttcctcgatacgttacgtaatgacgacgccaaagcagtgcaacgtcagaacgaagtggaaaatctcgaaatgcataacgaaggatga

SEQ ID NO: 36079 - DNA, 570 bp, Escherichia coli
atgaaacgacttattgtgggcatcagcggtgccagcggcgcgatttatggcgtgcgcttattacaggttctgcgcgatgtcgcagatgttgaaacgcatctggtaatgagccaggccgcgcgccagaccttatctcttgaaacggatttttccctgcgcgaagtgcaggcattagccgatgtgacgcacgatgcgcgcgatattgctgccagcatttcttccggttctttccagacactggggatggtgattttaccctgttcaatcaaaaccctgtccggcattgtccatagctatactgatggcttactgacccgtgcggcagatgtggtgctgaaagagcgtcgcccgttggtgctctgcgtacgtgaaacaccattgcacttaggccatctgcgtttaatgactcaggcagcagaaatcggtgcggtgattatgcctcccgttccggcgttttatcatcgcccgcaatcccttgatgatgtgataaatcagacggttaaccgtgtactcgatcaattcgccataacgcttcctgaagatctctttgcccgctggcagggcgcataa

SEQ ID NO: 36080 - DNA, 783 bp, Escherichia coli
atgaagaagtcgattctcgctctgtctttgttagtcggtctctccgcagcggcttccagctatgcggcgctaccggagacggtacgtatcggaactgataccacctatgcgccgttctcatcgaaagatgccaaaggtgactttgttggctttgatatcgatctcggtaacgagatgtgcaaacggatgcaggtgaaatgtacctgggttgccagtgactttgacgcgctgatcccctcactgaaagcgaaaaaaatcgacgccattatttcgtcgctttccattaccgataaacgtcagcaggagattgctttctccgacaagctgtacgccgcagattctcgtttgattgccgccaaaggttcgccgattcagccaacgctggattcactgaaaggtaaacatgtgggtgtgctgcagggatcaacccaggaagcttacgctaacgagacctggcgtagcaaaggcgtggatgtggtggcctatgccaaccaggatttggtctattccgatctggctgcaggacgtctggatgccgcactgcaggatgaagtggcggccagcgaaggtttcctcaagcaaccagccggtaaagagttcgcttttgctggctcatcagtgaaagacaaaaaatacttcggtgacggtaccggtgtagggctacgtaaagatgatgccgaactgacggctgccttcaataaggcgcttggcgagctgcgtcaggacggcacctacgacaagatggcgaaaaagtattttgactttaatgtctacggtgactga

SEQ ID NO: 36081 - DNA, 783 bp, Escherichia coli
atgaaaaaactggtgctatcgctctctctggttctggccttctccagcgcaactgcggcatttgctgcgattccgcaaaacatccgcatcggtaccgacccgacctatgcgccatttgaatcaaaaaattcacaaggcgaactggttggcttcgatatcgatctggcgaaggagttgtgcaagcgcatcaatacgcaatgtacgtttgtcgaaaacccactggatgcgttaatcccgtccttaaaagcgaagaagattgacgccatcatgtcatcgctttccattacggaaaaacgtcagcaagaaatagccttcaccgacaaactgtacgctgccgattctcgtctggtggtggcgaaaaattccgacattcagccgacagtcgagtcgctgaaaggcaaacgggtaggcgtattgcagggcaccacccaggagacgttcggtaacgaacactgggcaccaaaaggcattgaaatcgtctcttatcaggggcaggacaacatttattctgacctgactgccggacgtattgatgccgcgttccaggatgaggtcgctgccagcgaaggtttcctcaaacaacccgtcggtaaagattacaaattcggtggcccgtctgttaaagatgaaaaactgtttggcgtagggaccggcatgggcctgcgtaaagaagataacgaactgcgcgaggctctgaacaaagcctttgccgaaatgcgcgctgacggtacttacgagaaattagcgaaaaagtacttcgattttgatgtttatggtggttaa

SEQ ID NO: 36082 - DNA, 687 bp, Escherichia coli
atgttgtatgggttttcaggtgttattttacagggggcgctcgtcacgctggagctggctatcagctctgtagtgctcgctgtaatcatcggtttaattggcgctggcggtaagctctcgcaaaatcggctttcggggctgattttcgaagggtacaccacgctgattcgaggcgtgccggacttggtgttgatgctgctaattttctacggtttgcagattgcactaaacacggtgacggaggcgatgggcgtcgggcagattgatattgatccgatggtcgcaggtattatcactctcggttttatctacggtgcttactttaccgaaacgttccgtggcgcgtttatggctgtgccgaaagggcatatagaggcggcgacggcgttcggttttactcgtgggcaagtgtttcggcggatcatgtttccggcgatgatgcgttacgccctgccaggcattggcaacaactggcaggtgatcctcaaatctaccgctctggtttcgttacttggcctggaagatgtggtcaaagccacgcagctggcaggcaaaagtacctgggaaccgttctatttcgccatcgtctgtggcgtgatttacctggttttcaccactgtttccaatggtgtgctgctgttccttgagcgccgctactccgtgggtgtgaagagggctgacctgtga

SEQ ID NO: 36083 - DNA, 717 bp, Escherichia coli
gtgatcgaaatcttacatgaatactggaaaccgttgttgtggaccgacggttatcgctttactggcgtggcgatcactctgtggctgcttattttgtcggtagtgataggcggagttctggcgctgtttctggcgattggtcgcgtctcaagtaataaatacatccagtttccaatctggttatttacctatatttttcgcggtacgccgctgtatgttcagttgctggtgttctattctggcatgtatacgctggagattgttaaggggaccgagttccttaacgccttttttcgcagtggcctgaactgtaccgtgctggcgctgacgcttaacacctgtgcttacaccaccgagatttttgccggagcgatccgttcagtgccgcatggggaaatcgaagccgccagagcctatggcttctcgacctttaaaatgtatcgctgcattattttgccttctgcgctgcgtattgcgttaccggcatacagcaacgaagtgatcctgatgctgcactctactgcgttggcatttactgccacggtgccggatctgctgaaaatagcccgcgatattaacgccgccacgtatcaaccttttaccgccttcggcattgccgcggtgctctatttaatcatctcttatgtcctgatcagcctctttcgcagagcggaaaaacgctggttgcagcatgtgaaaccttcttcaacgcactga

SEQ ID NO: 36084 - DNA, 774 bp, Escherichia coli
atgtccgagaataaattaaacgttatcgatttgcacaaacgctacggcgaacacgaagtgctgaaaggggtttcactgcaagcgaatgccggagatgtaattagcatcatcggatcgtcgggatcggggaaaagtacctttctgcgctgcattaacttcctcgaaaaaccgagcgaaggatcgatcgtggtcaatggccagacgatcaatctggtgcgcgacaaagatggtcaactcaaagtcgccgataaaaatcagctgcgcttactgcgcacacgcctgacgatggtattccagcacttcaatctctggagccatatgacggtgctggaaaacgtcatggaagcgccgattcaggtgttgggcctgagcaagcaggaagcgcgcgagcgggcggtgaagtatctggcaaaagtcgggatagacgagcgtgcgcaggggaaatatccggtgcatctttccggcggtcagcaacagcgtgtttccatcgcaagggcgctggcaatggaaccggaagttttactatttgatgaacctacctcggcgctcgatcctgaactggtaggcgaagtgttacgtattatgcagcaactggcagaagaggggaaaaccatggtggtagtgactcacgaaatgggctttgctcgccatgtttctactcacgtcattttcctccatcaggggaaaatagaagaagagggcgcgccagaacagttattcggtaacccgcaaagtcctcgtctgcaacagttccttaaaggttcgctgaaataa

SEQ ID NO: 36085 - DNA, 891 bp, Escherichia coli
atgacaatatcgacaacttccacgccgcatgatgcggtatttaaatcttttttacgccatccagacaccgcgcgggattttattgatattcatcttcccgcgccgctgcgcaaactgtgtgatttaacaacacttaaactggaaccaaacagttttattgatgaagacctgcggcaatattattccgacctcttgtggtctgtgaaaacgcaggagggagcgggttatatttatgtggtgatagagcaccaaagtaagccagaggaattaatggcttttcgcatgatgcgctattccattgcggcgatgcaaaaccatcttgatgcgggctataaagagcttccattagtgatcccgatgctgttttatcatggttgcagaagcccttatccatattcactctgctggcttgatgaatttgccgagcctgcgattgcccgccaaatttattcatcggcttttccgctggtggatattaccgtggtgccggatgacgagattatgcaacatcgcaaaatggcgctgttggagttaattcagaaacatattcgtcagcgcgatctgttgggattagtcgaccaaattgtttcgctgctagttacagggaacactaatgacagacagctaaaagccctgtttaattacgtattacaaacgggggatgcccagcgtttccgtgcatttattggtgagatagcggaacgcgcaccacaagaaaaggagaaactgatgactattgctgacagattacgtgaagaaggcgcaatgcagggcaaacacgaagaagccctgcgtattgctcaggagatgctggaaaaaggatttgactacgaagtcatcctgacgctgacccgactttcgccagacgatcttatcgcgcaaaaccactaa

SEQ ID NO: 36086 - DNA, 894 bp, Escherichia coli
atgaagatagtgatcaccggagggacgggattaattggtcgccatttgattccgcgtttgctggatctgggccatcaaatcacggtagtgacgcgtaacccgcagaaagccagttccgttctcggccctcgggtgacactatggcaagggcttgccgatcaaagtaacctcaacggcgttgatgcggtaatcaacctggccggagaaccgattgctgataaacgctggactcacgagcaaaaagagcgtctctgccaaagccgctggaatatcacgcaaaaactggtcgatttgattaatgccagcgacacgccgccgtcggtactcatttccggctcggcaacgggctattatggcgacttaggtgaagtggtggttaccgaagaggaaccgccgcataacgaatttactcataaactctgcgcccgctgggaagaaattgcctgtcgggcacaaagtgacaaaacgcgagtgtgcctgctgcgtaccggcgtagtgctggcaccggatggcggtattctcggtaaaatgctgccgccgtttcgtcttggcctgggcgggccgattggttccggtcggcagtatctggcctggattcatattgatgatatggtcaacggcattctctggctgctcgataacgagctgcgcgggccatttaatatggtttcgccctacccggtacgcaatgaacaatttgcccatgcgctcggtcatgcgctgcatcgcccggccattttgcgcgtccccgcgaccgctattcgactgttaatgggcgaatcttcagtactggtattaggcggtcaacgcgccttgcctaaacggttggaagaagcgggttttgcgtttcgctggtacgatttagaagaggcgctggcggatgttgttcgctga

SEQ ID NO: 36087 - DNA, 363 bp, Escherichia coli
atggcacaacctgccgctattattcgtataaagaaccttcgtttacgtacgtttatcggaattaaggaagaagaaattaacaaccgtcaggatattgttatcaatgtgacgatccactaccccgccgataaagcgcgcactagcgaagatatcaacgatgcgctgaattatcgcaccgtaacgaaaaacattattcagcatgtagagaataaccgtttctctttgctggaaaaattaactcagaatgtgctcgatatcgcacgtgaacatcactgggtgacgtatgctgaagtggagatcgataaactgcacgcgctgcgctacgccgattcggtatccatgaccttaagctggcagcgttaa

SEQ ID NO: 36088 - DNA, 648 bp, Escherichia coli
atgatcgatctctatttcgccccgacaccaaatggtcacaaaattacgctgtttctcgaagaagcagggctggattatcgcttgattaaggtagacctggggaaaggcggtcagtttcgcccggaatttttgcacatttcgcctaacaacaaaattccggcaattgttgatcattctccagccgatggcggcgaaccgctaagcctctttgagtctggtgccattttgttgtatctggctgagaaaacgggactctttttgagtcatgaaacgcgtgaacgcgccgccacattacagtggttattctggcaggtaggcggactggggccgatgcttgggcagaatcatcattttaatcacgcagccccccaaaccattccttacgctattgaacgttatcaggttgaaactcagcgtctataccatgtactgaacaagcggctggaaaactcgccctggctgggaggtgagaactacagcattgcggatattgcctgctggccgtgggttaatgcctggagtcgccagcgaattgacctcgcaatgtatccggcagtcaagaactggcatgagcggatccgttcgcgccctgccaccgggcaggcactgctaaaagcacaactcggtgatgagcgttcggatagttaa

SEQ ID NO: 36089 - DNA, 645 bp, Escherichia coli
atgagtaaacccgctatcacgctttggtcagatgcccattttttctccccttatgtgttatccgcctgggtggcgttgcaggagaaaggcctgtcgtttcatatcaagaccatcgacctcgacagcggtgaacatttgcaaccgacgtggcaaggttacggtcagacacgccgtgtgccgttattacaaatcgatgattttgagttgagtgaatcttctgccattgcggagtatctggaagatcgatttgcgccaccgacctgggaacgtatttatccgcttgatttagaaaatcgtgcgcgtgcacgacagattcaggcctggttgcgcagcgatctgatgcccatccgcgaagagcgtccgacggatgttgtctttgcgggggcgaaaaaagcgccactaacggccgagggaaaagccagtgcagagaaactgttcgcgatggcagaacatttgttagcactggggcggccgaatttatttggtgaatggtgcattgctgatactgatctggcgctaatgattaaccgcctggtactacatggcgatgaggtgccggaacgcctggtggattatgcgacattccagtggcagcgagcgtctgtccagcgttttattgctctttcggcgaagcaatctggctga

SEQ ID NO: 36090 - DNA, 552 bp, Escherichia coli
atgaaactgatgtttgcatcggacattcatgggtcgttaccggcgacggaacgtgttctggagttgtttgcccaaagcggtgcccagtggctggtgatccttggcgacgtgttgaatcacggcccgcgtaatgctttaccggagggttacgcgccagccaaagtcgctgaacggcttaatgaagtggcacataaggttatcgctgtgcgcggcaactgcgacagcgaagtggatcaaatgctgctgcatttcccgataaccgcgccgtggcaacaggtattactggaaaaacaacgtctgtttttgacgcatggtcatctttttggcccggaaaacctacctgctttaaaccagaacgatgtgctggtgtacggtcatacccatctgccagtggcagaacagcggggggagattttccacttcaaccccggctcggtgagtattccgaaaggcggtaatccggcgagttatggcatgctggataatgacgtacttagtgtaatcgcactcaatgatcaaagtatcattgcgcaggtcgcgattaatccgtaa

SEQ ID NO: 36091 - DNA, 543 bp, Escherichia coli
atggaacagcgtcgtttggcaagtactgaatgggtggatattgtcaatgaagagaacgaagtcattgcacaagccagccgggaacaaatgcgggcacagtgtctgcgtcatcgtgcaacttacatcgtcgtgcatgatggcatgggcaaaattctggtccagcgtcgtaccgagacaaaagactttttacccggcatgttagatgcgaccgcaggcggtgtggtccaggccgatgagcaactgctggaatccgcgcgtcgcgaagcggaagaagagttgggcattgccggtgtcccctttgccgagcacgggcagttctatttcgaagataaaaattgccgtgtctggggcgcgttgttcagttgcgtctctcacggtcccttcgccctacaggaagatgaagtcagtgaagtttgctggttgacgccggaagaaatcaccgcacgctgcgatgagttcactccagactcgctgaaagcgctggcgttgtggatgaagcgcaatgccaaaaatgaagccgtagagactgaaacggcagaatga

SEQ ID NO: 36092 - DNA, 1479 bp, Escherichia coli
atgcccgatacgttggtgattatcttttttgttgctattttaaccagccttgccacctgggtagttccggtggggatgtttgacagtcaggaagtgcagtatcaggttgatggtcaaacaaaaactcgcaaagtcgtagatccacactcttttcgcattctgactaacgaagcaggcgaacctgagtatcaccgcgtacagctgttcacgacgggcgatgaacgcccgggtctgatgaacttcccgtttgaagggttaacctcaggatcgaaatacgggacagccgttggcatcatcatgtttatgctggtgattggcggcgcgtttggcattgtgatgcgtacaggaaccattgataacggtatcctggcgcttattcgccatacccgcggaaatgaaattctctttattcctgcgctctttattctgttttcacttggcggcgcggtatttggtatgggagaagaggccgtcgcctttgccattatcatcgcaccgctaatggtccggctaggctatgacagtattaccaccgtcctggtgacctatatcgccacgcaaatcggttttgccagttcgtggatgaacccgttttgtgtggttgttgctcaggggattgccggcgttccggtgctttctggctccgggttgcgcatcgtggtgtgggttatcgccactctgattggcctgatctttaccatggtgtacgcctcacgagtgaaaaagaatcctcttctgtcacgcgtgcatgagtccgaccgcttctttcgtgaaaagcaggcggatgttgaacaacgtccgtttacctttggtgactggctggtattgattgtcctgaccgccgtaatggtctgggtgatttggggcgtgatcgttaatgcctggtttattccagaaattgccagccagttcttcaccatgggtctggtgattggcatcatcggcgttgttttccgccttaacggcatgacggttaataccatggcttcatcctttaccgaaggggcgcgaatgatgatcgcccctgccctgctggtgggtttcgccaaagggattttgctgctggtcggtaatggtgaagcgggtgatgccagcgtgttaaataccatcctcaacagcattgccaatgccattagcggtctggacaatgcggtcgcggcctggtttatgttgctcttccaggcagtatttaatttcttcgtgacgtccggttctggtcaggcggcgttaaccatgccgttactggcaccgcttggcgatctggtcggtgttaaccgtcaggttaccgtgctggcgttccagtttggtgatggcttcagccacatcatttacccaacctcagcttcgttaatggcgacgctcggtgtgtgccgggtggacttccgtaactggctgaaggtgggcgcgaccctgcttggactgctgtttattatgtccagcgtcgtagtgatcggcgctcagttgatgggctaccactaa

SEQ ID NO: 36093 - DNA, 2145 bp, Escherichia coli
gtgtcccgtattattatgctgatccctaccggaaccagcgtcggtctgaccagcgtcagccttggcgtgatccgtgcaatggaacgcaaaggcgttcgtctgagcgttttcaaacctatcgctcagccgcgtaccggtggcgatgcgcccgatcagactaccactatcgtgcgtgcgaactcttccaccacgacggccgctgaaccgctgaaaatgagctacgttgaaggtctgctttccagcaatcagaaagatgtgctgatggaagagatcgtcgcaaactaccacgctaacaccaaagacgctgaagtcgttctggttgaaggtctggtcccgacacgtaagcaccagtttgcccagtctctgaactacgaaatcgctaaaacgctgaatgcggaaatcgtcttcgttatgtctcagggcactgacaccccggaacagctgaaagagcgtatcgaactgacccgcaacagcttcggcggtgccaaaaacaccaacatcaccggcgttatcgttaacaaactgaacgcaccggttgatgaacagggtcgtactcgcccggatctgtccgagattttcgacgactcttccaaagctaaagtaaacaatgttgatccggcgaagctgcaagaatccagcccgctgccggttctcggcgcggttccgtggagctttgacctgatcgcgactcgtgcgatcgatatggctcgccacctgaatgcgaccatcatcaacgaaggcgacatcaatactcgccgcgttaaatccgtcactttctgcgcacgcagcattccgcacatgctggagcacttccgtgccggttctctgctggtgacttccgcagaccgtcctgacgtgctggttgccgcttgcctggctgccatgaacggcgtagaaatcggtgccctgctgctgactggcggctacgaaatggacgcgcgcatttctaaactgtgcgaacgtgctttcgctaccggcctgccggtatttatggtgaacaccaacacctggcagacttctctgagcctgcagagcttcaacctggaagttccggttgacgatcacgagcgtatcgagaaagttcaggaatacgttgctaactacatcaacgctgactggatcgattctctgactgccacttctgagcgcagccgtcgtctgtctccgccagcgttccgttatcagctgactgaacttgcgcgcaaagcgggcaaacgtatcgttctgccggaaggtgacgaaccgcgtaccgttaaagcagccgctatctgtgctgaacgtggtatcgcaacttgcgtactgctgggtaatccggcagagatcaaccgtgttgcagcgtctcagggtgtagaactgggtgcaggcattgaaatcgttgatccagaagtggttcgcgaaagctatgttggtcgtctggtcgaactgcgtaagaacaaaggcatgaccgaaaccgttgcccgcgaacagctggaagacaacgtggttctcggtacgctgatgctggaacaggatgaagttgatggtctggtttccggtgctgttcacaccaccgcaaacaccatccgtccgccgctgcagctgatcaaaactgcaccgggcagctccctggtatcttccgtgttcttcatgctgctgccggaacaggtttacgtttacggtgactgtgcgatcaacccggatccgaccgcagaacagctggcagaaatcgcgattcagtccgctgattccgctgcggccttcggtatcgaaccgcgcgttgctatgctctcctactccaccgggacttctggtgctggtagcgacgtagaaaaagttcgcgaagcaactcgtctggcgcaggaaaaacgtcctgacctgatgatcgacggtccgctgcagtacgacgctgcggtaatggctgacgttgcgaaatccaaagcgccgaactctccggttgcaggtcgcgctaccgtgttcatcttcccggatctgaacaccggtaacaccacctacaaagcggtacagcgttctgccgacctgatctccatcgggccgatgctgcaaggtatgcgcaaaccggttaacgacctgtcccgtggcgcactggttgacgatatcgtctacaccatcgcgctgactgcgattcagtctgcacagcagcagtaa

SEQ ID NO: 36094 - DNA, 1203 bp, Escherichia coli
atgtcgagtaagttagtactggttctgaactgcggtagttcttcactgaaatttgccatcatcgatgcagtaaatggtgaagagtacctttctggtttagccgaatgtttccacctgcccgaagcacgtatcaaatggaaaatggacggcaataaacaggaagcggctttaggtgcaggcgccgctcacagcgaagcgctcaactttatcgttaatactattctggcacaaaaaccagaactgtctgcgcagctgactgctatcggtcaccgtatcgtacacggcggcgaaaagtataccagctccgtagtgatcgatgagtctgttattcagggtatcaaagatgcagcttcttttgcaccgctgcacaacccggctcacctgatcggtatcgaagaagctctgaaatctttcccacagctgaaagacaaaaacgttgctgtatttgacaccgcgttccaccagactatgccggaagagtcttacctctacgccctgccgtacaacctgtacaaagagcacggcatccgtcgttacggcgcgcacggcaccagccacttctatgtaacccaggaagcggcaaaaatgctgaacaaaccggtagaagaactgaacatcatcacctgccacctgggcaacggtggttccgtttctgctatccgcaacggtaaatgcgttgacacctctatgggcctgaccccgctggaaggtctggtcatgggtacccgttctggtgatatcgatccggcgatcatcttccacctgcacgacaccctgggcatgagcgttgacgcaatcaacaaactgctgaccaaagagtctggcctgctgggtctgaccgaagtgaccagcgactgccgctatgttgaagacaactacgcgacgaaagaagacgcgaagcgcgcaatggacgtttactgccaccgcctggcgaaatacatcggtgcctacactgcgctgatggatggtcgtctggacgctgttgtattcaccggtggtatcggtgaaaatgccgcgatggttcgtgagctgtctctgggcaaactgggcgtgctgggctttgaagttgatcatgaacgcaacctggctgcacgtttcggcaaatctggtttcatcaacaaagaaggtacccgtcctgcggtggttatcccaaccaacgaagaactggttatcgcgcaagacgcgagccgcctgactgcctga

SEQ ID NO: 36095 - DNA, 456 bp, Escherichia coli
atgtcaacgccggataatcgttctgttaatttttttagcttgtttcgccggggacagcattactcaaagacgtggccgctggaaaaacgccttgccccggtctttgtcgaaaatcgcgttatcaagatgacgcgttatgcgatccgttttatgccgccgatcgccgtatttactctctgctggcagattgccctgggcggtcagcttgggccggcagttgccactgcgctgttcgctttaagtttacccatgcagggattgtggtggctgggcaaacgttctgtaacgccattaccccctgcaatccttaactggttttatgaagttcgcggtaaattgcaggagtctggacaggtgttggcacccgttgaaggcaagcctgattaccaggcattagctgacacgcttaagcgcgcattcaaacaactggataaaactttccttgatgatttgtaa

SEQ ID NO: 36096 - DNA, 495 bp, Escherichia coli
atggaaatgaccaacgcgcaacgtcttattttgtctaaccagtacaagatgatgactatgctcgatccggcaaatgctgaacgttaccgtcgcctgcaaacaatcattgagcgtggttatggattacagatgcgtgaactggatcgcgagtttggcgagctgaaagaagaaacctgccgcactatcatcgacattatggagatgtatcatgcgttgcatgtttcctggtctaatttgcaggaccagcaatccatcgatgaacgtcgtgtcaccttcctcggctttgacgccgccactgaagcacgttacctcggttatgtccgctttatggttaatgtggaagggcgctatacacattttgacgccggaactcacggttttaacgcccagacgccaatgtgggaaaaatatcagcgcatgcttaatgtgtggcatgcctgcccgcgtcagtaccatttgagcgccaacgaaattaatcaaattatcaacgcctga

SEQ ID NO: 36097 - DNA, 651 bp, Escherichia coli
gtgcggtgcaaaggttttctgtttgatcttgatggaacgctggtggattccctgcctgcagtagaacgggcgtggagcaactgggccagacgtcatgggttagcgccggaagaggtgctggcttttattcacggtaaacaggcgatcacctctctgcgccattttatggcgggcaaatccgaggctgatattgccgccgagtttacgcgtctggagcaaatcgaggccacggaaaccgagggtattaccgcgcttccgggggcaatcgccttactcaatcatttgaataaagcaggtattccgtgggccattgtgacttctggctccatgccggtagcgcgagcgcgccataaagtagctgggcttcccgcaccagaggtgtttgtaaccgctgagcgagtgaagcgcggaaaaccagaacctgatgcgtatctgttaggcgcgcagctgcttgggcttgcgccgcaggagtgtgtggtggtggaagatgctcccgctggcgtgctttctggcctggcggcgggttgtcatgtcattgcggttaacgctccggcagataccccgcgcctgaatgaggtcgatttggtcctccacagtctggagcaaattactgtgaccaaacagccaaatggcgatgttattattcagtga

SEQ ID NO: 36098 - DNA, 1833 bp, Escherichia coli
gtgaacggtgaattgatttgggttctttcattactggccgttgccatcgtcttgtttgcgacgggcagagtgcgtatggatgcggtcgctttgtttgttattgtcgcgtttgcattaagcggaacgctgacggtccccgaagtattttccggcttttccgatcctaacgttgtcctgattgccgccttgttcattattggcgatggtttggtccgtaccggtgttgccactgtaatggggacatggctggtcaaagtggcgggcaacagtgaaatcaaaatgttggttttgttgatgctgaccgtcgcggggcttggcgcgtttatgagttcaaccggcgttgtcgctatctttattcctgtggtgttaagcgttgccatgcgtatgcaaacgtcgccgtcgcgcctgatgatgccgttaagttttgccgggctgataagcggcatgatgacgctggtggcgacgccgccgaacctggtagtcaacagtgaattgctgcgtgaaggctatcatggttttagtttctttagcgtaacacctattggcctggtcgtgctggtgctgggtattttgtatatgttagtgatgcgtttcatgctgaaaggggatacccagaccccgcagcgcgaaggctggacgcgtcgaacctttcgcgatcttatccgtgaatatcgactgaccgggcgtgcgcgtcgtctggctattcgccccggttcgccaatgattggtcaacggctggacgatctcaaactacgtgagcgttatggcgctaacgtcatcggtgttgaacgctggcggcgttttcgtcgcgttatcgtgaatgttaacggggtttctgaatttcgcgcgcgtgacgttttgcttattgatatgtctgcggctgatgtcgatctccggcaattttgtagtgagcagttgctggagccgatggtactacgcggcgagtatttttctgaccaggcccttgatgtgggcatggcagagatttcattaattcctgagtcagaactgattggtaaatcggtgcgcgaaattggttttcgtacccgctacggactgaatgtggtggggctaaagcgcaatggcgtggcgctggaaggttcgctggcggatgagcctctgctgctgggcgatatcatcctggttgttggtaactggaaactgatcggtatgctggccaaacagggccgcgacttcgtagcgctgaacttaccggaagaggtgagtgaagcatcgcccgcgcacagccaggcaccccatgcgattttctgtctggtgctaatggtggcgttaatgctgaccgatgaaattcctaatcctgttgccgctatcatcgcctgcctgctgatggggaaattccgctgtatcgatgctgaaagcgcctataaatccattcactggccgagcattattttgatcgttgggatgatgccgtttgctgtggcattacagaaaacgggaggtgtcgcgctggcggtgaaagggctgatggacattggcggcggttacgggccacatatgatgctgggttgtttgtttgtcttgtcggcggttattgggctatttatctctaataccgcaacggcggtgttgatggctccgattgcgctggctgctgccaaaacgatgggtgtgtcgccttatccatttgcgatggtcgtggcgatggcagcatccgccgcctttatgacgccggtttcttcacctgttaacacactggttttaggtccgggaaattacagcttcagtgactttgtgaagttgggggtaccgttcaccattatcgtgatggcggtttgtgtggtgatgatcccgatgctgtttccgttttga

SEQ ID NO: 36099 - DNA, 600 bp, Escherichia coli
atgaaacagagccatttttttgcccatctctcccgcctgaaactcattaaccgctggccgctgatgcgcaacgtgcggacggaaaatgtgtccgaacacagtttgcaggtagcgatggtcgcccatgcgctggcagctatcaaaaatcggaaatttggcggtaatgtcaacgccgaacgtatcgctttactggcgatgtaccacgatgcctcagaagtgctcaccggcgatctccctactccggtgaaatacttcaattcgcaaatcgctcaggaatacaaggcgattgaaaaaatcgctcagcaaaaactggtcgatatggttccggaagagctgcaggatatttttgcgccgttaattgacgagcatgcatatagcgatgaagagaaatcgctggtgaaacaggcagatgcactgtgtgcatatctgaaatgtctggaagaactcgcggcgggaaataatgaattcttgctggcaaaaacgcgactggaagcgacgcttgaagcgcgccgcagccaggagatggactacttcatggaagtctttgttcccagcttccatctttcgctcgatgagattagccaggattcaccgctgtaa

SEQ ID NO: 36100 - DNA, 1218 bp, Escherichia coli
atgtcccccattgaaaaatccagcaaattagagaatgtctgttacgacatccgtggtccggtgctgaaagaagcaaaacgcctggaagaagaaggtaacaaggtactgaaactgaacatcggcaaccctgccccgttcggttttgacgcgccagatgaaatcctcgttgacgtgattcgcaacctgcctaccgctcaagggtattgcgattccaaagggctttactccgcgcgtaaagccatcatgcagcactaccaggctcgtggcatgcgtgatgttaccgtggaagatatttacatcggcaatggtgtatcggagcttatcgttcaggcaatgcaggcattgctgaacagcggcgacgaaatgttggttcctgcacctgattacccactatggaccgcggcggtttcgctctccagcggtaaagcggtgcattatctttgcgatgaatcctctgactggttcccggaccttgatgatattcgcgctaaaattacgcctcgtacgcgtgggatcgttattatcaacccaaataacccaactggcgcggtatattccaaagagcttttaatggagatagtggagattgcacgccagcataatctcattatcttcgccgatgaaatttatgacaaaattctctacgacgacgctgagcatcactcaattgcgccgctggcacctgatctgctgaccattacctttaacggactgtcgaaaacgtaccgcgttgctggcttccgtcaggggtggatggtgttgaacgggccgaaaaaacacgccaaaggttacatcgaaggtctggaaatgctggcctcaatgcgcctgtgtgctaacgttcctgcgcaacacgccattcagactgcactaggcggttatcagagcatcagtgaatttattactcccggcgggcgtctttatgagcagcgtaaccgcgcgtgggaattgatcaacgatattccgggcgtttcctgcgtgaaaccgcgcggtgcgctgtacatgttcccgaaaatcgacgccaaacgctttaatattcacgacgatcagaaaatggtgctggatttcctgttgcaggaaaaagttctgttggtgcaagggacggcattcaactggccgtggccggatcacttccgcattgtcacgctaccgcgtgtcgatgatatcgagctgtctttgagtaagttcgcgcgtttcctttctggttatcatcagctgtaa

SEQ ID NO: 36101 - DNA, 939 bp, Escherichia coli
atgataagtgcaaatcgtccgataattaacctcgacctcgatctgctgagaacatttgttgctgttgccgatctgaacacttttgctgccgcagctgccgctgtgtgtcgtactcagtccgccgtaagtcagcaaatgcagcgtctggaacaactcgttgggaaagaactgttcgctcgtcacggtcgcaacaaactgttaactgaacatggcattcaacttcttggttacgccagaaaaattctgcgttttaatgatgaggcctgctcatcattaatgttcagtaatcttcagggcgtgttaactatcggtgcttcagatgaatctgccgatacgatcttacctttcctgttaaatcgcgtgagttcggtttatccgaaactagcgctggatgtccgcgttaaacgtaatgcctatatggcagaaatgctggaatcccaggaagtggatttgatggtaacaacccatcgtccttcaacgtttaaggcattgaacctgcgtacctcgccaacacactggtactgcgcagcggaatacgtattgcaaaaaggcgagccgatccctcttgtattgctggatgatcctagcccgtttcgcgatatggtgctggcgacgcttaataaagcagatattccatggcgactggcttatgtcgcctcgacgcttccggcagttcgtgcggcagtaaaagccggtcttggcgtgacggcaaggccggtcgagatgatgagtccagacctgcgtgtgctgagtggagtagatggcttaccgccgctacccgataccgaatatttgctgtgctatgacccgtccagtaataatgaactggcccaagtgatctatcaggcgatggagagctaccataatccgtggcaatacagcccaatgtctgctccggaaggcgatgactcattgttgattgaaagggatatcgagtaa

SEQ ID NO: 36102 - DNA, 165 bp, Escherichia coli
atgttgttgaatcgtgtccgttgtgaagcaatggaaaaaatacgggtctattttgacaggaatttgtgtcgattcctccccccaaaagagagtattttcttgatctgtgacacgcttttgtcattccataacaaaaacgcagcaacaaatttacgtattttttaa

SEQ ID NO: 36103 - DNA, 444 bp, Escherichia coli
atgagtatgtcaacatccactgaagtcatcgctcatcactgggcattcgctatctttcttatcgttgccattggcctgtgttgcctgatgctggtaggcggttggtttttaggcggtcgcgcacgcgcaaggtcgaaaaacgttccgtttgaatccggtatcgactcggtcggctccgcccgcttacgcctgtccgccaagttttatctggtggccatgttcttcgttatcttcgacgttgaagcgctgtatctgttcgcatggtcaacctctatccgcgaaagcggctgggtaggctttgtggaagctgcaatttttatttttgtgttactggcaggtctggtttatctggtgcgtattggcgcgctggactggacgcccgcgcgttcacgccgcgagcgtatgaacccggaaacgaacagtatcgctaatcgtcaacgctaa

SEQ ID NO: 36104 - DNA, 663 bp, Escherichia coli
atggattatacgctcacccgcatagatcccaacggtgagaacgaccgttaccccctgcaaaagcaggagatcgtaaccgaccctctggagcaagaagttaataaaaacgtgtttatgggcaagctcaatgacatggttaactggggtcgtaaaaactcaatttggccgtataacttcggtctttcctgctgttacgttgagatggtgacttcgtttaccgcggtgcatgacgtggcgcgttttggcgcagaagtattgcgagcttcgccgcgtcaggctgacctgatggtcgttgcaggaacctgctttacaaaaatggcaccggttattcagcgtctgtatgaccagatgctggaaccaaaatgggttatctcaatgggtgcctgtgccaactccggcggtatgtacgatatttattccgttgtgcagggcgtcgataaattcatcccggttgatgtgtatatcccgggctgccctccgcgtcctgaagcgtacatgcaggcactgatgctgttgcaggaatctatcggtaaagaacgtcgtccgctctcctgggtggttggcgatcagggcgtttatcgcgccaatatgcaatcagagcgcgaacgcaagcgcggtgaacgcattgccgtaaccaacctgcgtacacctgacgagatttaa

SEQ ID NO: 36105 - DNA, 1803 bp, Escherichia coli
atggtgaacaatatgaccgacttaaccgcgcaagaacccgcctggcagacccgcgatcatcttgatgatccggtgattggcgaactgcgcaaccgttttgggccggatgcctttactgttcaggcgactcgcaccggggttcccgttgtgtggatcaagcgtgaacaattactggaagttggcgatttcttaaagaaactgccgaaaccttacgtcatgctgtttgacttacacggcatggacgaacgtctgcgcacacaccgcgaagggttacctgccgcggatttttccgttttctaccatctgatttctatcgatcgtaaccgcgacatcatgttgaaggtagcgctggcagaaaacgacctgcacgtaccgacctttaccaaactgttcccgaacgctaactggtatgagcgtgagacctgggatctgtttggtattactttcgacggtcacccgaacctgcgccgcatcatgatgccgcaaacctggaaaggtcacccgctgcgtaaagattacccggcgcgcgctaccgaattctcgccgtttgagctgaccaaagccaaacaggatctggagatggaagccctgaccttcaaaccggaagagtgggggatgaagcgcggcaccgaaaacgaggacttcatgttcctcaacctcggtccgaaccacccgtcggcgcacggtgctttccgtatcgttttgcagctcgatggcgaagagattgtcgactgcgtaccagacatcggctaccaccaccgtggcgcggagaaaatgggcgagcgccagtcctggcatagctacattccgtacaccgaccgtatcgaatacctcggcggctgcgttaacgaaatgccttacgtgctggcggtagagaaactggccgggatcaccgtgccggatcgcgttaacgtcattcgcgtaatgctttctgagctgttccgcatcaacagccacctgctgtacatctcgacctttattcaggacgtcggcgcaatgacgccagtgttcttcgcctttaccgatcgtcagaaaatttacgatctggtggaagcaatcactggtttccgtatgcacccggcgtggttccgtattggcggcgtagcgcacgacctgccgcgtggctgggatcgcctgctgcgtgagttcctcgactggatgccgaaacgtctggcgtcttacgagaaagcggcgctgcaaaacactattctgaaaggtcgttcccagggcgttgccgcctatggcgcgaaagaggcgctggagtggggcaccactggcgcgggcctgcgcgccaccgggatcgacttcgacgtgcgtaaggcgcgtccgtattctggctatgaaaacttcgactttgaaatcccggttggtggtggtgtttctgattgctacacccgcgtaatgctgaaagtggaagagctgcgccagagtctgcgcattcttgagcagtgcctcaacaacatgccggaaggcccgttcaaagcggatcacccgctgaccacgccgccgccgaaagagcgcacgttgcaacatatcgaaaccctgatcacccacttcctgcaagtgtcgtggggtccggtgatgccagccaatgaatctttccagatgattgaggcgaccaaggggatcaacagttactacctgaccagcgacggtagcaccatgagttatcgcacccgtatccgtacgccgagttatgcgcatttgcagcaaattccggcggcgatccgcggcagcctggtgtctgacctgattgtttatctgggcagtatcgattttgttatgtcagatgtggaccgctaa

SEQ ID NO: 36106 - DNA, 501 bp, Escherichia coli
atgcacgagaatcaacaaccacaaaccgaggcttttgagctgagtgcggcagagcgtgaagcgattgagcacgagatgcaccactacgaagacccgcgtgcggcgtccattgaagcgctgaaaatcgttcagaagcagcgtggctgggtgccggatggcgcgatccacgcgatcgccgatgtgctgggtattccggcgagcgacgtcgaaggtgtggcaacgttttatagccagatcttccgccagccggttggtcgccatgtgatccgttattgcgacagcgtggtctgtcatatcaacggttatcagggtattcaggcggcgctcgagaaaaagctgaacatcaaaccagggcaaacgacatttgacggtcgctttacgctgctgccaacttgctgcctggggaactgtgataaagggccaaacatgatgatcgatgaggatactcacgcacatctgaccccggaagcgatccctgaactgctggagcggtataaatga

SEQ ID NO: 36107 - DNA, 1338 bp, Escherichia coli
atgaaaaacattatccgtactcccgaaacgcatccgctgacctggcgtctgcgcgatgacaaacagccagtgtggctggacgaatatcgcagcaaaaacggttacgaaggcgcgcgtaaggcgctgaccgggctgtctccggacgaaatcgttaatcaggtaaaagacgctggtctgaaagggcgcggcggcgcgggcttttcgactggtctgaagtggagcctgatgccgaaagacgaatccatgaacatccgttacctgctgtgtaacgccgatgaaatggaaccgggcacctataaagaccgcctgttgatggagcaactgccgcacctgctggtggaaggtatgcttatctccgcgtttgcgctgaaagcttaccgtggctacatcttcctgcgtggcgaatatattgaagcggcagtgaatctgcgccgcgccattgccgaagcgactgaagcgggcttgcttggcaaaaacattatgggaacaggtttcgacttcgaactgttcgtccataccggtgcagggcgctacatctgcggggaagaaacagcgttaatcaactccctggaagggcgtcgtgctaacccacgctcgaaaccccccttcccggcaacctccggcgtatggggcaaaccgacctgtgtcaataacgtcgaaaccctgtgtaacgttccggcgatccttgctaacggcgtggagtggtatcagaacatctcgaaaagtaaagatgctggcaccaagctgatgggcttctccggtcgggtgaaaaatccgggcctgtgggaactgccgttcggcaccaccgctcgcgagatcctcgaagattacgccggtggtatgcgtgacggtctgaaattcaaagcctggcagccaggcggtgcgggtactgacttcctgactgaagcgcaccttgacctgccgatggaattcgaaagtatcggtaaagcgggaagccgtctgggtacggcgctggcgatggcggttgaccatgagatcaacatggtgtcgctggtgcgtaacctggaagagtttttcgcccgtgagtcctgtggctggtgtacgccgtgccgcgacggtctgccgtggagcgtgaaaattctgcgcgcgctggagcgtggcgaaggtcagccgggcgatatcgaaacacttgagcaactgtgtcgattcttaggcccgggtaaaactttctgtgcccacgcacctggtgcagtggagccgttacagagcgccatcaaatatttccgcgaagaatttgaggcgggaatcaaacagccgttcagcaatacccatttgattaatgggattcagccgaacctgctgaaagagcgctggtaa

SEQ ID NO: 36108 - DNA, 2727 bp, Escherichia coli
atggctacaattcatgtagacggcaaagaatacgaggtcaacggagcggacaacttgctggaagcttgtctgtctctgggccttgatattccttacttttgctggcatccggcgctgggaagcgtcggtgcttgccgccagtgtgcggtgaagcaataccaaaacgcggaagacacgcgtggtcgcctggtgatgtcctgtatgacaccggcttccgatggcacctttatttccattgacgatgaagaagcgaaacagttccgtgaaagtgtggtcgagtggttaatgaccaaccacccgcacgattgtccggtatgtgaagaaggcggtaactgccatcttcaggatatgaccgtgatgaccggacacagcttccgtcgctaccgtttcaccaaacgtacccaccgtaatcaggatttggggccattcatctctcacgaaatgaaccgctgcatcgcctgctaccgctgcgtgcgttactacaaagattacgctgacggcacggacctgggcgtttacggtgcacacgacaacgtctacttcggtcgcccggaagacggcacgctggaaagcgaattttccggtaacctggtcgaaatttgcccgaccggcgtatttaccgacaaaacgcactccgagcgttacaaccgtaaatgggatatgcagtttgcgccgagcatctgccagcaatgttccatcggctgtaacatcagccccggcgagcgttatggcgaactgcgtcgaatcgaaaaccgttacaacggtacagtaaaccactacttcctctgcgaccgtggtcgtttcggttacggttacgtcaacctgaaagatcgtccgcgtcagccagtacagcgtcgtggcgatgatttcattaccctcaatgccgaacaggcaatgcagggcgcagcagatattctgcgtcagtcgaagaaagtgatcggcatcggttctccgcgtgccagcgtggaaagcaactttgcgctgcgtgagctggtgggcgaagaaaacttctacaccggtatcgctcacggtgagcaggaacgtctgcaactggcgctgaaagtgctgcgtgaaggcggcatttatacgccggcactgcgcgaaatcgaatcttacgatgcggtactggtgctgggcgaagacgttacccagaccggtgcgcgcgtcgcgctggcagtgcgtcaggcggtgaaaggtaaagcgcgcgaaatggcggcagcacagaaagtggctgactggcagattgcggcaatcctcaacatcggtcaacgtgcgaagcatccgctgtttgttaccaacgttgatgatacccgtctggatgatatcgcggcgtggacttaccgcgcaccggttgaagatcaggcgcgtttaggttttgccatcgcccatgcgctggataactccgcgccagcggttgacggaatcgaacctgagctgcaaagcaaaatcgacgtcatcgtgcaggctctggcgggtgcgaagaaaccgttgattatctccgggacgaacgctggtagcgctgaagtgattcaggctgcggctaacgtggcgaaagccctgaaaggtcgcggcgctgacgtcggtatcaccatgattgctcgctctgtaaacagtatggggctgggcattatgggcggtggatcacttgaagaagcgttaaccgaactggaaaccggacgcgccgacgcggtggtggtgctggaaaacgatctgcatcgtcacgcttccgctacccgcgtgaatgctgcgctggcgaaagcgccgctggtgatggtggttgaccatcaacgcacggcgattatggaaaacgcccatctggtgctttctgctgccagctttgctgaaagcgacggtacggtgatcaacaacgaaggccgcgcccaacgtttcttccaggtttacgatccggcctattacgacagcaaaactgtcatgctggaaagctggcgctggttacactcgctgcacagcaccctgctgagccgtgaagtggactggacgcagctcgaccatgtgattgacgctgttgtggcgaaaatcccggagctggcaggtatcaaagatgctgcgccggatgcgacattccgtatccgtggacagaaactggcccgtgaaccgcaccgttacagcggtcgtaccgccatgcgcgccaatatcagcgttcatgagccgcgtcagccgcaggatattgacaccatgttcaccttctcgatggaaggtaacaaccagccgaccgcgcaccgttcgcaagtgccgtttgcctgggcgccaggctggaactccccgcaggcgtggaacaaattccaggacgaagttggcggcaaactgcgctttggcgatccgggcgtgcgtctgtttgaaaccagcgaaaacggtctggattacttcaccagcgtaccggcacgcttccagccacaggacgggaaatggcgtatcgcgccgtactaccacctgtttggcagcgatgaattgtcacagcgagctccggtcttccagagccgtatgccacagccatacatcaaacttaacccggcggatgccgcgaagttgggtgtgaacgcgggcactcgcgtctcctttagttacgatggcaacacggtcacgctgccggttgaaatcgccgaagggctgacggcagggcaggtgggcttgccgatgggtatgtccggcattgctccggtgctggctggcgcgcatcttgaggatctcaaggaggcacaacaatga

SEQ ID NO: 36109 - DNA, 978 bp, Escherichia coli
atgagttggatatcaccggaactgattgagatcctgctgaccatcctcaaagcggtggtgatcctgctggtggttgtcacctgtggggcattcatgagctttggcgaacgtcgcctgctgggtctgttccagaaccgttacggacctaaccgtgttggctggggcggttcgctccagctggtcgcggacatgatcaagatgttcttcaaagaagactggatcccgaaattctcggatcgcgtcatctttaccctggcaccgatgattgcctttacctcgctgctgctggcctttgcgattgtgccagtcagcccaggttgggtggttgccgacctgaacatcgggattttgttcttcctgatgatggccggtctggcggtctacgcggtgctgtttgcgggctggtcaagtaacaacaaatactcgctgctgggggcgatgcgtgcttctgcgcagactctgagctacgaagtgttcctcgggctttccctgatgggcgtggtggcgcaggccggttcattcaacatgaccgacatcgttaacagccaggcgcatgtgtggaacgtcatcccgcaattctttggttttattacctttgccatcgcgggcgtggcggtgtgtcaccgtcacccatttgaccagccggaagccgagcaggaactggcggatggttaccacattgaatattccggcatgaagttcggtctgttcttcgtgggcgaatacatcgggattgtgaccatctctgcactgatggtgacgctgttcttcggtggctggcaaggcccgttgttaccgccattcatctggttcgcgctgaaaaccgcgttctttatgatgatgttcattttgattcgtgcgtcgttaccgcgtccgcgttatgaccaggtaatgtccttcggctggaaaatctgcctgccgctgacgctgatcaacttgctggtaacggcggctgtcattctctggcaggcgcaataa

SEQ ID NO: 36110 - DNA, 543 bp, Escherichia coli
atgaccttaaaagaattgttagtaggtttcggcacccaggttcgtagtatctggatgatcggcctgcacgcgttcgccaaacgcgaaacgcgaatgtacccggaagagccggtctatctgccgccccgttatcgtggtcgtatcgttctgacccgcgatccggacggcgaagagcgttgcgtagcctgtaacctctgcgcggtagcctgcccggtcggctgtatctcgctgcaaaaagcagaaaccaaagacggtcgctggtatccggaatttttccgcatcaacttctcacgctgcattttctgtggtctgtgcgaagaagcctgtccgaccactgcgattcagttaaccccggatttcgaaatgggggaatacaagcgccaggatctggtttacgagaaagaggatctgctgatctccggtccgggcaaatacccggaatataacttctaccggatggcaggtatggcaatcgacggcaaagataagggcgaagcagagaacgaagccaagcctatcgacgtcaagagcctgttaccgtaa

SEQ ID NO: 36111 - DNA, 555 bp, Escherichia coli
atggagttcgctttttatatctgtggcctgatagccatacttgcgaccttgcgagtgatcactcataccaatccggtacacgcactgctgtacctgattatttcgctgctggcgatttctggggtgttcttctcgctaggcgcttactttgccggtgcgctggaaattatcgtctacgcgggtgccattatggtgctgttcgtgttcgtggtgatgatgctcaacctgggcggttcagaaatcgaacaggaacgccagtggctgaaaccgcaggtgtggattggtccggcaattttgtcagccatcatgctggtggtgattgtttacgccattctcggtgttaacgatcaaggtatcgacggtacgccaatcagtgctaaagcagtgggtattacgctgttcggaccttacgtactggcggtggaactggcttctatgctgctgctcgcgggtctggttgtggccttccacgtcggtcgtgaagagcgtgcgggtgaagtgctgagcaatcgtaaagacgacagcgcgaaaagaaaaacggaggagcacgcatga

SEQ ID NO: 36112 - DNA, 303 bp, Escherichia coli
atgatccccttacaacatggactgatcctcgcggcaatcttattcgttcttggcttaaccggtctggttatccgtcgcaatctgctgtttatgctgattggtctggaaatcatgattaacgcctccgcgctggcctttgtggtcgccggaagctactggggtcagaccgacggtcaggtgatgtacattctcgccatcagcctcgcggcggcagaagcgagtatcggccttgcgctgctgctgcaacttcaccgtcgtcgccagaacctgaacatcgattcagtaagtgagatgcgcggatga

SEQ ID NO: 36113 - DNA, 135 bp, Escherichia coli
atgtttcattttataatgaagaatctgttgttctatggcaaattaatatatttcctgactatccattctttcgtgtggaaaaagaaaattattatcatcgtgatagctatgtacagtctgttatatcgaatatga

SEQ ID NO: 36114 - DNA, 897 bp, Escherichia coli
ttggaggagaatatcttcccggcaattggtactcgcaacattgctgaactaggcacccgcgatctgttaattcctattaaagccgtggagaagtccggacgtcttgaagtggcttcccgccttcaacagcgcactacggccatcatgcgttatgcagtgcaaagcgggttaattgattacaatccggcgcaagagatggcgggggcggttgcttccagtaatcgacagcatcgtccggcgctggagttaaagcgtatcccggaattactccagaaaatcgatgaatacaccggcaggccactaacccgctgggcaactgaacttactctgcttatctttattcgatccagtgagctgcgttttgctcgctggtcggagatagatttcgacacgtcgatgtggaccatcccgcctgagcgagagcctattcccggcgtgaaacattctcagcgaggatcaaagatgcgtacacctcatctagtgccgctttcaaagcaggcgctagcgaccctgaagcagataaaacagttctgtggcgaacatgagctgatttttattggcgatcatgatccgcgtaagcccatgagcgagaacacggtaaacagtgcactacgggtgatgggttatgacactaaggttgaagtttgcggccacggcttccgcacaatggtctgtagttcgttaattgagtcagggctatggtcgaaggatgcggtggaaaggcagatgagccatatggaacgcaattcggtgagggcggcgtatatccataaagcggaacatctggatgagcgcaagctgatgttacagtggtgggcggattttctggatgcgaacagagagaagggtatcagtccgtttgaatatgcaaaggttaacaatccgctgagaaggtga

SEQ ID NO: 36115 - DNA, 192 bp, Escherichia coli; identical to SEQ ID NO: 29988

SEQ ID NO: 36116 - DNA, 1518 bp, Escherichia coli
atgtctgaacgagaaacacggggagccaatgaggctattgattttaacgatgaactgagaaatcgccgcgaaaaactggcggcactacgtcagcaaggtgtggcgtttcccaatgattttcgccgcgaccatacctctgaccagttgcacgaagagtttgatgcgaaggataaccaggaactggaatccttaaacattgaagtctcggttgctggccgaatgatgacccgtcgtatcatggggaaagcctcctttgtaacgttgcaggatgtcggtggccgtattcaactgtacgttgcaagagatagcctgccagaaggtgtttataacgatcagtttaaaaaatgggatctgggtgacattatcggtgcccgcggtacgctgtttaagacgcaaacgggtgagctttccattcactgtactgagctgcgcctgctgactaaagcactacgtcctttaccagataaattccatggtctgcaggatcaggaagtccgttatcgtcaacgttatctggacctcatcgctaacgataaatcccgtcaaacgtttgttgtccgttcaaaaattctggccgctatccgtcagttcatggtcgcgcgcggctttatggaagtagaaaccccgatgatgcaggtaattccaggtggggcatctgctcgcccgtttattacccatcataacgctctggatttagatatgtacctgcgtatcgcgccagagctgtatctgaaacgtctggttgtaggcggttttgaacgggtattcgaaatcaaccgtaacttccgtaatgaaggtatttctgttcgccataatcctgagttcacaatgatggaactctacatggcgtatgcggattaccacgatttgattgaactgacagagtcactgttccgcaccctggcacaagaggttctgggtaccactaaagtcacttatggcgagcatgtgtttgatttcggcaaaccgtttgaaaaactcaccatgcgcgaagcaatcaaaaaatatcgtccagaaaccgatatggccgacctggataattttgatgccgctaaagcattagctgaatctattggtattacggtagagaaaagctgggggctgggacgtattgtcacggagatctttgatgaagtggcagaagcacatctgattcagccaacctttattacggaatatcccgcagaagtgtcaccgctggcgcgccgtaatgatgttaacccggaaatcaccgaccgatttgaattcttcatcggtggtcgtgaaatcggtaatggttttagcgaattaaacgacgcagaagatcaggctgaacgtttccaggaacaggttaacgctaaagctgcaggtgacgacgaagccatgttctatgacgaagattacgtgactgcgctggaatatggtttgccaccaaccgctggtctgggtattggtatcgaccgaatgattatgctgtttacaaacagtcatactattcgcgacgttattctcttcccggcgatgcgcccacagaaataa

SEQ ID NO: 36117 - DNA, 1458 bp, Escherichia coli
atgaaaacaccctcacagccgcgcgcgatatactatatcgtggcgatccaaatctgggagtacttcagtttttacggcatgcgtgccttactcattctctatctcacccatcagcttggttttgatgataaccatgccatcagcctgttcagcgcatatgcttctctggtttacgttacccctattctcggcggctggcttgccgaccgcctgctcggcaaccgcactgcagtgattgccggcgcgctgttaatgacccttggccatgtagtgctgggcattgatacaaattcaacctttagcctgtatctggcgctggcaatcattatttgtggctacggtttattcaaatcaaacatcagctgtttgcttggcgagctctacgacgagaacgatcatcgacgtgatggcggtttttcgctgctgtatgctgcaggcaatatcggttctatcgccgcccccatcgcctgcggcctggctgctcagtggtatggatggcatgttggctttgcccttgcgggtggcggcatgtttatcggtttgttgattttcttaagcggtcatcgtcatttccagtccacgcgtagtatggataagaaagcgctcactagcgtcaaatttgccttaccagtatggagctggttagtggtgatgctctgtttagccccagtattttttaccctgctgctggagaacgactggtccggatatttgctggcgatcgtttgcctcattgcagcacaaatcattgcccgcatgatgatcaaattccccgaacaccgccgtgctctttggcaaattgtattgttgatgtttgtcgggacgttgttctgggtactggcacaacagggcggcagtaccatcagcttgtttatcgatcgctttgtgaatcgtcaggcattcaatattgaagtacctacagcactattccagtcggtgaatgccattgcggtgatgctcgctggggttgttctggcctggctggcgtcgccagaaagccgcggcaattcagcattgcgcgtctggctgaagtttgcctttggcttactgctgatggcttgtggctttatgttgctggcatttgatgcccgacatgcagcggctggcggtcaagcgtcaatgggcgtgatggtatccgggctggcgctaatgggctttgctgaactctttattgacccggtggcgattgcgcaaatcacgcgtctgaaaatgtctggcgtattaaccggtatttatatgctggcaacaggcgcggtcgccaactggctggcaggcgtcgtggcacagcagacgacagagtcgcaaattagcggtatggcaattgccgcttaccagcgattcttttctcagatgggagagtggacgttggcttgtgtcgcgatcatcgtggtattggcctttgctacccgttttctgtttagcacgccgacgaatatgatacaggagagcaacgattaa

SEQ ID NO: 36118 - DNA, 2148 bp, Escherichia coli
atgaacgttattgcaatattgaatcacatgggggtttattttaaagaagaacccatccgtgaacttcatcgcgcgcttgaacgtctgaacttccagattgtttacccgaacgaccgtgacgacttattaaaactgatcgaaaacaatgcgcgtctgtgcggcgttatttttgactgggataaatataatctcgagctgtgcgaagaaattagcaaaatgaacgagaacctgccgttgtacgcgttcgctaatacgtattccactctcgatgtaagcctgaatgacctgcgtttacagattagcttctttgaatatgcgctgggtgctgctgaagatattgctaacaagatcaagcagaccactgacgaatatatcaacactattctgcctccgctgaccaaagcattgtttaaatatgttcgtgaaggtaaatatactttctgtactcctggtcacatgggcggtactgcattccagaaaagcccggtaggtagcctgttctatgatttctttggtccgaacaccatgaaatctgatatttccatttcagtatctgaactgggttctctgctggatcacagtggtccacacaaagaagcagaacagtatatcgctcgcgtctttaacgcagaccgcagctacatggtgaccaacggtacttccactgcgaacaaaattgttggtatgtactctgctccggcaggcagcaccattctgattgaccgtaactgccacaaatcgctgacccacctgatgatgatgagcgatgttacgccaatctatttccgcccgacccgtaacgcttacggtattcttggtggtatcccacagagtgaattccagcacgctaccattgctaagcgcgtgaaagaaacaccaaacgcaacctggccggtacatgctgtaattaccaactctacctatgatggtctgctgtacaacaccgacttcatcaagaaaacactggatgtgaaatccatccactttgactccgcgtgggtgccttacaccaacttctcaccgatttacgaaggtaaatgcggtatgagcggtggccgtgtagaagggaaagtgatttacgaaacccagtctactcacaaactgctggcggcgttctctcaggcttccatgatccacgttaaaggtgacgtaaacgaagaaacctttaacgaagcctacatgatgcacaccaccacctctccgcactacggtatcgtggcgtccactgaaaccgctgcggcgatgatgaaaggcaatgcaggtaagcgtctgatcaacggttccattgaacgtgcgatcaaattccgtaaagagatcaaacgtctgagaacggaatctgatggctggttctttgatgtatggcagccggatcatatcgataccactgaatgctggccgctgcgttctgacagcacctggcacggcttcaaaaacatcgataacgagcacatgtatcttgacccgatcaaagtcaccctgctgactccggggatggaaaaagacggcaccatgagcgactttggtattccggccagcatcgtggcgaaatacctcgacgaacatggcatcgttgttgagaaaaccggtccgtataacctgctgttcctgttcagcatcggtatcgataagaccaaagcactgagcctgctgcgtgctctgactgacttcaaacgtgcgttcgacctgaacctgcgtgtgaaaaacatgctgccgtctctgtatcgtgaagatcctgaattctatgaaaacatgcgtattcaggaactggctcagaatatccataaactgattgttcaccacaatctgccggatctgatgtatcgcgcatttgaagtgctgccgacaatggtaatgactccgtatgctgcgttccagaaagagctgcacggtatgaccgaagaagtttacctcgacgaaatggtaggtcgtattaacgccaatatgatccttccgtatccgccgggagttcctctggtaatgccgggtgaaatgatcaccgaagaaagccgtccggttctggagttcctgcagatgctgtgtgaaatcggcgctcactatccgggctttgaaaccgatattcacggtgcataccgtcaggctgatggccgctataccgttaaggtattgaaagaagaaagcaaaaaataa

SEQ ID NO: 36119 - DNA, 1335 bp, Escherichia coli
atgagttctgccaagaagatcgggctatttgcctgtaccggtgttgttgccggtaatatgatggggagcggtattgcattattacctgcgaacctagcaagtatcggtggtattgctatctggggttggattatctctattattggtgcaatgtcgctggcgtatgtatatgcccgactggcaacaaaaaacccgcaacaaggtggcccaattgcttatgccggagaaatttcccctgcatttggttttcagacaggtgttctttattaccatgctaactggattggtaacctggcgattggtattaccgctgtatcttatctttccaccttcttcccagtattaaatgatcctgttccggcgggtatcgcctgtattgctatcgtctgggtatttacctttgtaaatatgctcggcggtacctgggtaagccgtttaaccactattggtctggtgctggttcttattcctgtggtaatgacagctattgttggctggcattggtttgatgctgcgacttatgctgctaactggaatactgcggataccactgatggtcatgcgatcattaaaagtattctgctctgcctgtgggccttcgtgggtgttgaatccgcagcagtaagtactggtatggttaaaaacccgaaacgtaccgttccgctggcaaccatgctgggtactggtttagcaggtattgtttatatcgctgcgactcaggtgctttccggtatgtatccgtcttctgtaatggcagcttccggtgctccgtttgcaatcagtgcttcaactatcctcggtaactgggctgcgccgctggtttctgcattcaccgcctttgcgtgcctgacctctctgggctcctggatgatgttggtaggccaggcaggtgtacgtgccgctaacgacggtaacttcccgaaagtttatggtgaagtcgacagcaacggtattccgaaaaaaggtctgctgctggctgcagtgaaaatgactgccctgatgatcctcatcactctgatgaactctgccggtggtaaagcatctgacctgttcggtgaactgaccggtatcgcagtactgctgactatgctgccgtacttctactcttgcgttgacctgattcgttttgaaggcgttaacatccgcaactttgtcagcctgatctgctctgtactgggttgcgtgttctgcttcatcgcgctgatgggcgcaagctccttcgagctggcaggtaccttcattgtcagcctgattatcctgatgttctacgctcgcaaaatgcacgagcgccagagccactcaatggataaccacacagcgtctaacgcacattaa

SEQ ID NO: 36120 - DNA, 462 bp, Escherichia coli
atgattactgatgccagtggcgtcaccagaagggaaggcgggattttgggaatgtggagcaatatatttccagaacgtaatggtagcaacgagcaaaaaggtgatagcacaccgcacatacccgacatcagggatattcttgatattttccctcagccactgcgggaaaagctgttgaacaaaatcagtgaagccatcgactatgaacccgtgattggtgccatgggaaaaactggcgcggggaaaagcagcgtatgtaatgcgctgtttaaaggggaggtttgtgcagttagcgacgttgaggcatgtactcgtgaagttcaggaattgcatatacgcttcggaaaacattcgctgaagataattgatatacctggtgtcggtgagaatgcccggcgggataggagtatgaagatttataccgcaatttgcttccctccctggatctcatcctgtgggtaa

SEQ ID NO: 36121 - DNA, 237 bp, Escherichia coli; identical to SEQ ID NO: 20817

SEQ ID NO: 36122 - DNA, 309 bp, Escherichia coli
  misc_feature (273)..(282): n is a, c, g, or t
gtgaaggcttggctgaatgttgggggacagggatacgatccgtcaattaatttccaggttctgaagtttttaaagcaggttgagcggctttcttcagttaaaacaacgtatctacctcaaattcgtgaattcggtatcgcatcaaaatcatcaagcctatatatggtcacggatcaggtacagggagaaacctgggataaaatagcggtccccgatgatgaaaaaatcgacctcattggtaagtttgtcgccgccgttgagcacttacatggnnnnnnnnnncatccaccctggcaatgtgatatttga

SEQ ID NO: 36123 - DNA, 285 bp, Escherichia coli
  misc_feature (271)..(280): n is a, c, g, or t
gtgggacgtaaatgggccaatattgttgctaaaaaaacggctaaagacggtgcaacgtctaaaatttatgcaaaattcggtgtagaaatctatgctgctgccaaacaaggtgaacccgatccagaattaaacacatctttaaaattcgttattgaacgtgcaaagcaggcacaagttccaaagcacgttattgataaagcaattgataaagccaaaggcggtggagatgaaacgttcgtacagggacgttatgaaggctttggtcctaatnnnnnnnnnncctaa

SEQ ID NO: 36124 - DNA, 738 bp, Escherichia coli; identical to SEQ ID NO: 36042

SEQ ID NO: 36125 - DNA, 186 bp, Escherichia coli
atggtgtgcaatctgccgcagggattccggacaccggtgaataacggcggagccgatctgtccgcaggtcagcgccagttgattgcgctggcccgcgcgcaactggcgaatgctcacatcctgctgctcgacgaagccacgtcatgtctggatcgcacatccgaagaacgactgatgtcatcgtaa

SEQ ID NO: 36126 - DNA, 261 bp, Escherichia coli
atgtatgcccgcgagtatcgctcaacacgcccgcataaagcgattttctttcatctttcttgcctcacccttatctgtagtgcgcaagtttatgcgaagccggatatgcgaccactggggccgaatatagccggtaaaggctccgtgttttaccatttcagcgccacctctttcgactctgtcgatggcacacgccattatcgggtatggacggccgtgccgaatacaaccgcaccggcatcgggttacccgattttataa

SEQ ID NO: 36127 - DNA, 1209 bp, Escherichia coli
gtgacgctaccggcggagctggcggtgatgctggggaggctggagcgggaactgcggcagggcagcgtgagtgaagaaagccagcagtggcttgcacagtgtgggttgacggcggaacagatggcggcgcaactggaggcggaatacatcccggagaggaaacttcatctttaccactgtgaccaccgtgggctgccgcaggcgcttatcagcccggaaggggaaacggcgtggcgcggggagtatgacgagtggggaaacctgctgggcgaaaccagcgcgcagcaccttcaacagtcactccgtctgccggggcagcagtatgatgaggagtcggggctgtactacaaccgtcaccggtactatgacccgctacaggggaggtatatcacccaggatccgattgggctgaaggggggatggaacctgtatgcgtatccactgaacccggtgcaacggctggatccgctgggattaagtgcggcgttgggcgcaggagcattaactgccatgggaactggttctgaagtaggtacagagatcggttcggtaggaggccctccggggatgttagtcggtgcggcagtcggtacggtggttattggtggtggtataataatatacaacaatcgcgaggctgttggggacgcgattgagaaaagtatggagatgcagggtgaagccgaattattaaatgcacaaagtcaaatggaattctggcgagatccctatggtgctttttccagcgtgtttggaaatgatgattcatcaaaagagaatccaaatgtcgggaaggatttgacggaggaagagaagaactgcctgggtggtggcagtacgggaagcccgggaggatggggaccagaagatgagaatagcgcaagagatcgtatgcagcatgaacggtataaagatgaattgcgacagaagatgggaaaacctgacgttacagattcaaatttgaaaaatattatagacgatctttatcggccaaatgcaaaagtaggaagtggaagcacagcagatgctgttcgttatgaattggccacaggtgaaaaagttggtggtagaggacatgtattgaaagcacaggattatacaagggctttacaggattggttggataagaatccaacagcatctccaggggatcgagcagcagcagaaaacgttcttcaggatttacagaatgctttgggaggcaagtaa

SEQ ID NO: 36128 - DNA, 924 bp, Escherichia coli
gtgcctgctccggagctgccctgtgagggtgtacgccgtggcctgttcgtaccccgctgtactgcccgccccgccgaagctgcgggccgtctcacggtgcagccggtcccgcgtgtactcgaccagcggcgttccgcccagcttcatccccgcaagataaccgctgccatacgtcagccactccaccggcggcagaccgtccggctcctgacgggtcgccagcccctgttcgctgtagacgtgcctcgtctcatgctcccacagcatctcccccgtctcctggttctccaccgtctgccgttcgcccgtcaggcggcctttatcgtcatagccgtagtggaccgccacacggtggccttcgctcaggtggctgatttctgtcagccagccgtggtcgtcatactgccactgctccgccgggtcgccgttcaccgtccggtgcgtgatgcgcccggcgtcatcgtagtaccactgcgtgacctgcccctcatcctcgctgcggatgagctgccctgtggcgctgtaccggtaacgctgtgtcctgccgtcaaagccgcgctgctccgtcagcctgtccaccgggtcataccggaacgtggactggctgccgttctcgttggtcagcacggtgatgcgcccggcggcgtcatactccatgctgcgcgtcagtccgccctgcgtggtgctgacggcctttccccacgcatcatactgtgtctcactccggctgccgttcggggcaatgatagcggtgaggtcgcctgcggcgctgtactcataacgggtttcacgtccctgcgcatccttctgactgaccagttgaccacgcgggttataactgctgtaagtgctgatgccttcctcccggtgaaccgccgtcctctgaccgtaccggtcgtattcataccgcgtcgtgtaccctga

SEQ ID NO: 36129 - DNA, 729 bp, Escherichia coli; identical to SEQ ID NO: 31717

SEQ ID NO: 36130 - DNA, 852 bp, Escherichia coli
atgctcgaccggctggaaagtgaaatcctggctgaccgggtgagtgaggaaagccgccgctggctggcatcgtgcggcctgacggtggagcagatacaaaaccagatggacccggtgtacacgccggcgcgaaaaatccacctgtaccactgcgaccatcgcggcctgccgctggcgcttgtcagcacggaaggggcaacagaatggtgcgcagaatacgatgaatggggcaacctgctgaatgaagagaacccgcaccagctgcagcagctcatccgcctgccgggtcagcagtatgatgaggagtccggcctctattacaaccgccaccgctattatgacccgctgcaggggcggtatatcactcaggatccgattgggcttaaggggggatggaatttttatcagtatccgttgaatccggtatctggtttcgatccattagggttaaaagtgtcttttcagggagatgaaagtacacaaaaaactttaaaagaagcatataaagctgtagcagaaacaaagtttggacataaaataacagaagaattagagtcatcagagcatgaatatatatttagaggattaagaaaaggcataaaccaaacatgctacgatgatactgaatatagtttttacattgatattgataacgaccatagctcatgtgtatatcaaggaaaaaacaaagcatgtgccatgaaacccactctgttgagtgtggttcttgcgcatgaaatggggcatgcaaagggaatgaaagacgatggaactgactcgatggctaatgttgataaatatgaaaacccatttcgtaaagagttgggcttgccagcaagaatgaaatattaa

SEQ ID NO: 36131 - DNA, 336 bp, Escherichia coli
atgagtatagcctggcatgatgacattaatattgttttctgctttgttaattattattttttgcaggttggtaatatcctcttgaatttcacggataattgctcgcatatgcattttagaatcaacagtggtttgatcattacgacttcgccccgtgtggagtttacctccaacagggccaataatttcagtcatccgtctttcaatggccatatgaatatcttcatctacagtatcgaaaatgaattggccgtcttcaatttctttacttacttgtctcaaacctctaataattgtattggcttcatcctgtgtgattattccctgacgtcctaa

SEQ ID NO: 36132 - DNA, 651 bp, Escherichia coli
  misc_feature (593)..(593): n is a, c, g, or t
atgtttaatgaagtccatagtatccatggtcatacattattgttgatcactaaaccttctttgcaggcgacagctctcttgcagcaccttaaacaatcgctggcaattacaggaaaattacataatattcaacgttctctggacgatatatcttcaggctctattattcttctggatatgatggaagcggataaaaagcttatccattattggcaggatactttgagcaggaaaaacaacaatatcaaaatattgttgctaaatacgcctgaagattacccgtaccgcgacattgaaaactggcctcatatcaacggcgttttttatgccatggaggatcaagaacgtgttgtcaatgggttgcaaggcgtcctgcgcggcgaatgctactttacgcaaaagcttgccagttacctgattacgcattcaggtaactatcgttataacagcacggaatcagccctccttactcatcgggaaaaagagatcctgaataagctgcgtatcggcgcgtctaataacgagatcgctcgttcgttgttcatcagcgaaaatacggttaaaacgcatctttataatcttttcaagaaganagccgtaaaaaaccggacacaagcggtttcctgggcaaacgataacctcaggcgataa

SEQ ID NO: 36133 - DNA, 543 bp, Escherichia coli
atggacgcagagaaaattcagtcagatatagatgctcttttgacatacatgaacgatgacatggagaatcttggtgaaacaataaaaaccgttacatttggattcgaaacaggccagaacgaccgcattgctatagacgagttgcttcactggcgggaagagtatttgttcaaaatcatcaatatttgccattcccgctctctattacgtaaggactttggagattttgagcatgtatccttgacagaagagggtcagagtcgtgctatatcaatcaaacacggaaaaaatcgctcttacgagttaggggccagcatgcaaatcgcaacgttaaatgttcatgggcctgcacaggttggtaacggtaatacgcaaaacatccacaatgtatttaatcaattacttcagcagatcgagaaatcttccgcttctgatgaagaaaaacaggaagccaaaaaacgcctggcgaaatttttggaacatcctttggttggttctattgtcggcggtcttgctggttcccttcctggtctaatgggatga

SEQ ID NO: 36134 - DNA, 675 bp, Escherichia coli
atgcttagtggcgttgtcgcactttatttccataccccatcattgctcgcatttgtcattcccttatggttcaccactccaatagcgagtcttatgcttaatcaacagatcaatattcattttgctgttgtatggtgtattttttcactggcgctatatggtgggcgactcattttgttacgttggtttgaagaagcatgggtacaaaacagttataacaaccagttaattaatcgccttgatgcattagcacatcgtgatcctttaactgggatagcaaaccgacgtgcaatgaacagtatcttacacgacgcgatggataacggcgggtcatttgctcttattatgctggatgtcgatttttttaaacgttacaacgacacttacgggcatcctgctggggatcgttgtctaatacaagttgccgacgctctacagcgttcaactcgccagtcggaggatgttgttgtccgttatggtggcgaagagtttgccatcatactttttaatgcaacattgccggaagcagagacggtagcagccagagtgaagcaagaacttaaactggcagctatcccacatcaggcatctgctgttaatgcatttgttacggttagtcaggggattacctgttctgctcccgcaaaaacggtaaatggcttcactgcaaaatga

SEQ ID NO: 36135 - DNA, 315 bp, Escherichia coli
atgactgtagaacaggcaattttaaatggctacaccactggagataatttatccggattgatttacgtcaataccggagaaaaaacaaaaaccattacagtgaaggatgaggttactggcgcttctcaaacacttcaagtgtttgatactgactctttctcacaacgcgatgcggggactgggggaaatgaaaccattcctggttttagtggcactgcggattttttcaatgcgacacgttttgtaatttttattttcagcctggtgcaaccatgcaggggggcggcgttactcaaaaaatcattgactcaatga

SEQ ID NO: 36136 - DNA, 303 bp, Escherichia coli
  misc_feature (254)..(263): n is a, c, g, or t
atgaaaggattattagctttactcatttcttctatggtccttcctgcacatgccggtattgttatctacgggacgcgtattatttacccggcagaaaataaagaagtgatggtgcagttgatgaatcagggaaaccgttcttcgctgctgcaggcgtggattgatgatggcgatacgtcgttaccaccagaaaaaattcaggttcctttcatgttaacgccaccagtggcaaaaataggggcaaattccgggcnnnnnnnnnnattccgggcagcaagtaaaaatcaaaattatgccgaataa

SEQ ID NO: 36137 - DNA, 492 bp, Escherichia coli; identical to SEQ ID NO: 31698

SEQ ID NO: 36138 - DNA, 237 bp, Escherichia coli; identical to SEQ ID NO: 20817

SEQ ID NO: 36139 - DNA, 270 bp, Escherichia coli
  misc_feature (208)..(217): n is a, c, g, or t
atgataaccattcccattacgtttcgtatgttgatagcaaagtatctctgtctgctgaagcccttttggctgcgtaagaataataaaacttcagtgctgttaatcattattatcctcgccatgatccttggcgtggttaaaattcaggtctggttaaacgactggaataatgattttttcaatgcgctaagccagaaagaaaccaatnnnnnnnnnngctttggcagcttgtcctttggttccctgccctgctggggatctttgtattaa

SEQ ID NO: 36140 - DNA, 324 bp, Escherichia coli; identical to SEQ ID NO: 36039

SEQ ID NO: 36141 - DNA, 342 bp, Escherichia coli
atgacacacaagagaattcctaaagactgggtaatcaaacgctcaactccgttcttcacaaaagagaacgtaccttcagcgttattaacacatcataatacagcagcaggtgtttttggacagttatgcgtgatggaaggtactgtaacatattatggttttgctgatgagaatgctactgaaccggagataaaagtagtcattaatgctggcgcttttgcaacaagcccaccacaatactggcaccgtgttgaactaagcgatgatgctcagtttaatattaacttttgggtagctccagacttctcaggcgaaaaagtctataccgcaaaaaaagaatag

SEQ ID NO: 36142 - DNA, 288 bp, Escherichia coli; identical to SEQ ID NO: 36051

SEQ ID NO: 36143 - DNA, 1149 bp, Escherichia coli
atgaggcgcttcgcaggcgcatgtcgtttcgttttcaatcgtgctctggcgcttcagaatgagaatcatgaggccggtaataaatacatcccttacgggaaaatggcttcctggctggttgagtggaaaaacgccactgaaacgcaatggcttaaagattcgccctcacagccattgcaacagtcactgaaagaccttgagcgggcttacaaaaacttcttccggaagcgggctgcttttccccgattcaaaaagcggggacagaatgatgcattccgctacccgcagggcgttaagctcgatcaggaaaacagccgtatttttctgccgaaacttggctggatgcgctaccggaatagccgtcaggtcacgggtgttgtgaaaaatgtcactgtctgccagtcctgcggtaagtggtacatcagtattcagacagaaagtgaagtatcaactccggttcacccttcagcatcaatggtcgggctggatgctggcgtggctaaactcgccacgctgtcagatggcacagtctttgagcctgtaaacagttttcagaaaaaccagaagaagctggcgagacttcagcgacagttaagccgcaaggtcaaattcagcaacaactggcagaagcagaaacgcaaaatacagcgactgcattcctgtatcgcaaatatccgcagggactaccttcacaaagtcacaacgaccgtcagcaaaaaccacgcaatgatagtcattgaggatttgaaggtcagtaacatgtcaaagtcagcagcgggtacggtcagccagccggggcgcaatgtccgggcaaaatcaggtttaaaccgttcgatactggatcagggcaggtatgaaatgcgccgccagcttgagtacaagcagctctggcgtggcggtcaggtgcttgctgttccgccagcgtacacaagccagcgttgcgcgtgctgtggtcatacagcgaaagaaaatcgcctgtcacaaagtcaattcagatgccaggtatgtggatatacagcgaacgccgatgtaaatggcgctcgtaacattttagcggcggggcacgccgttcttgcctgtggagggatggtgcagtcaggccgcccgttgaagcaggaacccaccgaaatgattcaggcgacagcctga

SEQ ID NO: 36144 - DNA, 924 bp, Escherichia coli
gtggcaaagcaaaagttcaaaatcaccaactggcccacctacaataaagccctcatcaaccgtggctccataactttctggctggatgatgaagctattcaggcctggtatgagtcagcaacaccttcttcacgaggcagacctcagcgctattctgaccttgccatcacgactgtgctggtcattaaacgcgtattcaggctgaccctgcgcgctgcgcagggctttattgattccattttttctctgatgaacgttccgctacgctgcccggattacagctgtgtcagcaggcgggcaaagtcggttaacgtcagtttcaaaacgttcacccggggtgaaatcgcgcatctggtgattgattccaccgggctgaaggtctttggtgaaggcgagtggaaagtcaaaaagcatggccaggaacgccgtcgtatatggcgaaagttgcatctggcagttgacagcaacacacatgaaatcatctgtgcagacctgtcgctgaacaatgtgacggactcagaagccttcccgggtcttatccggcagactcacagaaaaatcagggcagcatcggcagacggcgcttacgacacccggctctgtcacgatgaactgcggcgtaagaaaatcagcgcgcttatcccaccccgaaaaggtgcgggttactggcccggtgaatatgcagaccgtaaccgtgcagtggctaatcagcgaatgaccgggagtaatgcgcggtggaaatggacaacagattacaaccgtcgctcgatagcggaaacggcgatgtaccgggtaaaacagctgttcgggggttcactgacgctgcgtgactacgatggtcaggttgcggaggctatggccctggtacgagcgctgaacaaaatgacgaaagcaggtatgcctgaaagcgtgcgtattgcctga

SEQ ID NO: 36145 - DNA, 141 bp, Escherichia coli
atgtaccgggtaaaacagctgttcgggggttcactgacgctgcgtgactacgatggtcaggttgcggaggctatggccctggtacgagcgctgaacaaaatgacgaaagcaggtatgcctgaaagcgtgcgtattgcctga

SEQ ID NO: 36146 - DNA, 1482 bp, Escherichia coli
ttggggcacccgacagacccgcaggaagcaataaaatctctgggtcatcagcttgatagtcgttacagacaggttgctgcacgtctttgcgaaaatgaggctgtcgaactcgatgtttctggcccgaagccccggttgacaatttctcccctcgccagtcttgatgagccggacagtctgaaacgactgagcaaaatgatcagtgatctactccctccggtggatttaacggagttgctgctcgaaattaacgcccataccggatttgctgatgagtttttccatgctagtgaagccagtgccagagttgatgatctgcccgtcagcatcagcgccgtgctgatggctgaagcctgcaatatcggtctggaaccactgatcagatcaaatgttcctgcactgacccgacaccggctgaactggacaaaagcgaactatctgcgggctgaaactatcaccagcgctaatgccagactggttgattttcaggcaacgctgccactggcacagatatggggtggaggagaagtggcatctgcagatggaatgcgctttgttacgccagtcagaacaatcaatgccggaccgaaccgcaaatactttggtaataacagagggatcacctggtacaactttgtgtccgatcagtattccggctttcatggcatcgttataccggggacgctgagggactctatctttgtgctggaaggtcttctggaacaggagaccgggctgaatccaaccgaaattatgaccgatacagcaggtgccagcgaacttgtctttggccttttctggctgctgggataccagttttctccacgcctggctgatgccggtgcttcggttttctggcgaatggaccatgatgccgactatggcgtgctgaatgatattgccagagggcaatcagatccccgaaaaatagtccttcagtgggacgaaatgatccggaccgctggctccctgaagctgggcaaagtacaggtttcagtgctggtccgttcattgctgaaaagtgaacgtccttccggactgactcaggcaatcattgaagtggggcgcatcaacaaaacgctgtatctgcttaattatattgatgatgaagattaccgccggcgcattctgacccagcttaatcggggagaaagtcgccatgccgttgccagagccatctgtcacggtcaaaaaggtgagataagaaaacgatataccgacggtcaggaagatcaactgggcacactggggctggtcactaacgccgtcgtgttatggaacactatttatatgcaggcagccctggatcatctccgggcgcagggtgaaacactgaatgatgaagatatcgcacgcctctccccgctttgccacggacatatcaatatgctcggccattattccttcacgctggcagaactggtgaccaaaggacatctgagaccattaaaagaggcgtcagaggcagaaaacgttgcttaa

SEQ ID NO: 36147 - DNA, 924 bp, Escherichia coli
gtggcaaagcaaaagttcaaaatcaccaactggcccacctacaataaagccctcatcaaccgtggctccataactttctggctggatgatgaagctattcaggcctggtatgagtcagcaacaccttcttcacgaggcagacctcagcgctattctgaccttgccatcacgactgtgctggtcattaaacgcgtattcaggctgaccctgcgcgctgcgcagggctttattgattccattttttctctgatgaacgttccgctacgctgcccggattacagctgtgtcagcaggcgggcaaagtcggttaatgtcagtttcaaaacgcccacccggggtgaaatcgcacacctggtaattgattccaccgggctgaaggtcttcggtgaaggcgagtggaaagtcaaaaagcatggccaggaacgccgtcgtatatggcgaaagttgcatctggcagttgacagcaacacacatgaaatcatctgtgcagacctgtcgctgaacaacgttacggactcagaggccttccccgggttaatccggcaaacccaccggaaaatcaggtcagccgccgccgatggcgcttacgatacccggctatgtcacgatgaactgcggcgtaagaaaatcagcgcgcttatccctccccgaaaaggtgcgggttactggcccggtgaatatgcagaccgtaaccgtgcagtggctaatcagcgaatgaccgggagtaatgcgcggtggaaatggacaacagattacaatcgtcgctcgatagcggaaacggcgatgtaccgggtaaaacagctgttcgggggttcactgacgctgcgtgactacgatggtcaggttgcggaggctatggccctggtacgagcgctgaacaaaatgacgaaagcaggtatgcctgaaagcgtgcgtattgcctga

SEQ ID NO: 36148 - DNA, 1494 bp, Escherichia coli; identical to SEQ ID NO: 13713

SEQ ID NO: 36149 - DNA, 633 bp, Escherichia coli; identical to SEQ ID NO: 30074

SEQ ID NO: 36150 - DNA, 141 bp, Escherichia coli; identical to SEQ ID NO: 36145

SEQ ID NO: 36151 - DNA, 423 bp, Escherichia coli
gtgaatgaaaatacgggagagcacgttggcaatggtggcttctttcaggctatggaagtagataagacacagtttgttaaactttatgttgatggcgtatcggctattgaaggattgtcttcatctggtaagaaagtcttcaagattctttatcttgctatcagagataataaggatactgatactattttaatgtcatatgatattgtagatcaagatatcgtgaagatatcgagaacgacctatttcaagggcatgaaagaacttgctgataagaaatttatcgcagagactatggtacagaactattactttattaatccagactatatgtttaatggtgatcgcttgacgtttatgaaaacatattatctttccagcagtaactctaataaacccagtaacaataaggtgaaaaaatga

SEQ ID NO: 36152 - DNA, 480 bp, Escherichia coli
  misc_feature (27)..(36): n is a, c, g, or t
atggatggtcgacctccctcctgcccnnnnnnnnnngaacacaaagaatttttaattgaccctacagtgagggtcactcaggacgtaaaagataagcagggccgtgtaatagcttccgccggtgagttgattaatccactttcgagatttcctcaaaacctgacgatgataattttcgatccactcaatccgggccagctggtatgggctgagcagcagtatcgacaacgtctgggtagtggaaaagtaatgccaatgtttacccgtatccaaaaagataatggatgggatcacctaaatgatttacgtgaaaaatttaacggtaaggtgtttaaagttaacgaacagatcatctcacgctttcagattaaaaacacacctgcgcttataactactgaccaagataaattccggatcaccctgtttagcgaggcagaagtccgtggtatcggagccccaaatctttcagaggaaaaataa

SEQ ID NO: 36153 - DNA, 990 bp, Escherichia coli
  misc_feature (141)..(150): n is a, c, g, or t
  misc_feature (870)..(901): n is a, c, g, or t
atgattaaaaaaaagggcttaggcttcaacgcaattacagcattgatcatgctcacgacttcgaactgcgtaatcgctgaagaataccaattgccagcaacaattaataacccgaagcattcgaagatattcccaaatgcnnnnnnnnnnattaataacccggttgtaatgccagttggtgctgacggatttcagaatggagctgcaaaagccattattccgggtcaagctggttctgaacagtcaggtgcacaaacaaaccttagtgaagccggtaatgcgcagggacaaaaacctacaactgatctccctaccgtgcaactttccccagccagcaatgcttcgcctgcggtaagcgctattactggagcattatcaaataatcctagtctccccggatttgacgcacagacccgatctggtgcaattgatagctatgggagaccaacaggtacctcttcccagcagaatgcaaccaatgcgaccgccacgtcaaaagccgatgaactttatgtcgaagctcgtaaccgatataaagaagttcagcgtgtaaatgtgccgcctggtgggaatgtggtactgccagtttcacgaggacttcaaaacagaatatcgaccagcttcaagaatgcttctgtcagtacttctacccctgctgaagaggcaagcatatttgttaatggtggcgatgtctttatttcaactaataccgataaaccaatcgggattatgttgtctgaagatcaggtacctgaatcgacctataacctgaccctggtaccgcttgatgttcccggtgcgatgatttcagttactacatctttaagcccatctatgcaagccaaacgtgaaacctcattggataagcannnnnnnnnnnnnnnnnnnnnnnnnnnnnnnnggaaatgttggcccgctcccagtcagaagaactggctccaacggatccaaaacaagacgatcataaacaaagaatcattgatttattga

SEQ ID NO: 36154 - DNA, 474 bp, Escherichia coli
atgaataaaaaacttctcgcaatggggctgttattaagcatgaccgcaggttcagctatggcagcagcaaattctggtacaaccatcggaacaggtacattagcggtaacaggcactgttgggacgtctacttgttcagtgacttttccacaaagtgtgacaatgccaagtattaccactgcgatgtacaatcaaacgtcgacccagaatgccatggttcaacagtctgctggcaatatccagttttcaggatgcaatggtcaatccgttaatcttaaagtgatggctagcaatgttacggttgccgggagtaaagtaatcgcttatccgagagttaacaataaccaacaagggtggctaggtctgacttttggtgtatcaacagataacggctcgtcttttaagaatttgaagttgcccatcagagccaatcagtgttacgagcgacacatttgcattacctgtgcgtgttga

SEQ ID NO: 36155 - DNA, 807 bp, Escherichia coli
gtgaccgccgccgctgacatccagcgtaccgtcctgattcactacagcgttattacctgcgatttcggtacctgtagagccctgaccatcaacggtggtgttaccgttattgttcacggtggcttcatcaccgttaatctgcgtgccggtgccgccgttactgatggcattgtcgccgtcgttgttgacgatggctttgtcgccgtcgatcagaataccgatggaatccggatcggtaaccgtcataccgcctttgttatccactttggcgctgtcgccggtgatatcaataccgtgaccgccgccgctgacgtccagtgtaccgtcctgattcaccaccgcgttattacctgcgatttcggtacctgtagagccctgaccatcaacggtggtgttaccgttattgttcacggtggcttcatcaccgttaacctgtgtgccggtgccgccgttgctgatggcgttgtcgccgtcattgttgacgatggctttatcaccgtcgatcagaataccgatggaatccggatcggtaaccgtcataccgcccttgttgtccaccgtggcgctgtcgccggtgatatcaatcccgtgaccgccgccgctgacatccagtataccgtcctgaataactttcccgttattaccggcgatctccgtgccagtggaatctttaccatcaacgatggttttgccattgttgtttactgtggcattatcacccgtaataacaagctcaccgttatgattatattgccacttcgttgcgccatctgcgctcacggtgatgctgccaacttactgatttag

SEQ ID NO: 36156 - DNA, 339 bp, Escherichia coli
  misc_feature (290)..(299): n is a, c, g, or t
atgattgatccaaaaagcgatactgttgagctggttggggatccttctatgtgggaactgtatcgttacgaccataagacattgttaagccttcaggttctatacattttggctaaaaaagaagctgcgcaatctctctatatttattttgaagcaatgccagctggtacgttgttcgttaatatgaaacggttgagggaaaggttgcttcttacaacccctattcgtacgcaaaaccagataattcgtaaagcaatgcgggaacttgaatctatcggatatctcgattnnnnnnnnnntaaaagaagccctaagctggcccttgccaaacaaggttga

SEQ ID NO: 36157 - DNA, 219 bp, Escherichia coli
atgtttcattgtccgaagtgccatcatgccgcacatgcgcgaacaagccgctatctaaccgaaaatacgaaagagcgctaccaccagtgccagaacatcaactgtagttgcacgtttatgacaatggaaacgatagagcgctttattgttactccgggagccattgacccggcaccgccgcacccgactgtcggtggtcagcggccgttgtggctctga

SEQ ID NO: 36158 - DNA, 711 bp, Escherichia coli
atggatctttttgaaaagctgcgcgatctggataagcagcgtgaaaatcagcggcaaaaatatctttcattgctggaagacgctaaacgggttaagcaacagcaactggattgtgtccgtcaggtgcaaaaactgcatgatgcggcccgcagtcagcatggctttagtagcgcctttaaaaatgcgcaggaaacaatcaatttactcgatcggtatagcgacgtattaactcaggcgagagtaaagacgctatctgctaactttgaagttgcctatcgcaaactggctcgtaaagaagatatgcaactgagtgctcatattaacccagagacatttgatgttgagttaattgatgagaagggagctgtcattaatcgtaagctactatctgccggtgaaaagcaaatttatgccattgctattcttgaggcgctggcaaaaacttctggtcgtgatttgccggtgattattgatacgccattaggacgtctggattcacaacatcgggataaactaattaaccattatttcccatttgccagccatcaagtggtgctattgtctactgatacggaagtggatgaacgttattttgttgaccaattacgcgatgatatttctcatgcttacgagatagtatttaacacgcatactaaatcatcagcgttgaagcccggttatttctgggaattaactaaggaggctgtctga

SEQ ID NO: 36159 - DNA, 783 bp, Escherichia coli
  misc_feature (7)..(16): n is a, c, g, or t
  misc_feature (758)..(767): n is a, c, g, or t
atggccnnnnnnnnnngccaaccactcagtgaactggattatgatcagtgccaggggtttcttaatgaattaattcctcatggtattgctgatttgttcttttttgatggcgagaaaattgcagaactggcagaagatgaatctggcaatattttgcgcaccgctgtacgccgtttattgggcctggatctgatatccaaactgcgtaatgacttaatgattttcgttaagcgccaacaatccagccagttagcggaaactcagcaacagcagattgaagtgctggaaaaacaaagtagagacttagcttgtcagacagaagcattgctggaaaaagctgattttgccaaatctagaatcgagtttctgtctaaagacattattcgctatgaaggcttgttgaatgcgcagggcggtgcatttgcgcagacaaaagcgcaggaaaagcagaaagttgaaacactgctaaaagataaggagcgcctggaaaaagcactgcgtcaggaatgtgatggatcattaccttatgcactggctcccaatattttatccgagttgctggaaaaaattgctgatgaaacacagatcaaacaagctcaaagctttgaaaaagagttaaggctatttttggcccagctcagaaacgatattgcattacgctctagtactaccagtaaaattgcagccgaggcgattactgataatctgaaagaatatatggcaactaagccgaagggcgatttgttgtttgatatttnnnnnnnnnnctccagcaatcaatag

SEQ ID NO: 36160 - DNA, 924 bp, Escherichia coli
gtggcaaagcaaaagttcaaaatcaccaactggcccacctacaataaagccctcatcaaccgtggctccataactttctggctggatgatgaagctattcaggcctggtatgagtcagcaacaccttcttcacgaggcagacctcagcgctattctgaccttgccatcacgactgtgctggtcattaaacgcgtattcaggctgaccctgcgcgctgcgcagggctttattgattccattttttctctgatgaacgttccgctacgctgcccggattacagctgtgtcagcaggcgggcaaagtcggttaatgtcagtttcaaaacgcccacccggggtgaaatcgcacacctggtaattgattccaccgggctgaaggtcttcggtgaaggcgagtggaaagtcaaaaagcatggccagaaacgccgccgtatctggcgtaagctgcatctcgccgttgacagtaaaacacatgaaatcatctgcgctgacctgtcgctgaacaatgtgacggactcagaagccttcccgggtcttatccggcagactcacagaaaaatcagggcagcatcggcagacggcgcttacgacacccggctctgtcacgatgaactgcggcgtaagaaaatcagcgcgcttatccctccccgaaaaggtgcgggttactggcccggtgaatatgcagaccgtaaccgtgcagtggctaatcagcgaatgaccgggagtaatgcgcggtggaaatggacaacagattacaaccgtcgctcgatagcggaaacggcgatgtaccgggtaaaacagctgttcggggggtcactgacgctgcgtgactacgatggtcaggttgcggaggctatggccctggtacgagcgctgaacaaaatgacgaaagcaggtatgcctgaaagcgtgcgtattgcctga

SEQ ID NO: 36161 - DNA, 924 bp, Escherichia coli
gtggcaaagcaaaagttcaaaatcaccaactggcccacctacaataaagccctcatcaaccgtggctccataactttctggctggatgatgaagctattcaggcctggtatgagtcagcaacaccttcttcacgaggcagacctcagcgctattctgaccttgccatcacgactgtgctggtcattaaacgcgtgttcaggttgaccctgcgggctgcacagggttttattgattccatttttacactgatgaatgttccgttgcgctgcccggattacaccagtgtcagcaagcgcgcaaagtcggttaatgtcagtttcaaaacgcccacccggggtgaaatcgcacacctggtaattgattccaccgggctgaaggtcttcggtgaaggcgagtggaaagtcaaaaagcatggccaggaacgccgccgtatctggcgtaagctgcatctcgccgttgacagtaaaacacatgaaatcatctgcgctgacctgtcgctgaacaatgtgacggactcagaagccttcccgggtcttatccggcagactcacagaaaaatcagggcagcatcggcagacggcgcttacgacacccggctctgtcacgatgaactgcggcgtaagaaaatcagcgcgcttatccctccccgaaaaggtgcgggttactggcccggtgaatatgcagaccgtaaccgtgcagtggctaatcagcgaatgaccgggagtaatgcgcggtggaaatggacaacagattacaaccgtcgctcgatagcggaaacggcgatgtaccgggtaaaacagctgttcgggggttcactgacgctgcgtgactacgatggtcaggttgcggaggctatggccctggtacgagcgctgaacaaaatgacgaaagcaggtatgcctgaaagcgtgcgtattacctga

SEQ ID NO: 36162 - DNA, 264 bp, Escherichia coli; identical to SEQ ID NO: 24468

SEQ ID NO: 36163 - DNA, 294 bp, Escherichia coli; identical to SEQ ID NO: 25479

SEQ ID NO: 36164 - DNA, 474 bp, Escherichia coli
atgtcgtccataaaacgtttcacaagagagcgcttcggcaaatacgcgatattgcgtaaccttctctgccagggaattgggttacgtgcagccgtaggagcaatagtcgccatgctaaggctttcacgcttggtcaaatcccgacgcagggcttttaacagtccgtatatggatattaataagataactgagaagggcaatgcactcgctatcgttacggtttgcaacgcactcagcccccctgcgatcagcagggcaatagcaacaacgcccatgagcaatgcccagaaaattcgctgccagacgggcgtgtttgccaccccacctgatgccagagtatccacaaccattgcccccgaatcagcagacgttacaaagaagacgatgaccatcgccattgcaatgaatgacagcacggaagagaacgggaaatgctccaggaaattaaacagggcaagcgcaacatcctgctga

SEQ ID NO: 36165 - DNA, 225 bp, Escherichia coli
atgctccaggaaattaaacagggcaagcgcaacatcctgctgaacggtattggcgaggtcagtggcgccctggttcatgatgagatagatggcgctgtttccaaacaccgtcatccacatgagcgtaaagccggcgggaacaaacaacacgccagtcacgaactcacgaattgtcctgccgcgggaaacgcgtgcaatgaacatacctacaaacggcgaccatga

SEQ ID NO: 36166 - DNA, 594 bp, Escherichia coli
atgattaataaagataataatctaaatatagatattttacgtcagcagaatgcaaacattcctcttaaagaggcatcctcacaaagtgaggagcctcatcaactggaaaacagcaaaagcgagggtaatttgtataacagcgccagtaaggataataatattggcgctatgctcaagaaagatgttgaaaaactatctactttagtcagtgaacgtagcccgcgaaatgaagactggaaatgccagcatgacatacaactcaacttcgttaaaaacatgctcagaaatttcccaactgagaacctgtcagagaagggatctgcgctcttacacgaaagttattcgctgataaaaaacgttctgcagcttacagaaaatgttaatactattgacgtcaaaaactatcgcatcgccttttttattagagtgagtccattttcccatattgctttggatatgttcactgaagtcctgccagtatgcgctcattatctcaacgctattcgcataaatttcgaggtagtcgctaccgagcacactcatcaaatcagcaatatcactgcatatatatttatcacttttaaattcgtttga

SEQ ID NO: 36167 - DNA, 153 bp, Escherichia coli
atggcagtgcatggtgatgtcaaagcctgttttttaaatttgaaatcgtttgctgaaataatctgcactttgtcgtttattccgacacaactggctttttttcacacttttgcggctcaggtcgaggatatttccacagccaacgtccagtaa

SEQ ID NO: 36168 - DNA, 471 bp, Escherichia coli
atggacaaggtgaagacgttaatcatcgccgttgttgtttgcattgttgttggccttgttgccgcgctcagtcattgccagtcagtgataaacacaatgcaaagcgagctaactactacgcagggcgcactaaaaacagcaagtaacactattcagcagatgaaggagcgaaacgccgaactgtcaaaacttgataagaggtatcacgatgagattaaagctatcagatctgacattgccgatctgcgcactggtattgataacggcactatccggctgcgcgtcaacgcaacacctgtgcgagtgtccgaccccgccggatccgccatcgccattgatggagccgcctgtaaactcactcccgacgctgaatcggcttatctatccctcagagaacaactaaaaacgaaagacgctcagatcactgggttacaggactacatcaaaacgcagtgcttacgcaaagaataa

SEQ ID NO: 36169 - DNA, 198 bp, Escherichia coli
atgattgagtggcttattattgctgtagttctcatttaccttgctggcgtcattttaatgggcgcttttcagaaagcggtagatagtgatggcattatttggttcgagttggttttctggccttttattacgatatacgctttcgctgacgctatgcgcataaacataatgctagccattaaggagcgcaagaaatga

SEQ ID NO: 36170 - DNA, 324 bp, Escherichia coli
atgtctaaatttatcagcgttaaagttttccgtggcactcttcctaacgaagaaagattggggcaattagccggacaacctggcgcatgtttccgtgtagccactgatgacgaagctggcgtcaaatgctaccacgtatctgaacctccttttgacgtgaaagatcttgataatgcagatcacgttaaattttttatcttagtatcattgaaacttaatccattccctggtgatgaagtggaattgattggtgctgaactggtggcggaatacaaaatgactgaaggcgaaaacggaggggtggacattgagcgcatcaaataa

SEQ ID NO: 36171 - DNA, 207 bp, Escherichia coli
atgcaggttaaatgtgtcgaatcaaatagcgacatttttgtagtcgataagatttatcacgtctatcaggttttgggcgttgactgcgatgaaagagatcaagtgctaattgatgaagatggcgacccgtggaaattcctatatcgctacgccagcggcggcgatgttattggtattcgccttcgtgcaaaatttgaactatgttaa

SEQ ID NO: 36172 - DNA, 768 bp, Escherichia coli; identical to SEQ ID NO: 35171

SEQ ID NO: 36173 - DNA, 354 bp, Escherichia coli
gtgaagaataacgttattcccgtaatcccaaaatggaaaggaactgggataaactggcagaaagttgataacggtgtaaatgaattaattacatttgatgctctgtgtcaggaaggtcaggagatggaacattgcgttgccagttatgcagactggtgtgcatctggagaatatattgcaatttcagtcctgatggataatgaaagagccactcttggactttcacgaaaagaacatgatttaacctatcagtttgaccagatgagaggtattcgtaatcaggctgtttccagaaacatgctaattaaaggcaggcatattttaaaaataatcaactcatcactaaaaagataa

SEQ ID NO: 36174 - DNA, 291 bp, Escherichia coli; identical to SEQ ID NO: 15774

SEQ ID NO: 36175 - DNA, 690 bp, Escherichia coli
gtgaccgtgaaacctgacgctacattaacagaagccatcacattgatgttgcggcatgactactctcaactacccgttatgaccagcgagcgagatgttaaaggtgttattagttgggaaagcattgctccaatactagcgttgacccaatcagaatctgcggttgtgcgtgattatatgaagccacacagggaaataaacgccagtgactctattttttctgcactacctagaattattgagtatgcttacgtattagtgcgatcttctgatcaaagaattagtgggattataactactaccgatcttagttctcagttcagacagttgtcagaaccttttcttttactatctgaaatcgaaaatcatattcgtaagctgatagatggaaaatttacgaaagatgagcttgttagcatcgttaatccatttgacagcgaacgggttatagagtcggtcgcagatttaacctttggggaatatatacgactttttgaaaatccagaattgtggaaaaaaaccgaacttcaaatagataagaaaatatttactaaagagctcgacaaggtcagaataattcgtaacgacgtgatgcactttgacccagatggtatatcagaggaaaatcacgagcttcttcataactttgtaaggtttattcatactatacaaagcctatcaagaaaataa

SEQ ID NO: 36176 - DNA, 330 bp, Escherichia coli
atgccctccacacaccggattggcactggcctccgtgccaatccggtacgtggaaaaaaattggcgcaggtgatagccaaattgttaccgcttcagctactgcgtggcgttggcctggagcaacggcaacatgtccatctggcaagaaagtcattggtggaggcggtcaatgcagatcaaataccggatttatatggctcacgcgttccatgccttcaggcaacaatgcatggactgccagttgcgacacgaccgaagatcaaaatggttcaattacagtttacgccatttgccagtgacgatacttatcactggcaaaccacgatgtaa

SEQ ID NO: 36177 - DNA, 315 bp, Escherichia coli; identical to SEQ ID NO: 33595

SEQ ID NO: 36178 - DNA, 315 bp, Escherichia coli
  misc_feature (138)..(138): n is a, c, g, or t
atgcagatcaaataccggatttatatggctcacgcgttccatgccttcaggcaacaatgcatggactgccagttgcgacacgaccgaagatcaaaatggttcaattacagtttacgccatttgccagtgacgatactnatcactggcaaaccacgatgtaactacatttccccgacaggtcagttcggtgagtaccgccataaaagttgtattcgtcatagaagccgcatttcacaattcgattggcatcataggttgcaactgaccccgcaaaataattcggcttccacccgtgcggattttctgcattactga

SEQ ID NO: 36179 - DNA, 315 bp, Escherichia coli; identical to SEQ ID NO: 33595

SEQ ID NO: 36180 - DNA, 618 bp, Escherichia coli
atgagtattattcctgctgaggcattttttgctaacgtggtttttttggtcgagggaccatctgaggtgattttttacactgaattagcaaaagcattaagtattgatcttgattattataacatcagcattctttctgttgatggtatccaatttgaagtttatagaaaaatattaacagctctaaatattaattggatcgtaagaacagacaatgatgcttcaaaagtacctcataagaatgaatggcaatatgctggtgtaaatagggcgttagcactgtgtggagagaataaagaaccaaactcaagtattcctatagatagtaaagctttgcatgctaagtggggaaccatttcaccaataataaatcctaacggcgtttatatatctttttttgatcttgaaggagatcttgctaatgacttttcgaagcatgttcttgattatgcaagtaaggataatctagatgatgccgctgattatttgagaggaaaaaaagctatacgtatgcgtgagttaattaaagagaaaaaagcttttttaactgaactgaagagcaaagatatagccagacctctaatacatgcactgaaaattgctagaggtgaattatga

SEQ ID NO: 36181 - DNA, 546 bp, Escherichia coli; identical to SEQ ID NO: 11402

SEQ ID NO: 36182 - DNA, 210 bp, Escherichia coli
atgcacccacgcgagttcattgccaagcacatcaaggcaacgctggagaaggaggaatttccccctcatgcggtctcgctgggggtgaaagaagccaccttctttttcgaccgaacacccagcttcgcaaaggggaaagtgttcgatgagtgcctcaaggcggcccgtgcagtagccagggtcgcgaagaaggcactgttgcaaagttag

SEQ ID NO: 36183 - DNA, 462 bp, Escherichia coli
atgccggttggcgcaaagaccttcccattcaccacaaccgtggattgcattggtctccgggtctctcgtgcggtaccccatgggccttggctcacctgcaatgcaatcccggttgtgtcccggcctttcaccgggtgggtggctggggagtcagacccgccactcgctgtgttcgctatcacttcaactgtgctgtctttccagctgtcagccggtcactgccttaatttccattcaccttggtcggcatgcattccagccttgccaagggagagcggggaggttagtcagcccggttgccggtgttatttccccaagcggtttgttgccaccgctgccagtgttgtgctggtcctccggctggggttgtccatcgtgcgaaatcaatttgctaactattggttagcatatgcttggtttgctttaagtcaacacccaaaagttagtttttcaattttttaa

SEQ ID NO: 36184 - DNA, 693 bp, Escherichia coli
atggatgagaaacaaacaccaatggcgcgttatgaagccgacaaaatggcattctcgcagcgactcaatgccgctctcgatgaaatgggctggcccgttagaggccgaatagttcggcttaagcgcacgttgcgagaagatctgtctgaggtctcggtagggaaatggctgaaaggtgaggggctgccagaggtcaaacggctgggagagctctcgcgcatcaccggcaagagcgtgcagtggttgctgactggcaccgatacgagcgacggcaatgtcgaaccacagcctttccctgtctaccaggttcccctgatctcttgggtcagcgccggtgagttcaaagactgcggcgatatcccaaccctggaagaggcagaagagatcaccatcagcccagttcgcgtcagcacccgggcctatgccgtacgggtgaagggcgactccatggtggcccccatggggggcaagtcataccctgacggcaccatcatcatcgtggatcctgaggtggagcccgccccgggcaagaaggtgatcgcccgctacggcagcgacatgaccttcaaagagctggtgatggattccggttcctggtggttaaagcctctcaacccgcaataccccctgctgccggtcaatgaggatgtgcagatatgcgccgtgctagtctgctcggtgatggtggagtga

SEQ ID NO: 36185 - DNA, 219 bp, Escherichia coli
atgcataccctgttaactcgattcggtaccaagagtgccatcgcggctgcactcggcatcaccccggagggcgtcagcaacgctttcaggcgtggcaaggtgccaagcacctgggtggccaagctcaagcagcaaggtttgagccaatctgagctcgctgaattgcctctgactgacgaagggcgggcgattgtatcagcattcaccgggcaattataa

SEQ ID NO: 36186 - DNA, 669 bp, Escherichia coli
atgagactcaagagcgcattcactttgctacttacgtgcgtaacaatcagtaacgcgctggcagtggaagaacaagaaccagaaacgaagcagacggtgttggccgtctgcttcgaaacatcattattggctcgagaactgatcgagaataccattcttgcggacgacatccaaaacaatacagaaaagatagctttgcagttgtcggagcccctccccccaacttataatgggattattgctgggctaaacaatgctgtcgccatgcgtgggacagcaaacgttgaatcgccatcaagagcatccacagatttacgtgcagccgtcatcggtttatggtgtataaatgacaccatagccgccctgaatcagactgataatgcagtcttacaggacggcgagttgcaacaaacacttgtcgattattacaacaacttattggctgacatcgtttgtcgttttcagaagacggctgcactgaacgtcagaagccgactgcactatagcagcggaggggttggatccatcaggcaacgacgggctgctgccggccatcagcggacgcagggaggactttccgcaaccggccgttcgatgcggcaccgatggccttcgcgcaggggtagtgaatccgccaggattgacttgcgctgccctacctctcactag

SEQ ID NO: 36187 - DNA, 1608 bp, Escherichia coli
atgaaagcaattgacaatcagattagaaacatctcttcaagccatcaagataagcattcagataaagttaacagtcatcaacaccatggcaaggttgataaaacacatcgtgcaaagatagttgaatttgataaactggataatgattcgcaaatagataacgattttggcctgcatatcatctatttcctgcaacatggtcactggaaggtaaatgatcgtagtcaccagatggagaaagtatggttttataatagtgaaccttctatagatattcaagaatataatagattcgccgacaatactactgatacgtttatctttacaattataccagacaataaccatgtgttaaaattatcgtctcccattaccgttactgttgagtgtaagggcggttattattttattaattcctctggagataaatcagatataatttataaagttgatgggctttctatcatagcgagaaatttctttactcttcttagtggtaatttcaaacctgactggcgttgggatgtctctaaagagacgtttactaaggaaaagtttgatagctatgttaaatctgtgttttcaaaaatagacttctataaacagtgtggtgtgattaacccacaaaatgccaacacggcttattttggcgatacagatggaagagtaggcgctgtactttatgcattgctcgtttcagggcatataggcatcagggaaaagggttggagtttattatgtgaattattaaaacacgaagagatggcttcatctgcatacaaacataaaaataataaagtgctctacgatttattaaatacgagagacatgatcttgaatgagttgcatcaacatgtttttttaaaggacgatgcgataaccccttgtatcttccttggggatcatacaggcgatagatttagtactatttttggtgataaatatatccttactttgctaaattctatgcgaaatatggagggtaataaagatagccgtattaataaaaatgtcgtcgttctggctggaaatcatgaaatcaattttaatggtaactatactgcacgactagcaaatcataaactctctgccggtgatacgtataacttaattaaaacgctcgatgtttgtaattatgactcagaaaggcaagttttaaccagtcatcacggaataataagagatgaagaaaaaaaatgttattgtctcggtgctttgcaggttccatttaatcagatgaaaaatcctactgatcctgaggaattagccaatatttttaataaaaaacataaaaaacacatggatgatcctctattccatctaatccgaagcaatactttgaaacccacacctgtatatgctaattattttgataacactactgatttcagaccagcacgtgaacgtatcttcatatgtggggagacactcaaaggtgaagaccccagcaaatacattagacaaaaatatgggcatcatgggcccggggtagatcataatcaacaatttgataatggtattatggggctaaattccctgaaggaagcacgtgataaaaataataaaataatttattcctcagggcttagttgttttcaaccacattaa

SEQ ID NO: 36188 - DNA, 1554 bp, Escherichia coli
atgatagttaaatttcatgccaggggaaaaggtggtggcagtggtccggttgattacctgctggggagggagcgtaaccgcgaaggcgcaacggtgcttcagggtaatccggaagaagtccgggaactcatcgatgccacgccatttgcgaagaaatacacgtccggtgttctgtcgttcgcggagaaggagctgccgccgggaggacgtgaaaaagtgatggcgagctttgagcgtgtactgatgcccggtctcgaaaaaaatcagtacagcatcctgtgggtggagcaccaggacaagggacggcttgagctgaattttgtcattccgaacatggagctacagaccggaaaacgcctccagccgtactacgaccgcgcagacaggcctagaattgatgcctggcagacgctggtgaatcaccattacgggctgcatgacccgaacgccccggagaaccgcaggacgctgacactccctgataacctgcctgaaacgaaacaggcgcttgctgagggcgtcacgcgaggtatagatgcactttaccatgccggagagataaaaggccgtcaggatgtgattcaggcgctcactgaggcggggctggaagtggtcagggtgacgcgaagcagtatcagcattgcagatccgaacggcgggaagaatatcaggctgaaaggagcattttatgagcaatcttttgcagacgggcgcggagttcgagaaaaagctgaaagagagagccgaatctacagagaaaatgctgaacaacgagttcaggaggctcggcgaatctgtaagcgaggctgtgacatcaaacgagacgaaaatcagagacgctatagccctgttcacagcctcgacagaggaatcgctggaaaaacaccgggaaggggtgaaagaggcgatgatgcagcacaggagggacgtgttaaagctggcagggaatacgggcatgatgttactggggatagtatttctcctgtttaccgcgagtggcgggacgctctggtatcttggagggaggatacaggcgaacctggaagaaatcaggaagcaggaagagacattgcagaaactgaacgcgaagacatggggcgtggagtttgtgcaggacgggaacaggaaattccttgtccttccgtacgggaaatcagcggaggtgattccctttcaggggaaagagtgggtacatctgaaggagtgacacagagtgacagagctggaaacacatttgctgaacgccttagagcagctgcaacaggactatatgcagcggctgagcgaatgggagagcgccttcgtggaattgcagaagatgttttcgcttacgcaacgggacaacgcgatgctgaacgagcgggtcatgcagttgagtcagcaggtgcagcacttgagcgagcagacagaacgcttgagccagttatacagcgagaactggagataagagaggaacggctgatacaggagcgcgaacatgtgttatccctggaacgggagcgtcagccggaaatacaggaacgcacgctggatggcccttcgctgggatggtga

SEQ ID NO: 36189 - DNA, 177 bp, Escherichia coli; identical to SEQ ID NO: 27493

SEQ ID NO: 36190 - DNA, 681 bp, Escherichia coli
atggcgctacagcaggaatggaacggcaggcatcagcgcggtatggagtccaggctgaagcaggctcgtctgccgtgggtcaaaacgctggagcagttcgactttaccttccagccgggcatcgaccgtaaggttgtccgggaactggctggtctgacgttcgtggagcgcagcgaaaacgtgatcctgctgggacctcctggtgtcggaaaaactcatctggccatagctcttggcgtgaaagcggtggatgcgggacatcgggtactgtttatgccactggacagactgatcgcgacactgatgaaagcgaaacaggaaaaccggctggagcgtcagctgcagcaactgagttatgcccgggtgttgatcctggatgaaataggctatctgccgatgaacagagaggaagccagcctgttcttccggctactgaaccgtcgatatgaaaaagcgagcatcatactgacgtcaaacaaagggttcgcagactggggagaaatgttcggagatcacgtgctggcaacagcgatactggatcggttgctacatcactcaaccacgctgaatatcaaaggagagagttaccggttaaaagagaaacgtaaagctggagtgctgaccaaaaacacaacgccaatcagtgatgatgaaatggtgaaaagcggacagcatcagtaa

SEQ ID NO: 36191 - DNA, 153 bp, Escherichia coli
atgaggcggcaggggatagacaaggtcagccagctaaagaaagaatcatggatcttaaaaataacactgtcggtattgcttgtggcgatttttctgccaaatgtagcgatgcatgtattgaaaaatataacactgggcaactcttcgggttag

SEQ ID NO: 36192 - DNA, 681 bp, Escherichia coli; identical to SEQ ID NO: 36190

SEQ ID NO: 36193 - DNA, 231 bp, Escherichia coli
atgcaaaacgtcactggttcaatagggaaaattcagctttttaaagatttagttaccagtggtccatttcgtcataacggtaataactatctgacttctggattaacagtggttacaggcacagggcatggtgtcacaacatttgatttcgatatgtcaagggtggcaaataccgccaatgaaactcgcccggtgaacgttgcatttaactacattgtgagggctgcataa

SEQ ID NO: 36194 - DNA, 591 bp, Escherichia coli
atgatgatgcccgctctgcaaaaagtccctttttctggcttgcctttttccggcatttgcggatatagtttttccgctgccgcaaaatcggcagccgggcgtgagaacccgagcaatctaacggcgacatatgacgcgccatgcgtctttttttgtgtcgcaatcaacgccacagagcgccagattatggtgtggtgtgtggtctgccgtgcaggtatgatcctgttcgcaatcgcatgttatgccactgagtcaatggtagctcaggcggggcagcctccgggctggccggtattcttcgaggccggtattcctacccccgtctgggctatcgccatcgagcgtaggaactccggcgatagcagttatttgctactcgaaggaggctgccatatggctacaacccttaccccctcacaccctgaatttgtctttgtgtttgcggctgtccgtcgcgcagaccgtcatccccgtatctgcatgcttcgcaccgtcgccggtgatgaacgcagcgcccgccgttcccttgtccgtgactatgtgctctcccttgctgcccgtctgccggtggtggaggtgtcccgtgcgtaa

SEQ ID NO: 36195 - DNA, 1329 bp, Escherichia coli; identical to SEQ ID NO: 11531

SEQ ID NO: 36196 - DNA, 1083 bp, Escherichia coli
atgagcggctgccactcttgcccgatccgttgtatgacccaaatgaatattcctcgggtgaaagagtttggcgtgcccagcacaggtggtaacacttgtgtagcaaactttgtccataccaccatcttcccgaacgggccgaaagattttgaagataaagacgatggtcgtgtgattggtaacctggtgggtctgaatttgttcgatgactacggcctatggtgtaactacgggcagttgcatcgcgactttacttattgttacagcaaaggtgtgttcaagcgtgttctgccagctgaagagtatgcagaaattcgctgggatcaactggaagcgggtgacgttaacttcattaaagatttttactaccgtctggcgcatcgtgtgggtgagctgagtcacctggctgatggttcatatgccatcgcagaacgctggaatttgggtgaagagtactggggctacgcgaaaaataaactctggtcgccgtttggctatccggttcaccatgccaatgaagcgtcagcgcaggtcggttccattgttaactgtatgttcaaccgtgactgcatgacgcatacccatatcaactttattggttccggcttgccattgaaactgcaacgtgaagtggcgaaagaactttttggttctgaagatgcttacgatgaaaccaaaaactacacgccaatcaatgacgcaaaaattaaatatgcaaagtggtcgctgttgcgggtctgtttgcataacgccgtcaccctgtgcaactgggtctggccaatgaccgtttcgccgctgaaaagccgtaattaccggggcgatctggcgcttgaagccaaattcttcaaagcgatcaccggcgaagagatgactcaggaaaaattagatttagctgcagagcgtatttttacgttgcatcgtgcctacacggtaaaactgatgcaaaccaaagatatgcgtaatgaacacgatcttatctgttcctgggtattcgacaaggatccgcagatcccggtctttactgaaggtactgacaaaatggatcgtgacgatatgaaccgccccgggaatcctggagactaa

SEQ ID NO: 36197 - DNA, 288 bp, Escherichia coli
gtgcgtaataaaaaagcccctcagaccgtctcagcgcgtcatgacgcccgtgaacacctcagcattgaggcttaccataagctcaaccgcgccagcgccgtatcccagtttgttgggggtgatttgattcaccgtgaactctccggcctgcatcagctctatattccgcatattttcagctacctgaatgaagatattgattttgtgctgaatgagctgaaagccaaaggcctgtgccgcgattttctcgcccagcagaaagaccggggagacaggacgcatgtttga

SEQ ID NO: 36198 - DNA, 717 bp, Escherichia coli
ttggcactgaagcaggttgtcgacgagcaacaaccagatgccgcgctggtgcagcatacgcgccagcagccgcaggacgggtacattctggcagatgtgctggcaacgttgcgctcggctggcgttcctgcattaaccgatgacaactatgcggtgatgaaagtggcgcgaattggctgcgaatgcggagcaaatgtctcgactttttcctgcttcaagctgtttgggccggagggtgttggcgcggtggtaggtgatgccgatgttattagtcggattcgcgccacgctctattccggcggcagccagattcagggcgctcaggcgctggaagtcttgcgtgggctggtgtttgcgccagtgatgcacgcggtgcaggcgggggtatctgaacggttgctggccttgctcaacggtggtgcagttccggaagtgaaaagcgccgtcattgccaatgcgcagtcgaaggtgttgattgtggagtttcatcagccgattgccgccagagtactggaagaggcgcaaaagctcggtgccttgccttacccggtcggtgcagagtcgaaatatgaaatcccgccgctcttttaccgtctttccggaacgtttcgccaggcgaatccgcaactcgaacattgcgcgattcgcattaacccaaatcgcagcggtgaagagacggtgctgcggattttgcgtgagagtattgccagtatttaa

SEQ ID NO: 36199 - DNA, 525 bp, Escherichia coli
  misc_feature (506)..(515): n is a, c, g, or t
atgttcggcctgagaaaagtaaatggaaacactcattcctttgaaaccacttttcaaaactggaaagaaaatggtgaagatgttgcgttattaatgcccgaatttagcgccaaatggctaccgatagcagaagagagcggcagctggtctggatgggtgttacttcgagagttatttcccttaatttctgccgagctcgctgggatggctttaatgccagaaacggaaaggttaatagtggaatggctcagtttatctagtaccccgttaaatctaaagtatcctgaactaaaatataatcgtttgtgtgtcggtaaagtatttgatggagtattgagtccagctcaaccactgataagaatatggacaggggaattaaatatttggttagataaagtcacagtctgccaatacgaaaacgctccaacgctagacaaaaaatcattatattggcccattcattttgtaattggatttagtaaaacatgttatagaaccattgttgnnnnnnnnnngaggagttaa

SEQ ID NO: 36200 - DNA, 429 bp, Escherichia coli
  misc_feature (371)..(380): n is a, c, g, or t
atggattcttgtcataaaattgattatgggttatacgccctggagattttagcccaataccataacgtctctgttaacccggaagaaattaaacatagatttgacacagacgggactggtctgggattaacgtcatggttgcttgctgcgaaatctttagaactaaaggtaaaacaggtaaaaaaaacaattgaccgattaaactttatttctttgcccgcattagtctggagagaggatggacgtcattttattctgactaaagtcagtaaagaagcaaacagatatcttatttttgatctggagcaacgaaatccccgtgttctcgaacagtctgagtttgaggcgttatatcaggggcatattattcnnnnnnnnnnttcttattgcttcccgttcttctgttaccgggaaactggcaaaatttga

SEQ ID NO: 36201 - DNA, 366 bp, Escherichia coli
  misc_feature (310)..(319): n is a, c, g, or t
atgattaataaagataataatctaaatatagatattttacgtcagcagaatgcaaacattcctcttaaagaggcatcctcacaaagtgaggagcctcatcaactggaaaacagcaaaagcgagggtaatttgtataacagcgccagtaaggataataatattggcgctatgctcaagaaagatgttgaaaaactatcaactttagtcagtgaacgtagcccgcgaaatgaagactggaaatgccagcatgacatacaactcaacttcgttaaaaacatgctcagaaatttcccaactgagaacctgtcannnnnnnnnncctgtcagagaagggatctgcgctcttacacgaaagttattcgctga

SEQ ID NO: 36202 - DNA, 123 bp, Escherichia coli
atgcaccatgtggtattgatgctcagtctgctgatcaatctattgattttggacaagtatcaaaattatttctggagaatgatggggaaagtcaacccaaatcttttgatattaaacttataa

SEQ ID NO: 36203 - DNA, 348 bp, Escherichia coli
atgaagccggaaaacaaattacccgttctggaccttatctctgctgaaatgaagaccgttgtgaatactcttcagccggatttaccgccctggcctgcaacgggaacgattgctgagcaacgacagtattacacgcttgagcgccgattctggaatgtgggcgctccagaaatggcaaccagagcttacagggttccaacaaaatatgggcaggtgaaaacacgtatcttttatccgcagccagataggccggcgacgctattttatttgcatggaggcggttttattctcggcaatctcgatacccacgatcgcatcatgcgcctgctggcaagctacagccaatag

SEQ ID NO: 36204 - DNA, 255 bp, Escherichia coli
atggttgcctcgatatgggtgcccgctcttgcgcctctcggtttgtcactgatgatgggcggtatagcgcaaatcatatctccgaaagccactaacgaaagtgtgaggcaggcggataactcgaactcttattactttgatggacctcaaaacacaacaaaccaggggaaccctgtacagcttatctatggcgaggaaattttagttggctcacaggtcgtgagttcttctatcaccatcgaccagcttatgtaa

SEQ ID NO: 36205 - DNA, 1146 bp, Escherichia coli
atgaaatacataaaatcttcatcgttgctggcattaactttgctttttagctctggattcgttaacgcagacaataaacaaacgctgatagaagccgctaccgcaggggataccgcagcacaaagtgagttagggacaaattattttgatggtatcaatggttttgataaggatgtagttgaggccaagaagtggattgatctcgctgcagaaaagggagacaaagtagcatattatgcacttggggttatgtacacatttggcgagggtgtagataaagacttaaataaagcagttgagtactacaaacttgcgggagatgctcgtgaaggtagagcctataacaatcttggtgctatttatcaaaaggggatgcttggtaaagtagatcatgcgctcgccattaaatacttcaaactagcctctgatgccgggtatgttaaagctagctaccttcttggtgcgtattaccaatatggtaaaggtgtacaaaagagttataaaaaagcttttacttattacaaaaaagcggcggatcaaggtagttcagatggcatgttcgcattaggcaccttatacgatgacggtttaggtgttaaacgcaacgatgccgaagcaattaagtggtataaaaaagctgctgaactcggaaacgccgatgccatgacaaatcttggcattatgtatgagtatggtgaaggggttaaaaaagactataaaaaagcagctgagctttatcaggctgcttgtgataaagaagataaaaatggctgtgattacattgcagaactgaaagaaagcggcaaatatcgagcgccggcttccaaagccaaaacaaaatccgccacccagcgacttattgctaaatccattgataagggcgttaacgctacatttacctggcagggtgatgatgctaccttcaccgctaatgatggcaaagttgactgcaccttcctgaaggatttttcagagaaaggaggcaatctggctacctcgtttgtttgcaccgataacgttcaaatcatactgaagcaattcagagataccaagaatgcctacctcgcggtaatgactgacaacttcaacacagaagttaaatcattttcggtcaatgtgtacgtgactaatactggttcaaactaa

SEQ ID NO: 36206 - DNA, 414 bp, Escherichia coli
atgagcaaaaataagctgattttaacaggagctttattgtctttgtttgctttagtggggtgtaagcctacagacgagaaggctattgctctgggccaacaagcaattgcggatgatatgaaagatcccacgtcggtgatgtttaggaaagataagtttgtcaggactgatcatgacgatgggagtgtgacaggctttgtgtgcggagaattgaacgccaaaaatggctttggtgcatacgtgggctatcactcatatgttgttgaactcgaaatgaagccaaagggcatgttttcgaaaggggtggtatacaaaatcctatcgaagtcgttggcacctaatgatcctcatgacttacagcgttataagcaggtctacagaaagatgtgcaacagtgaggctgtagctcattaa

SEQ ID NO: 36207 - DNA, 246 bp, Escherichia coli
atgacgatcactatctacggacgagataactgctcatactgcaaacgtgcggtcgagttggcgaagcaactaaagggacatggctacggtgattatgagtatatagatattacatctgcggggatcaacaaagaaacgttgagcaaccaggttggtaaaccagtggataccatacctcagatattcatacatggagagcatattggggggtatacggaatttgcggcgctggtgagtacactataa

SEQ ID NO: 36208 - DNA, 252 bp, Escherichia coli
atgtaccaacaggaggaagaggctatgtcgtcacgactgaaagttattaattattaccccacctctgcagaacgtttgagccttgaaatgggcgaaagactacagaaagctgctggtcaggatttaaagaacaagttgggttcaggggaaattaaactgattaacggtaaatatgtaggtgaaagcctgaaagttaatagcacctctatgctaaaagcgcggttgcgtaaagcgtatatccccgctaaatga

SEQ ID NO: 36209 - DNA, 537 bp, Escherichia coli
gtgaacaaccaaattcattgggactacccattctcagaagaattcggcagtgggatggtacacagacaattcactgtgggaagcactatttatgccgttgggtttgaacaaatattgacgatggatgatttcacacgtaagggagttgatatcctaaatgtacatccaacattccggtttcctctgagtggtgtatggggagtgatttttgacgaaattgaccctgtagaaatggatttcaaaggatttcggcatatccaacatcaaggcttggcaggtggtcaagtgcttttgaatgttgcaagtataatctttgaccattatactgtttgtaacgcaggagcttatgtcttctccgccgcagacgaccatcagcatttacgcagaactgacttggtagacatttactgtaagatactaggtctaaatggaaaacgtaaaagtagattgttcgccaatggttttcctggatgggaggcatactgtgatgtaccaacaggaggaagaggctatgtcgtcacgactgaaagttattaa

SEQ ID NO: 36210 - DNA, 201 bp, Escherichia coli
atgatcaaactctatctgatggcagtggctacaggtatatctgtagttttcatctactgtttgctggttccgtcgctgatctcggctaaaagcgatattgccgtaatgcttggaatcattgttgcttttggcgctcctgttatcggctttaatgttggtcgtaactttctgaagtcactaattaattcgaaggggaagtaa

SEQ ID NO: 36211 - DNA, 2424 bp, Escherichia coli
atggatcatagtgtacataacaagctcatctcatttatatggaacattgccgacgactgtttacgtgatgtgtacgttcgcggtaagtaccgcgatgtgattttacctatggtggtattacgacgtttagatacgttacttgaacccaccaaagaagccgtgcttgaagaggtcaagttccaaaaagaagagatgcaagccacggagcttgatgatgaaccattgaaggcggctagtggttatgttttttacaatacatctaaatggaccctgaaatccctgttcaacaccgcaacgaataaccaacagatattactcgccaactttgaagagtacctgcttggctttagcgataatgttaaagaaatcattgaatgctttaacctcaagtcgcaaattcgtcacatggcctcaaagcaagtccttcttgatgtcgtcgaaaagtttgtttccccttacatcaacttaactcatgaaacgatcgaagacccagatggcaacaagatgccagcccttactaacctgggtatggggtacgtgttcgaagagttgatccgtaagttcaacgaggagaataacgaagaagccggtgagcactttacacctagggaagtgattgagctgatgacacacttggtttttgacccagtgaaagagcagctaccattgaccatgaccgtttacgaccctgcgtgtggtagcggtggtatgctcactgaatctcaaaacttcattgaagagaaatacccgaacgacagccgagatatttacctttacggcaaagagatcaatgacgagacctacgcgatttgtaaatcggacatgatgatcaaaggtaacaaccctgagaacatcaaggtaggctcaaccttgtctaccgacgagtttgcggcttctcgctttgactttatgttgtctaacccgccatacggtaagagttgggcgtctgaacagaagtacattaaagacggcagcgatgtgattgacccgcgttttaaggttagcctgaaagactattggggaaatctcgaagtggtggatgccacgccacgttcgagtgatggccagctgcttttcttaatggagatggtcaacaagatgaaagatccgagcgtaagtccattaggcagccggattgcctctgttcataacggctcatcgctctttaccggtgatgcgggcggtggcgaaagtaatattcgtcgcttcatcattgaaaacgacatgctagatgccatcgttcagttacctaataacctgttctataacactggcattaccacttacatttgggtgttgaacaacaataaacctgaggcgcgtaaaggtaaggtgcaattaattgatgccagcttgctctaccgtaagttgcgcaagaacttaggtaacaaaaactgcgaatttgcgcctgagcacatcacggaaattaccgatacttacctcgcgtgtaaggatgttgaaagagcactggatgcaaacaatgatcctgttggcatcgccagtaaggtattcagcaatgacgattttggctactacaaagtcactatcgagcgcccagatcgccgcaaagccaagtttactcaagatgccatagccccactgcgttttgataagcaacttagtgaagtgatggagtacgtgtacgcagagcacggcgaacgtgtttacgaaaaaactggctacgggtcagatcagaaaaagagcttcttaaaatccatcgagaaagacattctttcttggtgtgaagataacgacatcagtctcaatgctaaggctaaggccaaactgcttgatgtgaaacactggctggcgctaaaagcattgcttgaaactgcacaaacgctgatggctgacatcggtagcattgaatttgatgacttcaatagctttaaaacccaagttgataaatcgctaaaagcccatgctattaagctttcagcacctgagaaaaatgccattcttcacgcggtgagctggtatgacgaaaccgccaagaaagtggttaaaaaggtagttaaattaacgggtgataaattaaacgacctgctggagcgctatgagtgtgaagtcgctgacttgccagattttggttattaccccgttccttcagcagaaggcggtaaaaaaggcgagtatatcacttacgagaccaattcagacctgcgagatacagaatctgttccattaaagcaaagcatttaccagtacttcctagatgaagtgaagcctcatgtcgatgaagcatggataaacctagatacggtaaaaattggctatgaaatcagcttcaataagtatttctaccgtcataaaccgctgcgtagtttagaagaggtcgcaaccgacatcatcaacctagaacaaaaagccgaaggtttgattgcgcagattcttggtgcggaagtaaaaaaggttcaggggtaa

SEQ ID NO: 36212 - DNA, 1329 bp, Escherichia coli
atgatgaagatttctgaaatgccgaaatatgaggcttataaagattcaggtgttgaatggataggggccataccagttcactggaattcatttcctttgtgcgcaaaatcaaaattaaaatctatttctaataatgaaaatgaagagcttctatcagtctatttggacaaaggagtaataaaattcgatgacgttgatgcaaaacgtacaaatacaaccagttcggatctgactaagtatcagttggtagatccaggtgactttgttttaaataatcagcaagcttggcgtggttcagtcggtgtttctgattaccgaggaatagtcagcccagcttacttagttctttctttatcggaagatatagttccccgctttggtaactatctgttcagagatggggcaatggtggctaattacttagttagctcaaaaggtgtaggaacaattcagagaaacctatattggcctcaattaaaacgagccttggtatttttgccaccaaccgaggaacaacttctaattgcctgcttcctcgacaagaaaaccgctctaatcgacgaagcgatttcgatcaaagagcagcaaattagcctgctgaaagagcgtaagcagatcatcatccaacaggcggtgacccaagggcttgatcccaatgtgccaatgaaagactccggtgtggattggattggtaagattccagcgcattgggacgttaagaggttaaaatatcttggtaaatcgatcattgggttaacttattcgccaaatgatttaagtgatgaaaaaggcggaactctagttgcgcgatcatcaaacttatacgaagggaagtttaagtatggtgaaaaggaaaatgtttatgtcaattgctttattcctgagcacttaaagcttaaaaaaggtgatattttgatatgctccaggaatggaagtcgagacctaattggcaagtgtgcatttgtatctgacgctgatgagggaaacagcttcggggcctttactacggtattcagatctaaacacaatgagtatttattttgcattctaaatagtgatgttttcaaaatgttatcagggacatttcttacatcaacaattaatcagcttacagtggggaatcttaatagcatttttgtgcctttccccccttctaaaaatgaacgagatggaattattacgtacattaacagattaaatggtgatgttgagcgagctatagagtatcaaaaaatacaaatcgaaaagcttaaagaatataaaaccaccctgatcaacagcgccgtgacaggaaaaatcaagatcaccccagaaatggttgagcaatag

SEQ ID NO: 36213 - DNA, 1164 bp, Escherichia coli
atgttcacggtaaatcatcagaccaacaggattagtccggttaagacgaagagattcagtgagttgggctttactgagcgcaaaaatcttcaggaatggttggcacacgagccttccgcactgggtgaagagctgctgattattcaaaaagagttcgatggctttgatgacacccgtgaacgcttagatttactggcactggataaagatggcaacttggtcattattgaaaacaagctggacgacagtggccgcgatgtggtgtggcaggcgcttaaatatgcctcctactgcgcaagtttaaccaaagcgcaaatcgttgaaatttaccagcagtacttagaccgctatgagcctgtaacaggagaggttgacttgtttaatacccctgcaagtgcctctgctagaatatgtgagtttttggatgcgcccgatctcgatgagttaaagctcaacctgggtaacagccagcgcattatgttagttgcggcaaactttcgcaaagaagtgaccagcaccgcgctgtggttattgggtcaaggcattagcattgcctgcttcaaaatcacgccttattcactgggtgaacagctactgattaatattgaccagatcattccaacgccagaagcgaaagagttgatgatcggcattaatgccaaggaagcggaagaaaaaaccaccgaagtggtactaaaaaaccgccataccgtgcgtcgcgagtactgggagcgtgccttagaggcgtttcagaaaagctcttgccaactctataacaacattagcccaagcaaagatcattggttatcagcaggctcagggctaagtggatgtccgtataacctgatatttctgcaaaaagagcttcgagtagagctttggatcagccgtggggttaccgaagagaataaatacctttttgatttgttgagtcagtccaaacaagacattgagcatacttttggtgcagaacttgagtggatgaggctggatgagaagaaatcttgccgtatccagttttcgaccaaagctgacgggtttaacaaagagacttggccccaagcggttgcgtggcacttagagcagatgacaaagttagaaaaagccttaaaaggaccgctgcaaaaagcggctgaggcaatgaaacagaagaattttgattaa

SEQ ID NO: 36214 - DNA, 3018 bp, Escherichia coli
atggtcagtcaaaccaatgaacaagcattagagtcggccattgagaaatgtctggctgggatcagtactgaagagctcaaagaggggctgagtcagcagtcactgggtgctggatacttcattggtgctgctagtgactttaatatgcaatatgccattgatgaacgttttttctggcaatttctgcaaaagacacaagaagtagagttggccaaactgcaaaagaacaacccctcagattggcaacgtaagttactcgaacgatttgaccgactgattaagaagcatggcattcttcatttacttaagaaagggctaagcgtagacgatgctcatttcaatttgctctatccagcccctttggcaagtagtagtgagaaggtaaagcaaaactttgcagataacgtgtttagttgtactcgccaagtgcgctattccatggtaaatcccctacaagaaatcgacatggtattgtttatcaacggaatacccttgataacgctggagttgaagaacgcatggaccgggcaaacagcacgttatcacggccaaaagcagtatcgagatgatcgggatgcaactcagccattgctgacctttggccgctgcctagtgcatatggcggtcgataccgacgaagtgtatatgaccaccaagttatcaggtagcagtacattcttcttgccgttcaataaaggtcacaatcttggacaaggcaacccgccgaatccatctggccataaaacggcatacctatggcaagaagtattcactaaagacagcttggcgaatattattcagcattttgtgcgtctggatgggtcaagcaaagatccattacccaagcgaaccctgttctttcctcgataccatcaattggatgtggtgagaaaattagtagaccatgccgcccagcacggtgtcggtcagacttacttaattcaacactcagccggttcaggtaagtctaactcgattacctgggcagcttatcagctaattgaaacctatcctgcttcgtctgatgtggcaggcggaaaaagcttggagcagccgttgtttgactctgtgattgtggtcaccgatagacgcctattggacaagcagctgcgggataacattaaagagttttctgaagtaaagaacattattgccccagcgaataagtcttctgagcttaagcaggcgctggagaatggcaaaaagattattataacgacgattcagaaattcccgttcattattgatggtatcgccgatcttagtgacaagcgctttgcagtgatcatcgatgaagcacacagctcacagtctggttcggcgcatgacaatatgaaccgagcgatgggcaagtctgaagtcgaagaggcagaagatgctcaggataaaatccttcaggcgatgagatcgcgtaagatgcgcgggaatgcgtcgtacctggcatttacagcgacaccaaaaaacagcactttggagaaatttggtcaacgccaagaagatggctcttacaagccgtttcacttgtattcgatgaaacaagccattgaagaaggcttcatcttggatgtgctggcaaattatacgacgtacaaaagttattatgagattgagaaatcaattgctgataaccctgagtttgataccaaaaaggcgcagaaaaaactcagagcttatgtagaacgaagccagcaaacaattgatatcaaggcagagattatgctggagcattttgttccgcatgtcgtgaatacgaaaaagctcaaaggtaaaggtaaaggaatggtggtcactcaaaatattgaggcggccattcgatactacaaagcgataaggcgaatacttgaggagcaaggaaacccgtttaaagttgccattgctttctcaggaaccaaagaagttgatggtattgaatataccgaagcagatattaatggttttgccgagtcagataccaaagatatgtttgataccgatgagtatcgacttttagtggttgctaacaagtatctgactgggtttgaccagcctaagctttgcgccatgtatgtagataagaagctcgccagtgtcttgtgtgttcaggcgctatctatgctcaatcgcagtgcacctaagctagggaagaaaacagaagacttgtttatcctggattttttcaactcggttgaagatattcaatcagcattcgatcctttctatacagcaacgtcattgtcccaagctacagatataaacgtactgcacgagttgaaagatgaaatggacgatgtcggtgtgtacgagtggtatgaagttgaagactttgtgacgcgttatttcaagaatgaagacgcccaaacactcagtccaatcattgatattgccgcagcgcggtttgaccatgaactagatcttgaagctgaagctaaagtggactttaagattaaagccaaacagttcgttaaaatctatgggcagatggcttctatcatgccttatgaaatggtcagctgggaaaaactgttttggttcctgaagtttttaataccgaaattgaaagtggaagatcccgatgctgatgctattgatgagcttctcgattctgtcgatctgagttcatacggtttgcaacgtgtgaagcttaaccacagcattaaacttagtgaccaagaagcggagcttgatcctcaaaatccgaacccacgtggggtgcatggcggtgaaaaagaaactgacccgctggatgaaatcattcgcacatttaatgagcgatggttccagggctggagtgccacacctgaagagcaaaaggttaagttcgtgaacatcgctgaaagtatccgcaatcaccctgacttcgaatcgaaatacaaaaacaacccagatccccataatcgaaatttggccttcgaaaaaatgctcaaggaaatcatgctgcaacgccgtaaagatgaacttgagctctacaagttgttcgcaggagattcagcatttaaagcctcgtggacgcaaagtatgcaacgaatggtgggtaggtag

SEQ ID NO: 36215 - DNA, 276 bp, Escherichia coli
atgaagactttggttcgcatttcatctagtaccgactatgacgtttacccgttgttcatgatcaagtgcgacgggctgaacgatgaagaaattcaagcggcaattgaacgcaatctagttgaatacacaggaatggatgcggattctatttatatcgatgatgacggtgtttgttggcacaacggtagctgctggtacgtagacgacacaatgctggtaagcgatgaagacgcggcccatcttgagcgcattttgggtatcagcacttttgagtga

SEQ ID NO: 36216 - DNA, 336 bp, Escherichia coli
atgaagaaaacagccctggtactggcgctgctcactctccccgtctttgcggacacacatgtctatgagtgcgaaatgtttgtggtcgaagcgaaaaacggcctgatccgcaacgccgttaaagctaattacggcgcgatggttgtggaccgtggcgaacagttttatgtggtacgcgatgatcgcgtcctgtcttccccgtttctcactaaacgtaacggcgaactatctggcgtaggtaaagataggttcgtttacaacaaatcgggtgatgtatacggcgttcacgcgaagaacgacagctaccttttcgatgactgcaaggaggttgggtaa

SEQ ID NO: 36217 - DNA, 306 bp, Escherichia coli
atgggcgctctgacccggcgcgccgagggtggcggcagcggaagagtagagaataagatagcgtccgtcgtggttgcgcagggtttgcaacagctggcttgccgcctgcgcttttaccgcgaaaacggcagccagctggtggtcatcaagctcctgcaagggcgcgtcagccaatacgccagcggcatgaatcgctccggcaatgccgccgttggccgccagatcgtcaagaaccgtggccagttgcccggcatcgcccacatcacaacggcagacgcgcgtctgcccgccctccacgtcgcgtag

SEQ ID NO: 36218 - DNA, 240 bp, Escherichia coli
atgacccctttccgctataactccgatctcaccagcggctcgctacaaacccgagagtgtcgcattattactggcttgttactccaagagcttgatgaagctgcctgggataaagccatgtataaggaaaatgtgcttcagaaacgcacgcaatctacggtaagacgtatttcttcagcgcttagaaaacgcctagaacacctaagctctgacttttgggcttttgcgtttttatgttag

SEQ ID NO: 36219 - DNA, 831 bp, Escherichia coli
atgatcgaccgaacacacaaactgtcggtcgcacgtcaggccaggcttctcggcttcagccgtggcagtgtctactattctccacgtcaagtgtccgacggcgatctggacctgatgcggcggatcgacgaactgcacctcgactatccgttcgccggaagtcggatgttgcaagggcttttgaggggtgaagggaccgaggtcgggcggttgcacgtcgccacgctgatgaagaagatgggcatcgaggcaatctaccgtcgcccgaacacctccaaaccagcgccaggtcacaaaatctatccttatctcctgcgcaagctggcggtcacccggcccaaccaggtctgggcaatggacataacgtatgtgccgatggcgcggggattcgtctatctctgcgccgtcgtggactggtttagccggcgggttctgtcctggcggctgtcgatcacgatggaggcggacttctgcatcgaagcggtcgaggacgcgctggcccgctatggaaagcctgaaatattcaacaccgatcagggttcgcagttcacctccatcgacttcacagccgtgctgaagaaggcggagatcgccatctcgatggatggcaagggcgcgtggcgcgacaacgtcttcgtcgagcggctctggcggtcgatcaaatacgaagaggtctatctccacgcctacaagaccgtatccgaggctcgcgctggcatcggccgctatctcgccttctacaatagccgacgtccacattcatcccttgaccggcagacgccggatcaggcctacttcaacgcgctggcaccaatgatggtggcggcataa

SEQ ID NO: 36220 - DNA, 273 bp, Escherichia coli
atgaatgaaataaatgaaatcgcagaccgcttgaaagaagttcgcaagaagtccggcaagcgacaacaaccctttgctgatagcattttagtatcacaaagtgcttatagtgcttatgaacacgctaagcgcgagatacctatgaaagttttgcgctcgcttgtgatcgaatacaatgtgaatccggcgtggttcttacttggaaccggcaatttttcatatctgcctgaagctgaagaaatgacaaacatcgcggccaagttggaaatttga

SEQ ID NO: 36221 - DNA, 429 bp, Escherichia coli
atgattttaagccctgtttcagttgcctatgaaggccaaaccgttattttatcctcaattgtcgttcctgctggtttcccatcaccggccagtgatgatttagaggatgaaattgaccctattgcttggatcgtaccgcatccgagcgccacattttggtggcgtgtttccggtgatagccttgtcgatgaaggtattcacgatggagatttaattgccgtggatcgttccggtaaagcgcgggtaggccgcattgttttagctgtggttgacggttcaatcacactgaagaaattagccaagcgagacggtcaatattggctcgatcctaaatctaagggcaataattatcagccaatcaggattacagaccaaacagagatttggggcgtaatcgccggatcagtccgccgctattcggtggattga

SEQ ID NO: 36222 - DNA, 273 bp, Escherichia coli
atggtaagacccatagccctgattgatgggaataatttctatgtttcgtgtgagagggtgtttcagccgcacttgctaggcaagccggttatcatcctgtcaaacaatgatggttgtgccgtagcacgatcagaggaagcaaaagccctcggtattaagatgggtgcgccgctgtttaaaatccgtgagctggtcaaagaacacggcgttaaagtgctatcctcaaactatactcaaaacaaaatcattatggccgctaattgcggctattaa

SEQ ID NO: 36223 - DNA, 249 bp, Escherichia coli
atggcaaaactcactaaagcacaattgaaagcacatcgcgaagctgaagcgattttgaccaaagacgttttgaactatgatgaaaaattgtttgtgctgtataattggcatgaaggcgcaaacttcaccaatggcgcagcaggcgcgttctttactcccgctgaccttgcaagcgattttgcaattgaaggggacgtttgcgggaaggggcgaaaacctactctaagctgtgtcagtacaaatgaatga

SEQ ID NO: 36224 - DNA, 1200 bp, Escherichia coli
atgcattttacaaaattaaagaccgtggtaatcgctgctctcctgagcgcaactgtcagctcatttaccctgccagcttattctgccgatctcatcggtttttgggacacacagcgaaaaggcgggaacagctttaacaaaacgcctcctgatgaggcttatttcaaaacgctggccgcgacgggcgctacctgggttcgtctgacttttagcaaatggcgtggggaagatcgggatttcctgatcggcaatgctgatcactatcgaagcctgagagaaaaagatttacaaattctgcggaagacattggatgccgctcaggcagccggacttaaagtcgttcttacatcggtaagccttccaggtgcccgatggactcaacaaaatggtggtaaatttgatgatcggctatgggaaagccctgaatatgtcgagcaagccgtcaagttctggaccgatctggccggagaactgaaggatcacccagcgatagccgcctataatttaattaatgaaccagcacctgagaaaaccaccgggcttaaagaaaatgcatcgatggaagttttagaagagtggcagaaggaacatcagaacggcacaagggatttacgagcgttttaccaacagctcattgaaggcatttggaaagtcgatccggcaacacctataatggtcgacagtgggtattacgcgaatgctcgatcactagcagcatggcctgcaccgcttgctgacaccaaagttctttatgcatttcatatgtatgaaccctatgatgccacaagcgcgccaaatatgaagcgcaaggtgcctttacgctaccctggtgtaaagacgcgatactctggttcagaagttatttgggaccgcaaaacagttgctgctcatatcaccctcccttttgaatgggccaggaaaaacggcttaagcaccaatcgaatagtgatggccgaattcggttgtatgcgcctctggccagactgcagcgcctatttgaccgatgtaatggatgcagccgagaagtttcaggctcaccgtgcattttatgcatttcgggaagacgagtgggacggcatggattacgaactgcctgcaagtctgcgtcccggccagttttactggctgacagaacagggtaagcaaaacaaaattccgcgaaatggcgaactcatgaaactgctcaagaagcggatgtaa

SEQ ID NO: 36225 - DNA, 867 bp, Escherichia coli
atgacaagatctgcccttttgattccactcaccacggcggctatcgcgctaaacgcaatatcgccggtttatgcgagcgacacccattctattgatgataccgtaaaacaggttgaaaccacgctgggagcaaaagtgggtatagccgtcctggacaccgggtctcaacgtgcctggttccaccgtgctgatgaccgtttcccgatggcgagcacatccaaagctctgacctgtgcagcgctgttggataaaggtcagagctttatgaataaagaggccttgatcaaaaaggcggacctggatgaatatgcaccagtgacatccggcatagtcggcaaaaaagtaagtgcggctgacctttgcagcattaccatgcgtacaagtgacaataccgccgtcaacaaagttcttgaaatcctgggaggaccgcaagctgtaaccgcttatttgcgcaagacaggtgataacattactcgacttgacagaaatgaaccggacctcaacgaaggaacgcctggagacgtgcgcgacacgacaacgcctcgcgctattctcgaaacacttaataaactggtactgggccccactcttggctctgacgagcgaaaacaactcacaacctggcttgaaagtaatgaggttggtgaccctttgctgcgcgctggagttccttctgattggcgcgtcgccgatcgaactggcgctggaggtaacgggacgcgtggggtgattgccgtcatgtggccgccaaaacacgcgccaatcattgctgcgatttacattacacagacgaaagccactatggaggaaaggaacgctgccatcgcctctattggcaaagcgattgctgccgaagttctggaataa

SEQ ID NO: 36226 - DNA, 621 bp, Escherichia coli
atgactgagcaacaactgcgagaggaaatggtgcagattggcgcctcgttatttagccgcggctatgccaccggctccgctggcaatctgtcgctgctgctgccggacggcaacctgctggcgacgccgaccggcgcctgcctcggcgaactgcaggctcagcggttgtcggtggtgacgctgcaaggagaatggatctccggcgacaaaccgtcgaaagaggtcacttttcaccgggcagtctatttgcacaacccggcctgcaaggcgatcgtccacttgcacagccactatctgaccgcgctctcctgcctgcaggggctcgatccgcacaactgtatccgcccctttaccccctatgtggtgatgcgcgtcggcgacgtcccggtggttccctactaccggccgggcgatgaccgtattgcccaggcgctggccgggctggcgccccgctataacgcctttttactggccaaccacggaccggtggttactggctcatcgctgcgcgaagccaccaacaataccgaggaactggaagagaccgcacggctgatatttaccctcggcaaccgcgagatccgctacctgaccgctgacgaagtaaaagaactgagataa

SEQ ID NO: 36227 - DNA, 357 bp, Escherichia coli
gtggaagtgaacattcagattgagcgccgatccaaaacgctggatcagggtgaccgcgcccgtcttggccacttggtgggtatggcccgctttcttgaccaggtgcgtggcaatgacgcggtaaacgatgcccagcacccaccccatgatctcgggccggctggcaaacaggaaacgcagctgaaacgggaagctcaacacccactgacgcatgggttgttcaggcagtacttcatcaaccagcaaggcggcactttcggccatccgccgcgccccacagctcgggcagaaaccgcgacgcttacagctgaaagcgaccaggtgctcggcgtggcaagactcgcagcgaacccgtag

SEQ ID NO: 36228 - DNA, 165 bp, Escherichia coli; identical to SEQ ID NO: 17502

SEQ ID NO: 36229 - DNA, 180 bp, Escherichia coli
atgagtaataatgctaacatgggtggttacaaagtcattaacatcgatgctgacaacgatatctggcgtctagaaatctacccatccgaaggcacccgtgaagaattagctaaccatttgcgcgccattgctagagcggtccattctgaacctttggccagttttgataaccccacatga

SEQ ID NO: 36230 - DNA, 855 bp, Escherichia coli
atggttacttatacgccagtagaagatgggtttacccatataaacatatatgggtatcgtactgatgaatggagatttctatgtcctatggaaaactcccgcatagatcacccttatttcggtagctatcgaactatggaggggttataccaggatttacggactggattcagaacaccttcaatgaaggtaacgtctggatttgaatccgcatccatagcgtctacattacctaccctagtggagagagcagaattagcttttaatgttgaggaggtatttaccttatggctgttacaaaaccacaacgctcgacaaagactattagccactaacctaccacttgtctatcgacgagcggtagggaatggtgcagaacgttattacgtagagttatctgaaacgtattggtttgaggcagtgtttgaaagaatcagacaacgtctcagatgcgagacacctggggtgacttgtctgttcctcaatactcaaccggatagtctttataacggcagtttacttgtagctgggcaagcgatcgtaagtgaagtagagtttcaatcactatacgaacgttgtggttttggtttttcgaggctacacacgcttggtgatgatgatttacacgctctaggagagtctgtaaagcgttttacttacgttgaggtaggtagacatcatatcgatgtaagaagtcaagcagaagcgatttctaatgcctctacagcgatgttactttgggatggacataaccacgatatcagggtgtttattgatcgagctatccatacagggaaaccaacacttttggtaacatctaactttaactttctggagtttaatacaggtgaataa

SEQ ID NO: 36231 - DNA, 567 bp, Escherichia coli
gtgaataaaggtaatcgtggtaaagtagcgttaatctatgctagagatctcggcggggtcattggtatggataacgagataccctggcatatccccgaggatctcgaaaggttcaaagaactgactagcaatggcgtcgtcgttatgggtcgtaagacttgggagtcgttacccaagaaacccttaccgaatcgccttaatatcgtgttttctcacaaccaagagttcaaagacagcatccaagatacttctggtggtgtgtggactgcttctagcctggaaaccgtgatcaacaatgtcggtaggtatgtaggtcgacgaacgatctggatcatcggtggtaaaacgctctatcatgatgctgtcaaatatgccgatgagatctacgtcacggaagtacaaacggatattagtgctaagtatcctgacaaaactcttgtaaagctcgatgtagaaagtattgagtcagattcattcgcacgagcgatgattactaaacctatcacatccggtgataaattacagtttcgatttattcggtataacagaattcggccacatttctag

SEQ ID NO: 36232 - DNA, 432 bp, Escherichia coli
atggctaaaaatattgaaaacatcgtcgtcccatcactagacccagatggttgggtttattcaagtaagaaacaagcggattacgtgatggcttattttttagccactgatcgtagtcagtcatacatttttgatagtgacgtcacgtcatttcagtatatactggctacccatcatggcaacattagtgaactagtgcatgaacttcagatagggcttagaaagctattcgagcgttatttcaataacgtccaagtagaggttagggatataactaaagaagaatcaccctctaaagtctacttagcgttatcgtgtcgctatacactggccgatggaacaatcgaagatcttatccggatcgttaatataaatggttcgaagtttactattatgaggcaagccatttcaggcgaagcatatcaactctaa

SEQ ID NO: 36233 - DNA, 594 bp, Escherichia coli
ttgatcaacgaccttttggaaacttcggcttcccctggagagagcgagattctccgcgctgtagaagtcaccattgttgtgcacgacgacatcattccgtggcgttatccagctaagcgcgaactgcaatttggagaatggcagcgcaatgacattcttgcaggtatcttcgagccagccacgatcgacattgatctggctatcttgctgacaaaagcaagagaacatagcgttgccttggtaggtccagcggcggaggaactctttgatccggttcctgaacaggatctatttgaggcgctaaatgaaaccttaacgctatggaactcgccgcccgactgggctggcgatgagcgaaatgtagtgcttacgttgtcccgcatttggtacagcgcagtaaccggcaaaatcgcgccgaaggatgtcgctgccgactgggcaatggagcgcctgccggcccagtatcagcccgtcatacttgaagctaggcaggcttatcttggacaagaagatcgcttggcctcgcgcgcagatcagttggaagaatttgttcactacgtgaaaggcgagatcaccaaggtagtcggcaaataa

SEQ ID NO: 36234 - DNA, 195 bp, Escherichia coli
gtgattgaatgcgatcatggcaaactgaaacggataatcggcgccacgctgggatttaaatccatgaagacggcttacgccaccatcaaaggtattgaggtgatgcgtgcactacgcaaaggccaggcctcagcattttattatggtgatcccctgggcgaaatgcgcctggtaagcagagtttttgaaatgtaa

SEQ ID NO: 36235 - DNA, 372 bp, Escherichia coli
atggtagaaagaaccgctgttttccctgctggccgacattcactgtatgctgagcatcgttattctgcggctattcgttccggcgatttgctgtttgtttccgggcaagtaggaagtcgagaggacggaacaccagaacccgattttcagcaacaagtcagactggcatttgataatttgtatgcgaccctggctgctgcgggatgcacttttgacgatatcattgatgttacgagcttccataccgatccagaaaaccaatttgaagacatcatgacggtgaaaaatgaaatattagcgccccaccttatccaaactggacggcggtgggtgttacatggctggcaggctttgattttgaaattaaagtga

SEQ ID NO: 36236 - DNA, 180 bp, Escherichia coli
atgcaaactacgcgtaccccctactctatttcctttatggcgacagtgttacttttattgctctttgcttgccatagcaccattgccaacgcagctgtcgcactgggtgcgacgcgggtaatttattgcctgtcacgaataatgatcctgccagtgtctatctcattcagtcatggatag

SEQ ID NO: 36237 - DNA, 387 bp, Escherichia coli
atgaaaaaacaagacaaaggaaaaaaggctgtagcttccacatcaaaggtggagagaaaacatgtgatatcactgcgattgactgatgaggaatatcagtcatttcatgagtattttacatctcttgaagtcagtcgtagtgagttttttcggatggttatactgaatcgtctggatgatattccgactttgaaacaaaaacgtccagttgaatacagagaattactcagactttttaataagtcaagcaataatattaatcagatagccaaaaaaattaacacagaatatcgcaatggttttatttcagaaagtacatatttacgctatcttaatgttcttgttaatattcgtgatgcgtttgttgcagggattaataaatgttag

SEQ ID NO: 36238 - DNA, 384 bp, Escherichia coli; identical to SEQ ID NO: 5293

SEQ ID NO: 36239 - DNA, 222 bp, Escherichia coli
atgaaacttgctttaatcatagatgattacctgcccaacagtactcgtgttggtgcaaaaatgtttcatgaacttgctcaagaatttatccagcgtgggcacgatgttacggtaattactcctggtacgggcatgcaagaagagatttcttttgatacctttcagggggtaaaaacatggcgttttaaaagcgggccgctcaaggaatcaaaaaatgggtaa

SEQ ID NO: 36240 - DNA, 714 bp, Escherichia coli
atgcgttgcctgggcgctgttgccagcgacattgctgacgctggcctggacgtttgctgcgccgtctggcaaggttgcgagatcggcggctgggatcgtcagcccccagctattatccgcggcaaccgtggtggtgtagcttttgccaccgaagataacggtgatggtctgccccgcttccacgccggaggtggtgccggagagctgcaaatcgctgcctttttcggcggcgttaatcacatcgtcagtggaaagggtgttaatggtaatcgccacggccgcgagatcgaccgtgaccggatggctaatgctggttgtggttccggcggtattggtgtcagaaacggcaatattgaccgtccccgcaggccagtttgtgacatctgccgccggaacaccgacgctccaggtgccatcgacgagtaccgttgcgccataggtgacgccgttgatcactaccgtcaacgccgcccccatcgccagtccggtactgctaccggtgactaccaacgcctgaccgtgctcgataatattgaccacatcatcgcctgctacggtatcgacgcgcagacctggcaggttggcatctatcacgatatcgtgcgttgcggtgccggtattacccccgttattagtcaccgaggcgctgatggtcagctcaccgttgcccagcgcctgcaaaacgttcgcaggtacgctgacgctccagcttaa

SEQ ID NO: 36241 - DNA, 837 bp, Escherichia coli
ttgattgccaccaatggtgacaatcaccgtattccccgcaaccgccgttcccgtgacctgaccgctgatggtctgcgccacaacgatttcagcggcgttgataatgtcatcgcccgccacggtattaatgattacccctggcaggagcgattcgacattcaccgtatgggtggtgctgccgctgttgcccgcgctgtcggtggcgctggcgctaatctggtacaccgcctcgcccagtgcgccgaccgccgaagcaggcacggtaacgctccagttaccggaaccgtcggtggtggcactgtacgccaggccgttcaacatcacggtgaccgtggtgccagtcgccagaccgctggagccgccgctgatggtcagatcctgggttttctccgcattattaatgatgtcatcgccggagacggtactgatggtcagcatcgggccgctaagatcaacggtcacattatgggtagtgctgtcgctgttgcccgcgcgatcgctcaggctggcggtaatggtctggcttcccgttgccagcgccgtgacatccaccgccggaatgccgacgctccagttaccggaagcgtccagcgtggtggtgtagtttttaccgttcaggttaaccgtgaccacatcgcccgccgccgcgcccgtgctggttccgctgatgacaagcgcctgaccatgttcgatggcgttgataatgtcatcgcctgcgacggtattaatggtgagatccggcgcagtgacgtccaccgccagcgcgtggtcggcgcttgccgggttacccgctttgtcgctcaccgtcgcagtcacggtatagctgctggcggttaa

SEQ ID NO: 36242 - DNA, 450 bp, Escherichia coli
atggctggcggaattgctgttgcccgcgctatcggtgacgttcgccgtcaccgtgtaactggcttcgcccagcgcaccgacagcggaggctggcaccgtggtgctccagttgccagaagcatcggtcgtcgcggtgtaattttgcccgttcagcgtcaccgtaattgtagtgcctgcgggctgattactggtgccggaaatttgcagatccgcgcctttttcggtggcgttaatcacgtcatcggtggcgatggtgttaatgccaatggtcggtgcggtaaggttaacggtgaccgtgtgcgtctcactatcgctgttaccggcggcatcggtaacggtcgcagtcacggtttgcgggccgctgccaagtgcggtgacatctgccgccggaacgccgacgctccagttgccggaggcatccagcgtcgtggtgtaggttttactgtttag

SEQ ID NO: 36243 - DNA, 378 bp, Escherichia coli
atgcgtggtgctcgccgggttgcccgctttgtcattgaccatggcggtcagggtgtggctgccatcggtcaatgcctcaagatctgccgccggaatattaatgctccagctgccgtcggcctgtaccgttgcctgataggtctgcacggtcgggctattgagcgttaccgtaacaatctgccccgcttcagcggtggtgctgccgctcaccgtcacacccgcatcggcttcgctggcgttgacgatattgtcgctggcaacggtattgataatgatggtcggggcactgctatcgacgctgtagttatgcaccgccgaggcgctattgccattaatattgctgacgctggcctgcgcggaggcgctgccatcggttaa

SEQ ID NO: 36244 - DNA, 357 bp, Escherichia coli
atgcgtaatgcttatcggatttccggcgctactttccccggacacggcaatattaatcgtccccgcaggccaggcgctaacctgcgccgccgtgacgcccacgctccagctaccatcggcctgcaccgcagtggtgtattccacattattaattgtgatggtaagcggcgtgccttcagccagccccgagctgctgccgctgaccaccagcgcctgcccgtgctcgatgatattgaccacatcatcgcctgccaccgtatcgatccgcagaccgggcagattggcgtcgatggtgatatcccgcgtgccgctgccggtgttgccgttttgattggtgaccgaggcgctcaccgttaa

SEQ ID NO: 36245 - DNA, 168 bp, Escherichia coli
gtgaccgttgttgtctacctgagtactggcaatagtattgccgttactgtctttaatctgaatagtcgcccccgcctgcccgctgccgctaaaggttggcgtggtatcatcggtgatgtcattggtggcgagaatgccgcgctgatcgccctgattatcggtaactaa

SEQ ID NO: 36246 - DNA, 1119 bp, Escherichia coli
  misc_feature (173)..(205): n is a, c, g, or t
gtggggcttacacgtactgcagtattgaaaccaacgggagagcagttaaccatacagatcaatgatgcctttcttggttcagttttgaatgcttctggtcaaattatggaaaggtttgtcccggacactccaggcgaaaggggaaatttacgcctgattgatgaactgccacnnnnnnnnnnnnnnnnnnnnnnnnnnnnnnnnnataaggaacgtcgagttattaatacaccactagagacacggataagagtcattgatggcgtactgacatgtggcattggtcaacgtgttgggattttcgcatcggctggctgtggcaaaacggttttaatgcatatgcttgtaaacaacactgaagctgatgtgtttgttattggcttgattggcgaacgtggaagggaagttacggaatgcgcggaatcgctgaaaaaatcagtaaatgcagcaaaatgtgttttggtttatgccacctctgatttttcgtcagtagatcggtgtaatgccgccctgatggcgacaaccgtggcagagtattttagagatcgaggaaagagagttgtactttttatcgactcaatgacgcgctatgcacgagcactacgcgatatgaagctggcagcgggtgaaccacctgccagacgtggttatcctgcttctgtttttgacagtttacctcgcttactggagagaccgggaccaacgctaaaaggaagtattactgccttttataccgtattactggagggggaggatgaatcagacccactgggtgatgaaattcgctcaatccttgatggccatatctatctaagtcgcaaactcgctgggcaaggtcattatccggcaatagatgttctaaaaagtgtgagtcgagtatttggtcaggtcactgatgaaaaacacagagataatgctgcacgggtaaggaagatcctcacaactttggaagaactacaggtgtttattgatttaggggaatatcgcgctgggcaaaatgctgaaaatgattttgctatgaatgcccggcctaaactcacaaattggttaaaacagtcagttaatgaaaaaatgccaatgagtgaaacgctaaaagagcttgaacgaattgttaagtaa

SEQ ID NO: 36247 - DNA, 984 bp, Escherichia coli
gtgctgacctcgaagtatgcagagcacaccccgctgtatcgccagtcagaaatatacggccggcaaggtgtggagctgagccgttcactgctgtcgggctgggtggatgcatgctgccggcagctgtctccgctggaagaggcgcttcatggctatgtgctgactgacggtaagctccatgctgatgacacgcctgtcccggtgctgttgccaggcaataagaaaacgaagaccgggcggttatggacctgcgttcgtgacgaccgtaacgccgggtcaacgctggcgccggcggtgtggttcgcttacagcccggacagaaaaggcatccatccgcagacccatcttgcggggttcagtggtgtactgcaggcggatgcatacgccgggttcaacgagctgtaccgggatggccggataacggaagccgcctgttgggctcacgcccgccgtaaaatccacgatgtgcacgttcgcaccccgtcagccctgacggaggaagcgctgaaacggatcggcgaactgtacgccatcgaggcagagataaggggaatgacggcggagcagcgccttgccgaacgtcagttgaaaacgaaaccgctgctgaaatccctggaaagctggctgcgtgaaaagatgaaaaccctgtcgcgacactcagaactggcgaaagcgttcgcatacgccctgaaccagtggccggcgctgacgtactatgcagatgatggctgggctgaggcggacaataacatcgctgaaaatgcgttgcggatggtcagtctgggccgcaaaaactacctgttcttcggttcggatcatggaggagagcggggagcgctgctgtacagcctgatcgggacgtgcaaactgaacggagtggagccagaaagctacctccgctatgtccttgacgtcatagccgactggccgataaaccgggtcggcgaactgctcccctggcgcgtagcactgccgactgaataa

SEQ ID NO: 36248 - DNA, 747 bp, Escherichia coli
atgaccaatctatcgggagtttatggcactctgctgccggataataacctgaattatagtgttcaggtcggtaacacccacgggggtaatacatcgtctggcaccagtggttacagttctcttaattatcgtggagcttacggtaatacgaatgtcggttacagtcggagtggtgacagcagccagatttattacggaatgagtggtggcattattgctcatgctgatggcatcacctttggacagccgctgggcgacacaatggttctggttaaggctcctggcgctgataatgtcaaaatagagaaccagaccggtattcataccgactggcgtggctatgccatattaccatttgcgacagaatatagagaaaatcgtgtcgctcttaacgcgaattcccttgcagataatgttgaactggatgaaaccgtggtcactgtcatcccaactcacggtgctattgccagagcaacatttaatgcacaaatcggcgggaaagtattaatgacgttgaagtacggtaataagagcgttccattcggtgcaattgtcactcacggaaagaataaaaatggcagcattgtcgcggaaaacggtcaggtttatctgactggacttccacagtcagggaaattacaggtttcatggggcaaagataaaaactcaaactgtattgtcgagtacaagcttcctgaagtttctcctggtaccttactgaaccagcagacagcaatctgtcgctaa

SEQ ID NO: 36249 - DNA, 1209 bp, Escherichia coli
atgagtatgttaatctggaagaaaaaaaataatgctaaacacttaatcttgtttatacatggcttaaaaggcggaagtgatacgtgggcagttgataagatcacatccttcccacagcttatatgtgaggatgaagatttttgtgatgcctttgatatagcttgttttgagtatttcactaattttacgaatacctacggtaaaagtagaaatttactcgccagattgttcacatcactaacaaaaaaagaagtcaatcttcctgttgatgaattatcagagttacttgttggtgaatgtcaaataaatttatccgattatagtaatataatatttgtcgctcacagcatgggaggtttaatagcaaaatcatgcattattaaaatgcatgaaagagatctttctcacaatataactggatttatttcacttgctgttcctcattcgggctcagaaactgcttcatgggctagtatggtttcatcaaatgtccagcttggtgatttaagtgtatttagtaaagaaacagattctctaaaccgcagatgggtaaagttgcctaaactccctgagttaaagtttttgtatggaagctacgatagtattgtagttaaagccagtgcaattcctgttcaagtttctgccaaagagtctatagctgttcaggaggatcattcgacaatttgcaaaccaaaggatagggattccaatgtttatcttatcgttaagaaactagctcttgaaatacataacaaaacggaactaatttcatcatcaccagaatttaaagatgataagcaatatgacaaagaattttttgtattgaaaatgatagtcgctgatgtacatagtgatatatcaaaacatgctaaggagtattattataatgcagaattggccagaaatattttcactagcgatcgagatagagaaaccttaagtgttttgtatagaaaaataagggagatatatcaaacacagtatcatgactctatagcaaatcataatacagcaaaccaactcttagctgcaatacacaaaaaaatagaagatgaagataaggttaaattatcatctcttcttgatacacttgatagtgtacataagaaaggaatgctgcatcagcttgctaataagctagatagagatataatttggtccccagacacatctcttgattctttgaatagtttaagggggcaaaaatga

SEQ ID NO: 36250 - DNA, 507 bp, Escherichia coli
atgagttcattaccttatattcctcttgatgaagattttaatttaaatgttgctcttctgattattttaattcatacgctaagcaagaatagaaatgatgttctattgttggatagaaataaaattcaaatatttttatatttgattaaaaacccgtcaaaacttgaggctgtaatgattctggcaggtaaacaaaacacatccattgatatgacagaaacttatacaattaaaagtctatcattaaacgttgacattcttttcagcactccaaaaataaaaacacttttgaaaaaattgtcgatactgggatggcttcgtgtaacaaagtctgatggtgcatcttattttagtttaacaactcagggtgaaagcgcttacgagcagtttggcggcgaatactttaactcagtgaaaacttataccaaatccatggataaaataaagtcactaacctccagtaaattaaattccattctgaatgaagtattcaaggtgtcaaaatga

SEQ ID NO: 36251 - DNA, 1980 bp, Escherichia coli
atgaaatcctatttaagaattgaacgattaatccttgttggtgtacgtaagaattacattgtcaagtttgaagatggattaaatattatacatggtgattcagatacaggaaaatctagtattttagagtttattaactatttacttggcgccagtaaaatagagttggccgatgagattatatcatctgttaattatgcggcgttagaggtcataataaatgattcggcttataccatagttagagatatttacaaaccacaaaatttcattgaggtctatcagtgtcctttcgagaggagggaggcattcatttctagaaaatatgctcctaacttctctaataacaatgccccagatggattcttttctgatttcttgatggatgcattaaatttccccaaattaaaattaaaagtgtcacccactcaggtgactagtcaatttaagcggttaagtttcagaaatatcattaaatattcctacgtcaatcaagatgatatgggaagcaagtctctcttgggaatgactgactgggctaaatatacgtacactaaagaagttttcaaatatatatataacgtactagacactgacatatccgatattgagcaacaaatatcagataaaagatctgaattaaacaacttgcgtaaaaagtatgaacatgtttcggagtttttgagagagacaggttatgaaagcattccatcaattgatgatgcaatagaagaatgtgattcaatctatgaatcgttgaacattgagcttcactcattaaatagtagtatgatggcaaactctgacaattacaatcagtttaaatcgtaccattcagaattcaacctaaaaataaaaatgatcgtaagaagcattgaagaaataaatttaaaaaaagatcaatacattagacttaaaaacgattacattaatgacataaagaaaataaaagcgattcatttggctaatgaaaaaattggccttactcaagacattaaatgtaattgccctatttgtgataatataattaccattgagaacggtgaaggtggatttatcaaatccaaacctgagtctctcgatgaagaattattatcattagaaaaaagagaaaaatccattagcgatctaattattaacctgactcatgaacataggattttgctggatgataaaattcaacttgaagctgatctgaacaaagtcagtggaatgatagatacagaagcaaaacagtttattactccatttctcacccaacgtgattctttattaaaagaaataacatctgcaagtaaaaaaagagagactttagtatcaagcttgaaagttagaaaccgtcaagaggaacttttaaccaagcaaaaaagccttacagataatatagaaactcttatagaaaaacttaacgacttaagagttaatgctcctagcatagatggtatattatcttgtttaggggatgatttgatgacttttttaaccgacgtgaaaataaagaatagaactgggataagcataagtaaaaaacatttctcgcccattgtaagagatagagactattttaatatcacatctggaggtttaagaactattatttccatagggtatatgtcatcaatattaaagagctctattgactcagacataaaccatcctcgttttttgatgcttgatactataggtaagtatctcggaaaaaacttgaaggcgaaatatgcatccgagaccaatataaaagatgatattgatgaaggaatctctgatccagaaaaatatgaaaacatctataatgcactcatagaaataactaattatgcgcagaaaaaaagaagtccgtgtcagataattgttgtagacaatgatgtccctgatcagctttctggcagattaaaatctataactgttgctcactatagtgcaagtaaggaaaacgggttacctgtcggactaattgatgatgtcatttacaaacattaa

SEQ ID NO: 36252 - DNA, 231 bp, Escherichia coli
atgttacaccattgcggattacaatatcagttttcccggtttgatgaaacagctcagcaactggcgcacgggaccgggtgttttatccggatggacctcagcaggacggccccggtcagggttaatccctttaaaggcaggatgaccatcagggatgctctctgtaccgcactcgcgggggcggggctgaaagtgactgaacagcaggctgattcgataacggtcagatga

SEQ ID NO: 36253 - DNA, 705 bp, Escherichia coli
atggaagcagtagatagatcaacaatagattttattagaaaaatcatccatgagttagaaataataggtgattgggacagaggatttcattggagctttctaagggaatttcctgacgaaaagaatatagagtcttatcttgaaataatatttgaacttgaatcaatgatcgaatttcatttggaaaagctcttacaacgacaagagaatgaaatacgaataaatggaaaaaatactaaaataaattttaaaactccgttaccattttatcacgatgttattgatatcattcctatttacaaagatgctatcttacttgaagaccataaactgcttgtgcctcaagaatcaatacccaatatatgttatctcctacaaatcccaggtacaaaagaaggtgttgcggttgaaaaccataattttggatatcacttccactattgcaaggtaaaaaaagggacattagaaagaaccaatcttttattgacttttgatcccgcttttaaaaaaacaaataagaaaccaaagcctgatttgttcggtgaataccatgcagaagggaaaaacaagaaaatagacatggaaacaattggggaaaataaacgatatcctatatatttagtttgtcatgatgcagggcaaaagagaggattgagtaattttaaagcgcctagcaacaagtcaaaattatttattacaggttaa

SEQ ID NO: 36254 - DNA, 1818 bp, Escherichia coli
atgccgtcacgtagtgtcagtgcagcctacttagctcaggctgccgagttggccggaaatccgggccagttagccgcgtatcactcccagggacactgcgtggtgctcgccggaccagggagtggtaagacaaagacgcttgtactgaagctggcccgaatcctggctgaggatgttcaagctccacgtggtgcggcatgtatcacatatagccaagaatgcgcacgcgagttaacccgtcgtctcgaagcgctggggctcagagaggcaccgaatctctttattggaaccgttcatgggttctgcttgcgccatctgttgatgccctatggacgacttgccgatctgccaatcccatttccgctgtcagtagtgtctcagcgcgagagcgaacggttacttcgacaatctggtgaccgtctatttggcgcaaaccatccctataaggctattgatctcggacggcatcgccgttcggtgttgaatcgcaatagcgttgcctggcgtgcagaggaggagctcgctgcatgggccgaggcctacgaagtagcattgcgccagcaagggctaatagactacgacgatatggtgatattcggccagcgtctgatcattgagcatgattgggttctgcccctagtacaggcgaaatttccgatccttgctgtggatgaatatcaggatttgggcgtggcgctccaccgtatggttaaacgcctggctttcgagggaggcgtacgcttatttgttgtgggtgatgcagaccaatcgatttacggtttcactggtgccgatggtgcgttacttctagaactggcagacaggagagacgttgaaacagttcggctccagttgaactatagatcaggggcgggcatcgtcaatgcatcggagatggtgttgggtgaggttcgtggttatcgagcaaacgacccgaaccgccagacaaccattgcgttccagctgtgcccggatggtttggtggatcaggctgtccatgctgttgcgcagattattcctgctgcgttggccgctaagccgggtcgaacgctgggtgacatcgccattctgtacaaggactaccgtgccggcgatgtggtggccgatgcggtgacagctggcggttttgattacattcgtgtggacaccgcagcaccttatcgcaaggttaccttgacgagctgggtggaggattgtgcggcatggtgtgctggcggttggcgtattgggcaccctcaactgcgcggattgatagaccgttatatagcatttcatcgggcaaggctggatgatgcatgcgcccggcgtaaggggcaggaattaactaggctgctttgggcgcttcgtgcagaccgacatcctgcgtgcgattttgtcgcatctttgcgcaacggtctcgttgattccctgctggcaactgagccgacgctttctgatcaggctgagcaactagatcgcatgactgctgcacttgccgaaggcggtacgttagcgatgttggatatcacgagcctaggtggtcgtgacggttcacctgagcacctcaatttgctgacacttcactcagcaaaaggttgcgaatatgacgtggtcatcatggtcggcttggatctggggaatttgccgtggcgcaatgaggcgccagagaagctgcgtgaaagccgtcgtcttttctatgtagggctgacccgcgcacgggacgaggtgcatatgctgtattccggttttgttgatggtcgctacggccctatgcgtctagggcgttccccatttctggatgaactggaggagcgaatgcgaggggccggtttacggtag

SEQ ID NO: 36255 - DNA, 1785 bp, Escherichia coli
atgcggatttcccgaattcggttaattaatttcgccaacttctctgacgttgatgttgaaacgggtgagagtattgttattgttggtgaaaacaaggttggcaagagcaattttattcgcggcctgcagctgattcttgacccagggttgtctgagcgtgaccgtcaactgggttttgaacatttttgggatggattgggcgaagaaaaattgggggagaccatcgaaatttcagtggatcttactgatttcactgacgatccccgattgatggcccacctgaatgactgtgtccttaatccgggacctccgatggtggcccgtcttacctatcgctttcagcccaaaaccgggttaaatcgagctcctgagtcgttaaaagattatgagtatgtgatcttcggtggcgctgatcctgacatgcatattggtggtgcgtttcgccgtatgttacccatcgatgttcaaggcgcgttgcgtgatgccgagaaggatctttcaagctggcgtaattcacccttaagaccacttattgaagaactatccgcatctctggacgacgagactcgtgaggagattcaaacccaggttgatgaggctcagcaggaactggctaatcatgatgaggtggcagcaacagccgaacgaattagcgaacggttggttgctatcgcaggtgagcaacatgccgttccgctatcgttaggacttgcaccgactcgcgttgatgcgctactacgtagcctgcgcttgctgcttgacagtggcattcgtggcattggcgatgccagtctggggacggctaatctgatttttctggccctgaaaagcctcgaacttgatcgtcttgtcgatgatggagaacgagaccatacgtttttcgtagttgaggagccggaagcgcacctgcatccgcacgtacagcgtctggtgtaccgttatttcctgggtactgatggggggaatgatgatgaagggacgccgctgacaacgatcctgaccacccactccccacatattgccagcgtcacgcctgtcagatctatcgttctgctgcgttatgactcagaggacgagaaaacaattgctgtttcaactgcgaacgcaccgttttcgcggcgggacgaagatgatttgcagcgctatattgacgtcacccgtggtgaaatattcttttcacgtggtgtaatcctagtggaaggagatgccgaacgttatcttgtcccggcatttgccgatgctcttgatattcccctcgatatgcttgggatcacggtgtgctccatcggtggaacaaatttcactccgtatgtgaagctattggggccacacgggctcaatattccgcatgtgattctgacagatcgcgatcctatagcgggtagagagcctctggttcgtagaagacttatcaatattttaggcgtacttgagggagatgttgaccatgatgatatggataccgatgaggtgattgcacgtgctggggagtatggatgcttcgtcaatgagatcacactggagcctgagctgtttaccggtggattggccgaagccatgcagtcggtaattgagcgggaattgtcgctggcgcaagttaccctagatcggatacaggcatgggtggatgacacggaccagcttgatatcgtccggttgttgaaactgattgagcgaattggcaaagggcggttcgcccaggcgctggcaccttcggtgtcggaggataattgcccggattacattcgtgaagcactggagtatatctgcgatgccgtcacgtag

SEQ ID NO: 36256 - DNA, 1116 bp, Escherichia coli
atgataaaaactttctcatctgaagtaattgataaatctgacactatgtttgattatttttctaacacattaaataagaatataaaaataatatcaaacttccctttggaatggactaatgtaaatggcttaccgttgatgataaggcataacgcaagtcgtatattcaacaccccaggttttataaaacaaaacatccttcttaataataacgaattttcaatgagtatagatagttttaaaaaaatattagtcatcagctcctttaaaactggggaccgtataagtaatgatataaaaaatgaattgcatcgggtattaaaagaatgcaacgaccctagaattaattctgtagtcaatgaaaaagtttctagtaaggggtcttacatcccgaactttgaaatggaagtgatatttaaagatgtcacaaataaaaatgagctagtggacgctttgaattcctttgaattcgctcttgtgatattcgatatgcacggtggacatgactgtgatgggcatggattccttgagttatctggtgaaattttgtacccttatgaattaatgagtttagcaaatatcccaccaatagtcgtattaagtgcttgtgatacaagcccagccgatagaaatcatttcaatgcagcaaatgcttttctatgtgcaggcgcaaaaacggtactggctagtacataccccatattaagcagagacgcggcaatctatataggacgattatataaacgcttaagatactatttacctgaaagaattttatccacaaaaaaaagtttaaggtggtcagagttcattacgggacttaatcgccgagtttattttgattatttcttaatgtacattttcagaaagtataagattaatgacaactccatattaatagaattacgaaatcacataaatattgcattagaaaatcaccctcacgattttttagatggggtttattatttctttgaaaatttaacagacctatctaaaaaccaaattagtgatgaacttaataaccacttcttgtttgctgaatgcctgaactatgtgcaaataggctctcctgaaaaaattttaatttctgcagaagatataggcatagaataa

SEQ ID NO: 36257 - DNA, 261 bp, Escherichia coli
atggatgcaaaacaaacgcggcagggcgtattactcgctcttgccgcttattttatttggggtattgcgccagcgtacttcaagctgatttactacgtgcccgccgatgagatcctgacgcatcgcgtgatctggtcgtttttctttatggtggtgctgatgagcatttgccgccagtggtcctatttaaaaacgctgattcagacgccacagaaaatttttatgctggcagtctctgccgtgctgattggtggcaactga

SEQ ID NO: 36258 - DNA, 597 bp, Escherichia coli
atgctggaagcgagccttggttactttattaacccgctggtgaacattgtgctggggatgattttcctcggcgagcgattccgccggatgcaatggctggcggtgattctggcgatatgtggcgtgttggttcagttgtggacttttggttcactgccgattatcgcgctggggctggcgtttagttttgccttctacggcctggtacgcaagaagattgctgttgaagcgcaaaccggcatgttaatcgaaactatgtggttgctgcccgtggcggcgatttacctgtttgctattgccgacagcgcaaccagccatatggggcaaaacccgatgtcgctgaatttactgctgatcgccgccggtattgtcactaccgtaccgctgttgtgttttactgcggctgcgacacgcctgcgtctctcaacgttaggcttttttcagtacattggcccgacgctgatgttcctgctggctgtgacgttttatggcgaaaaaccgggtgccgataagatggtgaccttcgcctttatttgggtggcgctggcaatttttgtgatggatgcgatttatacgcagcgtagaacgtccaaataa

SEQ ID NO: 36259 - DNA, 1125 bp, Escherichia coli
atgtttgtctgttcacgccacacagtatggcctgtattgtcaacatttttagcactttctctttccggatgtgataagccacagaagcaagtggtagtgccagtggtggaagttggtgttgtcacccttacagcgaaagatgtagtactgacaacggaattaccgggtcgtacagcgccttatctggttgctgaaatccgaccacaggtcggtggcattctccagaaacgccttttcgaagaaggtagtatggttaatgctgggcaagtattgtatcagattgatccgtctccctataaggctgagcttgcaaaagcggaagccagtctggaatcctcccgtttactggcccgccgttatgaggcgcttgtgaaaaccagcgctatcagccaacaggaccgagatgatgcacgttcatcctggttgcaggcgaaagcatctgttgattcagcgaaaatcaatctcggatacacaaaaattacagcgccgatctcagggcggataggacgttcttcagtgacacagggagcactgatgactgcgaatcagtctgatgcgctggcgaccattcagcaactggaccccatttatgttgatattccgcagtcatcaacttcattgctgcggatgcaggatgatttggccgcagggcgcattaagcaaaagggagaacaacaggctgaagtgaggctaattcttgataacggctcggaatatcctatatcgggaaaactaaaatttgcagaagttactgttgatgaagggacaaacgccgtcatcattcgtgctgtttttccaaatccagagaatcgactgctacctggtatgtttgtacgcgcaaaactgcaggaaggcgtacgagaagacgcagtgctggtcccacagcgtggtattacacgagacggtacagggcaggcgacggctctggttgtaaataaagataataaagttgaactaaagaatgtggtaacggaaagggttatcggtaatgagtggctcataagtgacggcctcagggcaggagacagagtcattgtcgatggtgttcagaaggtacagccgggcagtgaagttaaagttgttgcagcggatactgatgcaacagcctcctctcagtcgcaataa

SEQ ID NO: 36260 - DNA, 633 bp, Escherichia coli
atgaatgactctcaggcagagggaattcggggaaaaagtcaggaaaggaggaagcaggtacttgacgcagctgcagaatgtttcagccaggaaggatttcatggctgtagcatcgcccaaatatcaaaagctgccggtatgagcccagggcatatctactatcattttgagaacaaagaggccatcgttgaagcgctggtcagacaacaggaaaactcactgcttgatatgattaacgatatcaaaaattctccagcagaggaggaattggtcgaaatacttgtccggcacacggcagaaaatgttgaacgacacacctctgacaaattcattgggctctggcttgaaattgccgcagagtcagcacgtaaccccgatgttgcttcgttgctgattcaatcaagaaatgttatcgttgaacagtttactgaacagctacgcctaagatgcaatgtgaaaaatgaaaaagaaatgatacgtctgagagtatgcatggaggttatgtcagctatttttatggggctttctgtaaacactcctcaatactctgacgaaaccaggattgacaaaaaacaactgattgccgttattaatgatattaccagacatcttttcgggcacaaagagacttaa

SEQ ID NO: 36261 - DNA, 249 bp, Escherichia coli
atgttctccaattctactttgatacagcgctatcgccgtcctttcgggcactcgctttgcttaaaagaactggttggtccaagccatatgcgtttcggaagtgattatcccttcgcgccagaagttgcagttgatttagagatgaaatcgttagctgagcttactctacttaataacgagcagaaaatcgcggatagaaagagcgaaagcccttgcattatttccctgcttgcttttcatcattggtaa

SEQ ID NO: 36262 - DNA, 480 bp, Escherichia coli
atgctcacgatcgtaagtaaacggttctggctccccggcatcgatgataatggcaccgtataccccctcctgttcctgcagaccggaatggctgtggtaccagtaagtcccgttctgcttaaccttaaaggtgtaaacgtaggtatcatcaggctctatgcccataaaactcagccccggaacaccatccatattggccggaagaataatgccgtgccagtgaatggacgtctgttcattaagacggtttttgaccttcagggtaatggtgtcaccttctttccagcgaagaacgggccccggcaggcctccattgattgttttggcctgacgctcactgcccgtgatattgacggccgtttcaccaatggtcaggtcaaactgagtaccctgcagggatgcggcaactggcaggctcagactggaacgcgcattgaaactccatacgccaagacttccggctacgccagagagggttaa

SEQ ID NO: 36263 - DNA, 468 bp, Escherichia coli
atgactaacatcggtcacttccgtgctgcgggtaaactgctggatgcgcataaaggccagttgccgacccgcctgtgggcggcaccgccaacccgtatggacgccgcacagttgactgaagaaggctactacagcgtcttcggtaagagcggggctcgtatcgagatcccgggctgttccctgtgtatgggtaaccaggcgcgtgtggcagacggcgcgacggtggtttccacctcgacccgtaacttcccgaaccgtctggggactggcgcgaatgtcttcctggcttctgcggaactggctgctgttgcggcgctgattggcaaactaccgacgccggaagagtaccagacctacgtggcgcaggtggataaaactgccgttgatacttaccgttatctgaacttcaaccagctttctcagtataccgagaaagcggatagggtgatttttcctagtgtggtttaa

SEQ ID NO: 36264 - DNA, 2091 bp, Escherichia coli
atggagaacgccgacgccaacgatatgatcgaaatgcagatgtataccgctaaggatgatggcgaacgtctggcaatgatgcaggttcaaatggataaggcgaaagccgcgcaacgcgctcgccagaaagaacaggctactatcgaccttcagaactacatcaaggcgcagcacgcagctggcgaggatgtggaggtacttaccgctgaattggagcgaagcaaagcggaacttgaaaagaccaccgccgacgtcgccaaattcaaacaggcggtaatggccaaagcagctgataacgcagactggaaagcccgctggggtagcgtccatcacacagaccgtatgttgttagcacagtatcgcgcgtcgttgaaaagcgccattcagcgcaaggctaatatctctcaggccatctcccgctatgagaaattattgaaccgtactcagaaggccgcgacggatatcaaacgcctgcgcccgctggtggaggatgcaataaataaaggcattctggatattgatcctgacatggttaaccatgcgagtgagttccttgttatcggcgatcgctcatggcgtgtaggccaatactacgattgtgccggtgatatcgttcgcattaagtcgctggacttcgacagccagcgcgcagacgtggagatcatctttaccttcaaaggcaccaaatcgggtaactgggatgtgaagacgctggataaacaggtggatgtaactcccgatgaagatgctgttatgcagaaaatcagtggtggcgtctccatcgccgggattaacgacatcatttcctgtgacgatttctaccgtttccagcagcgcggcatgatcaaaatcactgactcatacggcgttcagactacagagtcaggctatagcattgattttgttggtacctatacggacccactgaagcatgcagtttacccggatcgccgtgacggcgcgctgaagtcgtcaattgcaaaatgggtgcttggtatgatgtcggaagggaataaccgccaggtccgtttggcagaagtattcctgactgaactgtttggctccaattatggcgatgtaatcgcgtcatacggagatacgctatcccctgaagcaattcaggagaaaatagcggatgcgatcgcaaaaatgccggagaaaacaagccagggggctactcgtaacggggattctgaacttgaggtcaccaatgccattttcggtacccatgaggtccgggcgtcagattatgagatcaccacagcacagtttggcaccattggcatttacagcaataaagccgagatcaagcaggcaatggacgcagcaagcgcgcgcatcgcagcagaacgggaagccaatctgaatcatgcagtcgccgcgctgactcaattgtgggtaacagcaatcagggaggccgccaccacagggaaaatcacacctgcaattgcggatgtcgtacacgacggctctaaatttatggatgcctatcaaatggatgcggtgaagttgccatcagcctatggtcaactcagctatcgcatgacctacaacctggtatcaatgttttccgaccttgccatccttgggctggtggatcttaacgaggttacgccggaattgctcagcatgcgcaagaatcatgtggagatattgcagagagttaacacggttcttgccggacgcaccgatgaagagaaacaggccgacgctgatcggataaaccaggcccttggcaacatcacggaggaagaaattgccgccagaaacgagaaacaagaagagttatcatcaatacagggtgatgccaccagcatagctcagtctcttggtctgaattatcgcgtatccaccgccgacctgaagatgatgtacgcaccaaaattcgccgctggcgaggtatttgggcttcaggaagcctcaggcatgaaaggcgttcttttccgtgcgaaagacgcaatcaaggcgaaattcggcgctcgctggctgccagcgaaggcgaagaacagcgatttcccgggtaactggtggattatcgagacaaaacacaacgtggcggacgttctggccgtcatccaacaatacgcataa

SEQ ID NO: 36265 - DNA, 216 bp, Escherichia coli
ttgagtaacttacgcgaataccagaatcgtattgcagatatcgcaaaacgctctaaagctgtgcttggctgggcaagcactgcgcagttcggtactgataaccaattcattaaagatgatgccgcgcgtgccgcatctatccttgaagctgcacgtaaagacccaatttttgcgggtatctctgataatgccaccgctcaaatcgctacagcgtag

SEQ ID NO: 36266 - DNA, 180 bp, Escherichia coli
gtggcgcacgtattcggtgaacgcacgttggccacgctggagcgtcttccgggcctgctgtcggtctttgaggtcgtggtatggatgacggatgactggccgctttatgaatcacgcctgaagggagaactgcatgacaaagtcattggacattatctgaacataaaacactatcagtaa

SEQ ID NO: 36267 - DNA, 375 bp, Escherichia coli
atgaagaacgcaactcgccttctggtgatttcgctcgccctcatgttgagcggctgtgcatattccccgaagcaggttgaagcatcccgaccgcttgtgaatcagactgcttctatcgacctccaggctatggcagccaatctgcaacaacctctgaacaccctgccgcagggcgccgcgctcagcgccaatggcaatacctatattctgggccagcgttatgtctccgccctggggctggaatgcatagaactgctgcgtaatcgcaactacaaccagtcgcagcacggtgtgacctgtaagaacggtgacacctggtatctggtaccgcagctggaacaggcttccgccagtaacctgtttgccgtgcaataa

SEQ ID NO: 36268 - DNA, 1764 bp, Escherichia coli
gtgaagataacgaattttcggcaattgagtgccgtcctgttgctggcctgcgtctcctgcgcctctttcgccgcccccacccagcaagaagcccaggcatttgggatgaacaccccggcagacaacggcgatggccgactgcagcttggcggcgagcaagcgatgagcggccaggcaaacacctcctccaccaccgggactttcgcacagcaaaaccgccagggcatgttattgccgggcgagtctgatgtgcgtaaattactgccgcagtccgagtccggcctcccccctccatacggtgccaacctgtttgccggtggttatgaaaccgagcgcagcgacggcttaaacgataattacctgatcgcccccggcgataagctgaatatctggatctggggcgcggtcaatttttccaacgtcgtgaccgtcgataatcagggcaatatttttattcccgatgtcgggccgattaatgtcaagaatgtggcggccagtaaggttaataacctggttaccagccatatcagcgaagttttcaccaataacgttaatgtttacgttaatttacttaccgcgacgccggtcagtgtatatgtcaccggacccgtcattcgtccgggacaatatgccggacaatcctccgacagcgttttatatttcctgaaacgcgctggcggcatcgactccgaccgcggaagctatcgtcatattaaagtattgcgccagaaccgcgtgatccagcagatcgacctgtatgagtttatgcagcagggcaaaatgccgaagctgtccctcaaagatcaggatgtgattctggttgaaccccaggggccgatgatcaacgtggcgggtaaagtgcgtaacccgttccgcttcgagctgaagaacagcaccgcgctcggctcagagctgatcgactacgccctgcccctcgccaaggtgagccacgtgggcgtgattggcgatcgcgccagtggcccgttctcggtctatatgccctataaagatttcgaccgcattcagctgagcgacggcgataaagtgctgttcaacgacgacatgcatgcgcaggtgtacgatgtgcaggtgatgggcagctatcgcgggccatcctacttcaccgtgcgtaaagagacccgtctgcacgatctgctgaaccacatcccgattgacccgaacatggcggattacggctcgatctacatcatgcgtaagagcgtggccgcgcggcagaaagagatgctggaagactccctcaaccgtctggagcgcagcgtctttaccgcgcctgccagctctgacggcgaggcctccattcgcaccaaagaggccgaactggtgatgcgctttgtggaaaaagcccgcaagatccagccgctgggtaaagtggtggtgtcggataaaggcgtgatcgccaacatcctgctggaacagggcgaccagattgtgatcccgaacaaaaccgacctgattcaggtgggtggcgaagtgatgatgccgcaggcggtggtctacaacaaaaacgccagtctggaagactacgtagcctgggcgggcggctataccgaccgtgcgaacgacaagcgcattgccgtggtgcatgccaacgggctgatggagtttaaagacggtggcgatgtgatgccgggcgatcagattctggtcatgccgaaagtggacagcaaaatgatgcagtccatcaaggatatcacccaggtcatctatcaggttgctgtggcggccaacgtggtcctgaactaa

SEQ ID NO: 36269 - DNA, 849 bp, Escherichia coli
atgcgggctcgccccatcgcgggcccgttctgtgatatcggccttcttatgcttaaacctgttctcaaccagacgccccgcagctcgttccaggtgctgagggatgtgacgtttggcctgcttattcgtgaactgaaaacaagatttggcagttatcggctggggtatgcctgggcgctgctggatccgctgttgatgattggtgcttttagtttgatttttggcatgcgcgggcatagcggatttggtggagctccggcaccactgtttattactgcaagttatctgcctttcctctttttcaggaatgtggtcagcaaactgcaatctgccgttaatgcgaacaagggcttgttttgctacagacaagttacccccttcgcgacctttgtttcccgttttatcctcgaaacagttattggcatggttgtgggctgcgtactggtactaggattgctgtggtttggttttgatgccatccccagcgaccctttagaggtcgttcttatctatttcatgttaatgatcttttcgttttcgctgggcattattttttgtgtactgggtaatttatttaaagaagctgataagttccttagcctgctgatgatgcccttgatgtttatctcctgcgtgatgtaccccctcgcgaccataccctcaaattatcaacactggtttttgtggaacccgttggttcatgccgttgagctaatccgaagcagctggatctccggctatgccagcccgaatgtaagcgggatgtattttttggctgtaacgttggtactgctgacgttcgcgatgagctgttaccgcctgagtcatcgtcgcttgattgccagctaa

SEQ ID NO: 36270 - DNA, 651 bp, Escherichia coli
atgatcattctggaaaacgtctcgaagtattaccccaccaaatttggtcgcaactacgttctgcgtgacgtgagcatcacgttaccccgcgaccgcaatatcggtatcttaggcgtcaacggagcaggaaaatctactctgttgcgtctgctgggcgggatggatatgcccagtaagggaaaactgacacgtcactgtcgtatatcttggcctctggcgctaaacggaggttttcagggcagcatgaccgggcgtgaaaatacacgttttgtctgccggattcatggcgttcgcgatacgctggctatcgaagagtgggtaaaagagttctcggaaattggtcaacattttgaactgccgattaaaggctactccagtggaatgagatcaaaattttcctttgctgtcagtatggcctttgactttgatatctacctgaccgacgaaattatgtcagtgggcgacgcccgctttaaacaaaaatgtattgatgtttttaaccaaaaacgcgagaccgccagtttgatcatggtctcgcacgatatgaaaaacttacgccaacaatgcgatatgggtattttgctgcgcaacagcacccttgagttgttcgacgatatcgaagatgccatccgtatttatcagaaactataa

SEQ ID NO: 36271 - DNA, 1203 bp, Escherichia coli
atgattcagccaacccgctctaacaaatcctccgctttgatgcgcaagctaaataaattaaagaccaaacccaaacatttcattgttgactccagcggtttcaagcttgcccaccgctcatggaaaaagagccttaaactcggcagttttttatgggtagtagtatgttttgctattgctgcgctttatttctgcgtcattgtttcggatcgctatgtcagccgggcagagctggtagttaagcaggccgaccagatcaaaatgttgcccgatgctctgtcgatgctgggaattggtggcagtaatcatgaagacatactgatcattcaggattaccttaaatcccccgatctactcgacaaactggataaagagctgggtttgaaagcccattatcaaagttctaaagtcgattacttttcccgcctacctgataatgtcagtcgggaagagtttattaaatattatcgtcagcacctgtcattacatctggatgagttatctggcgtgctgacgattgagctacaggcatttgatcctgcctatgggcagcgcgttgttgcattgatgctccaggaatctgaccgatttattaataaactggggcatcaggtagcgttggaacagctggccttcgtcgagaaagaagtcgatcgcgcctatcagcgtgtgcagactgagaaagctaaagtcctcgatttccagaatagccatcaccttatcagcccggagtcgaccagcagtgcacgtcttggtgtagtaagtcagattgaagctcaactggcacaacaacaggcccagttaaaacagctgcaaagctatatgaaagaaaccgccccagctgttgtttccgtgcaggccagggttgatgccttaacgcagcaactggctcaggagcaatccagacttaccggtgctgataaagatgcgatgaacgaagtgacggctcgctatatggatgtgcaaacccaagcgaccctggcggcagatctgtataaaaccggactgattagcctggaacaagctcgcgtggaggcgtaccgcaaacttaagcacctgctggttatcagccagccaacgctggcagaagacgcagagtatccacgtcgtctctacaaccttctgaccacaggggttctactctgcttgctatatggtctgattgtgatgggtattgcgactctgcgtgagcatcaggactga

SEQ ID NO: 36272 - DNA, 1140 bp, Escherichia coli
atgagtaaccagcacccatttatgcatttcgatgccatcccagattatcgccaacaaggtaaagtcgagcacaagttaactgatatcattttgttaacaatttgcgcggtgctttccggtcaagatgactggaaagctatccatctttacggcactagatggttagattttctcaaacgctttggtgattttagtcatggtgttccctctgccattaccattgcaagagtgatgggaatgattagcgcgacacgcttacaaaagtgttttatcgaatggatgaaatcctgctgtgaactgacggacggtgaagtgatcgccatagacggtaaaaccgtgcgtggctcttatgatgattcccgtgggcttggtgctatccatatggttaatgcgtttgcgacagagaatggcgtgtgccttggacaacataaagtttacgagaagtccaatgagataaccgctatccctgagttgcttcaactgcttgatatatcgggttgtttagtcacaattgatgcgatgggatgccaaaagaaaatcgcgcaaaagatccttgaaaaaaacgctgattacttgctggccgtgaaaggaaatcaaggccgacttgagcaagcttttgataactattttgatatgagcatgctgcaaaaacatgatggtgattcttacagtacccaagaaaaatcgcgaggcaggcaggaaacacgactggctttagtgaatgaagatttaagtgttttgggcgatcttgagtttgattggccagggctaaaaacgatgggaattgtggtatcgattagacaagaatcagcagtggcccaagagtcagaagtaacggtgcgatattatattagttcgaaagcgctcagtgctaaagaattgttaaatgcttcacgctcgcactggttagtcgagtcgatgcattggatgttggatactgcatttggtgaagatgcttgccgtaaacgagcggaagaacgagcagagaatttcgcaaggatcagacagatgtgtttaaacatgctaaaaagtgaaacgacactaaaagcgagtattaaacacaaaagagcgatgtgcgcgatggatccggagtaccttttgaaggttctgggaagcctttatttacgggaatgttcatga

SEQ ID NO: 36273 - DNA, 339 bp, Escherichia coli
gtgaatgccggtgagtctgccaccatatttgatgttgttgagaagcctgagcaagatgaggcaccatccaatcttgccattgttggtcgttacgtgttgacaccggagatatggccacacctgcgaaccacgcaacccggagctggtgatgaaatccagttgaccgacgcgatttcagaattgttgaaaaccggtgaggtcgatgcattttgcatgcaaggaaaatcccatgattgcggtgacaaactgggatatatgaaagcgtttgttgagtatggccttcgccataaagattatcagcatagctttaaagcatttatcgggtcactggcgttgtaa

SEQ ID NO: 36274 - DNA, 483 bp, Escherichia coli
atgctacagcatgaaagaaaaaataatttcgaatatgattatgttattagggcaagaccagattgtgcaattaaagaaaagttgacacacacctttttggatagtttacaattcaatgagttagcaacggatatggttttagattgtggcccactagatcagttttatatttctagaagggatgtgcatattaaagtagccaatttatggaaagcatcaatatcatcaggtagtctatcaccattcaaagacttccccaaatatgatgctcatgctctattgtttttatggatagccgtaaataatataattcctgtatcacccccagtgacaagacatcttgctttagcaacatcaaatttgactcctcctaaagagttgtacaatgcgttagagcatgatcttcataatgatgcgaaagatcttatcgagaatgcagctgtcagagattttataagtcatattattggatcgaaaaaatga

SEQ ID NO: 36275 - DNA, 396 bp, Escherichia coli
atgaagaatattattatcgatttagatggtactttgactattgacgcggatacatcttatgaaaataagcccgtaaatattgatgttgtacaaaagcttagagaatataagtccctaggtttcaatattaccatcttgactagccgaaacatgcgaacctatgaagggaatatcggaaaaataaatgtccatacattgcccatcattattgaatggcttaatagacataacgttccttatgatgacattgtgttggcaaagccatggtgcggatttgatggtttctatgttgatgacaaatctattcgtccatcggagttttcatctttgacttacgaacaaataaaagacctgcttgcaaaagaaaatcctttcagagatggtggtaataaatga

SEQ ID NO: 36276 - DNA, 1611 bp, Escherichia coli
atgatactcatcacatctgctgcttacgtagaccaagaatttgttagcgaaattggattaattcctcctagttttctacctgttcaaaatcgtcgcctatatgaactccaggtagaaatgctgcgtgaacaagatctaaatgatgatattcatctttccattcctgaaagctttaatatcaatgtttatgatgagaagaaaataaaagaccttggtgttaatatcattagagttcctgacggattatctttaggtgaatctgttctccactgctggaactcttctgcaagctatcatagcgacttcagaatattacatggagatactctttttattgatcttaagttgactggtaaaaatgaagtcagcattcataaaaataaggggctctacaagagagcgtccattgaacctccattgcgtggggggcatagcgtagatgaaattagttggattcagaatgagaatagagttatttctgggtatttctcatttgataatccgctgctatttataagctcgttaatatcctgcaagtcagactttattggcgctattaactcttaccatcttgaaaatccattgactttcaattcatcagggcaatggcttgacttgggacatattaatagttttttccattcaagaacttttttaactactcaacgggcatttaatgatttaaaaatttcaagacgaactgttttgaagaaatctagctcaaagggtaagaagatttatgcagaaggtcattggtttaattctataccgtctgacattagattgcataccccacaactgctctcacttattaaaggaggcgatgattattccggttcagaatatagtcttgaatatctttatcttcttccattaagcgacctatttgtttttggtgcgttaccattatcaagctggaaggagatccttttatctcttaaggatgttttaagtagcctgcatcaatacagttcagattcatgcaacctgacatctcttgatgaattgtatttgtgtaagactttggagcgtttaaatgagcactcctatacaacaggtattgcattctcggagaaaaaatttgctttttctgaaagtcatgatgaattaactctttttgagctggcaaaaaaaagtgctgaatttataaataaagctagtcgtgatgatgtcacgatagttcacggagatttttgtttcagtaatctattatttgatagtagagttagtgccataaaatgtatagatcctcgaggtattaatgctcatggagagctaaccatatatggtgaccgacgttatgacctagcaaagctatatcactcaattgttggtaattatgaccttataattagtggcaactatgaacttatgaatagtggtaaagctggggatataaagttttatcttgatgatgagtatcaatgcaatcttgaaaaagaatttaaaagcattgttcttgctggcttgaaatatgacgaagatgaaattatcgcgataactatacatttattcctctctatgcttccattgcatgctgacagacctgaccgccaagcggcatttattagtaatgcatttcgactttataaaaaacttataaaagagtaa

SEQ ID NO: 36277 - DNA, 744 bp, Escherichia coli
atgattgttatcccaatggcaggtctttcttcccgatttaaaaaggctggctatgtaaagccaaaatatatgctggaggctcacggcaagactctcttcagtcattcactttatagttttaagcgctattttgaatcagagaagtttctttttattgctcttgatgtgtttgaaactcggggttttattgatgcagagtgtattaagcttggtatcaaagactatgatgtggctattttaggttcaccgactcaagggcaagcacaaacagtttatatggggcttaaaaatgcgagtgtcttacccaacactccacttacaatattcaatattgacacatttcgccctgggttttcgtttccagaacactttgatgtcaataatattgatggttacctagagacttttgttggtgaagggaaaaactggagcaatatccttccaaaggaagaagatacttatacagtagcactaacggcagaaaaaaaagaaatatctaaatactgctgtacagggttatactactggcgttatgcaagagactttattagagtttttgagtcttatcaaaagacatcgctgagtgatgtggacgctggtgagtattatattgcaccgatgtataatcatctgatcgcagagggcgcagatgtaaggtatagtgtagttccatacagcgatgttattttttgtggcattccatcagaatatgaagcatttttaaatttgaatcttgtttcatag

SEQ ID NO: 36278 - DNA, 2004 bp, Escherichia coli
atgaccctatggacttcatcatctggaatttttgcacgcaaattgcaaattagtgcatgtctagataaaaaattaaatctgtatacgtcaactgatactccattatcaggggatgtatttgtaggttgggggcaaaaagccaatgccaagcagattaagcagaaagcgcaagcgttaggattgccctattggcagcttgaagatggctttatcggttatatcggccatcccgccagggggggcaaggcggtctcgctgatcgccgatccggtggggatctattacgatgcccgccagcctagccagcttgagcagttgattgccacctcgtgcgagccacagatgttggctcgagccgaacgactgattggtgagctggtacgcctcggcatcaccaagtacaactgctataccgcagatagcggcctgccggatacgctgacggcccgcctgcatagcgacccgcgccctaaagtgctgctgattgaccaagtggcaggggatctctccattcctggtgcgctggcaagcgaagaggattttgtcgcaatggtggcggcggcccgccgtaatcaccccgatgcccgcctgctgctgcgtactcacccggatacccggctgggtaaaaaaagcggcgtgctggcgcggctggcgctggacgacgtggaggtagtggccgaacactgccatccccacgccctgctgaatagcgtagaggcggtttataccgtctcctcccagatgggctttgaagcgctgctgctcgggaaagcggtccactgcttcggcatgccgttttacgcgggctgggggctgacccacgacagcaaaacctgcccgcgccgtcaggggccgatcgccctgccccagctggtggctgcggcgctgatcctctacccgcgctatctggacccgatcctgggccagcgctgcgaagtggaacaggtgctcgacattattgccggtcagcagagcccagccccgcgctatcgccgcctctatatggtgggcttctcgctgtggaagcgcgcctttatgcgcgccttctgccagccgctggccgaagagctgcgctttgtgcgcaagctgcctgaaacgctggccgacgacgaacaggtgctggtgtggggcagccgccatcctgaacgccagaacgccatccgggtggaagatggttttatccgctcccgggggctgggctcaaacctgtgccgcccttcgtcgctctgcatcgacccggtggggatctacttcgacagccgccgtccaagcgggctggagcagttgctaaatcagcatgagcttaccgaccaggagctggctcgcggcgagacgctggtggatctgctccgccagcatggggtgagcaaatataacgttggcaccatcaaaccgttcaccccacctgctgatggccgttcgctggtgctggtggtgggccaggtggatggcgatgcctcgatcctcaccggcagtccggttatccgcagcaacgaagcgctgctatgggcggtacgtgacgccagaccggaggcgcacatcctctttaaaccgcacccggacgtggtggcgggcaaccgggccggggctatctctgccgaatgtctggcccactgcgttgacagccaggtgctggatctcggcctgaccagtctctatccccatgtggatgagctgcacaccatgacgtcgctgagcggctttgaagcgctggtgcagggggtgaacgtcaccacctggggccagccgttctacagcggctggggactgaccgaagacagacatcctgccccgcgtcgtcagcgccctctgccactggcggcgctggtctatctgaccctggtggcctatccgcgctatatcgactggcagagcgggctgtggatgagcccggagcagttgatacgccagttggccgcgcagggtcactcctcatcgcaaaaagccagccgctggcagcgctggcagttaaaactgagctatctcgcgcagacgcttcgctag

SEQ ID NO: 36279 - DNA, 1248 bp, Escherichia coli
atggaagagcaagccatacgccatttattaaatggccgccgatatcttttattacaaggaccgatgggcccctgctttgcacgtctggcgacctggctgcagcacagccaccgcgaagtgaagcaggtctgctttaatgccggagacgcctggtatgccgcaaaagagacgtcgctgcactacaccggcccggtgaaaaattttgccttctggctgcacgatctgcacaaagagtacgccttcgacaccatcgtctgtttcggggattgccgcccgatgcatgtcgaagcgaagaagtgggcgcgcggtaaagccatcgactttctcgtctttgaggaggggtatttccggccattttatatcaccctggaaaaaggcggcgtgaacgccttctcctcgatgcccatcgatgcgaaatactatcgcgagcagccgctgccggagctgaaaaccccgacgccatggaagcccagcgcctttaaccgtgccgcccacgccatgctctactacgcggcaggctggtttggtcgccatcgctatcgcggctaccgccaccacaagtcattctccccgtggtatgagatgcgctgctgggtccgtgccggccgtcgtaagctgtggtatcgctggaagcagcgccacatgttgagccatatcaccgaaacgctggacaacgcgtactacctggcgattttgcaggtctacaacgacagccagattattcaccacagcccgtataaagatgtgcgtgactatatcgaaaccgtgatccgctcctttgcccgccatgcgccgaaagaacaccatctggtgttcaagcatcacccgatggatcgtggtcaccgctattatggtgtgctgattaatacgctgtgcgagaagtacggcattacgacagaccgggtgatctatatccacgatctctccctgcccgccctgctgacccatacccggggggtgatcaccgttaacagcactgcggggctgtcggcgctgatccacaacaagccgctcaaggtgatgggcaaagcgctgtatgacatcgaaggcttaacctggcaggggccgttgaaccagttctggcaaacggatttcgcgcctgacaaacagctgttccaccgttttcgtacccacctgctctacaacacgcagatcaacgcggtgttttacggtaagtccgactggcttaacgtcccgaccgaactccccctgccggattctattatcgattccgaactcgaacgctaa

SEQ ID NO: 36280 - DNA, 537 bp, Escherichia coli
atgacaattccgaccaggagtcgctcggctgaaaggttggtagatattctgctggagcttcatttacacggcgtggttaaccgccaggcattgatgcataaatttaatattactgagcgcaccgtctatcgcgatctgaatgcactctcgccgattgtggagtacaccggaaacgggctgtaccggcttattcataccccgcagggacacaccggcccggggctgcatcacgtcattgctaacttcctgaatgtggatgactattttcctgataaaggccgtgaattctggcagaaactggagtcacgggtggaggaaaaccatattatgatcctcggtaacgaggccgagcgaaaagaaaaatgggatattcacgcgcagcttgcggcctttgagaaggcgattaaggaccagcaggtttgccagatcctctataaaggaaaatcgcggcaggttaacccttatagaggtcagtttggatatcgaaaattattgtactataagggcttccccggcatgtcaacgccggttttatag

SEQ ID NO: 36281 - DNA, 240 bp, Escherichia coli
atgctcgataaacgcagcgccctgtacaaagccaagcgcaagatcgagaaggccaaggcgcaagtgcgagcgaaggtagagcccccgtttcgcgtgatcaagcggcagttcggctacaccaaggtacgtttccgagggctggtgaagaacactgcacaactggtgacgctgtttgccctgtcgaacctatggatggcccgccgacatttgctggcaagcgcaggagaggtgcgcctgtaa

SEQ ID NO: 36282 - DNA, 612 bp, Escherichia coli
gtgcgtctgccgaaaaccgataccgctcaggatgttctggatatcgaaaaagagatcctgcgtatcgaaaaagcctgtggtcgtgaacccggcagcaccggtctgctggcggcgattgaatctccgctggggattacccgcgcagtggaaatcgctcacgcttccgagcgtttgatcggtatcgccctcggtgcagaagactatgtgcgcaacctgcgtacagaacgctccccggaaggaattgaactgctgttcgctcgctgctccattttgcaggccgcgcgctctgcgggtattcaggcgttcgataccgtctattccgacgctaacaacgaagccggattcctgcaagaagccgcccacatcaaacagctgggctttgacggcaaatcgctgatcaacccgcgtcagattgatctgctgcacaacctctacgcaccgacccagaaagaagtggatcacgcccgccgcgtcgtagaagccgctgaagccgccgctcgcgaaggcctcggcgtggtttccctgaacggcaagatggtggacggtccggttatcgatcgcgcccgtctggtgctctcccgtgcagaactttccggcattcgcgaagaataa

SEQ ID NO: 36283 - DNA, 276 bp, Escherichia coli
gtgaaaggcgatctggcacagaaaataagcggcgcgctgggtatcagcgtacagggcgatattgttttacagagcgacagcaaaatcagtctgcgggtgggcggttcatttgtggtgatccattccggcggcgtggatattaagggcgcgaaaatcaatcttaacggcggaggcagtccgggagacgtgatcctgccgatgcgcccggtgatcctgaaagccgcagccggaagcgggacaatgtttgtggcgcactgcccgaaggaggataagtga

SEQ ID NO: 36284 - DNA, 885 bp, Escherichia coli
atgccattcagcaattcttccctctccgcgcaagtgaaatcatatctgacgtttcttcctgaagaaattcgccagaaaatccttgaacatctccacggtgttattcattacgagcccgtgattggcattatgggtaaatccggcaccggcaaaagcagtctgtgtaatgccatttttcagtcccgtatctgcgccacgcatcccctgaacggctgcacccgccaggctcatcgcctcaccctacagattggtgaacgcagaatgacgctggtcgatctgcccggcattggtgagacaccgcagcatgatcaggaataccgggagctttaccgtcagttactgccggaactggatctgattatctggatcctgcgggctgatgaacgtgcgtatgctgccgatattgccatgcatcagtttttactgaatgaaggtgcagatccctcgcgttttctgtttgttctcagccatgccgatcgcgtgtttcctgctgaagaatggaatgccacagaaaaatgcccatcccgtcaccaggaactctcactggcaactgttacagccagggtggcaaccctgttcccgtcatcatttccggtactccccgttgctgcgcctgtcggctggaatcttccggcgtttgtgtcgctgatgatccacgccctgccaccgcaggcaaccagtgcggtttattcacatatccggggggaaaaccgctctgaacaggcccagaaacacgcacaacagacttttggtgacgccatcgggaaaagttttgacgacgccgttgcccggttcacttttccggtctggatgttacagcttctgcgtaaagcccgggaccgcattatccgcctgctggaaacactgtgggatcgtctgttctga

SEQ ID NO: 36285 - DNA, 1065 bp, Escherichia coli
atgatccaggcccgaaatcagcttcttgctgaagcggcgaaaagtccagcgttaaacatggttcgtcctaacggcatgaacgatgagcctcagttccagattctgattgatgacgagaaagttcaggcgtttaaactgagcatgagcgacgtcgacaacataatgtcagcagcctggggttcgatgtatgtaaatgattttaacgatcgtggacgggtgaaaaaagtctatattcagggcgaacccggctcacgtatatcaccgcaggattttgataaatggtatgtccgtaacagtgatggcgacatggtttcctttgcctcttttgcaacaggcaaatggatttatggctcaccaaaactggagcaatataatggtatctctgctgtcgaaatcctgggggaaccggcaccaggatacagttccggggatgcaatgaaagcaattgaggatattgcggcaagacttcccgaaggtttccatatttcctggacaggtttgtcttttgaggaacgactttcaggttctcaggctcctgcactatatgcactttcactgttgatcgtctttctgtgtctggctgcactgtatgaaagctggagcattcctttctcggtcatgctggttgttccgcttggtgtcctgggggctgtctgtgctactttgttgcgcggccttggtaacgatgtctttttccaggtcggtttattaacaacaatagggctgtctgcgaaaaatgccatacttatcgtggagtttgctcgtgaattgcatgagaaagaaggactaagcattaaagaggctgctgttgaagcggcgagagtgaggttaagaccgataattatgacttcgctggcatttgtaatgggggttatcccactggctgtctcgactggagcaagttccggaagtaaacatgccatcggtactggtgtggttggagggatgatcactgctacgatactggcaatcttttatattcctctcttctatatgttaattgccgggttcttcagccgcagaaataagaaatcatcggataagactgaagctgagcaatcataa

SEQ ID NO: 36286 - DNA, 171 bp, Escherichia coli; identical to SEQ ID NO: 30820

SEQ ID NO: 36287 - DNA, 396 bp, Escherichia coli
atgttcgataactgcttcgtcataatttcccgtggccaccatcgcccgggcctgctgtatcagctcctgaatgtactgcagcaggatgtcgtaaccgatatagtccgtcagctggtaaatcatactgttggaaacaccgagcatctgcgggtcaaccaggtatttgaagacggggatggtggtactggaaataaagcctttttccttgtcatccagaggcgtgtcactgacagccttgttctgaatgctggccagaagtttagtaatctgagacttcagtgcattatcccggctgatggtcaccggtgtgtctgccaccactttcaggcatttgtcagaatcgttgcagtgataaatttttgctgtaccgccttccatcatggcccggataattga

SEQ ID NO: 36288 - DNA, 756 bp, Escherichia coli
atggcggaaatagcggttataaaccataaaaaacgtaaaaatagcccgcggattgtccagtcaaacgagctgactgaggcggcatatagtctctccagggatcaaaagcgtatgctgtatctgttcgttgaccagatcagaaaatccgacggctccctgcaggaacatgacggcatctgcgaaattcacgttgctaaatacgctgaaacattcgggctgacctccgctgaagccagtaaggatatacgacaggctttaaaaggttttgcgggtaaggaagtggttttctatcgccctgaagaggatgccggcgatgaaaaagggtatgaatcctttccctggtttattaaacgtgcgcacagcccatccagagggctttacagcgtacatatcaacccatatctgattcccttcttcatcgggttacagaaccggtttacgcagttccggctcagtgaaacaaaagagattaccaatccgtacgccatgcgtttatacgaatctctgtgccagtaccgtaaacctgatggctcaggtgtcgtgtccctgaaaatcgactggatcatggaacgctaccagctacctcaaagttaccagcgtatgccggactttcgccgccgtttcctgcaggcaagtgttgacgagatcaacagccggacaccaatgcgcctttcttacatcgagaaaaagaaaggccgccagacgacgcatatcgtattttccttccgtgatataacctccatgacgattgaatag

SEQ ID NO: 36289 - DNA, 216 bp, Escherichia coli
atggtacattgccagacatgcgccaagcaggccaaacatcatggtgataaagcgcccggacataaagcgagcggtacccgcgtagaactgctgcgtattcggatcggcaagttgggcaaagaaaatccgctgcgtaccttcaaccaactggccgttgacgatttcactgccgcccagcgccgtcgtccagaacggcaaataaaagatatggtgtaa

SEQ ID NO: 36290 - DNA, 372 bp, Escherichia coli
atgggcatgcatgatgatgtttttattgctgacaatgtttttcctgccgcccccgtatatcgggttgccagtctggtggttctgccttcagaaaacgaatcttttggtatggtgctggcagaagcatcggcattttctgtgcctgtagtggccactcagattggtggaatccctgaggttattcagaacaaccagaccgggacattgttaccagcaggtaataagcacgcatggatgtgcgccctgaatgatttttttaatgaccctgggcgtttttatcagatggctcgcctggcaaaacaggatatagaagagcggtttgatattaataaaactgcgttaaaaatactcacattagcgaagcaaaagtaa

SEQ ID NO: 36291 - DNA, 273 bp, Escherichia coli
atgctgaacttttttgtgacgatggtgaatattattggcgtaccagtgatgttgattggtacccctaaagcacgagagatttttgaggctgatttgcggtctgcacgtagaggggcagggtttggagctatattctgggatcctatacaacaaacgcaacgtggaaagcccaatcaagagtggatcgcttttacggataatctttggcaattacagcttttacaacgcaaagatgcgctgttatcggatgaggtccgtgatgtgtggtattag

SEQ ID NO: 36292 - DNA, 171 bp, Escherichia coli; identical to SEQ ID NO: 19272

SEQ ID NO: 36293 - DNA, 684 bp, Escherichia coli; identical to SEQ ID NO: 5757

SEQ ID NO: 36294 - DNA, 678 bp, Escherichia coli
atgagagaaaggccacttaacagtcaatctgtaaataaatacattcttaacgttcaaaatatctacaggaattctcctgttcctgtttgtgtccgtaacaaaaaaaggaaaatcctttatgccaatggggcctttattgaactcttttccaaagaagataaacccttctctggtgaaagttatgtacgtctgcaggttgaaatttttctttcatcacttgagcttgaatgccagtctcttgggcatggttccgcattttgtcgtcgttttaattttcatggagaaatctatcaaataaggatggaaaatgtttcattttataatgaagaatctgttgttctatggcaaattaatatatttcctgactatccattctttcgtgtggaaaaagaaaattattatcatcgtgatagctatgtacagtctgttatatcgaatatgacagcaaaatcattggttgttttttgtttctatgcattagggtataaacatataaatatagctaaagaattaaaaatcacagaagtggcttctaaaaaaaggattaaaaagattaatgcggatatcaataaaagattgggttccttcgatttgttcaggaataaatgtattaagacaggtgtaatgtacgaaatattaaatgttttgagtgaatatatgggtgttaaaaaaatgtaa

SEQ ID NO: 36295 - DNA, 339 bp, Escherichia coli; identical to SEQ ID NO: 13025

SEQ ID NO: 36296 - DNA, 462 bp, Escherichia coli
atgctcaatacactcactgaccagatacatttccaccgacgaaaaacgagctccccggttcaggatggcatcgagcaccacgggcaggttttcgtcatcttcatcgagccagcaggggtgatcgctttccttcacgaccaggcgaaagcggcgcgtctggcgggtcagcaacgtctgaccggtggtggtcagcgccgcacggatacgccgcgcatcttctgccacctggtaacagatgcttcgtaccgcatcgtgcaccgcatcaagaacagccctgatttcgtcttcggtcagccattctccggcatacgggaaagacacctgcgttccgtctgccggaagtaccggcagcgactgccactgactgccggacagtaccagttccgccccggttccggtcagtctctgaatggcggaggccaggagcggcggcagtacgccgccgtgacggttgataagtaa

SEQ ID NO: 36297 - DNA, 1152 bp, Escherichia coli
atgaaacgtgcatttattatggtgctggactcattcggcatcggcgctacagaagatgcagaacgctttggtgacgtcggggctgacaccctgggtcatatcgcagaagcttgtgccaaaggcgaagctgaccacggtcgtaaaggcccgctcaatctgccaaatctgacccgtcttgggctggcgaaagcacacgaaggttctaccggtttcattccggcgggaatggatggcaacgctgaagttatcggcgcgtacgcatgggcgcacgaaatgtcatccggtaaagacaccccgtctggtcactgggaaattgctggtgtgccggttctgtttgagtggggatacttctccgatcacgaaaacagcttcccgcaagagttgctggatcaactgggcgaagagcatatgaaaaccggcaagccgattttctatacctccgctgactccgtgttccagattgcctgccatgaagaaacctttggcctggataaactctacgagctgtgcgaaatcgcccgtgaagagctgaccaacggcggctacaacatcggtcgtgttatcgctcgtccgtttatcggcgacaaagccggtaacttccagcgtactggtaaccgtcacgacctggctgttgagccgccagcaccgaccgtgctgcagaaactggttgatgaaaaacacggccaggtggtttcggtcggtaaaattgcagacatctatgccaactgcggtatcaccaaaaaagtgaaagcgaccgggctggacgcgctgtttgacgccaccatcaaagagatgaaagaagcgggtgataacaccatcgtcttcaccaacttcgttgacttcgactcttcctggggccaccgccgcgacgtcgccggttatgctgcgggtctggaactgttcgaccgccgtctgccggagctgatgtctttgctgcgcgatgacgatattctgattctcactgctgaccacggttgtgacccgacctggaccggtactgaccacacgcgtgaacacattccggtactggtttacggcccgaaagtgaaaccaggttcgctgggtcatcgtgaaaccttcgcggatatcggccagactctggcaaaatattttggtacttctgatatggaatatggcaaagccatgttctga

SEQ ID NO: 36298 - DNA, 501 bp, Escherichia coli
gtgaactggcgtatttccggatatcgtaacgatgtcagtgacttgatcgattatgatgatcacaccctgaaatattacaacgaagggaaagcgcggattaagggtgtcgaggcgaccgccaattttgataccggaccactgacgcatactgtgagttatgattatgttgatgcgcgcaatgcgattactgacacgccgttgttacgccgtgctaaacagcaggtgaaataccagctcgactggcagttgtatgacttcgactgggggattacttatcagtacttaggttctcgttatgataaggattactcctcttatccgtatcaaacagtgaaaatgggcggggtgagcttgtgggatcttgctgttgcatatccggtcacctctcacctgacagttcgtggtaaaatagccaacctgttcgacaaagattacgagacagtctatggctaccaaactgcaggacgggaatacaccttgtctggcagctacaccttctga

SEQ ID NO: 36299 - DNA, 1050 bp, Escherichia coli
gtggaattgttgtctgaatatggtttgtttttggcgaaaatcgttaccgttgtgctagcgattgcggcgattgccgccattattgtcaatgttgctcaacgtaataaacgccagcgtggcgagttacgagtcaacaatctcagcgaacagtataaggagatgaaagaagaactggccgcggcgctgatggacactcatcagcaaaaacagtggcacaaagcgcagaagaaaaagcacaagcaagaagcgaaagccgcaaaagcgaaagctaaactgggcgaggtggtaactgacagtaaaccccgcgtctgggtgctggattttaaaggcagcatggacgcccatgaagtgaactctctacgtgaagagataacggcggtactcgcagcattcaaaccgcaggatcaggttgtgctccgtctggaaagcccaggtggcatggtgcatggttacgggttggcggcttcgcagttgcagcgtctgcgtgataaaaacattcctttaactgttacggtagacaaagtcgctgccagcggcggttacatgatggcctgtgtggcggacaaaattgtttccgcaccgtttgctattgtgggttccattggggtggtggcgcaaatgcccaactttaaccgcttcctgaaaagcaaagatattgatatcgaactgcacaccgccgggcagtataagcgcacgctgacgttgctgggtgaaaataccgaagaagggcgggagaaattccgcgaagagttgaacgaaacgcatcagttatttaaagattttgtgaagcgtatgcgtccgtctctggatattgaacaggtggcaacgggtgaacactggtacggacaacaggcagtagagaaaggcctggttgatgaaatcaacaccagtgatgaagttattcttagcctgatggaaggccgggaagtggtcaatgtacgctatatgcagcgtaaacgactcattgaccgattcaccggcagcgcggcagagagcgccgatcgattgttgttacgctggtggcagcgtgggcaaaagccgttgatgtaa

SEQ ID NO: 36300 - DNA, 450 bp, Escherichia coli
gtgtctgacgagagcgacgacaaaacagaagcccccacacctcaccgactagaaaaagcgcgggaagaggggcaaatcccgcgttcccgtgaactgacctcgctgctgattttgttagtgggcgtgtgtgttatctggtttggcggtgtgtcgctggcccgtcgattgtcgggcatgctctccgctgggctgcattttgatcacagtattatcaatgacccgaatttgatcctcgggcagattattctgctgatcagagaagccatgctggcgctgctaccgctgattagcggcgtggtgctggtggcgattatttctccggttatgctggggggctggtatttagcggcaaatccttgcagccgaagttttccaaactcaacccgctaccgggcattaaacggatgttctcggcacagactggcgcggagttgcttaaggcaattttga

SEQ ID NO: 36301 - DNA, 756 bp, Escherichia coli; identical to SEQ ID NO: 22471

SEQ ID NO: 36302 - DNA, 678 bp, Escherichia coli
atggcgttcggcgtttacccggatgtttcgctggcggatgcgcggaagaaaagggaagaggccagaaagctggtcgctgctggtatcgatcctcgtgagcataaacgtgctgtgaaagaagagcaggcgaaagagattattactttcgagaaggttgccagagagtggctcgtgacaaaccaaaaatggtcggaagatcatgctaatcgtggaaaaaagagcctggaggacaatatcttcccaacaattggtgctcgcaatattgctgaactgggcacccgcgatctgttaattcccattaaagccgtggagaaatctggacgttttgaagtggcttcccgccttcaacagcgcaccacggccatcatgcgttatgcagtgcaaagcgggttaattcattacaatccggcgcaggagatggcgggggcggttgcttccagtaatcgacagcatcgtccggcgctggagttaaagcgcatccctgagttacttgagaaaatagacagctataccggcaggccgctaacccgctgggcgacagaactcactctgcttatctttattcgatccagtgagctgcgttttgctcgctggtcagagagcgattttgatacgtcaatgtggaccatccctcttgatgggcattgcagtaagctgagggttggactggtattgtaa

SEQ ID NO: 36303 - DNA, 183 bp, Escherichia coli
atgagtatatttgccgattcgatattgcttgtatactcacgagataccaatggaaggaagaccattattgccctaacggatactaaagttcgttctgtgaagtcagaggagaaagagtattcacttgttgacggcgacggcatgtctttacttgtaaaacctggcggttcaaagtattggtga

SEQ ID NO: 36304 - DNA, 639 bp, Escherichia coli
atgagaaaactattactaccgttattatttatggctgggactgttaatgctgcatcaagcgtaaaggagatttgtaccgattatacgaaataccttgggcacgtttacggtttcactgtcagtcaggacggcaaaatgaaaaaagctctccagaatgatatgacgcgcttaagtttgtctgaagcaatggttcagcaagaaatgtataaggttgcgacagatgatgctgcaaaaatgtattattcgaaatttcttaatcctaatcttaatgaatataaccgttcggcttttaatcagatggtagcgtattgtgaaactgcaccagatatgatgattcctagttgggctgtattagtggctaatggaaaaattcgcaaagaagaccaaggaaaatctttaagtagctatataaatagcgaacaatttctgaatgcgcgtggcatgcgcactcaaaatactcaaggtgcgcttgagcggagggctttagggatcgctgatgcaaatgatactgataatttgccccctggaataaaaaaatgtgttgaaactaagttagctctgatgaagcgggacagccctaacattcctgtttcacaacttaccgctacggcaactagtctctgcaaagacgggctttaa

SEQ ID NO: 36305 - DNA, 654 bp, Escherichia coli
atggtatctgcttcgcttgcatatactatgaatacgaaagctactgtttttagcttgccatcagatattgttgattcattcaagaaaaatgaaatagcagccttagatgaatggagtcaaacttctagaattcggggtaagatcgaaagaataacattgtctaatgggcatcctgttattgagcttgtaagcccagggcaagcaaaatcgcctttgaactatataagattagaagatacgactgacaacagtcacatagtaaaagaactaacaaaagaacaagaaatttattcattatgttctggtgttaaatttagacaaattcctacttttcagtattgctcattctatcttaatcctattgaagcaaatctggaatatgttggtaactatttcattcctcaatataaatataatttaataaagacagtagccgagaatagaacgctacctattggcgcgttgacaacaagatttattgggtacattatgcttgttggcatttctaaagataaaaacgatatggaaaaaataaagtcgtgcactccatggaagaaagaatgcaaatcgtattatgagtcaataatagtaaatgcaacaaaatactatgccgacaatgcgaaaggcttggctgattatcttgaaaagctttaa

SEQ ID NO: 36306 - DNA, 3297 bp, Escherichia coli
atggaaagaaaaaacgccaacattgacgatgttataaggacagttgaaaccgccagcgcaaaagagctggaagagcttgcaggtatccgggaagctgttgaagatttgaaagggggacgcgttgcaactgttgatcctgtctctcgcagtgtgtcggcattaaatcgcacaatcgaaaattcccggccagactttgtggccaatgcgccatcagtggaccctattgttgaggcaatgaaacggcttaatttaggggacgtttctcgtgttgttcaggaggatgttgctctacaggaaccgcgggccaaatcaactacacgaaagggtaaaaaacgacgcaagaaggctataacagaagatgtaaaggcgcaacggaccgaagcagccgaacacgctcgcgaaatgttcggtcaaaaaggcggtgcgcaaaaaagccaaaaccaacgcgatgcgcgtggtcgttttattggaaagtcagggagtaaggccgcagcggaagatgtccgtgctgaacgtgctgaaaaggccaggcgcaaagaggatgatgagcgtctaaatgctgaatcaggtttattaaaaaaactgtcaaaagtagctgaaggcataggtaacccttcagagactcgtgccgtcgatgcgttaggttatgccgttgctggtccattgtgggcagcagggaaggagcttggcgggatatcaaaagaagttggtggatcgcttaatggtgccagaaagtctattgccgatgtgattcgtggcaatgacgataacagccgtagaaaaggtttttttaggcgtaaatcgcaaaatagtgccgatgtcgttcaggttaacacccaaaaacggacggttcaggaacttcaggagcagaccagcgaaattaaagagggcaatgacaagattctcagcgcccttgatcagatagccaaaaacaccgggaaaaagaagggcggcttgctgtccaaactatttagcctgttagggaagggggccggaggtattgcttcccttatttttggccgtggggcactaaagaaagttggctcgatggcactcggcgctttaggtattaaggggctggggaaactggggattaaggcgttcgcaaaaggcgctttacgcgcaattcccctagtcggcacagtggctggaggtatttatgatgcggtaaccggttggaatgatacagaagcgcaacgtcgagcgtttgggcttaaatcaggacaagagccatcattccagcaaaaagcagcctatacgctggctaatgttctcgatatgggggggctggtatctggtattagcagcgccattggtggtgttctcaaatcacttggatttgaggatatcggcaatatgttgcaatcattttcgacggaaagtattgcacaggccattgatagtgggattaccagtttagaaacgtatatttctaaacttggtgacactatatccacgacatttagtgattataccgcaaagattggtgatgctatatctgcatggttcagtgacacaacaaagaacctgaacgaaaaattagacgccatcaaaaacttctttactgtcgataacctgaaacaggttttcagtgatgcaattgatagtgcaattgatttcattaagaacccagggaaacacattaaagaggctggtagtaatttatggaataccgtaaaagaacatgcgggcgaggcaatgaataagacagcagatgctattattcagagtacccctcttggcttagctgcatcaacactagtcaataaagcgaatgcgaaagaggtcacacctgaattaaaaacacctgcaaaagaaagtcaggaggccaatactcctaagtctgaagatacccctaaaaaggctaatattgtcactcgtgttgtaaatgcatccctggatacggcgaaagatagcaataaaacagttaaacaaactgccaatcagattatcaatgcaaatgccgtagaaacaggaaataaagcagcacaaacaattgatgctgccttgggccagtctgctacaggcaaggaggaagcattaagtgcatatgagatagataaacgtcgatttaacaatggcaaggatgtttctttgccaaaattaaatgctgccggataccaatggatttctgacaatgccgattattttgatgagcttgaacgtaagtatgggcttgaaaaagggattctgtcagcagttgcatccgcagagtctagtgcaggccagacaacaggaaatccagtagacaaaaacgggaacaaactttcatctgcccttggggcttttcagatcactaaaggtacaagggaggatcttggactcagcgatgctgatgccatggatacacgaaaagcagctgatggtgccgccagatatctaagtatgctgatgaaccgttataacggtgatcaggggcgtgcaatagcggcctatcatgctggtatggggcatgttgataaggggagagtggtcgctggtactggcgaatatgttactcgtgtcagagggtatcagcagatgctcaataatggtgcagtttatggttctaaggtagatcatagcgcaccagcaatttacgaaaagatacctgataacgctgttatcgatcagtctactggcctggcgtttacccctggtgatagcccgtttgagaaaggcggtctggtagacaaaatcggcaatgctgttggcgttaacgatctggtcaacaaattcatgaatggccgggggatgcgtcgggaagttgttcagggaacgctcgaagaacgtgcacgagggaaggggaccgcaacggctgctggcaatgtgtatgttgatacacctatgccagttgaagaggcacgtccggtagcaaacaactcaagttactttgaccaactcggtgcacaaatggggattgatgggctgtatgacaaactcattaatgcccggggaatgcgctcaaataattctcctcaaccaaactccacgtcccaggtgacgactgccgccaacgatttgcagcaaccaaccggtcgtatgcagatagacgggcaggttattagtgaccttggcggttccggtgccaagccgacaatgcagttggatgataataccgtttcacttgatggtgaaacgaagcggctgtttgcgcagatgacctcattgcttgccaggattgaagagcacaccaaagactcggcgaaaggccagggaactgtcgtaaaggtcagcacgcctcaaccgggcgttatgcgcacggtgccactgtcaattgatgatccgttgatgaatgactacgcgagagttgattga

SEQ ID NO: 36307 - DNA, 228 bp, Escherichia coli
atgggaaggctgggcgttgacgtcagccagaatgaccatgtccggattaaaacgctgctgctcatgcgccagctttgcccgactaatgagcttatcctgctccatttcgcgctggacaggatcacgggattcattaaagaaataacgctcccagacctgatcactcagtacctcgcggcgcaggtgttcctgctcgttatcggcagcgtacagagcgatcaggtttga

SEQ ID NO: 36308 - DNA, 930 bp, Escherichia coli
atggatgaaaggccattaacaagtcaatacttatttaaacaatcacttaggattcctgtattttcagcgatatactttggtatattttcctggcttggacattcccctcaatttgatagtgagggctttaataatttcattgcaattagcaagcttcctatcgccttactttctttgtccataccatttgttgctgtcgtagcaaacatacaccgcacagttcaaacaaaccgacaaattgaggaaaccaagcaaaagaatctatctgatagctactatagccatctaaagttcgttactgattatttcaccaatttacctaacaaaaccattaaacgcgaacgtcattatggtactaaagagataagttataaaataaactacccaatacatctatatagatatattttcataaatagctcaccagagaagggacggcctaaaaatacagataaagagtacatacgtgaagtaaataatcactgggttgatatactaaaaaacctagagaagatacattcatctaatcgtggctctcagtttgccgaagttttaatccgtcaaatgcaatctcttcattcaatagaaaaacacttatccgaacttaatcgaatgctttgcctaactcccatggagttaaatgaacatgcaactttatactttgatggatatgaaatgattactaacttcatgtccagcattgaacttggcgatacaattgaaacctacttcaaatttaccattgatattcttgatattaccgataatttcctttcattcaaggatgatggctcgtctgggcaaatcattatactagcaagattactgaaagataataatccagctatctttgatgaaattgtaacaaacaaagggaaggctcaaccttcgttgacctacaatggcgacagattggcgacagaacattaa

SEQ ID NO: 36309 - DNA, 2016 bp, Escherichia coli; identical to SEQ ID NO: 30301

SEQ ID NO: 36310 - DNA, 2760 bp, Escherichia coli
atgagtgataacaacctgcgcctgcaggtcattcttaatgcggttgacaaactcacccgcccattccgtgctgcacaggccagttcgaaagagctggctggcgcaatcagaaactcccgtgacgcattaaagcaactcaatcaggcgggtaatagcctggaaaaatttcgcaagctgcaggctgataacaagaagttaggcgacaggctgaactatgccagacagaaggctaatttgcttagctctgagctggaggcgatggaacaaccatcacaacggcaccttgtggctttaggtcggcaaacgctggcagtccaacgcctggaagaacaacaaaaatatttgcagaagcaaacggcgcttgtgcgtgcagaactgtaccgggcgggaatttctgcgaaagatgatgcgggagcaactgcccgtttagcccgtgaaacatcacgttataaccaggaattgtcgaaacaggaggcgcggctgaagcgactgggtgaagctcagcgcaggatgaatgcggcgcgtgccagttatgcccgttcgctggaggtgcgtgatcgtattgcaggtgccggagccaccaccacggctgcagggctggcaatgggcgcaccagtgatggcggcagtaaaaagctataccagcatggaagatgccatgaaaggtgtggcaaagcaggtcaatggtctgcgtgatgataatggcaaccgcaccgcgcgtttttatgaaatgcaggatgccatcaaggctgccagcgaacagttgccgatggaaaacggtgcggtggacttcgctgcactggttgaaggtggtgcgcgcatgaacgtcgcaaaccctgacgacagctgggaagaccagaaacgtgacctgctggccttcgccagcacggcagcaaaggcggcaacagcctttgagctgccagcggatgaactgtcagaaagtctggggaaaatcgcccagctctacaaaatacctacccgcaatattgaacagctcggcgatgcgctgaactatctggatgataacgccatgtcgaaaggggcggacatcattgatgtgatgcaacgtctgggcggtgtggctgaccgtctggattatcgtaaagctgcggcgctgggttccaccttcctgactctgggtgctgcgccggaggttgcagccagtgcagcaaacgcgatggtgcgtgaattgtccattgcaaccatgcaaagcaagagtttctttgaagggatgaatctgctgaaactcaatcctgaagtgattgaaaagcagatgacgaaggatgcgatgggaaccatccagcgcgtgctggagaaggtgaacgcgctgccgcaggacaagcgcctgtctgccatgactatgttgtttggtaaagagtttggcgatgacgcggcgaaactggcaaacaacctgccggaactgcagcgtcagttaaaactgacagcgggcaatgatgcgctcggttccatgcagaaagaatccgacatcaacaaggactcactttctgctcagtggttgctggttaaaaccggagcgcagaataccttcagcagcttgggcgaaacgttgcgccagccgctgatggatattctgtacacggtgaaaagcgttacgggagcgttgcgtcgctgggtggaagctaacccggaactgacgggcacactgatgaaagtagccgctattgtggctgcggttaccgtcggcctcggcaccttagcggtggcgctggctgcagtgctggggccgctggcagtaatccgtctgggattctctgtgctgggtatcaaaacgttaccttccgttacggcagcagtaactcgaaccagcagcgcgttgtcctggctggctggcgctccactggcagtgctgcgacgcgggcttgcttcatcgggtaacgcagcgggtttacttactgcgccgttgtcgtctttgcgccgtacggcatcactgacgggaaatgtcatgaaaactgtagcaggtgcgccagttgcactgttgcggtctggattatccggtttacgtgcggttgctgtgatgtttatgaatccactggcggtactgcgcggtggactgaccgccgcaggcgcggtgctgcgagtgctggcatccggtccgctggcgatgctgcgcgttgctctgtatgccgtatctggtctgttaggtgctctgctcagtccgataggtcttgtggttactgcactggcgggtgtggcgctggttgtctggaaatactggcaacccatcaccgcatttctcggtggcgtggtggaaggattcaaagcggcggcaggtcccgttagtgcagcgttcgaaccgcttaagcccgtgttccagtggattggcgacaaagtgcaggcgctgtggggctggtttactgatctgctgacgcccgttaagtcgacctctgccgaactgcagagcgcagcggcaatgggacgacgattcggggaggcactggcggaagggctgaatatggttatgcatccgctggactccctgaaatccggcgtttcctggttgctggagaaactaggcattgtcagtaaagaggctgcaaaggcgaaactgccggaaagcgtgacgcgtcagcaacctgtgacggtgaatgcagacggtaaagtgatgatgccatcgggtggtttccgtcatggggatatggctttgcggggatgtatgacagcggcggctatatcccgcgcgggcagtttggcatcgtcggtgaaaacgggccagaaattgttaacggcccggcaaatgtga

SEQ ID NO: 36311 - DNA, 1005 bp, Escherichia coli; identical to SEQ ID NO: 5853

SEQ ID NO: 36312 - DNA, 444 bp, Escherichia coli; identical to SEQ ID NO: 15094

SEQ ID NO: 36313 - DNA, 231 bp, Escherichia coli
atgactgtaagcattgtttcaccttccgcagcggctgtaaagccccgccgtcatccccgtttcagacgcgaagacatccccgcgccggaaattgaccccgtgctgaaagccttcgggcgacacatagcccggagttttcaccgggggcgtggtgtacacatccccgccatgaaaaacacggctttcgggcaggtgctccgcacactcgaactgaaacgcgcttttaactga

SEQ ID NO: 36314 - DNA, 990 bp, Escherichia coli
atgccggcctttgaatgggttcatgtgcagctccatcagcaaaaggggatgataagtttatcaccaccgactatttgcaacagtgcccgatattttcaccttgatgaagcagacaaggaatttatcggaaaaagcagaggtgatcacaaccgtctgggcattgccctgcaaattggatgtgtccgttttctgggcaccttcctcaccgatatgaatcatattccttccggcgtccggcattttaccgccagacagctcgggattcgtgatatcaccgttcttgcagaatacggtcagagggaaaatacccgccgtgagcatgcagcgctgatacgtcagcactatcagtatcgtgaatttgcctggccctggacatttcgccttacccgtcttttatatacccggagctggataagcaacgaacgtcctggcctgcttttcgatctggcgacagggtggcttatgcaacatcgtattattctccccggagccactacgctgacccggttgatttcagaggtaagggaaaaggcgacgttgcgcctgtggaacaaactggcactgataccgtcagccgaacagcgttcacagctggagatgctgctggggccaactgattgcagccgcctgtctttactggaatcactgaaaaagggccctgtgaccatcagtggtccggcgtttaatgaagcaattgaacgctggaaaactctgaacgattttggcctgcatgctgaaaacctgagtacactcccggctgtgcgcctgaaaaatctcgcacgttatgctggtatgacttcggtgttcaatattgccaggatgtcaccgcagaaaaggatggcggttctggttgcctttgtccttgcatgggaaacgctggcgctggatgatgcattggacgttctggacgccatgctggccgttatcatccgtgacgccagaaagattgggcagaaaaaacggctccgctcgctgaaggatctggtatga

SEQ ID NO: 36315 - DNA, 240 bp, Escherichia coli
gtgataactctgggctgtgcgggcattggtgccgaggaagtaaagcgtggccccgttaggaagcaccatcggatcgcctttcagctccacctccacttctttggcgaagtcgatgatgtactgcttaaagacgtgggcctgtgccttactggcggaaaggaaaatctggttacgtccggtcagcagggcgtcaatcagggcttcacgggcaaagtaaaaggtcgcgccgatctggcgtga

SEQ ID NO: 36316 - DNA, 366 bp, Escherichia coli; identical to SEQ ID NO: 19611

SEQ ID NO: 36317 - DNA, 258 bp, Escherichia coli; identical to SEQ ID NO: 11055

SEQ ID NO: 36318 - DNA, 240 bp, Escherichia coli
gtggtaactctgggcagtgcgggcattggtgccgaggaaatacagtgtggccccgttgggaagcaccatcggatcgcctttcagctccacctccacttctttggcaaagtcgatgatgtactgtttgaagacgtgggcctgtgccttgctggcggaaagaaaaatctggttacgtccggtaagcagagcgtcaatcagggcttcacgggcaaagtaaaaggtcgcgccgatctggcgtga

SEQ ID NO: 36319 - DNA, 195 bp, Escherichia coli
atggtgagtcgtgcagccactgtgccgcccgttcaacggcttgaggcaccgacgcagatcatcattcagacgcagccaggacaaagtgcgcaggatattgcgcgggaggtggcccgccagcttgatgaacgtgaacgcaggctgaaggcaaaagccaggagtaactacagcgatcaggggggatacgacgcatga

SEQ ID NO: 36320 - DNA, 399 bp, Escherichia coli
atggactattcacagttaagtgattttgaaattaacgtggcggtattcgaagctattcataacggatcaccggattacaaagaaggtgagaatggcgatatggtgtttgtctcatttgagggagacattgtaaacggagacgcagttgaagtagaagttgagcgcggatcctttaacccatgcgcaaacccagcagacgcatggcagattatcactgaaaacaaaattagcaccatgtggatgacagcggaaaaagaatggtgcgcatggtcaggaggtgatttagaggaaggttgttgggaatgggaaaatattcctgactactgcttctgcggtgaatcgcctctccgcgccgccatgattgtatttctcatgatgcaggaaaatcagaatggctaa

SEQ ID NO: 36321 - DNA, 594 bp, Escherichia coli
atgtggagtattgccaacgaaccggatacccgtccgcaaggtgcacgggaatattttgcgccactggcggaagcaacgcgtaaactcgacccgacgcgtccgatcacctgtgtcaatgtaatgttctgcgacgctcacaccgataccatcagcgatctctttgatgtgctgtgcctgaaccgttattacggttggtatgtccaaagcggcgatttggaaacggcagagaaggtactggaaaaagaacttctggcctggcaggagaaactgcatcagccgattatcatcaccgaatacggtgtggatacgttagccggcctgcactcaatgtacaccgacatgtggagtgaagagtatcagtgtgcatggctggatatgtatcaccgcgtctttgatcgcgtcagcgctgtcgtcggtgagcaggtatggaatttcgccgattttgcgacctcgcaaggcatattgcgcgttggcggtaacaagaaagggatcttcactcgcgaccgcaaaccgaagtcggcggcttttctgctgcaaaaacgctggaccggcatgaacttcggtgaaaaaccgcagcagggaggcaaacaatga

SEQ ID NO: 36322 - DNA, 1461 bp, Escherichia coli
atgtcgtcagaattcgaggcaatgcttgccgatgatatgggtcgattcttttacgatccgcttggcttcgttatgtatgcgtttgattggggaactggtgagcttgagggctttgacggccccgatgaatggcagaaagagtttctgacagattggggagacgcaatcaggactaataacttcgacggtgttaaacctgttgaagcctatcgttgcgctaccagctctggtcacggtatcggtaaaagtgctctaactgcctgggtcattctgtacatcctcagcactcgtcctttctgcaagggcgtcgtgacagccaatacctctgaacagcttcgcaccaaaacatggggcgagctgggcaagtggaagaagcggtgcatcaccggtcactggtttgagtacaacaacggcaaaggcaacatgaacatctaccatgtggatcacatggaatcatggcgctgtgacggccagacgtgtcgggaagagaacagcgagtcatttgctggcctgcatgcagctaactcaagcccgttctacatcttcgatgaagcctcagcggttcctgacaaaatttgggaagtagcagagggcggccttactgacggcgagcctttctggtttgcatttgggaacccgacgcgtaacaccggtcgattccgagagtgcttccgcaagttcaaacaccgatggcgtcgacgtcaaattgatagccgcctggcaaagatgaccaacaaagagctcatcgaagagtggcgcaaggattacggtgaagacagcgatttctttaaagtacgtgttcgcggtctattcccatcgacatcagaagtccagttcatacctcaggcatatgtggatgaggccatgtctcgcacgcttgaacccggctcttacacattcgcatccaaaataatcggcgttgaccctgcttacacaggtagtgatgaggcatcaatttaccttcgccagggtcttcatgcgcgcctgcttggcacctacccgaaaacagatgacgacgttaagttcgcgcaaatcgtcgcaggatttgaggatgagcataaggcagatgcagtgttcatagacttcgggtatggcaccggaattcactcaataggtaggtcgtggggaaggaagtggcagctggttaactttgggggtgaatccaaagaccccggcatgctgaacaagcgcggtgagatgtggaactcaatgaagtcatggctcaaagaagggggaagtatcgatgatcagcaaacagctgacgaaatcgttgctcctgagtacagggttaagctcgatgggcgcatcgtccttgaggccaaagatgacatgaagcgccgtggggttccttcaccaaaccgcgctgatgcgttagccctgacgtttgcattcccggtagtcaaaaacaaaccaactaagccattaccggctccaattcgtccaatttccagaggtagataa

SEQ ID NO: 36323 - DNA, 336 bp, Escherichia coli; identical to SEQ ID NO: 19742

SEQ ID NO: 36324 - DNA, 282 bp, Escherichia coli; identical to SEQ ID NO: 5799

SEQ ID NO: 36325 - DNA, 522 bp, Escherichia coli; identical to SEQ ID NO: 5800

SEQ ID NO: 36326 - DNA, 1428 bp, Escherichia coli; identical to SEQ ID NO: 5801

SEQ ID NO: 36327 - DNA, 252 bp, Escherichia coli; identical to SEQ ID NO: 5802

SEQ ID NO: 36328 - DNA, 465 bp, Escherichia coli; identical to SEQ ID NO: 5803

SEQ ID NO: 36329 - DNA, 339 bp, Escherichia coli; identical to SEQ ID NO: 5805

SEQ ID NO: 36330 - DNA, 954 bp, Escherichia coli; identical to SEQ ID NO: 19750

SEQ ID NO: 36331 - DNA, 1116 bp, Escherichia coli; identical to SEQ ID NO: 5807

SEQ ID NO: 36332 - DNA, 459 bp, Escherichia coli; identical to SEQ ID NO: 19752

SEQ ID NO: 36333 - DNA, 1497 bp, Escherichia coli
atggcgaggggtatctgggtttcacccgatgaatttgttgctttttctgagcctcagaaatcactgaccgcgcagattgcctcccgcagccgcgcgatcgacttttacggactgggcatgtatctgcccaatcctgatcccattctcaaggctcagggacgggatatccgtatctaccgcgaactgcgcaccgacccgctggtcgggggctgtatccgcagacgtaaagcagcgctcaaatcactggagcgtggactggagcgcggtcacgcttctgcccgggtcttccgtttcatccgcgacatgctcgacgatctggatctgtcccgcatcatcggtgagatgagtgatgccgtgctctacgggtatcagccctgtgaaatcatgtggggccgttcggtcagggcgtgggcagtgacggatattgtcggcaaaccgcctgagtggtttcagtttgatacggacaactgcctgcgctttcgggcgcgtgatgcgggtgtggagggtgagctgctgtcaccgtcaaaattcgtggtgccggcacaggatgcctcgtatgacaatccttacggtttcccggacctgtccatgtgcttctggccggtcgccttcaagaaaggcgggatgaaattctggctccgctttgccgaaaagtttggctccccgtgggtgatcggtaagcacccgaggggcgcaaatgatgcagagattgaaaaactgctggactccatggagcagatggtggaggacgcggtggccgccatccccgatgacagcagcatcgaactcaaagccgcggatggtaaggcggacagcagcgaggtattccgcgagctgatcacactgtcacgcagtgagatctccattgcattactcggtcagaatcagaccacggaagcgaacagtaacaaggcctctgcacaggccgggctggaggtaacggctgatatccgcgatgcggatgcggacatcattcaggcagcagtgaatcaggttatcagaacggtggtcaccctgaacttcggcgatgtgccgtgtccggtctgggccatgtgggaacaggaggccattgatgacacccgtgccacccgcgacgaaaaactcacccgggcgggtctgcgtctgaccccgcagtacttcaagcgtgagtaccaactgcaggacggcgatattgacgagacaccaccgtcggaacgccagaataacatgctgccgctgtcatttgccgaggcgattgatgccgatattcaggctcagcagcagcttgacgacgcgctggacattctgatgaacggaggcgcgttaaatggcacgctggaacccgtcctggcacctctgttcaggcgggtcgaaaacggggttaacccgtctgagctgctgggcgaactggcggagctctaccctcagatgaacacggacgatctgcaggagcggctggcccgcattctctttgtggcaaatatccggggacgtctgcatgagcgtgacaacggctga

SEQ ID NO: 36334 - DNA, 420 bp, Escherichia coli
atggatggcctgcccggtctgctgggtgcagcgtttgatgcccgtggtaatggtgcctatctggctgaatacgccatgcagcgctacggctccggccgggttcagcaggtgatgccaaccgaaggctggtaccgggagcatatgcctccggtcaaagctgcactggaagacggtaacctggtggacttaccaaaggatgaagacacactggatgacctgcgggccgttcaggtggtgaacggtgtcccccgcgtgccggagcaacgctcaaaagcaaaggctgatggtggtaaacgtcacggggattcagccatcgcactggcgctggcgtatttcgccagccgtgaaattaacaaagggccggtgaaggcaagctcacgccgtcgtcgtcaggcggcccgtatgctggagggattctga

SEQ ID NO: 36335 - DNA, 1095 bp, Escherichia coli
  misc_feature (972)..(981): n is a, c, g, or t
atgcaaattgcagaagattatcaggccttcaaccttggtattggtaaagatttaggactttttggtgccttttctttcgatatcacgcaggccaatacgacgcttgcagatgacacccgtcacagcggacaatcggttaaatccgtctacagcaaatccttctaccagacgggaaccaatatccaggtcgcaggatatcgctattctacgcaaggtttttataacttatccgacagtgcatacagtcgaatgagtggttacaccgtcaagcctcctaccggagacaccagtgagcagacactatttattgattattttaatctgttctacagtaagcgtggtcaggaacaaataagcatctctcagcagcttggacattacggtacgacatttttcagtgccagtcgccaaagttactggaacacgtcacgcagcgaccagcaaatatcatttggattaaatgtgccgtttggtgatattacgacttcgctgaattacagctattccaataatatatggcaaaacgatcgggatcatttactcgcttttacacttaatgttccctttagtcattggatgcgtacagacagtcagtcggcatttcgtaattcaaacgccagttacagtatgtcaaacgatttgaaaggcggcatgaccaacctatcaggggtttatggcactctgctgccggataataacctgaattatagcgttcaggtcggtaacacccaagggggtaatacatcgtctggcaccagtggttacagttctcttaattatcgtggagcttacggtaatacgaatgtcggttacagtcggagtggtgacagcagccagatttattacggaatgagtggtgggattattgctcatgctgatggcatcacctttggacagccgctgggcgacacaatggttctggttaaggctcctggcgctgataatgtcaaaatagagaaccagaccggaatnnnnnnnnnnataccgactggcgtggctatgccatattaccatttgcgacagaatatagagaaaatcgtgtcgctcttaacgcgaattcccttgcagataatgttgaactggatgaaaccgtag

SEQ ID NO: 36336 - DNA, 912 bp, Escherichia coli
atgggacgcaccaaatcaccgattaacactgaactgaacgccgaggtaccgctgtcggatgatctcaatgtcagtctgaacgccatgacacagcatcgtatggagatcatgcagcagtttggcgatggtcagccctatgagcgtgatcgcatagttcatgaggctcggttttatatggcacagagcgctgaggccatgctggaagcaggtaaacgacttattattctcaaagaaaatgaacctcacggggactttgttggaattgtagaagaacaacttggtctgcatgtgcgcgcagcacaacgaatgatgaaagcatctttgaaatacctttcaccaaaactagagccaaaagcgacaacgttgtcgcttttaggtaaggcaaaattatttgaacttgttgctgaagatgacgacgaccttgctgaactggccgacggtggcacagttgccggactgacgcttgacgatgttgatcgcatgtcagtacgtgaattgcgtcaggccctgcgcgaagcgcgcgaaaccaacgcagcacaacagcgcgtactcgccgacaaaaatgaaaaaatagactcactctccaccagactggagaagaaatcccgtattcagccacctgagcctgatgaagaggtgaagaaactgcgggcagaagtgaccgcgttagcggttgaggcggaatctgccatcgccgttcgactgtccagcgcttttgagacgctgtgcgcatattgtgctgaaaacatgattgatacccccagagacttcatggcaggcctggtctgtcaactggaaagcacagcgcgtagcctgcgctccacatttgacctgccggacgagccaacaggcaatgcagcgccttcatggctgactgagccgacgccacagattaacgggctggaggcataa

SEQ ID NO: 36337 - DNA, 207 bp, Escherichia coli
gtgtcccgcgccatctacccggacaccacgcaactggagctgcgccgtgagcttgattacctggcagatcgcaagatggtggaactggagaagaggccttccggtgactggtttgccgatctgagtcgccttggtgtggatattgtggaatacaccgtggaatgcggccccggtattgcccgcccggaaaaatactggagtgagtga

SEQ ID NO: 36338 - DNA, 213 bp, Escherichia coli
atggatatcaccgtcacccggaacagtccgactggtcaggcaatgacaaccgatgcggaagccgctgtcagcgaagccctgcgcgacctggccttctggctgtaccgccagctggaaaacaagtacgactggctgacctcagacaccgctgtggatgaggcccttctcatcaacgaatataccttcaccgaagccggtctgcgcgccggctga

SEQ ID NO: 36339 - DNA, 327 bp, Escherichia coli
atgcaaacgatcacaacgcatgaacagttattagttgatggaaaaatcacagaaagaaccgccacacatatagtgacgggcgctcacgggtatgaaacgctttgcacaagcggctataacatcaggtacaacgagaaacaagaactggtagaaagttgtgaaaagatagcggagggcgaactacctgtaacatgccctacctgcttcgcagtctggcaagacgtacataagttcacgccaggcgactttgaaactgcatcggggaaaggagattttgctgatacaaatctcacagaaatcatgataggaaaaatgtcagacacataa

SEQ ID NO: 36340 - DNA, 366 bp, Escherichia coli
atgtctatccatttctgctgggattcagtgattgataaaaaagtgtatgaaacctggataacgctggcgggagacgtctggaaattgatgctcacactttattcaccaccaggcggtggcagtgaaaagtattatctgcggtatctgttaatcgggctggctccggaagggaaaataggagtgtggctggagaaacctgacaagcccaatattcgcctgacggataagcagattctgatagaaacggtttcaggtgaaaaaatggaaatgtgtaacggccgaagtgcctataaacatgggtattcttatccggaaagtacaaaaaactttatcaaagataaaaaatatccctatggtaactggtaa

SEQ ID NO: 36341 - DNA, 558 bp, Escherichia coli
atggtatttcaatttttttaccctaattccctaccagcagaagttacctatgtggagttattagataccgatggcatctattatcagttcagaactctggcgagtactaatgccagtccaggaagtgttggacaatggagcgagaaagtatcagggatgtcgtcagtttttaataaagccaaaaacccaccaatgtctatccatttttgctgggattcagtgattgataaaaaagtgtatgaaacctggataacactggcgggagacgtctggaaattgatgctcacaccttattcaccaccaggcggtggcagtgaaaagtattatctgcggtatctgttaatcgggctggctccggaagggaaaataggagtgtggctggagaaacctgacaagcccaatattcgcctgacggataagcagattctgatagaaacggtttcaggtgaaaaaatggaaatgtgtaacggccgaagtgcctataaacatgggtattcttatccggaaagtacaaaaaactttatcaaagataaaaaatatccctatggtaactggtaa

SEQ ID NO: 36342 - DNA, 705 bp, Escherichia coli; identical to SEQ ID NO: 5348

SEQ ID NO: 36343 - DNA, 705 bp, Escherichia coli; identical to SEQ ID NO: 5348

SEQ ID NO: 36344 - DNA, 282 bp, Escherichia coli
atggttcatccagtacccggcaccgtcctcaaaattccaggtacgccagaccaggccattgttattgcggacaaccaggcgaaaatgcgttccctgatcatcctcgataaagacattccggtactgtgcggcaacggcttccgcctgttcgcgggtaaaggcgccgtccggcagcccctgaagtattctgaaatattcgctcatcctcatctctccggtgatgccccgcgcagggcggggcggttatcacagtcaggccagtcagaacgggatatcgtctga

SEQ ID NO: 36345 - DNA, 153 bp, Escherichia coli; identical to SEQ ID NO: 28129

SEQ ID NO: 36346 - DNA, 516 bp, Escherichia coli
  misc_feature (412)..(421): n is a, c, g, or t
atgggaaagaatatagttgtaatatcggctgttaattttacaaccggaggcccctttaccgtactaaaaaatgtgcttacagcaactaaagatagagccgaatgtaaatttattgcactggttcatagctctgctgaactaatggaattatttccgtgggttgaatttatagagtatccagaagtcaagtcttcgtgggttaaaagattatatttcgaatatataacttgcaatagattatctaaggtgattaaggcaactcattgggtatgcttacatgatattacagcaaatgttagtgtaccctatagatttgtttattgccacaatcctgcaccgttctataaatatttaagctatcgagatattataggagaacctaaattttatcttttttatcttttttatgggnnnnnnnnnnttttatgggcttttatacaatatcaatataaaaaagaacacagcagtttttgttcagcagcagtggctaaaaaaagaattcgaaaaaaaatataa

SEQ ID NO: 36347 - DNA, 222 bp, Escherichia coli
atgaaaatcatcacccgtggtgaagccatgcgtattcaccgtcagcatccggcatcccgtctttttccgttctgcaccggcaaataccgctggcacggcagtgctgagacgtataccggtcgtgaagtacaggatattcccggtgtgctggccgtgtttgctgaacgccgtaaggacagttttggcccgtatgtccggctgatgagcgtcactctgaactga

SEQ ID NO: 36348 - DNA, 456 bp, Escherichia coli
atggttgtgtccgctattgccagtacacctcaaactgagttctcatggttccgatacggacagtataacgaaacgggtatttacatctcgatcgagaagaccattatcattacaatcaccgtttctggtgggtgctttaaaaaagaatacagcattgtctcccacatgctggtcactgacaccataacagaggccaccctgtacgaaaacgggctgtatacgcgccacatcagactcagtcgcccagtatctgacagcaaataccccttgccacccggatctcagctcattaaaaatatgaccttacgactgcgcctgcaggatcagcaggaagaaacatccgtgacattatttcagggaaaaatgagtaccgacggaaataactattccatcatcaaaggtaaagtaagctcagtacttctgttattaaaaatgctgcagattaatcatgcctga

SEQ ID NO: 36349 - DNA, 327 bp, Escherichia coli; identical to SEQ ID NO: 5975

SEQ ID NO: 36350 - DNA, 771 bp, Escherichia coli; identical to SEQ ID NO: 5760

SEQ ID NO: 36351 - DNA, 234 bp, Escherichia coli; identical to SEQ ID NO: 11469

SEQ ID NO: 36352 - DNA, 528 bp, Escherichia coli
atggcagttcgtggaattaacaaggtcattcttgtcggtcgtctgggaaaagatccggaagtccgttacatccccaacgggggcgcagtggcaaacctgcaggtcgccacgtcagaaacctggcgcgacaaacagacgggggaaatgaaggaacagacggaatggcaccgcgtggtgctgttcggcaagctcgcggaagtggcaggggaatatctgcgtaagggcgcgcaggtctacatcgaggggcaactccgtacccgtagctgggaagataacggtattacccgttacgtcactgaaatccttgtgaaaaccacgggcaccatgcagatgctggggagtgcaccacagcagaacgctcaggtgcaaccgcagcctcagcagaacggccagccacagagtgctgacgcaacgaaaaaagggagcgcgaaaacgaaaggccgtggacgtaaggctgcgcagccggagcctcagccgcaaccgccggagggtgaggattactggttttcagacgatatcccgttctga

SEQ ID NO: 36353 - DNA, 213 bp, Escherichia coli
atgcttagacaacatcaggatagcctcttaccgcgctttgcgcaaggagaagaaggccatgaaactaccacgcagctctcttgtctggtgtgtgttgatcgtgtgtctcacactgttgatattcacttatctgacacgaaaatcgctgtgcgagattcgttacagagacggacacagggaggtggcggctttcatggcttacgaatccggtaa

SEQ ID NO: 36354 - DNA, 462 bp, Escherichia coli; identical to SEQ ID NO: 33598

SEQ ID NO: 36355 - DNA, 258 bp, Escherichia coli; identical to SEQ ID NO: 11054

SEQ ID NO: 36356 - DNA, 1089 bp, Escherichia coli
  misc_feature (826)..(855): n is a, c, g, or t
atggaatctctatttatttatttttttgttacgatggtgttaattgtttttacgtatttttttaagcataataataatatattaataattgtttgtagtgctatattatctgttacatatgggctacgtgttggaataggtaatgattatgaacaatacaataacattttcaatgcaattaattataactcctattctgcaatagaaccaacatttatattgctatccagattgctggaacagtatgattatggctttaattatctaatggcaatatatgcatttgtgactttttttctttgttatatggggataagaaaatataatatctatccttatgtgccattgttaatgttttctaccggttttatattttttgtggataaccaagtaaggcaagcactggcaacatcgttttttatctattatatgcggtttatatcgacaagggaatttgggaaatatttgatatgtgtgataatatcaactatttttatgcatttcagttcagcggttttattgcttgcgtactttgtaactagaaagagaataaatggagtggtttggattttattattgttgcttgcttatattttaatgaagttggacgtggtccacaccgtattatccaatattataagcatggtgccgtactattcagaactctatttgcaaaggtttaataatataagtctgaacgtaactggtagtggattaggtgtattgttctggttgataatagctgtattcattgtaatttttaatcaaaaaaatgatgatgttattgtctttaatttatttataattggtacaataatcagtacgnnnnnnnnnnnnnnnnnnnnnnnnnnnnnnatttttattaattatgatatatttgagcgcgttagtttttattttatttatttgaggtttattctattagcaattatttttaaaaaaataatgtttagaaataatgttaattttatgctttgtgggattctaatcactttaactgtgttttttactagctatgaggtgataaatgatgctaataaacatggggtggtacctttaagattcatttatttagataccgaggtataa

SEQ ID NO: 36357 - DNA, 246 bp, Escherichia coli
atgatacgcatcgccccactcgatacgcaggatatcgacctgcaaatcaacagcagcgttgagaaacagtttggcgatgcaattcgcaccaccattctggacgttctcgcccgctacaacgtgcgcggcgtacagctgaatgtcgatgacaaaggcgcactggactgcattttacgtgcacgactggaagccctgctggcacgcgccagcggtatcccggctctgccatgggaggattgccaatga

SEQ ID NO: 36358 - DNA, 606 bp, Escherichia coli
gtggataagggaaaagagattcttgcagtacgaaatgccgcttacaacgaatacggcggtataaactgtgaggtgcagtttgaaggcgcggtgaatgaaaaaggtgaagcattatggctgccatatacggcaacggaaacggataatactgaacacggaaaagcattgtggtctggtctgacagcaggaaagtacggaagtgtgaccgcctttgctgccacggaagctgttcttgaggcggcaaaatcggtgaaaagggaggagattaatctctggcgggatgtgcaggagaatatggaatacgtgatggaattcaacggaaggaaatgggattacggcaagaagacattgtccaggataagcacgacgcgcctgatggcggaaaaaaacagtcttccggaaggctttgcctggacggatggtgaaaataatgtggtgccggtgacggcggcggaagttatcgcgctgtcggatgcgatagagaaggcgatgtttgcgaagggtgtggagattaacaccaggcagttgcagatgaaagcagagcttgggacgctgacagagctgaagtccatcagaagttatgttgttggctggcctgccagttga

SEQ ID NO: 36359 - DNA, 1059 bp, Escherichia coli
atgccagtacagatttcaggtgtgctgaaggatggtacaggaaaaccggtaccggagtgcaccatagagctgaaagccgtgagaaccagcgagacggtgatagtcaccacggtggcagagcaccagccaggcgaaacgggcagttacagcatgcaggttgagccggggcgttatcgtgtgaccctgtgcgtggaaggtcgtcagccagcatgcgtgggcgagattgatgtcatggcagacgacgaaccgggcaccctgaatgcctttctgctccgtgaaacggatgcagcgtattaccctgatgcactgaagaaactggaagcggcggcgggtgaggctgtgcgcagggcgcgggaagctgctgagaaagcggaaactgccgtggggccacaggggccaaagggagataaaggcgagaagggggagcagggggcaaagggtgataagggagacaccggtgcacaggggcctaagggagaaaccggcgctaagggtgacaaaggtgatacaggccccgcaggtccgaaaggtgagcggggcgaccctggcggcccgcagggaccaaaaggagataccggagccacaggcccggcaggcccacagggaccgaaaggggataccggagccgcaggtccggcaggcccacagggaccgaaaggagatacaggagccaccggtccggcaggcccgcaggggccgaaaggggataccggagccgcaggtccggcaggcccacaggggccgaaaggcgataccggagccacaggtcctgcaggtccgcagggtccggcgggaagttctgacagcgggttgtttggcgtcgggtcttttgttcttgcagcatattacccgacgagttactcgggggacatgccaccgggcacaactgttgccgggtcatcactgtctgcatgctgcctttcgaatggtactcccctgattgcgtccgataatgtgggggagacccgtttaccggggacgtggcgtgcatgtggtccgttaatatggacatctgctgcgggtatcagacaggcaggattatttcagcgcatatcatga

SEQ ID NO: 36360 - DNA, 1080 bp, Escherichia coli
gtgcagtttgagttctggttctcggaaaagcagattgcggatgttcgtcatgttgaaaccaccgcccgttatctggggacggcgctgtactggagtaccgccagtaatatcaggccggggtatgattattatttttatatccgcagcgtcaacctggtgggcaaatcggcattcgtggaggccgtcggccgggccagcgatgatgcggaaggttatctggaattttacaaagggctgattaataaaacacatctcggtgcagagctgctggaaaacgtggaactgacggaggataacgccagtaagctggagcagttcttgaaagagtggaaggacgcgaacgataaatggaatgccatgtggggcgtcagaattgagcagaccgaagacggtaagcattatgttgccgggcttggtctcagcatggaggatacggaagaaggcaagctgagccagtttctggttgccgccagccgtattgcgtttattgacccggcaaacgggaatgaaacgccgatgtttgtggcgcaggacgggcagatattcatgaacgacgtgttcctgaagcgcctgacggcccccaccattaccagcggcggaaatccgccggtattttccctgacaccggacggaaagctgactgccagaaatgcggatatcagcggcagtatcaccgccagttcgggtacgctcaacaatgtgacgataaaccaggactgtgtgattaagggcaatttatccgcggcacagataaccggagatattgcgaagacgtatgtgcttaacgggaacagtgtgtatatccctgctcaggtatttaccatgaatctggtgatgctgggcggtgccggacacctgtactttaacggtaacgagcagacaccggtttcctctgcgatcctttcgaggatgcagacagacagtgtctggagcggcggaagtccggggcatggtggcggcagttacagacctgtttacagcacaatctggataaaggtgttcaggcttaatgcggggacacccgtgacggtgtcggtttcagacaatgcggtgacggttatctggatgtcgaaggcgtaa

SEQ ID NO: 36361 - DNA, 588 bp, Escherichia coli
atgaccactcagatttctgtcgaaactctttccccaattacacacaaccaaattcccgttatcactaccgagttactggcacagctttactgtaccgagatcaacaacatcaaagtaaattacacccgtaattccgagcgttttgttgagggtaaacactttttcaaggttgttggtgatgagttgaaaaatttgcgggttactttaagtaactcacaaaatttgcaaccatctttaagagggttacaaatttccccgaaagcccgctccctcattctctggacagaacgaggggcagcccgccacgcaaaaatgctcgaaaccgatcaggcgtgggatgtgttcgaaaaactggaagattgttatttcagccgaaaacaaccagctgcagcacaaaacacatctatcgaaaatgatggatgcgcattattgatccacttcgataaacacgggcaggtcgaattcacggaaaaagtacccgccgatgtgatgatatgcactctggaacggtttaagttttatctggaacagcaaggctggattgttgcccgtaaagagcaactggtggaacgactgatgcggctttaa

SEQ ID NO: 36362 - DNA, 273 bp, Escherichia coli
atggcacgacatgctaaatctcacaatgctgaaactggccttgccaacaagcacgggcggcgtttttttgcatctgaaaaacaacctttttactacccgaactgtacgacgcatgaactcggggaacttgaagagttatacagtcgtcgcggatacacaataataaagcagctcaattctgacggcagaacgtggtttgtttcggtggtattacccgtatcaaatcatcagccacctacaccactctgttatcgccagcgcatctggaggtaa

SEQ ID NO: 36363 - DNA, 261 bp, Escherichia coli
atgaaaatcgaagaattgcgtgaaattttaagtgaaaatggtctttacgctgtgcgcgttgagaatggaaccgttgtcagccattgcctcattaaatgtttacaatttcaacaaaagaagataggggcagcgttaatttattttgcggatggacttgtgacggacggttttattttgcgtgaaaatgaatttgtcacatcattgtcgtatctgaaagaggccggacttaaggctggtttttctgcttttgctgatgagtga

SEQ ID NO: 36364 - DNA, 477 bp, Escherichia coli; identical to SEQ ID NO: 30458

SEQ ID NO: 36365 - DNA, 672 bp, Escherichia coli
atgaataattttaaaaacttcacgctctacacaccggagaagccggatgtaccgggtgcgatgtatctgaaatcggaagaggggcatgactggtatgcatgccagtcattatttaaagctgacacactgaaggtggtttataacagtgcaaaggttatcacgagtgtcagcagggatgtgtcaacgctgtggccagttgatcagagcgttgccgagttgccggatacagaagaaaaccgcagggtggatatatcaggccgttggggttttgacggtgaaaaaatcacggttctgctgacggtggaaaaggcgcgggagcagaaaggaagcgaaatcaacgcctggcgaaatgcaatggaggcgtcgaactacacgtttgagcataatggccgtaaatgggactacggcaagttaacgcagacccgtcttgagccgtcggtggcggcagcgaaagcgggaaaattgccggaaggatttttctggacggatgcggagaacaatgatgttccggtgcccccggatgagcttattgcgctgagtgaagcggcagagcaggcgatgttcagcaaagggatggaaatccacgtaaggcagcgcaccatgaagaaggagctggaaaaactgagcagtgcagatgaggttctggcgtataaggtgggctggggcgaataa

SEQ ID NO: 36366 - DNA, 1479 bp, Escherichia coli
atggcgattaaaatttctggcgtgcttaaagacggcacaggaaaaccggtaccgggatgcacgatagagctgaaagcacgtcgcaccacagagacggtgatagtcaccacggtggcacaggggcagcccggggaaaccggcagttacagtctggatgttgagccgggatggtaccgtgtgacgctgaatacggaaggttacgcgccgtcatatgtgggtgacattgtggtgaaggaggattccacgccgggtacgctgaataaattcctgatggaccaggaggatgcacagtattacccgaaagcgcttgcggagctggaggctgtggcggaggagatacttaagcgagcggaagcgtcggcggcgagtgcagaggaagcgaagaaacgggcagagaatgcccgggggccgaagggagataaaggcgagacaggtccggcaggtccacagggtccaaaaggggataagggagataaaggcgatccgggaggaccggtgggaccgcagggtccggcaggcccggcaggtccacgaggtgagccaggtccgaaaggagacaaaggggaaactggtccggcaggaccgaaaggtgaacagggaccgcaggggccaaagggtgaggcaggtccggcggggagtgctgcaaatgttaatgatgccagcacgacgcagaagggcgtagttcagttaagcagcgagacggcgagtgatgatgaaacaaaggccgcgaccccgaaagcggtgaaggcggcaatggatgcagcaaatacggcgaaacagcgggcagaagaggttgcgaaggctgccacatcagggagcagtatccccggaccgaaaggtgataaaggagagccgggaccggcaggcgctgttggtccacaaggccctgcgggtgaaaaaggggaagcaggtcccccgggtccacaggggccagcgggagctccgggggcaaaaggcgatgcgggaccagcaggtcctgccggggcaaccggagagcgaggagaaaaaggtgaccccggacccgccggacctcagggggtaccgggacctcagggtccaaaaggggatactggagaccccggaggaaccgaactgcttacttcagccaatacatggactcaaccacaaactattaatggcgatttgacggtaaccggaaacggctcatttaacgacgttcagatccgctcggataaacgcaacaagcgaaatctggtaaagctggataatgcgttagatcgcctggaagcactgactggttatctttatgagatacagtactctgccgacggctggcaaatgtcggttggtttaattgctcaggatgcacaaaaagcattgcctgaactggtaactgaagacgacgacatgatatctggtgaaaaacgtctgcgtcttaactacaacggcataactgcactgttagtagaaggctttaaagcacttcgtcatgagattaaagagctcagggagaagtaa

SEQ ID NO: 36367 - DNA, 624 bp, Escherichia coli
atgcgccatttatatggagccattttatgttttgtcagctttctggcagggatcgctcttcctgcgcaggctgaaaccggacacggtgcgttttctgtggggtacacacaggtacacccggacggtgtgccggggctttccggtaccggcatcagggccggcgatctgaaagggattaatgttaaataccgttatgagttcacggatcacctgggtggcattgtcgcgctgagttatgcatcggtgaagaaaagcgacacgatgaaaacgggtgaaaatacgttccattatgaaagcctgcgcggtcgttatgccagtctgatggccggtcctgtctggcaggtcggtgagcgggtcagtctctatggcatggccgggatggcgtacacccgctggtctgacagtgttcaggattaccggcgtgatgaagtgaaaccggggtatgtgaaggaaaccaccaccgccagtgatggccatactgcgcgtcatctgtcgccggcatggagtgcgggtcttcagttcagcccggcagaaacggtgattattgattttgcttatgaaggctccggcagtggtgactggcgcactgacggtttcatcattggtgttggttatcaattctga

SEQ ID NO: 36368 - DNA, 1599 bp, Escherichia coli
gtgagtgcctctgacggtcagtatctggcggtggcgaaatgggacacgccacgggtggtgaagggcgtgcgcttcagtcttcgcctgaccagcggaagcggagaagacagccgtctggtgaccactgccatcaccgcagacacggagcaccgtttcagcggtctgccgccaggggaatacaccctgacggtcagggcgataaacagttatggtcagcagggggagcctgccggtaccacgttccggattaatgccccggcagcgcctgtaaccattgaactgataccgggatattttcagataacggcggtcccgaaactggccatttatgacccgacggtgcagtttgagttctggttctcggaggagaaaatcgcaggcacatctcaggtggaaacgtccgcccgttatctgggtaccggcagccagtggagcgtctccggcccgcacattaagccggggagggatttctggttttatgtgcgcagcgtcaacctggtgggtaaatccgtttttgtggaagcaaccggacgggcgagcaatgatgcggaaggttatctggactttttcaaaggagaaatcgggaagacacatctggcacaggggatgtgggagctgattgataacagtcagcttgatgatgagatggcggagatgaagaccaccatcacagaaacccgcaatgaaatcacgcagacggtcaacaaaaccctggaagaccagagtgccaccatacagcagatacagcgcgtgcagaaggacacaaatgatgacctggctgcgctgtacatgctgaaggtacagaaaacgaaagacggcattccgtatgttgccggtattggtgcggggattgaggatgtcgatggtcagaccatgagcaacattctgcttcaggctgaccgcattgcgatgattaacccggaagatggtaacaccacgccgttatttgtggcacagggtaatcagctgttcatgaacgatgtgttcctgaaacaactttttgcggtgagcatcacgtcgtccggcaatcctcccgcgttctccctgacaccggatggaaaactgactgccagaaatgcggatatcagcggggcaattactgcgaatacagggacgctgaataatgtcaccattaatgaaaactgtgtcatcagagggaaactgtctgctaatcagattgaaggcgacctcgtcaaaacggtgggaaaagcctttccccggaataacagttatgccagtggctcgataacggtcacggtttacgatgaccagggcttcgaccggcagattatcattcccccggtactgtttcgcgggacgaaacatcagaacttcaacagcccgaatcagcagtcgtactggtattccacctgtcagttgcaggtattaaataacggtcgggtgatttttcatgagccggcgacggacactgcgagggttttttcatcggtgattgatatgccggcaggacggggtcatgtcaccctgacgtttaatgtgtcgtcgaccggtgcaaataactggacgccaacaacgtacatcagtgatttactggttgtggtcatgaaaaaatccacggcagggatcagtatcaggtga

SEQ ID NO: 36369 - DNA, 1005 bp, Escherichia coli
atgaaatttctggttacgggagctgctggctttatcggtttctatgtaagtaaacggcttcttgcagctggtcatcaggttgtagggattgacaacttaaatgattattacgatgtcaacctcaaacaagcacgacttgatttactcaagcacgacaatttcagtttttataaaattgacctggccgatcgtgagaaaatggcggcactgtttgcagacgagcggttcgatcgcgtaataaacctcgctgcgcaagccggtgtacgttactcccttgaaaatcccaatgcatatgcagatgcaaacctgattggattcctgaacatactggaaggatgtcgccataataatgttcagcatctactttacgcttcctccagttctgtttatggcatgaaccgcaagatgcctttctctacagatgactctgtagatcatcctgtttcgctttatgcagcaactaaaaaagcaaatgaactcatggcccatacgtattctcatttgtatggcttaccgaccacagggctgcgtttctttacggtttatggtccatggggacgtccggatatggcattatttaaatttactaaagccatgctggaaggtaaaagcattgatgtttacaacttcggcaaaatgaagcgtgactttacttatattgatgatattgccgaagctattattcgcttacaggatgttattccagaaaaagatccacagtgggctgtagaaacaggctcgcctgcaacaagttcagcaccatatcgtgtctataacattggtaatagttcgcctgtagagttgatggactatatcaatgcgttagaagaggctctgggtattgaagccaacaaaaatatgatgcctctccaacccggtgatgtactggaaaccagtgctgatacaaaagcactgtatgacgtaataggattcaaacctgaaacgtcagttaaagagggggtaaagaactttgtagaatggtatcgtaacttctataaagtttga

SEQ ID NO: 36370 - DNA, 177 bp, Escherichia coli; identical to SEQ ID NO: 30205

SEQ ID NO: 36371 - DNA, 492 bp, Escherichia coli
atggtcatttcacctataacgctgaaagcggcgcaggaatttatcgcacagcaccaccgacacaataaaccaccagtggggcataaattcagcattggtctgagaaataatgccggagaattgataggtgtggcgacagctggtcgacctgttgcacgacatttcgacgatggattaacgcttgaagtaaatcgcacatgtaccacaggagaacgcaacgctaacagcgcgctttatggtgctatctggcgggcagcaaaagctatgggttatcaacgttgtattacgtacacccaggcagatgaatcaggagcatctcttcgcgcagctggttttgttcgtgtgaaagagcttcctccaagaaaaagctgggcggaatcaagcgtcgccctgcggagtaaacgcgatccggtcggaaacggtggtattcctcgtgtgctctgggaaatcaggagaatgagtaccactggcattcgcatcaaaggagagtga

SEQ ID NO: 36372 - DNA, 789 bp, Escherichia coli
atggcaaataatactctcaagcttcatcgaactcattatagcattagtgagaccgctaaaatattgggctgcgatgagcaagatgttatttatattgcggatgaaaaagacattccattgtcgctaagaatgtgtgggcgatggtctttttcaaagcataaagtaagagatgtggactcttttattcagaatataaactctttgaaaaaagacaaagatggttttagttatatatctgagtttagtttgattaagattaatgaagttaaaaaagataaaaaactagtactggcgagtacaaaaggctatttccaaatgccaccaaaagttaaaagtgatttcgttttttatgaggggcagttcccggagtacccatcattgttatctccagctggtaccacctattctgaaatggtcaaatatattcaaattgactggaaaaatgatgatgggtttggatatgagggagatgcgtacctggagcgggaagatgtaaagaaattgcatctaatattaaatgatgatgtttctaatgataaatataaatcgttatcaattgcacagcaagaaagacatgctaccaagagaaatgagattctaagtgtagcattatatctttataaagaggatatggcataccgaaaggaaaatgcagcagcccttgctgaccttatctttagtcgggctgaggaattttggcctgataaaaaagagcctccgctatcacacccaattattagcaaactaatatcatctatattcaagaaaccatcatttacaaaaaattaa

SEQ ID NO: 36373 - DNA, 201 bp, Escherichia coli
atggggtttactgataatcgtccttctgctgactcgctcattgatatgaaattcattacatctgattgtctttttactgataaatggatttataaactgatttctctgggacgttttcctaaaccaatcaagttaggtcgtatgtcccgatggcgtgctggtgactactatgcttggcgtgatagtcattcttcagagtaa

SEQ ID NO: 36374 - DNA, 978 bp, Escherichia coli
atggataaaactacggctgctcaatttgagtattggaggaatgaaacagtagccttccttgctcttacatccattaagggagtgagctattggactttgaggaaaattgctgagtcaaaaatcggttttaaagaaatactaaaatctgcggatgtaaacagattagcaggctttcttagagttgcattacccaatgaaaatgaatgggaaataatgcaacaaaatctttggaatgatggtattgaaaaggcaagggagcttagcaaaagaggaattaaacttgttttctttgaacatgagtctttccctaaaagtttgaaagaaatcccagaccctccttattggatatttgttgaaggttcacttgaaaatttgacatctaaatccattgcaatagttggcacgagaaagccgactgatgatggtatttttattactaaattagttatttcatctattgtcgatagagggttcgtaactgttagtggtttggcctcgggaatagatcagattgcacatatcgaatctttacgatacggtatccccactgtggctgttcttggaaatggtatatttaatgagtaccctaaaggttcaaatttattgcggaagcaaatcgttgaacatggtggaaccataattactgagtatttacctagacaaagctatagcgccgaaaactttgttcgacgaaacagactacaagctgctttatgtcaggtattggttccagctgaatggaagataaaaagtggtactgcacataccgttgattatgcacatcattatggtaagaaaattgtcaatctataccttccattaacatatcctgatagaccagagttagatttttcagctaaaaatagaaatgccaaaaattatgaaatcccaaatgaattagtagcggcaatagattatattgtttccgacaataaattggataatttaaaacctacacaacagactcttgatttatag

SEQ ID NO: 36375 - DNA, 1224 bp, Escherichia coli
atgactagaataaagggcgttattctaagtgttgagggtaccatttgtccaaacggtacattagatgaagcaatattttcagaagtagataaattaataaactattttaagtctaagaatatagagtttgttgtacatacaaatcgctcttggacctataataaaactaataagcttgaagattttctcaaggagaaatggggggattttagttatgtctgctatgcggatgataataccattcctccgaagcctcgtgcagagtcaattgaatatatattaactatgaaaaagtgggattcattagaaacactttacattggttcgactgatgatgacatgagaacagctgtaaatggggaacttctcttccttagagctacatggtgggcgaatgctactgattatggttttgaattttcaacgcctaaagatattgcaagatttatagataccttctgccttcgatcacatctctggtgtcatgaaattcatgatggggattttaatttttatgccttagccccattcagcacaatgaaagaggagtatacactatattctcaggatgctagaaatgctgccaagcatggcaccgggcatcccgatttttggattggagcgatagtttccagtttatattttagtgggattcataaaaaaatagattacgtaagtgtttatccggggcataaagctggatatggtaatccggtaatggatgaggctatatctatttttggtaaatgcttccgtaaaaattatttgcctgatttaattatcaggcataaagatgcaatcaaatctcaaacagctaggaataataggatcgcaattgactttctgaaccaattgaataccattcatttgaattttaagcctatgcgtagtgcaacaagagcttatgttagaagtcctttaggtcccggtaaaacggttcttttaatagatgatataactacaaaaggatacagcttggaatcaggaagagcttacatcgagcagactggttcaaaagtaatattggcatcatggttaaagaccataaatacagatattgatgtgcttgctcctttgggccgatttgatccatatgttccaaatcaatttgaagttgcacgagtcttaaaacagcattcatatcgtcaaaatatcgtagatactttagctccagctgaaatatcagctatgttggaaagttatactaactgggagtggcaatag

SEQ ID NO: 36376 - DNA, 513 bp, Escherichia coli
atggcgcctgtcagcccgcgcgaaaacccgggcaggctgcgcctgctggagagaaacgtcgccgcgcctccggcgccgcgcactctcctctccattgtcagtcgctgttgcccgggaatgcgcccgaatataataaacccggagatgagcagcagaagtgatacttatagtcagtgtgtccagggtggaaattttatgcgtatgtctctgatgtttgcagccgttacccttttaaccggtattaacctgttgtttattctgtttcagcctgtacctgctctgtgggggggaatcctggccgttgcttttatcctgatgaatgtcctggcggataaactgcgtctctggagtggcattgcatggattatcattgccggcatcatcatagcgttgatgctaaaggggaaggagccgggtgacgaattaagagtgctgatcactgtttttgcttttctggcttcggcctggtacagcattgtgcagtacagaaaagaaaggcattttcgctcctga

SEQ ID NO: 36377 - DNA, 672 bp, Escherichia coli
atgtgcggtcggtttacacagtaccactcccgcgaggagtacctttcctttctcggagaagaagcagaacgggacattccgtatgatccggaacccgtcggccgctacaacgttgcccccgggacacgggtattgctgctgagtgaacaccgctcgcaactgcatctcgatcccgttcactggggttatgccccggagtggtggaacaagcccgcgctcatcaacgccagaagtgaaactgcggccaacagccggatgttcaggccactccaggagcacggacgggccatcgtctttgcagacggctggttcgagtggaaacagcaaaacggcgtgaaacagccgtttttcatttaccgtaaggacagaaatccactcctgctcgcagccatcgggaaaccaccttttgagaacagcaatgaccaggaaggattcctgatcgtcacggcagctgcggatgatggactgctggacattcacgatcggcgaccgctcgtgtactcaccggctgccgcacttaaatggctcagcgaaaacacaaccggtaaagaggcagaagacattgcccgtgagggcagtctttccgccgaagatttcacatggcaccccgtcagtcgggctgttgaaaatccccggagccagggtcgggaacttattgagccgctggcttaa

SEQ ID NO: 36378 - DNA, 216 bp, Escherichia coli
atgaacaagaaacctcgttatgcagtcatgctagaagggaataaaaccatttatcgtggtaatagtcgctttgttgcatggacgttatggctgattaaccgtcatcgtaaggcgatcgcttatgattgcggaatttgggttgtggagccaggctactggattcgcgttacccgaactgaaaaatcagcaagtacaccagactcaataaaagcataa

SEQ ID NO: 36379 - DNA, 600 bp, Escherichia coli
atggaacaggatgcgcttcgttcaaaaaacaggctaaaagaattcgcagcgcttcatggccaccgaattgctggctggtatgtagaaaatgctccaggcgcatccctgaatcgtccggagctcgctcgtatgctttcagatatggagccaggggacgtcattttgatagaacaggtggaccagttatcccgcctgaatgatgctggctgggatattcttagaaaagagatagcagataaacggttatctgtagtcagcctcgatctcccaaccagccatatggccctgaccaacgctgtcagcgatgacttcacaagaagtatgttgaaggccatcaatagcatgatgctggatatgcttgccgctattgccagaaaagactacgaggaccggcgatgtcgccaggctgaaggtataagtaaggcaaaagcagagggtagatataggggcagggtagccgatgcgcagaaacatgaactgatacgcactttgcgcctggccaacggaaaatcactgcgtgaaacagcccggttagctggcgtatcaaagatgacagtaatcagggtctgtaacggcaatcataaacaggatattgattga

SEQ ID NO: 36380 - DNA, 576 bp, Escherichia coli
atgaaccacacaccttatcccgtagttttagatgcttgcgtactgtacccatcatttctacgggatttactgattcgattggggctgaccgggttgtaccaaccaaaatggtcagccagtatcgaaaatgagtggcaacgtaacctgttagcaaacagaacagatctaactgaagatcaaattaaacgcactgctacgctaatgaataaggccgttcctgatgcgatggttaccggctttgagcctctgattgatagcattgatttacctgatgtagatgatcggcatgttgccgctgctgctgtccgtagcaattctgaaatcattgtgacgttgaatcttaaagattttccggcacctgttcttgatgcctttggtatcgaagcgttgcatcctgacgattttgttatggatttattcgatttaaatagagcacttgtgctttcggccgtaactacgcagcgcagtcgtttacggaaaccgtccgtgtcggttgatgaatatttagaagcgctgctaaggcaaggtatggcgcaaaccgtaagagaattaagcaaataccgcatgctgatatag

SEQ ID NO: 36381 - DNA, 462 bp, Escherichia coli
atgacaaactcaattcttgatagccttagccttccggctaaaggggagattgaggcggctgtacgtggacaaagggagcttgccgcctacctctccacaaaaatggaaacacagaaaatttctattcaggatgcagataacgtaactcatcaaatcgaactaccgacgtcttcactgacgttgcttatatcgattttgggtgaactggcacttggtaacgcggtgcaagtcgttcctgtgcatgctgaattgaccacgcaggaagccgccaatattctgaatgtttcacgccctcatatggtgaaactgctggaagatgggaagctgccttttcataaaacaggtcgccatcgccgcgtgtttttcgccgatttgatgaagtataaggatctgcgagatagcgatagcaataaagctatgcaggagttggcagatctaagccaagatcttggacattactaa

SEQ ID NO: 36382 - DNA, 876 bp, Escherichia coli
atgagttctgttcttagccaggagatgaataccttatcaaaattatcgtatcgggttgatttgaatggaaaaaaaactgatggtgagatgttttttgccaggacttatgatgatcccgagcataacgatgggttttctttaaaccgggttattacggatataacgacacctcaattgacagttttcagaccagaaaaaagtaacggcgtgggaattctggtaataccgggtggtggttaccaggcggtaatgttcgataaagagggaacagcattagcgccattttttttatcaaagggatatactctttttgtgctaacttatcgccttccgtcacatgataccaactcgggaaaagacaactctgtaaatgatgcagtacaggcattttctcttattaaaagaaattcagcacaatggaaccttaaaaaagacagggttggtattctgggcttttcagcgggaggacatatcgctgctgctgttgtatcacatgtcagcaagtacgaacaatgtgaacgccctgatttcttagggcttatctatccagttatatctatgagtgatgaaattactcaccctggctcaagagaaaagctgttggggtcaaatccttctacaactataatcaagaaatacagtattgaacattgcgttacaaagaactttcctcctgtttttcttctgcactgttgtgatgaccttctggttcctgttagcaatagcatcagaatgtatcaggcattgctgaaggaaaaaattccggctgagatgcatttatttgaatcaggaggacatggtttcggcatccagtggtgtcagggattacctgtgcgcacatggcctgatctgtttcataattggttagaaaactga

SEQ ID NO: 36383 - DNA, 732 bp, Escherichia coli
atgaaaaacaacgaaaagaaaaaaatcagcgaactgacagctaaaagaaaacctgtcgtgacgaaaaaactctctgacatcgtggctgaagagctggaagggatgatacgcagggaggagctcagggagggcgaatttctcccttcggaaagagaattaatggagttttttggtgtcggtcggccatcgatcagagaggctcttggggcactcagacacagggggttgatcaaatataataagggagaaaaagccagtgtatcacgcccatcagcggaaacaatcatcaacggtttatctggtattgttaaagattttttagccactgaagatggtgtgcttgagtttgaaaagttacgcatcttttttgaaacaaaccttgctcgttatgcagctaaacacgcctctgatgaggatataaacagactaaaaaacattctttctgttcatcacaacagcctgaaaacaacggatacttatgctcattatgatattgagtttcaccgtatcctcgcggaaattccacataataaaatattgaagacaatgcacacagcattttctgaatggctgatcatggcaaaacctatgaaaaaaaatatgatgacatacacacaaaataaaaaaacgcatttacagcatatggaaatactccaggccatcatagatcatgatgctgataaagccgaattaataatggaaaaccatcttcaatgcagaatcagtaaatag

SEQ ID NO: 36384 - DNA, 1053 bp, Escherichia coli
atgcatactgttgaaaataaaaacaatccaaatcaatcctctacagagattgatttttggtacgttcttccgttggctggtcagtcaaatgcaatggcatacggagaaggattaccccttcctgattcactggatcgtacagatcccagaattaaacagctggctcgcagaacatcagtaacgcccggaggagagcggtgtcattataacgagataattccagccgaccattgtctgcatgatgcccaagatatgagctcctacaatcaccccctggctatgctggagaaaggagaatatggttgtgttgggcaaggattacacatagcaaaaaaattactgcctcatattccggataatgccggcattcttttagtgccgtgtagccgtggtggagccgcttttacatcgggagaaattggaacatttcatccttcctctggcgcaagtagtaactccatgcgttggggtataaatatgcctttatacctggatttagtctccaggacaaaagctgctctcgattcaaatcctcgtaatcagctcctggctgtatgctggatgcagggagaattcgaccttatgtcagaaaattatcaggagcaacccagattatttaacagtatggttaatgctttcaggaatgatcttcaggaatactccactcgttgtacatcgggtgatatctatcacgttccatggttgtgtggggataccacatggtactggaaactggaatacctgtttccctatgcctgcatatatggaaattatatgaatcaatccaggggccgcttcaccagggacttgcacgtttacttcattagttttcagaaagatggagagagaggactgactaatgagccagaggaagatttagataacccatcctgcggttatctgggagcaggatggagatctgagtcaaactggacaacctctttaagaagtagccatttcagcactcatgcccgacgtggtgttatcgcagaacgctttgcaaaagcaatcacggaattgattttgcaaaaaaaacataaccatatgaaataa

SEQ ID NO: 36385 - DNA, 900 bp, Escherichia coli
atgttatctgaactaaaaggagtcatttcagcattaccgactccgttcgataatgcacaacaggttgatactgatagtcttaaaaaacttgtacgctttaatatcgaacaaggtatagacgggctatatgttggtggctctacaggagaagcattcttacagaatgtatcagaaagagaaaaagtacttgaaacggttgctgaagaggctaatggtaaagtgaacctgatagcacatgttggagctatcagtactcatgacagcctgatactggcaagaagcgcagcaaaatatggttttaatgctatttcagcagtaacgccattttactatccttttagctttgatgaacattacacgcattaccagaccattattaatggttctgatggtctgcccatggttgtatataatattccggcgttaagcggagtaaaattatctatggaacagataaatatgttgataactctccctggtgttcatggattaaaacaaacatcaggtgatttattccagatggagcaaatcagaagacaacatccagatttagtattgtacaatggatatgatgagatttttgcttccggaatagttgccggtgctgatggtggtattggtagtacttataatatcatggggtggcgttataaaaaaatactttcagctattgagtcaggggatatattgaccgccagacaagcccagtctgagtgtaataaggttattgatacactaataaagacaggcgttcttgccggaatgaaggtgttactgaactatatgggaataataaacacccctgtctgccgaaagccattttcaccggtacatcaaaaatatcttcctgaactttatcagttagcccagcacctgatggctgaaaaatataattgttag

SEQ ID NO: 36386 - DNA, 939 bp, Escherichia coli
atggataacaccgaattcatccggataaatacagaaaaaaacaaaataactggtcaccttatggctactttagcaatagatatcggcggaacaaaaatatcagcggcaatcattggccgggacagaaaattaatgatgcgccggcagatatctacactacacaacagaagcaaaatccatctggaaaatgcgataaaccagttagtgactccactgcttccttttacctcctgttatgcggtcgcagctacaggcattattaataacggtgttctcacagctctgaatccatcgaatctcggagggttagacaattatcctctggaagaacatttaagtcatctcaccgggttgcagggcatatgcattaatgatgctcatgctgctgcctgggctgaatataaatggatatcagaaaagttaaataacatggtttatattactgtatcaacaggtgtaggtggggtaattattactgatggtaaattactgttgaataaaaatggacttgccgggcatttgggacatctgctttcagatataaatggtcctgtatgtggctatgggagaaaaggatgtgttgaagccattgcatctggctctgcaataatgaaggcggcacatgataaactttcaggactaaaaacaaaagaaatattcttatatgcagagcaaggagatccggaagcaatttctttagtagagaactcatccagatccatagctggattaatcgcagaccttaagatgatcacagattctcagctcgttgttatcggagggagcgttggtcttgcaaggggatatctggacagagtttctaaacatctatctgaatacccatctacttatcatataccaatatcaccggctatatataaacatgacttggggttgttaggagcggccatatgggctgaagagacaataatgccctga

SEQ ID NO: 36387 - DNA, 918 bp, Escherichia coli
atgcccttgaattcgatactgttgacggcaagcctttttctggtgctaaaaggcatagccctgagtaatatctggtacagatatatgaaacaaaaagataataaaaatttatcatgccagtatgcaagtttctgtctctttagtggtcagccactaacgaatgacagggggtatcattctgaagaaactatcatatctgatataaagcatccggttcttacgattgtatcctcagaacaaacgaatggtgttggtattcttattatccctggtggtggataccgccgacttgttcatggcaaggaaggactttcagttgcaaaatatcttgcatcaaaaggatattctgcttttgttctttcttatcgaatgcctgttcctgttttagggggaaattatgcactcagtgatgctaatcgggcccttgagtttataaaagaatggtcatcccggaatacagtttcactgaaaagtctgggtgttatcggcttttccgccggaggtcatgtagcgtcagggcttgtgagtcataactatcatcacagaaattttattcgccctgacttcctggctcttttatatccagttatctctatgagcgcgaatatcgctcatagaggttgcagggataaacttatcggaagtgatggtaatgaagatgatttcagtattgaactaaatattccatcagaaatgcctcctgtatttattattcatgcaactgatgatgatgatgtctgtgttgagcactctctaagactggcagatgtacttctcagaaaaaaaatctctgtagatattcatttatatgagaaaggaggtcatggatttggtttatcagataagacgaaattacctgtaaaaggctggaaagagatttttttaaattggttatcttttcataattttaatagttaa

SEQ ID NO: 36388 - DNA, 711 bp, Escherichia coli
atgaacaagtcaggttatcttattgctgctttttttcttggattaccattgtgctctcaggctcttacactcaaccttcggggcggatacagaagtgccagtcatgcctatgaaacattagtacaggttagccagggatggagtaacggatggtgggcaagctttgaatcaaatagctggaatacgattcatgataacagtaacgagcttttggctcttaactatagtaaaatagatgtaaaccatacagttaaactgaatgataactgggcattaatcccgggaattcaaactcagtggatgtcagcagggagtcagtataacccttatctgaagctttcttatcaggttaatccatctcttaatcttgcattacgctatcgttatgactggaaagcatttcgtcaaattgatctggatggaaatcgagcccgaaatgatcaacatcaggttgatggttatttgacttatcgtattagtgatgactggttgttcgcatggcaaacaactatatatactaaagtaaataattttaaatacactaatcataaaaaaacagcaactgaaaatgcatttgttttgcaatatagactatcgccggtatttacgccttatattgaatacgattatctggacaaacagggagtatataaaggaagggataaccttgctgaaaacagttatcgtgttggtgtacttgtgaatttttaa

SEQ ID NO: 36389 - DNA, 1107 bp, Escherichia coli
atgaacgtcaaattattagcagcaattacaggtataatacttgcttcaaactgttatgcagaagtattaccaaaattaccagaaccgtttaagtacggtgcaggtgtacttctgaatgatacaatttacattggtctgggaagtatgggaaaacactggtacaaaatgaatctcaatgaacagacacctaaatggacagaagtttctgactggcctgatatcccccgggagcaggctaccgcaacggtagtaaatgggaaaatttatgtttttggcggcattggtaaagataaatcagatgtggttaagttacaagatgatgtttattcttatgacccattaaaaaacgaatggaaaaatatggggacacgaccaccggtgagtcttgcagggcatgttactttttcttataaaggaataccaatatcaacaggcggagtaaacaaaaatatttttaatgggtatttctctgatataagaaatgctggagatgatatagcaagagtaaaaaaaataaacattaattacttcaacaaacctgtgcctgactattttcttaacagacaggtgatcgcgtgggatcctgaaaatggactatggaaaaatatgggggagttaccttttacaggaacagcgggttcttctgttgttgcagatggaaacaaaatctggctaattggcggtgaacgaaaacctggtctccggactacagctgtatggtcaggaatgattcagaatgatggaataaaatggactaagattccgccagtcgcgtcacctgatggagtttctggtgcttatgcatcattaattaatggcaatgtagtgctcgccggaggtgcaaactttcctggtgctgccagaaattatgcaaacggtaaaaactgggcacattcgggattagaaaaaaattattcaaaagatatttatattctaaaaaataaaaaatggtctaacgccggcgttttaccaaatggcctcgcatacggagtttctcttccatggaaagatggtatgttactgcttggaggggaaaccacagggggacgcgcaacttctgatatttttttcattacggaaaaggctaatcagttagtcattaattaa

SEQ ID NO: 36390 - DNA, 609 bp, Escherichia coli
atgtttaaaaggaatatattacttgttttgttgtcactgttactttccgcatgtagctcaaaatctttgtttttaggtgattattataacgctgacttagatgataatatgtgcttttacaaggaagatagtttttttcacccatccaggaatggcacctgtatctttgagtctgataccgtcataggaatgagaagtaataaagagagcttcctggttttattcggaactattgcttcatcaactggatatacagctgtttatgatgtaaacagaaataatgtcgatgaactatcaagtatttttatggattttgttaaatggtcccagttgaataataaagaaagagagagcgaagctgcattatttaataatagctctgcttctggtaataaggtagcaacaaaatggaatatagaatatagctatttaaacactgcacctaaaacaatgaattacaataaatataaaaacactcctttattaaagataaataataaaggcagatcatatttaggtattcctctggaagaaacgtggttattaacaccagaacaaacaattaaatttgtattagtaataaaaagaacatcaatgttcttaaaatag

SEQ ID NO: 36391 - DNA, 2472 bp, Escherichia coli
atgaaggctatttccctaaaaataaacacagaaaatggtaatacagtacaatcttttataatttccacgaaaaaaggtaaagctacggtcatcaaacaaccagagggaaaaattacatttgagttgattgatgattccactcagtttgcccctcaagttatttttgccaaacgtaatggtgataacttagaaattgcgtttgacgatgaacaaagtcctcctcgtttgattattgaagattactatactaatgatgaactaagccctgttatcggtttagctgagaataattcctactatgcttattttcctcaaagtggtgaaagtattgatgctattgcatcattacagcaagatgctattgccgctgaagttcttggtggggagccttttgttgtgccgtatttaccgcattgggggtggatgtttgcaggattgggcttaatcggcttgggggcagttatcgcaagttccaattcatccagcggtagatcatccaataatgataccgacgataatgacgcattaaattcagccaagagctcactggacgaagcccagaaagcagaccaggccgccaaggatgcactgaccaaggcgaatgaggacggcaaaattactgccgaggaaaaagccgatctggaagcaaaagcccaggacgcagctgacaagaaagccgacgcggaaaaagccatcgaagccctgccggcagacaacgccgataaaccgggactgacagaagagctgggtaaactggacggcattaccgtaccggatgtcaccccgaccgaagacccggcaaaagacgcgaaagccgcgctggacgaagcccagaaagcagaccaggccgccaaggatgcactgaccaaggcgaatgaggacggcaaaattactgccgaggaaaaagccgatctggaagcaaaagcccaggacgcagctgacaagaaagccgacgcggaaaaagccatcgaagccctgccggcagacaacgccgataaaccgggactgacagaagagctgggtaaactggacggcattaccgtaccggatgtcaccccgaccgaagacccggatgatgaaaaagatccagtggatgataaaggtgaagataataggcctacagtagaaccaaacacgattataactggtcgtacagtacctaataacccaagcaagtttgtggttgataagattaaagccaaaaacccgttgtctgaggataagatcggagataaagctcagattaacactggtggtagtgatgatttagttgtagtcggcaacggaacaagcaaaaatgatattgatggtaaattaagcattactggtggtgaaatcaataccaatgctggcaaggattctatcattattaccaataatgcaataaatacaaaattcaacacaggggctgatgatgataaattagatgtttatggaaatttgcgcacttcgacagtcaatatggatactggagatgatgtattaacggttcggggaaaacttggcattggtaatacgattaatactggtgatggtgctgatactgtaattgtagatggtggtgtaattggctacgcgaactctgctagtcatgaaaaagacaaacacaaaacctggaacaaaattgatctgggggctggtgacgatagtctgtctatgggtgaaaatggttccagtaatattcagtttaccgaaattaatggaggggatggtaatgatactgtaactctgaaaccaaatcatggagccggtgatttattctggatgcatattgatcttggtaacggtgatgataatctaatagttgaagccagtgacttgcgaatgacttatattgatggtggagaagggaatgacgtcattgatttaagaaatgcacaatttactacaacattcaaaacccacgttaatgatactcgcattgatggtggagaagggaatgataagattatcttaggtgaaatgggctatactttagatcaatattattaccgtattaccggaggtgctggagatgatgtgattgagtttactcaagattatagtgcgattgtatataataatcttggtaatgaaatcaataaaaaccataaccagcacgatattcgagggggggatgggtttgatactattgcgattagcggtatcgaaacaacggtaaacttacattcaggagaatccataaataacaggccggacggcttaagagagtttgaagctgttgatatgacagctactggagggcagaaagttgtgttgaaatcttctgatatattggcaaattcaaatactgaacctctatatattgccggtgatagtaatgatacggtggaaatgggggaggcttttgctaaaggtactgaaacaacaacccgtatcgcattagatggtaaagaacataactatacgctctacacctctacagatggcgcgaaagtgtttattgatgatgcaattaccaatattatctga

SEQ ID NO: 36392 - DNA, 366 bp, Escherichia coli
atggttgttcttcgtacgttaccgggcagaatcaaagctctgaacacctggcgggtgaatgtcctgaagggtgaacagcgtcgggtcagtggcagtgtccgggtttccctcaagcgtcgtatctggctgagggatgccggacagtgctgtctctgtgggcgtgtggttgacctttgtgacagtgaactcgatcaccgcattgcacttcagttcggtggtggtaatgaagagacgaatctctggacgctctgtaccgaatgccatcgccagaagtcagccagtgaagtggcgagtggtatgccggacccgacgttgccggaggtgtccggagatagtggtagaacggatgagataatcggactgtga

SEQ ID NO: 36393 - DNA, 561 bp, Escherichia coli
atggtggataacatcacagagatgctgaacggaaataaagtggaatggcgcagctgggcctcatccatattgcaggaaatatcaaaagtccttatgaatgcggccattgtcaacgggattaagatggcggcaaacagcctgtccggagccggaggatttttcggcagcattggtgactggctgggcggcgcggtggcgaatgcaaaaggcggcgtgtatacctcagcaaacctgagtgcatacagtaacagtattgtggacacgcccacgtactttgcctttgcaaaaggggcggggctgatgggggaggccggacctgaagccatcatgccactgaccagggcggcagacggttcgctgggcgtgcgtgcggtgggcagcatgaacggcagtgcgggtctggtgtattccccagtctaccatattgccattcagaatgacgggagcaacgggcagatagggccggaagcagcaggcagtcttgtacaactgattgaccagcgggtgaaggcggtgatgctgtcgatgcgtcgtgacggaggtatgctgagtggcggataa

SEQ ID NO: 36394 - DNA, 396 bp, Escherichia coli
atggtaagcgcgctgtatgccgttttaagtgcgttgttattaatgaagttctcttttgatgtcgttcgcctgcgaatgcagtaccgcgttgcctatggcgacggcggttttagcgaactgcaaagcgctattcgcattcatggtaacgcggtggaatatattcctatcgcgattgtgttgatgctgtttatggaaatgaatggcgcagaaacctggatggtgcatatttgcggcatcgttttgcttgctggtcgtctgatgcattattacggttttcatcaccgtctgttccgctggcgacgttctggcatgagcgccacctggtgtgcgctgttgctgatggtgctggcgaatctttggtatatgccctgggagttggttttctccctgcgttag

SEQ ID NO: 36395 - DNA, 1239 bp, Escherichia coli
atgactgcgaaagatcaatttgctgctcatgttggtttggattgggcggataaaaaacacgatgtctgcgttcagtttaaaaacggtgatcgcatattccatgtgattgaacatacgcctgaggcacttgatatctggctcaatgagttacaccagagggcgaaaggcaggattgctattgccgttgagctgaagaaaggcccggtggtgtatgcactccagaagtacccatttgtcactgtttttccagtacacgcgttgtcactggcccgctaccgacaggctttctggcccagcggtgcgaaggatgatccgcaggatgctgagctggcattagacctgatgctacgttatccccacaagataaaagccattgaagtcgacaatccggatatccgattactccagcaattagttgagcagcgccgactgctggtcgaagacaagcgtcgctttgttaatcggctcatcaatacgcttaagcagtattaccctcagcccctggaatggttctcccatcgggacagctccctgttctgcgagctaatcattcgctggccgagtctgcaacaactcaaacgggctcgcagcgatactgtccgtcattttatgaatgctaaaggtggtcctgctgttgcatataccgaacagcgggttgcaagtattgccagcgctattcccctgaccacagataaaactgtcatcgaggcaaatgcattgatggcaacagcacttgcatcccaaatcaaactgacaggcgacctaatcagaacctacgatgaacgtattgaatccttatttgatacgcttccggatgcagaactgttcaaatcacttcctggaatgggaccgtgtatgggaccacggatgcttgcagcactgggtgataaccgcgaccgcttcaacagcgccgaagaaattcaaaactacgctggcatcgcaccagtaaccgaacgaagtggtcaaaaatcctgggtacactggcgttggcagtgcgcgaagttcgtccgacagacattcgtggaatggactgcgaagacggttaactcatcgtactgggccagactttattaccagagccagcgagaaaaagggaaatctcatcagtcagcgatccgggctctggcatttaaatggataaggatcatttaccgctgctggaagaccagaacccggtacgacgaagcgaaatatttgctggcactggaagcgcgaaagtcgcccttactgaagccataa

SEQ ID NO: 36396 - DNA, 537 bp, Escherichia coli
atgaaaaagctgattttaggttcgacaattgtagcagttctgggtgtggcgtctaatgctatggctgcaccaaacagtggtactgtaaactttatgggtagtgtttctactgctacctgcgatctttctttgaaagatagttctggtggggatatttctaatgttaatttaggtgtactttcaaatacagcgacgggtaatggtacagctgtcccatttaaattagtcccccaggatgcaggttgtcttgctaaaacttccgctaatgtatcttggtcatcttctacactgggttcagcaggtatcagtaacgctacaactggtggtaccaatgcttatctgctgatttctgcaactaatgcaactcaaaatggtactgctgctgtaattaaacaaggacaaacttctttcgattatactgttgcgagggggggaatccaatcttttgattatagcgctgtgcttgcgaaaccaacagcagctcttactgctggccaattcaatgcttctgcaagctatgtcgtaacctataaataa

SEQ ID NO: 36397 - DNA, 2358 bp, Escherichia coli
atgaaaataaaagtattatgtgtcgctatcatttttcatttatggtcgaatgaaattcttgccgacgattttaactacagttttatccgtggtggcagcaatgaagttcctgaggtgttaaaaaataacgggcaaaatatacccgggaaatatgttgtggatctgctatttaatggttctaaaacggcgacctctgtacaattggtaatcggcaatgacgattctgagaatatttgtctttcagataaatggttgcaagaaaacggcattaatataaataaagaattttacaaagcgtatattaatcccgaacgcaactgctatcttatcgataaagaaaagaacagtcggataaaatttgatccttccttgcaggagttatcaatcgatatgcctcaggccggttttatcgattcaaaaaagaaaggcgacacctgggattatggtagtactggtttcaaactcgcctatgatcttaatacgtcaaaatctactgaccagaaccggacaacatatggtaacatcgagggtcagatcaatatcggagaatgggtcctgctcggaagagggtatgcatatcagggagaaaaatttcagagtaacaacctcctgttaacgcatgcgataaaatcgattaaatcagatattcttatcggtaaaacccagtcctataataccctgaacaatggttttacctttttaggtgcgcagttaaagtctaatcaggatatgtatccctgggactcgcaatcttatgcgccggtcattaatggtattgccagaacgcatgcccgtgtcaccgttgagcaaggtggttacaccttaaagtcgttcgtggtgccgccgggtccttttgtcattaacgatctgaccggtgtatattctggtgaccttattttaaaaatttatgaagaggatggctcggtaaaagaacagcgattccccgtcgccgttctaccaaacttattaaaacccggaaattataattataatatcgcgatgggtagtaaagttgaccaatacagtgacaagcgtgatgaggacagtttattcgcgcaaatgacctatgattacggttttgtgccctttacactcaatttctctgcattgttagataaaaactataacaacattggcctgggtgttatccgctctttcggctggtttggtgccgtggcaatgagcagtaatctgtcgcaagcaaaataccataatggcaaagccatgaacggctttagcgcatcggtaaaatatgctcgcgccttaggggaaaacgcgaatctgcagctaatcggttatcgctttaactcagaacattacattgattacgcggattttaactatcgctactacagcctgttaaacaacaggcctaaacagcgatatgaatcgattatcacttatcaacttccgaaaatgaatgcatttttcaacatgtcagcctggaaggaagattactgggacagttccagtgaggtgggggcaaacctgaatctcagtaagagttttgataatatatcggtctctctgaatgccggatattccagactgcaagggatggggaacgattataacgcaggggtctcactgagcgtaccctttagcgtgtttgataaatcgcactatagcttctctggcataaactacgatcgccgtaacggcacgaacttcaattccggtgtatcgggaagcgttaactctcgtctgagctataacgcttctatcagtcagtcacgcaacgctacaggcagcgcggtttcagcttcttatctgtttgataaggtacaaacgtcggccagctattcgcaaatgggaagcatgtccagttcttccttccagatcgggggaagtattatcggactacctgatgcaggcattctttttacgcctgtgagaaatgatgaaattgccgttgtgcaaatggaggatgttcctggcgtcagatttaacggttccatgcctggcgataaaaaagggcgcgcgatcattccgttaacggcgtataacaaaaacaccatcacggttaatgcagacaacttaccgcagagcgttgagttaacagaaaacgcaatcaacgtaacgccgacggaaaatgcgattatctataaaaaagtgaaatacagaaaaatcaacacctatatcgtcaaagttatcagcagcaatggttttgttgtcccaatgggaagtattgctaaaaatgcagacgatcaggaaatcggctacgtcaacaacggtgggattctgttaatgaatcttgaagataaagatgaagggatcatttctgtcggtgattgcaaatttgattcacgatcgctgcagaaagatacgggtaaagtacaggagattaagtgtggctaa

SEQ ID NO: 36398 - DNA, 702 bp, Escherichia coli
gtggctaagatcgatacgctgagaaagtttttcttttctgcgtcactgctgttatttacagcatcagggcatgcggcgtttgtccttaacagtacgcgttatatttttgatgaaaaacgagagaatatctccgtacaggttgataaccagtccactcaggaatatggcggacagatatggattgaaaaccaggatcaaaacgataagaacgtctattttgtgcccagccctacgttctttaaagtcgccgatcagcataaacaaatcctgcgtattcttaaaattaatgatgcgctacccaaagataaagaatcgcttttttggatcaatattcaggagatccccaaagcaccaaaagacggtatgaatgcattatccattgcgctgcatactcaggtcaaaatgttttatcgtccagatatcttaaaagataaaagagaaaacgctgaacagaatgtaaaaataataagcagcgagggtaacactgttctttggaatgatacaccttattattttgcgatcatcagtgttaaacaaaatggaacaccaattaaacttagcgaagatattaaagataaactttctgtatttgctcccggtgagaaagtttatctgggtaagtcagttaccagtaacagccttaacatcgtagcgtttgatgattatggagttgacaaagagtataaattaaacaaaccctga

SEQ ID NO: 36399 - DNA, 1005 bp, Escherichia coli
atgtgtaaatttattcttgctcttttcattgctttcttctcagttaattctttacccgtcatggcaaaaaactgtaccgggggaagcataacttttggtgttgatcccagtgataaaaattattggaaatatacctatacatctgctaataacgatccattattaattacgtctgtaaccataacagatggtgacatgacttgtgatcctgattatatggattataacccacaaagtcagatgattatgcgaattaccagtggaggcacttgtaaaaacggcacaacaatcacaaccccttatccaggcattgaatggcaactggagggtatgcgttgtaacaatggtaattggataatatccgacaccattaaatcaggtggagattctagccaaagaatctcctggcctgtagatactgtcttgggtaaagctagacttgtggtaactgatgaatactggagaaaaagtacacagtcgggtcagtatagtgtcgttataccggcactttctgtaggaaaaacgctatcaaacagcccagaagttgatgtccgttcttatcttggatccggttactcttttatttttaaggatacttcaacctgcgcaatgagtctctcaacagaaaaccttgattttggcagattaacaccacgtgatgtcaatggaaattcattatataaagagctgtcagtttattactcctgtcaaaataaagcactagttaatggtctttatgtacgttttgacccggagaatgtggtggatgcggcaaatggtatgttcagtgctaatgatagtgaaggaagaaaattaaacttccaaatgaaaagggtgtatgtagattttcataccgttcctcttaatgctaattatgaagtatataagccgaccaataaaaatgttgatgcgtcagcgaccttcagaatttacgtcagaccttcaagcccttttcctgtcgggaaggtttctacatatatgaatgtttcgctaatatatagatag

SEQ ID NO: 36400 - DNA, 522 bp, Escherichia coli
atgcaccgatggttggtcttttttttgataatgttatcacttcacaacgcgtctgcgtcaaaatccgtgcagaggaaaatgacgatcaacgccgagttagccttaaatacgtgcgcattgtcactttctccagcaaatctgaactttcagcaaatcagctttagccagtttgaaagtagcgcaaccacggcacagaccgttgatctgaatattgcttgtagttggcctgcaaccgggatctcactaaaattttcccccgctgctggcgtttcgacgagcagcactaacctgatgaaaacgggtttaaccggcgttgggcttgcgctgtcctggaaagatgccgctggaacggattttacggcgctagaattgaataagtcttttgcacccgcatcaactgcattgagcaataaaaatcaaaaacttggtcagttccagttgctgcctaaacaaatcccgggcgagacgctccaggcagggaatatttccaccagtctgactgtcgaggtaacctatgattga

SEQ ID NO: 36401 - DNA, 519 bp, Escherichia coli
atgattgataggacatgtctatttttcccgttaatagtcgggttgttaagcgcatcaacatcgtttaattgccaggccgcacagaaggcaagcgtaagcctccctattgcaatgcaggtcactaatccccagtgccaaatcaacaaaggacttggcctgcctgaaaccgtgcaacttccgctgattacaacatcaggtgccttactaggcgataataacgttgaagttcctattgtgattgactgtgctagtgatatcaccaaatttgaagtcaccctgacagggggcgctaattcgaaactcagcacgtcaaataatatggttgatattaccttgtcatggaagcaaggcggagggatggttgaattcgggaagccagtcgaaatgagtaaagcgccttatcttgtgagccaaaagcagtttgatggtactttattggccagcgtgtctccacatacaggtacaataccggcgggtaattacagcgccagtttgccagtgacatttacttattattga

SEQ ID NO: 36402 - DNA, 132 bp, Escherichia coli
atggctgccgcaatcctcactgagggtacgaatagtttgctcatatatgttatcggagaattggccacgtatatctgcttcgcaggcagtcagaacctggtggcgcgactgtatcgacaccaaatgggataa

SEQ ID NO: 36403 - DNA, 141 bp, Escherichia coli
atgctgctgcgcgtgaagagaagacactgtttcacgattgcttgctgtcagcgtaccgatactcagattatttccagtactgatgctgacattcttaatactggtacagccgattttggaaacgccccccaattatattga

SEQ ID NO: 36404 - DNA, 153 bp, Escherichia coli
atggaaccggtgctgaccggtctggtaagcaccacgctgcagcacaactgtttttatattgtcgtacagggcttcacacggtacgcaaccgaagaagctgaacgcattacagtgacaggcttccagcgtgccatagcacatgttgccagttaa

SEQ ID NO: 36405 - DNA, 279 bp, Escherichia coli
atgactcacctgcgttcgttgggtataaccgtcgatgttgaaatagccaactgctacgacctgcgctggctgcacgatgttgctaaccagcggaagcatgagactatccagatccgtccctgcgatcgctggctcgaagaacagcagtccatactggctctaccaccagagaaaaaacaatatcacgtacaggtagacgaaagcctggtggccttcgacaggcagccactgcatcatccgctattcctctatgacacgttctgcaaaggaaccgaataa

SEQ ID NO: 36406 - DNA, 540 bp, Escherichia coli
atggttgaacttcaacatcaacggttgatggttctcgccgaacaacagcaattggacagtcttatcagcgtaacaccagcacagttgcaacaggctgtggatcaggaatggagctatatggacttcctggagcatctgcttcatgagaagaaactggcccaccatcagcgtaaacaggcgatgcatacccggatagcggccttcccggcggtgaaaacgttcggggagtatgacttcaccttcaccacaggagccccgcagaagcaaatccagccgctgcgttcactgagcttcatagagcgcaacgaaaacatcgtgttgctgggggcatccggcgtgggaaaaacgcatctggaaatagcaatgggctatggggcggtacgtgcgggtatcaaggttcgcttcacaacagcggcggatctgttatttcagctgcccaccgcgcaacgccagggccgctataaaacaacactccaccgtggcgtaatggtaccgaagctgctccgattgctgaagcactgcaagcggtcgctcacttga

SEQ ID NO: 36407 - DNA, 141 bp, Escherichia coli
atgcctgaaattcggaatggagatatattatttattgagggcaggaaaaacattgcaacagttgaacgattattctctatgctaaagcttaatcgcgtgtttgatggcgtaataatactcggaaaacatgagtttttttga

SEQ ID NO: 36408 - DNA, 849 bp, Escherichia coli
atgaaaagtaaactaaacaatattttttcaaaaaagagagcaccccggacattagttgtttcaaacgaagtgcaattgcatagttgtgctctactgtatatacataatattgcgctatgtgagctatatttaaatggaaacagaattgaatctgcagcccagggggcattgttttttattgacagaggaacgaatctgagcattcgtataaaaaaacatacattacaatcatcatatcacttatatatacttggtgatgatgagttacaaagttcttatgaatggctacaatcatatttgtcctcagaatatttgaagcaaaaaattccctcgttagcatctaagacttttatgtttgttctgaacgagtgggagaaaaaattgtttctccagcttcacaataaaaatgtaacaatgcaaaagaaacatgccatattaaattattttttatcatgcatgccagataatgacattattttttcattaatctctctgagcgttaaaaaatcattctcaagcatgattagaaaaatcatacttgagaacatatccaataactggagggtaaatgatatgtgtacaattataaacatgtctgaatcaaatattaagaaaaagttatcttgtgaaaattatacatttaaatcattacttcttgaaaccagaatgaattatgcagcaaaaatgatattaactactgataagcatattaatgtaattgcatccagtgttggatatctaagttcatcatattttatcaagacttttaaattgcattttaatatcaccccaaaacaattatcaattcaatttaaaaaaagttatgctgctggaaattataatagctaa

SEQ ID NO: 36409 - DNA, 570 bp, Escherichia coli
atgaagattaaaacaattagcgctatcgctgctctgatgttaaccggtagtgtctatgcagcgtctggggatgtcgttggtacgcaagatgtaactatcaatggtagcattgtgaactccacatgtaatgtatcatttccaaatgattatacatttgcacctattaatttaagtgcctggaaaagtgcccaaattcaagatgcgcttgactcacaagaaattggtaacattacattatccggatgccctgcatcaacagagtttagctataagataacaacaccacatgttactcagggcaacgtctggcaagcaaatgcagttacatccgatacgggggatgttattgaggctgttggtttaagaatgatgttgggggctaacgatattagtaaggtcgcaaaactagatggtaccgttcagggattaggtacttctgatgcgaatggaaatttgactgtaccagtttatgcagccgtagttaaacgtggtaaccctgtggctcaagatggtgcagactggactggcaactttaaaggtgtctttacatatactgtttcctataaataa

SEQ ID NO: 36410 - DNA, 483 bp, Escherichia coli
atgtatagtagaaaaatatacttaagatggagtaattttaacgaacaatttattcctacggcattaggtcctagtgaagatttgaggtgtgttccaaagcagggatatggagctagtgaaattgccgcgtggttatcgtcagattttccaaatggtatcaactctattgatatttggattgaaaacctaatcaacctaggttcaggaataacaactgatggtaattttgggatgggtaatgctcactgggttatggtgactcaagacaaagttttcatcggctgtgaatatgttgaagagcagcaagtacttttaactattgagcaaacattatatgtactggagcagtatcgtttatttttggaaggatcttataccaaagatttttcaccagaaccaatcgatgttgagtatctagcagaaggcagagatgcaatcacacagtatgaatctttagaaggtgcatattgcttgccatattaa

SEQ ID NO: 36411 - DNA, 372 bp, Escherichia coli
atgtttgataaagagaaagagcagaactgggtaaaagagcagcaactgcttggtgaaataggtgtgcaggccacagatattgcccggacacatgccaaagctaatgcaacagaaaaagcaaaagcagattttcagggtaaaaagccaacagtggctgaatttaatcagcgggtagaggaatatctgacagagccaggtttcggcaacggcggtaagtatacccgtgccatgcaggcggcaacggcagcggttcagggcgtgatggggggagacctgaaggcggcgctggcgaatggtgcagcaccgtttatcgcaaatgaaataaaaaaacagatcccggaaactcagatggttcattctcaggtttcctag

SEQ ID NO: 36412 - DNA, 261 bp, Escherichia coli
atgaaaagtgatttcagtgttgatttttttagtgattctcgatatgaagcactaacagcagaaatatcgtataaaggacagatactctgccaaattaatgtggataaaggtcctaatctagttgaagtggaatttttttttgatagtaggctattgcaagaatctgtagaaatgaagtttccattagatgtatttatatcggtattaaatgaaactaaattagaggtgaaaagtttcatcaccaaagggggtaaaagataa

SEQ ID NO: 36413 - DNA, 393 bp, Escherichia coli
atgacggatagcgagaaggctgaatatggtggtgctggggcaggctctccgactccaccagaaaatgagcatgaaaaagaagaaagtaagcctgttgataaacttaatcaaaagcaagaaagtgctatcaagaagatcgataacactataaaaaatgccttaaaagatcatgatatcacaggaacgctcaaggatatggatggtaaccctgtacctaaggaaagcggtggatattgggatcacatgcaggagatgcaaaataccctcaggggcttaaggaatcatgcagacacattgaaaaatgttaataatcctgaagctcaagcggcatatggtcgcgcaacagatgctatcaataaaattgaatcagccttgaaaggacatgggatatga

SEQ ID NO: 36414 - DNA, 387 bp, Escherichia coli
atgattactttccgtaagttgataggaaaaataaatttaaaacctgattctgttcagaaatcatcgcttgaacaatggtttgaacgtgtgattgatataccaatagaagagctgtccgtagaagatatttgtcgtgctattcgtcaggatctctttatcgaccagctaatgccaagagtattacaaatattggaggaggacccattggcgggagaatattacgatggtgaactcattgcagctctggcaacagtaaaagcaggggatctaaaagatcatatggactgttttgaacaggttaagttgattataaataaaataaatacttcagatattgataatgaactaagaaaagatatattgaaaatcactaaaataggtacgtga

SEQ ID NO: 36415 - DNA, 927 bp, Escherichia coli
atgcttgatcgagttgttgttgagaataactacctgagcgtgtctgaaaagacagagcttgagatagcaaaacagacgcttaaaaacagtaaaaatccggcagagcgtgaaaaggcacagcagaaatatgatgcattgcttgaaaaagatattgccagtgataaggaggttattgctgtctgcggtgatggtaatgcgggtagttcagcgtgtgccagcgcaagactgaaagttattgcgtcgaaagaagggtacgaagatggcccttataactcgaaatacagccaacaatacgctgatgcgtatggtcagatagtcaatctcctcgatatcaccagtgttgatgcacagaatcagcagcaggtgaaagacgccatgattaattatttcatgttcactaaagggggggatcgtcagacagcagaaagctacaccgaaacgaagcagggtctggagatcattacggcttcggtgacaccaattttgggttctgctgcggcaaaacaattaagtaaaatcgttgatgctaatcttaaggttgtagcgaaaggtaatgttgatggagctaagtttactgatactaatcagggtgcaaggccttccaacttagcagatgtgaataagccaacactcattgatggacgaatccaagctaaaatagataagcaaaacaagcctcttcctaacggcaatatggctacagctcatgctgaagtagttatacagcaagcttttgaaaagggtatgtctcaagggcgtgagatgacaatgagagtatctaatgagcctgtatgtggttattgccgcggtgatatagcagctatggctgataaagcggggctaaaatctttaacaatttatgaagaggctacaggatcagtcctctactggcagcctggcatgaaatctctcaaggttagggattaa

SEQ ID NO: 36416 - DNA, 384 bp, Escherichia coli
atgaattttaaaatgagttggacactggacgaaacaggtggcaataaacagatctcaaattgggacatggtattaaatcagtttaaactaattcagggaaaaaaaggaaccctcactcttgatatacagaacagtggcgataatagcgctgaaatgcttcagatcagaacggagaatggttattacttgataacattaggtgaaattttcgaagatgaataccaagtaagaacgtactgggattcatctaaacctgatacaaaaatagtgattcttggtgattgctggccggaatctcagcttacaaaagactgtgaacttattgtaaagatcttaaaagagttttttgatactggtaacgtatcaaaggaacttcttaattga

SEQ ID NO: 36417 - DNA, 534 bp, Escherichia coli
gtgttcgggcgaaaaaggctcgtcagggcaaaaaatcccgttctggaattacagcaggacaaaacggttgtaactcacagaaagcacagggaaaaactggttttatcacagcaacctgcggcggaaagagttgttgttgagaataactttctgggagcgacatcttctgacaaactggataaagccattgagaaaatcaggaacggcgataagacattagccactgctaatgagctgattaagctggaaaatgcagataaacgtagtgatgctctggtatccaaatttaataaagatccttcacaattaaacagcgcagaacgtgctgaactggcagcttacttgcgtgtatatgcttcagaaatggaaaaggagtacggtacagcggtggcacaggagcttgttaccgggttactgtcaggacaggactatataaaacgtaaccctgatactgaagcaatggcaaaggctcaaagcattatgaatacctgtaagcgtcaacagagcgccgtattgacacttatttatcggtga

SEQ ID NO: 36418 - DNA, 183 bp, Escherichia coli
atgacatttatacagcttattttattatatttctgcacagtggtctgcgcattatatctgatgagtggcgggtataagataatccgtaactatattcgtaaaaagattgatgccgcagcagcagaaaaaatcagtaccggtcaggctggcggaacaaagcctgaagatccgctcatttcgtaa

SEQ ID NO: 36419 - DNA, 948 bp, Escherichia coli
atgaaaaaagttttaatgtttgctttcgctttgaccatacctgtggctaatgctgatagtatttcattatcattatctaatgatgacgcaggttttttccaacctgcgatcaataaaatctacagtcacaaaactgaaaacagagatgattatacccaagggatatttcttggttacagtcatgatttaacagaattaagccaactttccttccatatagcacaagatatttattctccttcaggctctaataaaaggcttccgacagccaagagtggagacagggctttcagtgcatttctgcattcaggaattgaatggaacgcactcgcaaataactggtttcgctatcgtttaggtactgatttgggcgtaataggccccgatgcaggtggccaaaatgttcagaataaggcccataaaataattcatgctgaaaaatatcaatcatgggatgatcaaattgaaaatcgctacggttacacagtaaaaggtatggtatctcttaccccaagtattgacctcatgggcataaacattggtgtttatcctgaactgacagctgtaagtggtaacttgttccagtatattggatacggagctacattttcccttggaaacgacaaaatctttaactcagataatgggttcggtctgcttgcgaacagagggttaatacactcatctggaaatacgggtttaatatacaaaatatttgctggtattgaacgacgagaagtcgatcgcaactataccttgcaaggaaaaacgcttcagaccaggagtaaaaccgtctcgctgaacaaaaccgttgatgaatatcgtgtcggtgccacaataggttactctcccgtggctttaaccatgtccttaaatcgtatatccccggaatttaaatcaggcaaagattactcattcataaatggtgctataactttcatcttctga

SEQ ID NO: 36420 - DNA, 717 bp, Escherichia coli
atgggtgataattcattgctcagaaattcatctgttctgattgcatatatgggcagtctggggtggggaagcgcttatttttatggctggggtgtttcattttactatggttttccatggtggatcgttggtgcaggagtcgatgatgttgcaaggagcttgtttttcgcggttatagtaatgggtatattttttgttggctggggtattggtattgcattcttctttgcagtaaagagaaaaaatgcaatgcatgatttaagtgtactcagactctatcttgcgattctgttgctgtttgcgcctgttctcattgaattttctgtattgaaacagaaattacaaattcatttttttattttgtccgtattggttgcactgattcttactatttcaataagattttatgggaatatgttttctgtttcctgtttttcacaaaaaaacttttttaaaaagcactatcctgagttattcatgatctgttttgtggcatacttttggttcttttcatttttgacaggttattataaaccacagttcaaaaaagaatacgaaatgattaacctgcaaaatacatggtattatgttcttgcacgttatgataatagtctcgtattgtcaaaatcatataagacggggagtaaccggtttcttgtttttcgttctgagcaaaatgacaatcttgagattaatgttgtccagaccagactttaa

SEQ ID NO: 36421 - DNA, 693 bp, Escherichia coli
atgaaaggtctaagaaatcatgggaaaactgatattggtacattaagcgctcgttatcgtggttcttatggtgatattcaatcttcttggtcacatgaatcaaatatacagcagttaatgtatggcgtatctggtggggtagtcttacatgacaggggattaacgctttcacaggagcttaatttaaatggtgcgaatgctttaatcgataccaatggtgttagtgatataagggttaataatggaacaggtgtaagttctgactggcgaggttatacagttatatcaaatctagtaccttatcaaaaaaatgatatatctttagatgttaatagttctggtaaccttgcagaaataatcagtactgatttaactgtaaccccatcccggggagcattagtgcctgcacattttaacgttgtttctggtaacaaggccttaataacacttaccagaccagatggatctcctgttcctttcggtagctcagtgtctgtattaacaactgatagttacgttatcccaagagatagtattgttgctgataatggacaagtatgggtgactggcctacctgatgacggaacattgattgctcactgggggcggaaaggtgaaatgtcatgcaaggcgaaaatgccagacttaaagtcatcgtcaggtttttctcgtctgtcattaacatgtaattaa

SEQ ID NO: 36422 - DNA, 927 bp, Escherichia coli
atgaatatgcaaaccatcttaataattatggcgctatttatctcgccctggaatattagctatgtatttgctgatactatttttaataaaaatattaacctggggagtcattcaataactccacaggatattgtcaattcaaaagtaccattctatatacaaacagaacagattaaatcggagtgtattggtccttgtaagcaagtaagaatatcctggacacctctggctcctgtactaaatatagcagagccaagtcagggatttatgttttcatcaggagttgcaggtgtcgctgttctattaaaacaaaatccttacaatacaatagagcagcagcttgaagtcagtttactaaaaataagtaattccacagactcaggagagctgaaatccatgccattgttgaggagaacagttgaacaaataggtgaacatggtaatgttattaataggttatctgaagatattagtgtgtctggaactgttaatcgtagtggttgtattataccacaaggtcagtcactcaatatgacattatcaccagttagcacatcgctgttaaaaaatgctgttcagggagaacctctcacatatattagtgcagatactttcttaagtataagatgtgagcctaatgctgtaggggctttagatcttcttttttctgcgtatgatagattatcaacacaacctatgatattacctgcgctgactgaatctggtaaacaaagtggtgttggatttattgtaaaggcgcaaagcaaaaatatttcatgggatggaaagagtattttaaatattccatttgtgacagatgggacatctattacaatacctttcagggcttattatactaaaatctctgataatattacccctggtaatgtaattgctcgtggaatgatgacagtaaaatatcattaa

SEQ ID NO: 36423 - DNA, 621 bp, Escherichia coli
atggcgcaaaaaataacaccatctaaaattgttaaacatgcccgggagttaattattaaggggattgaatcgggcgataactcatttgtcatttttgatgtagatggagctctggagcgtctggaacattacaggtgtcaacttaagagttttttccccaacagcagtatcgcatatttatataagtcaaataatctggcgcaatggtgccagattatctcaggtaaaggtttgtatgcagaggtgtgctctgttgatgaaatgaacctcgccaaaagagacggttttaacaggattgtttttgatggccctttaaaaaaaacgagtgaactattaaaggcaatagaaattggggcattaattgaagttgacaatattgatgaatgtaaaagacttaatgaactatgtaaattgcataagctgacatgtagaattcatttgagattatcgcattactatgatgataatttatcaagatttggcttatctgaaagtgaggctattaatttactggagatgttgatcagtaagtcagagtatctcattttagacgggttccatttacatgttggctctaatctacccaatgcggaaaaactattatacagtatcatgagttga

SEQ ID NO: 36424 - DNA, 270 bp, Escherichia coli
atgacgggacagattcagcccccacaccagggcaaacagtggaaaggctccacgcccggccagaaacatccaatcctgcttaagctggaatatcagattgatgtggtccagtaccatcagcaccagtgccaccgattttatgatatcccgctgtccgggggaccaaaacagcagatgaaccagcaaattccggactgtcatggaggctccgtctatattgttcatgttctctattttcttgttccttactgcgtactcatacacagctaa

SEQ ID NO: 36425 - DNA, 2154 bp, Escherichia coli
atgctggaacagagtgttttttttaaaaagagacatctgccacttgtatttcagacggaaagaacagattgtgctctttcatgtatcgttatggttgctaattttcatggcgttccattaaatctgacgcaacttaagagtatctatcctcaatataaaaagggaatgaacctgaacgatatctatgacattcttgtctctgcaggcatgaatgtgagagtattatctgttgataatgatgagctagggaaagtgaagttgccatgtatacttcactggaattgcgaccattttgttgttttaaaaaaaataagaaaaggtaaatttatcattcatgatccagaaaaaggcctgcttaaacttggttatgtgaaattctttgaacattttacaggtgttgtagttgagtctgttcctgctcttgttattactgattcttcatcaaaatattttctttccggaaaaggcaagagtgatacagtctctaaaaattttaaattcttcttttcattgctcagacagtgtcagtcaccagtttatttcatattgatattactatttatcatcgaatttattaatatttgtttgccacaagtgacgcaattaatcatagatgacgttattgtaaatagtgatatgcatctgctgattgtcgcgacatcaggttactttctgcttagtttgatacagttagtggttagttctgccaagggaggtatcctgatatggatgaacgctcagctcggatatcaactacctctcagcttttacaataaattaatggcattgcctttctcattttttaactcaagaacgcttggggatctaatatcaagatttgattctgttgatattataaaaaatactacaacgacgcagttacttgctatcgtactggactctatcatggtatcggcatcatttattatgttgatgatatatgataaatttttagcattaatcgtgataattatgctatttctttatgttctcactaaacttttttcgtataaagtttataaatattgcaatgtgagtacgctcaaatcaagagcgagacagcagggtgctgttattgaaagtgttaaaaatcaccaacttttaaaactgtattcggaatgtagtggggtcagaggaaactttactcagagtcttgtggatgtggtaaataatcaggctaaagtaggttatattcagaacatttttaccggtgcgaatttatttttgtcctctttgaaaaatgtatccattctgtatttcgggggcgctcaggttatgtcgggaaattttagtgttggtatgttggttgcttttatttcatactccgaacagttttgccgtcgctcaatgaaaatcattgatttcatgatgcagggttatatgtccggagttcatattgaacgcatcaatgaagtcataacagccagtccggagactgagcctcttacaccatcgttttcttttcaatctgtgaatggtatttctcttgaattaagtaatctttctttttcttattctgccacatctgaggttttatccagagtgtcttttaaactggaacctggtgaaacattattagtttctggtaaatcaggttgtggcaaaagcactctggtaaaaataattcttggtctgttaccgccatccggaggaggtattctctgtaataatatgaatgttgcgaaacatactattcactctttcagaaaaattactggtacggttttacagggagatacacttcttagtggttctctgctttataatattacctttgataatacagttcctcttgatgatgttgttcacattacaaaagggctgggaatacatgacgtcataaatagcttgcctgtaggttattattctcaggtgactgatattaactcatttttgtctgttggtcagattcagcgtatattacttgccagggctatatacagaaaaccagctttgcttatccttgatgaagcaacgagtaatcttgaccatgaatctgaaatacaggtcatagattatattgctaccattccatgtacaaaaattatcataagccataagggtgaggccctgcgcattgcagataagatcttgtcactcgatagatcaaagtcatattgcaattacaatttgtacaaaaaaaattgttcataa

SEQ ID NO: 36426 - DNA, 1209 bp, Escherichia coli
atggagaaaaattatcgctctgattttggtgatgtgattgtaaccaccacatattctcagtgtgctattatcacatgctcagtttttatttttatttgtgttcttttgtttatatctattgcagattacacgcaaaaaaggactgttaacggaattgtttatcctgacaaaggtattgtcaatattaaaagtaaacactcaggtactttatcagcgttttatataaaaggtggtgattatattaacactggcgaaaaattgttttcgatcgatgcatcttcatcaactcaatatttcaggaataacgaagaaaattatcgtgagttgctttcaaagttaagagaagttagtggcagagaaacacaggataatataaacacgctgaatgccagaaaaaaattaacagaggagcagctcgatcaaacgagaaacagtattgctattatgacgaatcaggtcagattacttgatgcagctatacagtctcagcaggtaacatttaatagaatccaggaagcttataaaaagaaatatgtttcagatattgagaaaaacaatgctgagatgcagttaattgataaaaaaatgcagcggcaatcacttaataatgaaatttcatccagagaaggacaaatcataagtctcaaaaaggaattagatgataccattgacagaatcaaaaatattcagaatgaagataagaaagaaagtcttcagtcgttaatgaaattgtatggtattgcttcagatactgagtctgtcctccgtgctcctgttgctggtaaagttgcagaaattgttgaaaggaccggtcgttttgttaacgcgggggatactatactgacagtaatcccgcaaggtagtgtaaaccagattgtagcttttatatcaccggaactcattggtgaaataaaaaaaggtacgaaagtggcgctgaaatatgattcttatccctatcagcgatttggggttgaacatggcgttattattgatatatccagggttccactgcagcctgaggatatttataccaactttggtctcaaatttgaaaatgcctgcttcagggttggaattaaaattattgagagaaaggaaagtataactgttattcctggtatgagtcttaaagttgaaatacctaccaggaaagcatcaatcattaagtggatatttccttttttcagagataagagtgtaggtatataa

SEQ ID NO: 36427 - DNA, 573 bp, Escherichia coli
atgaaagagctaaacagagatgattgtaaaaaaatatatggatgcggtataaatattgcgccagcattacgtgttcttggagagttcggcgaagattttgcccatggagcagaagggggagtccagttggctgatgccctgggattgtttgagcccccggaaaaatccacacccaaatacacgacagacccacaactattgagtatggatgtcgatattgcgaatacttatatgcatgagatacagacgcacaccggtagcgatcaaatcacggatactatgcgtgaagatgctattcataatttacagaatgatgggcgggtttattataatcccgtctcaaatcatttcgaagctctgggcggcacaccaactgaaggagcgttttctgctgatgaaattaaagaccctgatgtaaaacagtttattgaacagggcatgaataaagatatccagaatgtacattcttctgatgcatcagtagctcaaaatgcacttgagtctatacagaacagcacaagagaaggtgcttatcatttttctgtagaacagaataaatttgtcgttgggtaa

SEQ ID NO: 36428 - DNA, 432 bp, Escherichia coli
atggaaacttaccccaaccctgatgatatccgggaaaacacagcagacatactgaaagcgttaaccgtggacaatattcctgagcgttatggctttacggcggagctggcatcactgaaaaactgcataagcgatgatgaatattgcaacatggagttttatgagacggggtgtgccttcctgaaatccttactgagaacccggctgagacttaaaagaaccgaccctgcgcatccgttgctgcctctcatctcttcgtcggtggaagcactcagagcacagctgaaggaaaatgaagtttatgtccgccttttaatcgggatggatgtggtttcccgccgggttggtgtaataaatgtggttctgttcagccttactgcactgatggtactgactctgggaggtgccgtgctggcacatgtatggatttaa

SEQ ID NO: 36429 - DNA, 3822 bp, Escherichia coli
atgataatgtccacaccgtggctgacaccgatcgttgccgatagtgatcatgctgaggcaaatgcagtgagctatgaagcactgactccgacagaactcgactcagataaagcaggctgttatatcagcgcgcttaattatgcttatgaacatccggatatccggaatattgctgttaccgggccgtatggggcagggaaaagctcagtattaaaaacatggtgcaaagctcacaatgggacactgcgggtgttaaccgtttctcttgctgattttgatatgcagagacatgtggatgaaagtaatggggacagcagtagtgacgaagggacgaaaaatactggtagtgttgaaaaatctattgaatacagtattctgcaacaaatactctacaaaaataaaaagcatgagcttccctgttcccgcattgaccgtatatcagatgtgactgcgggacaaatattgcggtctgcgtcttttctgacaggaaccattttactgagtggagctgctttatttttccttgcgccggattacgttacaacaaagctatctttgccgggagcattcgcccgttaccttcttgaatgcccgtttggggtgcgtgtgtccggtgcagtggcatctgtgatgggatcgttatgcctgcttttgaaccagttacatcgtatcggtatatttgacaggaaagtaagtcttgataaagtggaccttctgaaaggcgctgttacaacccgggcatcatcaccttctttacttaatgtctatattgatgaaattgtctatttttttgattcgactaaatatgatgtagtgatattcgaagatcttgaccgttttaacaatggccggattttcgtgaaattgcgggaaatcaatcaaattattaataactgcctttctgacagaaaacctgtaaaatttatttatgctgtcagagatggtattttcaactcagcagagtcaagaacgaaattctttgattttgttatgcctgttattccagtgatggataaccagaatgcttatgagcattttgttaaaaaattcaaagaagaagagataaataataacttaagcgaatgtatttctcgtattgcgacatttattcccaatatgcgtgtaatgcataatattacaaatgagtttcgactctatcagaatttagtcaatagtcgggaaaatctggccaaactacttgccatgatagcatataaaaatctctgtgcggaagattatcatggtatagatagtaaaaaaggtgttctttatcattttattcaaagctacttagaccatgaaattcagaatgaattattacattctgcaaataacgaacttgaggatatggcacagtcacttgtagcgataacaaatgaaaaactcgcaaaccgggaaaatctgcgcgaagaactgctcatgccttaccttagtaaaaattatagcggcgcgcttgttttttatacagaaggaaggcaaataagtcttgatgatttgatacaagatgaagatgaatttctcatgcttttagataaggaaaatattcaggtcgttaccccctataacagacaaaattttctcatgataaatcagcgggatacagaaaaactgaagcagcagtatgaaaaacgatgccatttaattgaaactaaatctgttgataatataaccagagtgaaaaataatatttccagtctggagtcattgaggaccgaaattctttccggaactgtagctgatatagcagaaaagatgacaaatgaaggctttgttgcctggataaagaagaaagaggatacaggtgtcctgacgattcagtcggaacatgaacagattgactttatattttttctgttatcaagtggttatttatcaacagattacatgtcctatcgctcaatcttcattcccggagggctgagtgagacagataatttatttcttaaggatgttatgtctggtaaaggtccggaaaaaacattctcattccatcttgataacgttaataatattgttgaacgactcaaaaagctgggggttctgcagcgtgacaatgctcaacatcctgctgttatcagatggctgattgataatgaccctgataccctgaaaaacaatataatggcattactgagtcagacgggtagccagcgtgtggttagtttgctgatgttgatgcagaacgatttcacaacgtatgttcgcctgcgttacctggagatttttatgtcagatgaacatatactgaacagattgctggcacatttatgtgcgtcagaagaacgcacacccgagcaaaagttttttgttcaggaaatagcggcacacctgttatgcctgactgaaaaatcaaatatctggcaatcggttgagattaataaacgtatcggtgaacttatagattcctccccaattcttattactgctgtgccaaaaggatatggtgatgcgttttttgaagtgttgaaagataatacactttcagtttcatatattccaggtgatgtgggagacgagaagtgttctgttatcaggaaaattgcgggtgcaggattattcaaatattccgtcagtaatcttaaaaatgtttatctttgcctgacgcaagacaagaatgaagaaagaatgtcattctctctttatccgtttcattgtctcgagtccctggctatttctgaattaacagaaattctgtggactaacatagaagattttattttatcggtatttattgaatcggaagagattgatcgtattcctgaattgctgaattcttctgaagtctcaatgactgttgttgaacagattatagccaaaatggatttttgtataaataatctggatgatattattaatcgttcagagtgtgcggacaataatgcttcagggagaaatatctatagcatgctgttgcagcatgacaggatttttccatcctttgataatattattcatttattgcatgatacatcaattaatacttccggtgaacttgttcagtgggtaaatgagaaacactttgaatttgaaccatctgatatagtcataaatgatacaggaatatttaataattttatttctgaattaatttgctcgccagtcatttcagaagaagctttactgaaagtactgagtaatttaaacgttgttattatcgatgtgcctgaaaacattccattgcgaaatgctgaactgttatgttcagagaaaaaactggcaccgacagttaatgtctttacggtgttgtttaatgctctcagtgaaaatgttgatgatattaacaggatgaatactctgcttggtaaccttattgcccagcgtcctgagattattacccaggagccagaagatattttttatatcgagggtgactttgatgaagaactggcaagcgaactttttcgtcacaagctaatcggtatgaatataaaagttgccgctttacgctggttgcgtgataacaaaccgggaattcttgataagagctacctgctgtcattagatattctggcagaactgagtccctggatgggtgacgatgatctgcgcctgacactgcttaaacgttgtctggttgccggggatgctggcaaagacgcgctttgcgtggtgctgaacagttttgctgatgagagctatcatggactgttaccacatgacaggttcaggaaaatccctcactccgtggatttgtgggaagtggccgaattaatcagcaatcttggatttattcagccgccaaaaatggggtcagggcgtgatgaacacaaaattgttattactcccgtacgctatgtccgtgatgttgagttttatgactga

SEQ ID NO: 36430 - DNA, 333 bp, Escherichia coli
atggttcacaaatctgacagagatgaattatcagcactgcgggcagaaaatgcccgattgatttcgttacttgaagcccatgggattgagtggcgacttaagcagcaggttccagtgaaaaaatcatcaaccttatccactgacgataaggttgcgttgtttcggcaactgttccgggggcgggacgacgtatgggccctgcgatgggaaagtaaaaccagcggtaaatcaggttattctcccgcctgcgccaacgagtggcagccgggcaatattaaaattagcgcacaaaaaaccaaaccacgcatagaattgtattttatctccccataa

SEQ ID NO: 36431 - DNA, 576 bp, Escherichia coli
atgctcatcggttatgcccgagtttcaacacaggaacaggatactcaggctcagatatcagcattaaagtcagtcggctgtgaactgatattccaggaaaaagcatcgggcggacgatgggatcgccccgagttacaacggcttttgcagcagttacgcgaaggtgatcaggttattgtatggaaactggaccgcctttcccgctctctgaaggatttattgctgacgctggagaaaattgaaaacacgggagcagatttccgcagtcttaccgaaaatattgacacatcaaccccggctggaaggatgatgatgcaaatcgttggctcctttgctgaatttgaacgcgccatgcttcgtgaacggacaaagagtggacttgcagcggtacgtcaggacggacgggttggtggacggcgaccaaagttaacaccccagcaacaaaaagagattgtctcgctcgtcacatcggggcagaaaacaggtgctgatgccgcccgtctgtttcgggttcacccttccaccgtggtgcgtcttctcgccagacaccggatgactgagatcaaacagacataa

SEQ ID NO: 36432 - DNA, 459 bp, Escherichia coli
gtgcaagaaaataataatcactatttgagcgttgacaaaaatcctgttctatcaaaaagaaatgcttttttttctgtcgatagcatgagtgacgatgagttctggtgtattatcgagctatgtgctgttcgtagtgataaagttataaaggctttgtatgaatatatggttttaaaacattcaagaagcatttcctgtaataataatggggtcagtaatggatattttggcagttgtctggcaagagtcgaacacgttattcgtgtcgtaagtaaattaattgcctgctaccagaatacccggttccaaaatcatcaagggcaaatttcacgcctccattgctcagtctgcaaaatatctattcaatctgcctgttcatataaaatggttgctgctctgtcaattccagaatcagttgtatattgttttcttctgtcaactccaggcacattcgagtaa

SEQ ID NO: 36433 - DNA, 204 bp, Escherichia coli
atgcaacagcggctgtacttcacagggattatttatcagttgatatgctgtgccatgatattgctattgccgaaagggacgtcgttttacggcgttttccctatcctgcatcgcactggccgcgttcgaatgtttgcgctcctgactaaccgctcactcagctttatcactctcgcctgcgtcacagttatcatgctcccatga

SEQ ID NO: 36434 - DNA, 690 bp, Escherichia coli
atgtatccgatggatcgtattcaacaaaaacatgatcgtcaaatagaactgctggaaaatatgatggcagttattcaggattttccaaatccagcctgtatcagggatgaaacagggaaatttcttttttgcaatgctttgtttcatgagtcattcttgacacaaattcaaagtgctgaaaagtggcttctgtcacagccggatttttgtgaattgatctctgttacggagatggaagcataccggggtgagcatactcatttgaatcttgttgaggatgtttttattcaaaacagattctggacgatatctgtacaattatttttcagaggaaataaaaatattattttatggcagttttatgacgcggctcatgttcgtcataaagacagttacaatccaaaatattgtgtcagtgacgatatcaggagagttatcagaaaaattaatgatgattcttctgtgtcatcacatgtaaatgatgttttttacttgtacagtaccgggataagtcatggctctattgccaaaatattaaacatatccatttctacatcaaaaaaacacgcctctataatatgtgactatttctctgtttctaataaggatgagttaatcctttttctctatgataaaaaatttattcattatttgtatgaaaaagctatgcgcatcataaatacacgttaa

SEQ ID NO: 36435 - DNA, 237 bp, Escherichia coli
atgacatgtcaagacttaatgatagtgattatcattaacatggtgttataccgttcagaaagcctgctgacgctgtggcagcatcacagtctgggtattctctggtgcaatacaaaaaccggacttcccgtaacaacagacaatgttacgggaaaagttacagaactgagccacaaaatatctcagtacttgagatgcataaaaacaccgtacatatgtttctcaaaagggggatga

SEQ ID NO: 36436 - DNA, 354 bp, Escherichia coli
atgccgatgatacttgtaaagaagaatccccggggcaaagtgattcgggagcttagcagtgaggaagagactgcagtaaagacggtctgtggactgaaaaagccagcaaccatggcactacataacctggccaatgatatactccgggaaatgcgtgagtatgatgcatggttacagtgtgactgtattccgggagattcgctggccatgaatttcgctggacttaaaaaagtctttatttgtccggttttaatcatgagcatgcacctgaatgccccatgtatcgtcagttttccggaaatgaagaggaaatatcttccggagcaagccgacatcccgttagctcccgtataa

SEQ ID NO: 36437 - DNA, 618 bp, Escherichia coli
atgacccgcagccatgaatatgcggaaatggcctcccgtactgaaagcatgagcgggcagatgagtgaagacctgtcgcaacagtttgcacagtatgtgatgaaacgcgcaccgcaggatgcagaagctattctgacaaataccagttcgccggagattgcagaacgccgtcgggcgatggcatggtcttttgttcaggaacaggttcagcccggtgttgataatgcctggcgtgaatcccgtggcgatatcggtaaaggaatggagagcgtaccttcgggtggtggcagccaggatattattgctgaccatcaggggtatcagtccattatcgagcaaagaacgcaggacagtaatatccgtaatgatgtaaaacatcaggttgataatatggtcacagaatatcggggcaatatcggagatactcagaacagtattcgcggcgatgaaaatattgtaagaggacagtattctgaactgcaaaatcatcataaaacagaggcattatctcagaataataaatataatgaagaaaagctggctcaggaaagaatacctggtgctgatagtccgaaagagcttttagagaaagcaaagagttaccggcataaagaataa

SEQ ID NO: 36438 - DNA, 207 bp, Escherichia coli
atgggtgtcggcgttcgacgagataaacagccagccatttttctgatcttcccggacaccacgcatccagtcacggatggtaaacgactcaccactgtgctcaattccctgcaggtaacggatggctttcacatagttggtcagcaccgcacggatggaaatcgccgttttctcgattttctcttccaccaggttggccgccggtga

SEQ ID NO: 36439 - DNA, 474 bp, Escherichia coli
atggaacaggatgcgcttcgttcaaaaaacaggctaaaagaattcgcagcgcttcatggccaccgaattgctggctggtatgtagaaaatgcttcaggcgcatccctgaatcgtccggagctcgctcgtatgctttcagatatggagccaggggacgtcattttgatagaacaggtggaccagttatcccgcctgaatgatgctggctgggatattcttagaaaagagatagcagataaacggttatctgtagtcagcctcgatctcccaaccagccatatggccctgaccaacgctgtcagcgatgacttcacaagaagtatgttgaaggccatcaatagcatgatgctggatatgcttgccgctattgccagaaaagactacgaggaccggcgatgtcgccaggctgaaggtataagtaaggcaaaagcagagtgttgtgtgtatttttactctctcccccccctctcctga

SEQ ID NO: 36440 - DNA, 624 bp, Escherichia coli
atgttgattggttatatgcgggtatcaagcaatgatgaacgtcagtcagtttctttgccgcgtgatgcgttgattgctgccggagtggatccacggcatttacatcaggatcatgcttcaggtgctcgtgataatcgcccgggacttaagtcctgtctcgctgaacttcgcgaaggtgatgtactgatagtctggaaactggatcgacttggtcgttcactctcacatttgctccgaattattgaagacctgaaaattcgtggtattgctttccgagcattgactgaatctattgatacaacaacgccacacggctcgttcctctttaacctttttggcacgctcgcagagtacgaaagaacacttatcacagaacgcgttaatgctggtctggctgctgctctccggcgggggcgaaaaggcggaaggccaccggcgatagatgctgaaaaggttgatcaaatcctcgcagctctggaaggaggtgccagtaaagcgtcagtatgtcgcgcattcagtgtgccacgctcaacactcaccgatactctacgacgaattggctgggccggacctgggggccgtaatctgacaacggatcagagcaatgtcatttctcgacgctaa

SEQ ID NO: 36441 - DNA, 570 bp, Escherichia coli
atggaaataatagaacagcactgggatgaagttctgcggcttaaggcctcgatcggcgctggtctggtaccaccatcggtaatactgaaaaagctggcagcatctccgagacaaaacaggctcaatctggccctgcgtgaaatgggacgtattgaacgctcaatttttatctgtgactggttgcttgacactcggttacgtcgcagatcacacgcaatcctcaacaaaggcgaaagccgccatgcacttgcccgcgctatttttcttcaccaactgggcgaattccggaacagggctgccgagacaatggctcacagggcatcgggcctcaaccttgttgttaatgcaataattctgtggaacacggtctatctcagtcgggctgttgattacattcgcagccaagggattattatacaggaagagctcttgtccagtgtatcaccactaccatggggtcatatctcgctcactggagattacctgtggaacgaaattgaccacccccttgaacgatacaggccacttcgtactaatcgcttcaatccaaagaacttcacttttccttag

SEQ ID NO: 36442 - DNA, 3735 bp, Escherichia coli
atgactgtactattggtgagcctgctggtgatgttatattctgccacatcagctgcttcagttgttggtagtatggttaattatcaaacataccgcgattttgctgaaaataaaggcccatttaaatcaggctcagaaaatatcccgttgtatgataaaaatggaaatattgtagccacattaaataaggcccccatgatagatttcagttctaatgacaggaccggggttgcaacattagtgtctccacaatatgtcgttagcgttaagcacaatggtggttataaaaatgtgaaatttggatatgttgatgacacctcctatatccttgttgacagaaataatcactggagagattttcacactccccgccttaacaaaattgtgacagaggttaccgcactggatatgactgacgcgggaacaaccaagggtacatatcagaatcagaaaagattccccattttctatcggatcggaacgggaacacaatatgtaaaagataaaagtggaaagcgggctcatttggcaggagcatactcgtataaaacagggggggtagtgaatcagccgtttatctcggactggagtttcgtcactaatacaacaaatactcccctgtccacctatggcacccccggcgacagtggttctcccctttttgcctgggatactcagcaaaacaaatgggttgtaactgctgtactcaattcttatgctggagtagatggatatacgaactggtacacgatcattcctaccggagatgtggctaatactatgaaaaaggacgtagatgcgccggtaaattcgcgacaaaatgcaggagatattcgctggtcgtatgatgaaacaactggtgttggcacattagcccaaggcacagcctcatggtccatgcatggtaattccggcccagccaggcctgattcattgaataatggcaaagatctcactttccagggcggtggtaccattgtattagaaaatactgttaaccaaggtgctggtacgttgatatttgatgatgattatacggtcaaacccctagactcccagacctggaaaggtggagggcttataatcaatggcgatcatgctattgactggcaagttaatggggttcagggcgataatctgcacaaacttggctccgggacattaaaagtaaacggaacgggtatcaatcctggtgggctaaacgttggcgaaggaaaggtcgtcctgtcacaacgaccggacagagatggcaatgtccaggcctttaataaggtcagcattgtgagcggtagagcaactgttgtattgagcgatgacaagcaggtcaatcctgacaatattaaatggggctatcatggtggtaagcttgacatcaacagtaacgacctcaccttccatcaacttaacggtgcagacgatggagcgatattgaccaacagcgggagcctagcctccgtcaacctagacttcaacaaagttgatgctacagcggtaatagctaatatctggcacggtcattttaccggcaatgttgatgtcagaaataccgttgcgcccggaacgaagaacgattttgtcttagatggaggaatgaacactcaaggaaacttctcccagcaaaatggccgcctgtttattcaggggcatccggttgctcatgccatcagtactcagtctgttgcgaataagctgaaagaatttggcgacaattctgctctaactcagccggtttcctttacccagagtgactgggaacagcgtcatttcaacctgaaacagttgaatctgtataatgcttattttagcctggcgaggaatgccagcctcaatacaactctttatgcaaatcattcaaccgtaacactgggtagtgaagacctctatattgatctcaatgacggaaacggagtaaaaaccataccgtcattcgggaagtcgaaagcgacaaaagacgccgatcggagtcgtttcacgggccgcatacatctgaacaatggatcgctccttaacattaatgagtatttttccggcggcattgacagcacagacagttctgtgactgtggcatccaacaatgccgtgttcagccagaacagtctattcagacattcaccactgtcgctggcggatggcgcaaagctgatagtaatttcggggctagtttctgacagtgaagtgactgttggtgtggggtcggcactttcactgctatccggaaagtactcggctgagcgctggcgttttgacggggaaggcgcaatgctaaatgctggtactggtagcgtaatgacgggaaatattcaggcggataatgccgccagtctgaattttggtactgcagagaaagtcagtgagaatccgttcacagcttatcacggtaatctaattgcaccattggccaatgtggcaatgatgaatactcactggcagatggacggacaatctacgataaaatccctcgatctgaataattcgcaagtactattcagtaaggccaaggtgccaggttctcttaaggtggatactctggctgccagcaacagcctgttcgtaatgaacattgacggcaaaacggcagataaggtaactgttatccagtcgctgtccggtaaaaataatgcgttggttattgtcccgtcagtagctgcagtgaaccaagagatgtcgcccgtagcgttggtcactgcaccgaaaaagacagctgctgatgtgtttactctcaaaccagtgacacaacgtgtgggtattcatagtttcacgccacaagtgaacatcgtggatagtggaaatagcaaacaatggttattggaagggttcgatatacagccggataaagcagttctgcaggtaagcaaagctgttatgaatattgggtataaaaactttttaacggaagtaaacaacctgaactaccgtatgggcgacttgcgcaacacacacggtgatgccggagcgtgggcgcgagtcttcagtggcgtgggttccgcagatgcgggttattccaacagctggactcagttgcaggctggagtcgacagaaagtacatatttgacggtggtgatttgtttaccggtgcgatggcaacgttcactaaccatcatagccatggtgatggctggtccggacagacgaaatcaaccggtatcggtctttatggctccgcgatgtttaactccggtttgtatatagataccattggtaaatatgttcgccacgataaccgctattcagcaatcgtccccctgatgccagaacaggattactgctcatattcctggtatctgggagtagaaacaggctggcgtttctcgttacctgaagaaacctttattcagccacagacagaactggtttatggctcggtgccaggaaaccggtttgactggcagtctgctggttcagacatcagtatgcaacataagcaggataatccgttgataggtcgtacgggggtggaaacaggtaaaacgttcagaggaaaagattgggagttgaccgcactagcaggcgttcattatcagtatgacctgtttaatccggcagagacaattgtccgtgattttgctggagaaactcatattaaaaatggtaaagatagtcggatcaacttcagcttaggcatcaatgcaaaaataaaagaaaatactacgattggcctcaatatagagcgttcaactttcggacattacgatattgataaggcagttaatgccaatattcgttattcattctga

SEQ ID NO: 36443 - DNA, 708 bp, Escherichia coli
atgaatttaaataaatacttattggtcattgctattgcttattcctcatctgttttttctgccgggattcctgtagttgatactgttggtaacgcacaggaactggcgcactggacagaaaagctgaaacaatggacagagacagtacagcattacaaaaaccagttacaggcttataaagatcaactggcaacgtctacaggtcttagagatatacaaggtttagtatctcaggggaaaagccttaagaatgatattatcagccttcagaaacaaggaatcagcctggacagtcttttaacatcgagcagcgcaccatcaggaactctcgatacactgtataaaaagtttaaagattttgatatctgcgatgaaaaacaggcagaatcatatatcaatatttgcaaacaggagacagtaaacaaagcctgggcgatagaacaaacagcagacgtacaggagaaaataagtgatgccctcaatgatatctcagaccttaccgatcgcatggcgaacgccaaagatataaaagaaagtcaggacttagctaatgcgatccaggctaaaagtatccagcttaatattctctctcaacagtgggaaattaatatgaaatcatcagaacagcgtgataaacttctagcagagaaacgccggaaggctttcagggaaagtcagattacagcacctgtaccgcaatttaattag

SEQ ID NO: 36444 - DNA, 1050 bp, Escherichia coli
atggctggcttttttgaaaaaatgaatgaaaagattgatagtctgttgactgcaacatcagaaggtatgtcaggtaaatactcagacagtatttcattaattgccgcttctgctctggttctgtatggagtaatccttgcgttttatataatgggagggaaaaagaaaatagaggatgtaggttctacttttttccatgcaatgattgtttatgtttttgtaactaatgcaggagggtatttaaatattttaagtgacggtataaaaggacttaatgatggtcttgctactgttggcggtgctggcagctctgcatggagtttgcttgataaacaatgggaagtaacacaacgactagcggagacagtgaaatctttagatacagactatttttccataacaggagctattgcttcattaatgatatggattggtacaggagtggttttggttatatcaagtctggttttattaatcgctaaaatcgctctgacacttcttttaaccactgcccctgtttttatttattgtcttacattcccatttttacggcagaccttcaataactgggtacaaaacgttttatcgtccattctaacggtaatgtttgcctcgctggtgattaattttggtttagaattttataacgacatacttagccagttaacggcaaacgtagataatgcaagcctcatgacaaccggcgctatagcggttgtttgcggaattgtcgccggtgctattgtccttgtgtccgcaaaacttgcgcaaagtatttctggtgcaggcattgatgcagctattcagggtgctgccgctatggggataggcgggagtattttagctgccagcaaagcagcaggaacagcaaaagatattggcaccggagcttatgaaggggcgagcgggaaaaactggaaggagcgcgaatcaaaaggcgttacacctgcaatcgcatatggtagcgggcgtatcggcagagctgctattcagaaagtgatagccagcaattcacgcagcgaacagagcatcccgacagcacgaaattaa

SEQ ID NO: 36445 - DNA, 288 bp, Escherichia coli
atgaagagtcttaagtatatcctcataggaactatctctctgacggctgcggtttgcaacgcagaaccagaagttaaaaccgcagaatggtatatgcagcaccatgatgaggtcttatctaaatataaagaatgtaaggctgcacaagataagtcttatggcggcactggatattcagatgattgtaaaaacgtattgaaagcatccctcagaattaaagacccggattttattaaatcactaaataaaatcagacttgagagtattaatgagattttaaataagtaa

SEQ ID NO: 36446 - DNA, 285 bp, Escherichia coli
atggctgggcgcattgtgccagaaagcagcggcgagaagaattctttcttcaggcttctgctcgatttggaaaaccgtggttatttcatccgtggagtatacgcagaacatcaaaacgttcgtgggcgtgatattcatcttaaacttatttcctcaagcggggatatcaagtattacgctgttaagaaattccgtactactgctcctcacgaagttacatattatacaatcgacaaatatcgccgttggctgagacaatataagcgccagccagttaaatcatga

SEQ ID NO: 36447 - DNA, 495 bp, Escherichia coli
gtgaacacatcagaactcgctttcaagaaggtctcgaagcttcatcaacagacgacagttgatctcgattctggggcaataaagcaggagacaacgcgagagacgttctctgttcctgctgaaccgccctacattaagctttatattgctgatattgctgctattcatggcctttctaaatcgcagaatgatgtgttgttccagcttgcaatgcttatcggatgggatggaattgtttctgtatcgaaaagtcgatttgaaaaaacgataaaaccaaggatcggtatcgaatatcagtcattcaaaaatatcgttgcaaagcttgttgagaaagagttgttcttccgttctggtcgtggcgagttagaagctaaccctttcatttttgccagaggtgactggccatctatttacgaaagaagaaaaaggatcgagctgacgctagtttatgatgaagatggaaggcatttaaaatcaagtatttacaacgaataa

SEQ ID NO: 36448 - DNA, 1104 bp, Escherichia coli
gtggcgtatctggaaaagcgccgccttaaccatcctgaactggttgcgcagttccgcctgggcttcgccaaccgcacgctggcctaccgtctcccgtccaaaaaagtgctggcaggcgagaagatccgcgcccggcttaagaccgcaggtatcatgcgcgagtccgggcatgagcacttcaccgggtcgctggttgtgccggtgatggatctgaacgggcagatccgcgagatgtacgggcgcaagatcgagcgtccacaacgtggcctgcccgcacacctgtatcttcccggcgctcacggcggcgtgtggaatgaacaggcgctgatcgggtcatcaacggttgtcctgtgcgaatcgctgatcgatgccatgtcgttctgggtggccgggttccgcaatgtcacggcggcttacggggtgaacggcttcaccgatgagatgctggcggcgttccgggcacacggcgttaagcaggtgctgatcgcctacgacaacgatccggcgggcaatgaggcagcggtgaaactggcttcttccttagccgcttccgggatcgccacgttccgggtactgttcccggcgggcatggatgctaacggttatctgtgccaggtggcagagccggaacgggcgttcagtctgttgctggatggcgcggttccggtggctgacgtcgtgggtgcggagagtatcgcgccgcaggccagcgcggagcctgcacacctgacttcattagctgccggggttgcgaccttacccgcagccgccgcgcctgcaccgggcgtcagcgtggaagcgttgccggaaggtgaactgatgatcgccttaccgggagaacgctggacgatacggggcttaagccgcaaagcgaacgtggcggcgatgaaggttaacgcgcaggtgctggacaccgacagcggtgtggtgttcgcggatgcggtggatatgatgagcgcccgcagtcgcggcggttatgcgcgggccgccgtcgcagagcttggcctggcagaaggcgatctgcgccgctcgttaggaaaagtgctgctggcgctggaacactggcaggcgcaccggagccggagaacaccgccccggagatga

SEQ ID NO: 36449 - DNA, 246 bp, Escherichia coli
atgtacggtcacccggttctgtttcatgatgtcacgactgagtgcccggacggacagctcatcgagcacatgaatcccggacgtgaacagccccttctcacggtcgagggggatgagctgctcacggctgatggcctcatcgataccggcgcgtgcccgctcaatcacaccattttccggcggcagtatgccgaccgtcctggccagcacgtccgtatacgtgaactgcactttgcgttcacttaa

SEQ ID NO: 36450 - DNA, 543 bp, Escherichia coli
atgaaagtaatcaacacatttataaatggtttgaaaataattgaacctcaggtacatgtggataatagaggtttttttcttgaaacttattcagaggaaaaatattgcgaattaattggtagagaattacattttgtacaggataatcattccagatcaactaaaggagttcttagagggctacattttcaaagcaaacatcctcagggtaagcttgtacgtgttactcgcggtattgtatttgatgttgcagttgatttgagaattaactcgcagacctttggcaaatggtttggaatcattttatctgaagaaaataaacgacagttatggttgccggaaggatttgctcatgggtttcaagtattatcagatattgtagattttgaatataaatgcactgattattattatccggagtttgaacgaactttgttatggaatgatgcagatgtgaatattgcgtggcccctcgctctttccataatatcagagaaagataaaagaggacattccttatcagaaattaaatcttatatctaa

SEQ ID NO: 36451 - DNA, 630 bp, Escherichia coli
atgcaccatgaagaaatgaatcagcgcttcagtcgcctggaaaatgaaattgctgaactgaataaaaaactgtcggcgctgatgccttctgaagatgaaaaaaaacgccgcgatgagcaggaggcggcgttttacgatgattgcatcaaagttgctcgcaggacctttgcgaattttttgcaggaaaagctttcaccgaccgcattgtcagaaaagtactccattacgattaaaagtgccggcgaggaaggcaataaacgttattttattgcgtctgcaccggataaagacgaggaaccccgtcggcctttcagggtttcctgtgaagagggggagttcgtcgtttatgagaacggaaaacatgtccggcatcgcaatcatcattgcctgaaaattattgatctcgctattggatgcctgaaagacgaaaacaccagggttatgaaacgcattggctgttgcatggggtatctgcaggtggcggcagagattgaagcacttgccagtggtgcagacagggatgctgcggtgcgggaggctcttctttgtgatttcaatacgccaccctttaagaaagagcctgatggctggatccagccggggctgacttatctcaaatggcgcatatag

SEQ ID NO: 36452 - DNA, 228 bp, Escherichia coli
atgaaaaaatacgatatgacagttaaatcattccacatgggggataaaaatgttgtcgttgtccttggtatatataattatcaggttccatcaatgctgttgttcaatattgaaatagatattgaacgacgggaagatgctaccattccgttttatgaggcgctggctttaaaaaaagcagcctcgctaatccatgaaatttctgatgatttagcagtggctgcttag

SEQ ID NO: 36453 - DNA, 288 bp, Escherichia coli
atggaaatatcaaaccatgaactttttcaactaattcaggggcttcagcgcgaaaacatagctataaataccgcagccaatttcctgttctacaacatcgttgacattctggatcagcaaagtggagacaagaaattcagtgatgagcttaaaaccaggttacatagcgaactaagcaaaatcacaacctcaggtaaaccagagattaaagtcgccatcaatactctcatgcaaccaccggtaagacccatgtttggcaataccagtcctgagccatttttgaaataa

SEQ ID NO: 36454 - DNA, 309 bp, Escherichia coli
atggggctatttaaccataaaaccaatatcagcctgagtgctcatagcaatgttttcacttcactcccctctcaaatgagaattataaaaaactttggtattgttaaagccaccacagccgaaatttctggtaaatattacaatgaggacgatgaactgctttctgctctgttatctgaatcctccagaataggggccaatgccatagtaaactttcaatatacttccggttcatacaacactggaaatggttatttcgcaacttatataatcgctaccggtgatgccgtattgctagaaggtatatga

SEQ ID NO: 36455 - DNA, 561 bp, Escherichia coli
atgagtgaagacctgtcgcaacagtttgcacagtacgtcatgaaacatgcgccacaggatgccgaagctattctgacaaataccagttcaccggagattgcagaacgccgtcgggcgatggcctggacttttgttcaggaacaggtacagcctggtgttgataatgcctggcgtgaatcccgtggggatataggaaaaggaatggaaggcgtaccttcgggtggtggcagtcaggatattattgctgaccatcaggggcatcagtctgttattgaacagagaacgcaagatagcaatatcagtaataatgtcagagaacaggttaataatatgatgacggaatatcgttcagatattgcgacaacaggtaaaaatattcgtaacgaggaagggaatattgcccatcaatatactggtctacagagctcacatagagcagaagaattatctcaggagcgtaagtataatgaggaaaaatctgcccaggagagaattcctggggcagatacgtcggatgagctactgaaaaaggccagggaataccaagataaaaatagttaa

SEQ ID NO: 36456 - DNA, 1689 bp, Escherichia coli
atgacatgtatgaaaattacatctaacaatgtaactgcggtcatcaacggaaaaggttggcattccattaactggaagaaatgccatcaacacgttaaaaccatacagacaagaatcgcaaaggcggcatgtaaccagcaatggcgtacagttggtagactgcaacgactgctggttcgctcattcagcgccagagcactggcggtgaaacgagttacggaaaatagcgggcgtaaaacccccggagtggatggccaaatctggagtactccagaatcaaaatgggaagcgatatttaaactcaggcgaaaagggtacaagcccctaccgctaaaaagagtttttatacccaaatctaatggcaagaaaagaccgttaggaattcccgtcatgcttgacagggcaatgcaagccctgtacctgctgggattagagcctgtatcggaaactaatgcagatcacaacagttatggtttcagaccagcgcgatgtacggctgacgccattcaacaggtatgtaatatgtatagttcccggaacgcctcgaaatgggttctggaaggcgatattaaaggatgctttgaacacattagccacgggtggctgcttgaaaatattcctatggacaagcaaatactccgtaattggttgaaagctgggatcatcgaaaaaggcatattcagcaaaactctctcgggtacaccccagggaggaatcatatctccagttctggcaaacatggccctggatggactggaaagactgctgcaaaatcgctttggttcgaaacggtcaaaaacattcaggaaacatcaagttcacttcgtccggtatgctgatgatttcatcatttccggaaagtcgaaggaacttctggaagagaatgttcttccgttggtgaaatcatttcttgcagaaagagggctgactttatccgaagagaaaacggtcatcactcacattacggacggatttgattttcttgggcagcacgtccgacgcttcggtagaaaactcataatcagaccagccaagaaaaacgttaaacaatttcttagcaagatcagagagactattgaaggtaaccgaacggttcctgcatgggtgctaataagtctgcttaatccaatcatcaccgggtgggcaaactatcaccaacatgtagcatcggccgagacatttaactatgtcgacaaccaaatctggcgcaaaatctggcagtggtgcagaaggagacatcccggcaaaggccggagatggatcttccgtaagtaccacacgacaataaaaatgtgtcatggtcgattttatggagtcgatccggagggtaggaaatatgttctgtcccgggccagcgacatccatattaatcgctatataaaaataaagggagcggcaaatccatatgatcccgagtgggacacatacttcgaaagaaggctggactactcatggaagaaatcccatcaggggcagaaaaggattctcgctatatggaaaaggcaaggatcgcgctgccctttatgtgagcaaccgattaatcgtgatacaggatggaatgttcatcatttgctcaagaaatctcttggtggtagcgatgatgtgagcaatttagtcctactccatcccaactgccatcgacaactacatagtaatgacgctggtctcccacaaggtggaggcttataa

SEQ ID NO: 36457 - DNA, 372 bp, Escherichia coli
atgctgcaccgccgtgatggcaaaggtgccgtccgtgttttcccggatggacacacagcggaacaggcgacggcgaagaccgggtattttcagtccccacacaccgtatgtctccacgccatccggcagggtactgacctgtatccggtccggctcggggtgtgcggtgatgtccacactcaccggcttaccgctgccgttaatcaggttcaccgtggcggtgccggtttccggcagtgtcacctcacggtccagcgtcaggatacgacgggttacatcggtgtccagaatacgtccgccggtcatggtcccggcatagtcgttatcacagatttcaatgatgtcacccggcgtgtggcgcagcccctgtga

SEQ ID NO: 36458 - DNA, 147 bp, Escherichia coli
atggggtcgggctcaaccataaaagccgctatggcgctggggcgtcgtgcaattggtgttgaactggaagaggaacgttttgcgcagaccgtgaaagagattagtcatatcctgacaggctcaattgatgaaggaaaggatggataa

SEQ ID NO: 36459 - DNA, 567 bp, Escherichia coli
atgaataagctggtttctgatggcagcgtcaaaaaaacaacaggagaggagagaacagtgagtaaaactctgcacgcagattctaacatgctttctgatgagcagctgaatatgtgggaaaaacaggttcagcatataaagaaggggggcgctctgatttcttttgagagagaaaagcgccgaaagtcgtggctcctgaacaaggatctatcttctccccgtcactcactcgccaccctgactgcctcaggtatggcatgcctctggctgttcgcagggaaaggtataccagcagcaccatttatcgcagccggaagtgcgctccttgtctattttatggtcctgcacttttcaggtcttcccgtgaacgatgaagagcgtcttcggaaaatgctggcaggcggctgtttcccgaaagaaagccatttctccgcactctgtctccgaactgacagtaccgcagaggatatcaccagggctgttaacgaggctgttactgctgacctgcagttaattgaaaatataagagaaagtcttcagtacaggcaggagaaacatgatgaataa

SEQ ID NO: 36460 - DNA, 321 bp, Escherichia coli
atgaacatgcgtaatattaatgttattacagccctctctgtgccggataaaagcgtatcagatgattttatgcatgctgttctcagcaactgcaccacaaaaatagttctttctgcaccaaaggaattcagctctgaatcattgccgcacaaatttaataatgctgctgtcggtgtgatgaagaaggggatgtcgatgagcttattttcttctcctgggcatattgtggttgccggacaatccggtggcggaaaatctgttccggcgaaagaactaatcgacagaattattcagaaatataaggaacccttcgatgaataa

SEQ ID NO: 36461 - DNA, 387 bp, Escherichia coli
gtgaaaactgttcttctgcgctatggtgtggccgggttccttctggtgtactggggcctcagctttgcgaaccgctctttactgcatgagccgccgttttctcctgatgtctggaaaacagtccggctgcagcttctgctggtcaccgcgtctgttgctgtgacgctggtccggttgtactcctcccgtcccgctgttcagcaggagctggcaggcatcatcgtcctgttaaccgtgatggcgcacggactggctctgctggttccttccctctggctctttattcagtggcggtgggatggggtatggctgcttcagtggcaggactttgtgttcggtcccatgctgattgtcctgcctgctgccatgttctggttctctgattaa

SEQ ID NO: 36462 - DNA, 831 bp, Escherichia coli
atgaaaagtcaaagtgctttatataaactaaatctttctgctaagagtgatattttaagcacatgtagactggaaatcaggaagattcactttcatgaaaatgctattatatatctctatgatgcacaactcattttaaaaaacagcaataataaaaaacacatcatctctccacagtcaatttgttatataagaaagaatacaattgcagaactgattttatatgaaaaatcaaaaaaaatatcatactatatatatgacatggataacatagtattaaataatgtttacgaagtaatgagtcctttgtggttaaaatatcagagaagaatatcatgtgattgtaggctgttttcattcagcgcagatgatgtggataggaaaatattcgaaactctgattaaagggaacattccacattacaggaaagtatataaaataacatatcttttatcaaagtgtaataacgtagagtcattaatttgctcattatcaacagtaaacaacacaacatttactgaaaggttaaaagaaataattgagtcggacttgtctaaaccatggcatttaattgattttgctaaaagactatatatgtcagagtctttagtcaggaaaaagcttgaaaaggaaagaataaaatataatgaactaattatggatatcagaatgaaccatgctttcaaattgattgtaacaacagaaaaacatataaacacaatatcaaaagaagttggttatgctagcacatcttactttattcgcaacttcaaaaaatactttgggattacgccaaaacagttttcaataaaagttaaacataaattatag

SEQ ID NO: 36463 - DNA, 234 bp, Escherichia coli
gtggctacggatgggaaaaaaaagaggtgcccactgagcgaccagaacttccatttcggcctcggctatacccttggggtcaccgctcgcgagaactggaattacatcccaataccattaatattgcctttagcatcaatcggttacgataaagtgattttccagatgacatatattcctgggacctataataacggtaatgtttacttcgcctgggcacgtatacagttttaa

SEQ ID NO: 36464 - DNA, 1005 bp, Escherichia coli
atgcaaaacgttgcgcttattggtatcgatctcggtaaacattcttttcatattcattgtcaggataaatctggcaatgcgcttttgcgtaagaagtttacgcgtacgaagctgatgcagtttctggtaacatgtccatcctcagtagttgttatggaagcctgcgctggtgcgcattttatggcccggcgtatcagcgacatcggtcatgacgtaaaacttatctctccgcaattcgtgcgtccatttgtcaaaagcaataagaatgattttattgatgcagaagccatatgcgaagcggcttcacgaccatcaatgcgttttgtccagcccagaacagaaacccaacaggcaatgagggcattacaccgggtcagagaatcgctcatcagggataaggtgaaaacaaccaaccagatccacggtttcctgctggaatttggaatcagcctgccgacaggggatgccgtaataaaacggttgtctctggtgttggctgaacacgaaatacctgaatatctgagtcgcttgctgatgaaattacatgctcactatctttatcttattgagcaaataacagaactggaatcagagttaaaccagtcaatcaaagctgacgctactgcgcaacgcattatgacaatacccggtgttgggccgattacggccagcctgctctcatcccagcttggtgatggtaaacaattttcatgcagcagggattttgcagcatccacaggacttgttccccgacaatatagtaccggtggtaaatcaacgctgctggggatcagcaaacgaggcgacaaaaatttgcgtcggttacttgttcagtgcgcccgctcgttcatgatgcggctggagcatcaacagggcagactcgctgaatgggttcgaaaacaactcgacaacaagcattcgaatattgtcgcctgcgctctggcaaataaactggcccgaatagcctgggcaatcactgttctgcaaaaagaatatcaggcttga

SEQ ID NO: 36465 - DNA, 534 bp, Escherichia coli
gtgaatcagaaacaacgctatggtttatcggctgccgttctggcgctgattgccgccggcgcgtctgcacctgaaatccttgaccagtttctggacgaaaaagaaggtaaccacaccacggcataccgtgatggtactggtatctggaccatctgccgtggtgccattctggtggacggtaagcctgttgttcccggcatgaagttgtcgagggaaaaatgcaaccgtgtgaacgccatcgaacgggataaggcgctggcatgggtggagaaaaacatcaaagtgccgctgaccgaaccgcagaaagcggggattgcgtcattctgcccgtacaacatcggccccggtaagtgtttcccgtcgacgttttacagacggattaatgccggtgaccgcaggggagcctgcgaggcgattcgctggtggataaaggacggtggcagagactgccgtatccgctcaaataactgctacggtcaggtatcccggcgtgaccaggagagtgcgctggcgtgctggggtatcgacagataa

SEQ ID NO: 36466 - DNA, 216 bp, Escherichia coli
atgtaccagatggaaaaaatcacaacaggggtgtcatacaccacgtcagcggcgggaacgggatactggttgctgcagttgctggacagggtctccccgtcccagtgggcggcgataggcgtgctggggagtctgctgtttggtctgctgacgtacctgacgaacctgtattttaaaatcagagaggaccgtcgcaaggcggcgcgtggggagtga

SEQ ID NO: 36467 - DNA, 480 bp, Escherichia coli
atgcttaatctttacatcactcactctgatttatcgccacccgattgtgtctccacagagaacaaccggcttacttctgttatatccgtacttgtttcattacaggataacaatattatttccgttaccgactatctaaaaaaacatggcatctcgcattgtttttacttcctgtccacagggaatatacggtttacaacgcataaccggagtatgataacagtgcagacaaaaaaaaggcctgtttatataaactacagagcaaacaatatctggacaaaactgattattaaaaaacatttatccggaaatattccatttttccggagtcaatttactctttcccgggctggcatatttaaatatgttctggatgtaaatatgaagcaatgccagtattattcagtgcagaacaatattctgcattcgcaattcatcattccggtttcttccaccatcgcaccggacaggcgactatga

SEQ ID NO: 36468 - DNA, 381 bp, Escherichia coli
atgaaagaaaacaaaaagaatcggaaattcaaaatcagaaaaaccaaacgggattgtgattatgaacgcagggtttctgatgtatattttgatctgttttttgtgttcgttgctgccggagcttttttatgggcgattatgcacagtattttcgattccggtattgattcgtggaaagcggtcccggcattaaataattcgatttatatgtggaacatcctgatgtatgccattccgattatgttatatgcgcttgcagttggtttccttgttacattttttctgtccccaacgtacgaaaatatcgggatatccctgctgaaatgtcgtatgcgccgggagaacaaattaagggagggtagcaataatgcttcgcattaa

SEQ ID NO: 36469 - DNA, 948 bp, Escherichia coli
atggccagccccaacggtaacctggatgaagtgcatgaaggtctgctgctgcaggccgtcagagcctcctggctggctaaagagaataaggcgcgcattgatgacgtggtggatttcctgaaaaacgccagtgacagcgagcagtatgccgagtcaccgaccatccgcagccgtctggacgaaatgattgtgctgcttgaccagtacactgccaacggcacttacggccggtattttaactctgatgagccatccctgcgggatgacgccagaatggtggtgctggagctgggcggactggaagaccgtccgtctctgctggttgcggtgatgttcagcctcattatttacatcgagaaccggatgtaccgcacgccgcgtaacctcaagaaactgaacgtcattgatgaggggtggcgtctgctggacttcaaaaatcacaaggtcggtgagtttattgagaaaggttaccgtaccgcccgccgtcataccggtgcctatatcaccatcacacagaacattgtcgactttgactctgacaaggcctccagtgcggcccgtgcagcatggggtaactcctcctacaaaattatcctcaaacagagtgcgaaggagttcgcgaaatacaaccagctgtatccggaccagttcctgccactgcagcgcgacatgattggcaagtttggtgcagccaaagaccagtggttcagttccttcctgctgcaggtggaaaaccattcctcctggcaccgtctgtttgtggacccgttaagccgcgccatgtacagctctgacggcccggattttgaatttgtgcagcagaaacgtaaagaggggctgagtattcatgaggcggtgtggcagctggcgtggaaaaagtcagggccggagatggcttcgctggaagcctggctggaagaacatgagaaatacaggagtgttgcatga

SEQ ID NO: 36470 - DNA, 411 bp, Escherichia coli
atggtcatcaggtctcaaaggatttcaggtaaaacgactatggccgcacctataagcaacgaagaacaggtatttattgccgaacttggcagacggataaccgcactgaggaaggacgccgggatgacgcagacgcaggtcgcacaggcgctgaacgtctcccagcaggccgtacaggcatgggaagccggacggcggcggatacagatctccatactcccagccgtggcaagactgttagcggtttctctggaggatttacttggcgaagaaccggagaagatcgcccgtaagcgtggcccagcaccaaaatggcagcagcttattgaagagatcgacagcctgccgaaggcaaagcagaagatgatttcggagatgttaagtgcgctgattgtgcaggcacgtaactga

SEQ ID NO: 36471 - DNA, 252 bp, Escherichia coli
gtgactgtcgccttcaacatgaaacagaccgtggatgcgttttttgacagcgccggtcagaaacaactgtcagaagcacagtcaaaagccctttcagcgcgttttaacacggcactggaggccagcctgcaggcgtggcagcaggaacaccacgcggtcattctggtgtcgcctgccgtggtacagggagcaccagatatcacccggcagatccagcaggatattgcccggcgaatgagggcggaaccatga

SEQ ID NO: 36472 - DNA, 252 bp, Escherichia coli
gtgactgccgccttcaacatgaaacagaccgtggatgcgttttttgacagcgccagtcagaaacaactgtcagaagcacagtcaaaagccctttcagcgcgttttaatacggcactggaagccagcctgcaggcgtggcagcagaaacaccacgcggtcattctggtgtcgcctgctgtggtacagggagcaccggatatcacccgggaaatccagcaggatattgcccggcgaatgagggcggaaccatga

SEQ ID NO: 36473 - DNA, 270 bp, Escherichia coli
atgaaactgacctctatccatcttgaaatactacgtcgagtgaatgaattgcagccaaaggattctagaattcaggctgcatcattacctcatctctcagcaaaagaggttaattttgctatttcagatcttgctgatataggttttatcgatgttatacgaagcaaatctgccgaaggtggattgattgctaatgagataacgtcaaaaggttttgcttttttgagtgagattggcgctgaaaaaaattcatcgatgagcactcattga

SEQ ID NO: 36474 - DNA, 495 bp, Escherichia coli
atggagctacgaattgatgagaggaattcaaatagcagcacaatgattgtagcatcggaagataatgagtgggttgactcgttatggattacgattcaggatttacttaacaagtgcaaaaataaatttagattttttagaacagcttggactatgttaagtatccagatttcaggtgtgacagttggctttttgcttagcttatggacagcctcaaaactggcgccaaaactatcaatcgatggtgcatttgctttatcatttatttgtatctttattttgttttcgaacttatggagctttgctattccattaataattaagcttatcgactttttgtttcctagtgttaagtttgttattaatggtaaaaattactttcactggagtgtccaggctataattggagcgattgccagtgcggttatattgtattttattagctccatgttgctttttgcattagaaatgttaaatagcatcattaagaaatag

SEQ ID NO: 36475 - DNA, 372 bp, Escherichia coli
atgcaaaacagcagatcgcactggagtcacagagaacccaggaagatatcaaagtggctgttgcggatgatgattgtgctctacgccctgtgcctgctgccgctgctgaccggttgcgccggtacgcggacagtttacgtgccagttccggtgataccactaccggcgaacctgaccgctgaaaccccgcaaccggttattcctgatccattgacctacggtggaagcttggatttgaatgtgagtctgttgtcggctctggctgcctgtaatagtgataaagctgatattcgtaaaattgaggcagagaggagctggccattaagctgtaaagcggaaagaccgcagcaagtagtgtcaatgcagcagtaa

SEQ ID NO: 36476 - DNA, 282 bp, Escherichia coli
atgccaaaaattcaatttgatgcaaaaagtggtgaaatgaaggttgaggaagaaatttccaagatcaccattgatgataaaggcttagttaaagctgaagagtctgtagttaatggaaataccgttaagtactttgagtatgaaaatggtagccatatcactattacccaaaaaaacggatcctctgagatttcatctcataatatccagacaacaataagcgctgaccctgaaaagcctggttttgtgactatgacttacagaatggggtcaggtagctaa

SEQ ID NO: 36477 - DNA, 264 bp, Escherichia coli
atggcaaaggtaattattgaaattaaaaatacagtatctggaactaaaggacggcatttgcgcaccagtattgcggtaggtggtagtgtggaaatggaaggggatgaggctacacttgcaggtctggtggcgttattggtgcttaacaaaagccagaaaataattaatgagtcagctcatgaagccattgagattttgaaaaacgatggtgtcatcacaggtggcagtgtcactgaaatggctgttgaaaaaacatgtcactga

SEQ ID NO: 36478 - DNA, 192 bp, Escherichia coli
atggctataaaagaagtaaaggttaaacacctgaaaggtggggagcgcttaaaggcgtggtggggccgtgaatttacagctactgctttcagattcaggcaaggcggagaggtcattatatacgacgaaaacatggatgaagttggtaaatggcatcttgagcaatatgtcgaggtgttaaatgaaaattaa

SEQ ID NO: 36479 - DNA, 240 bp, Escherichia coli
atgaaccggaaccatagataccagtgcacatactcactatgcagcgcgttttttaagaatggcaagatctacgaagtcggcgcggcattggttgatgcaaaggatcaggaatgtattcacgccattactgacgaccagggccggttatggcgcttttataaaatggggtacggtacggcgcttgtttatgcgcgtaatagtagtggtgcttttgctgcattttcatatgtcggggcgtaa

SEQ ID NO: 36480 - DNA, 216 bp, Escherichia coli
atgattttaacgtgtcacggatctgatcttgattgtttcgaagacggttgtcagtacgaagcggaaaagccaggcggattaccgaaaaacccgtttttagtcgttacagacacttacggtcacttatggtatgcagcgcccagcaaggcgcgtggctggtggctgattcagaatgaagatcgcgaggttgtagtggccctcaggcaggacgaataa

SEQ ID NO: 36481 - DNA, 324 bp, Escherichia coli
atgactaaatttatcagtgttaaagttttccgtggcactattccagaaagtgaaaaatacggcgaatttagtggaatgcctggcgcatgtttccgtgtagctacagaagacgataaccgtgttaaatgtttccacatatcagaaccgcctttcgatccagaacatcttaaacatccaggtaaaattaaaacgcttattttcgcttttctgacgattaatccttaccctgatcttgaggttgatttagtcggcgcggaactggtcgcagaatacaaaataaccccggcagaaagcggagattctgaaattgagcgcatcaaataa

SEQ ID NO: 36482 - DNA, 471 bp, Escherichia coli
atggaaaaggtgaagacgttaattatcgccgccattgtttgtattgttgttgggcttgttgccgcgcttagtcattgccagtcagtgataaacacaatgcaaagcgagctaacgaccacgcaaggcgcactaaaaacagcgagtaacactattcagcagatgaaggagcgaaacgccgaactgtcaaaacttgataagaggtatcacgatgaaattaaagctatcagatctgacattgccgatctgcgcactggtattgatagcggcgctatccggttgcacgtcaacgccgaaccagtgcgattgctcgacaataccggaaccgccagccgcattgatggagccacctgtagactcactccagacgctgaatcggcttatctatccctcagagaacaattaaaagaaaaagacgcgaagatcaccggattgcaggactacatcaatacgcagtgcttacgcaaagaataa

SEQ ID NO: 36483 - DNA, 165 bp, Escherichia coli
atgcaaaagtatcgtcttgatgtctggatggctggtagtgatgattgggaaggttacggtttgcatgacagttacgaaatggcggtcgaggaaggagaaaaaactcgttcgattcttcggtcgcgccagagaattcaaaattactccagtacaaataccggataa

SEQ ID NO: 36484 - DNA, 384 bp, Escherichia coli
atgctgaacgaaaaacgttctatacaaacaattcgcgattgcacgagtgttatcgcaactcatgtgctgaataagcgcaaacttgaggtgcgtaaacttaacaacgatgcgactgcgccaaaagacactcgcttcatcgtaactttcaaagacgatgttgagaatgctggtgccagtgtaaaaccgttggctgaagcgattttcctgaacgatcgtgttcgtttcattgtgaagccagcaaaacaataccctgaattagcacggtttagtgaccaattctctgaaattattgagagtgcaattcgccgctttcttaatactcatggtagcattgtcagcaatacaactgctgatggtactgctctaagatggcacctacactag

SEQ ID NO: 36485 - DNA, 753 bp, Escherichia coli
atggcacctacactagaacgcacatactctaaaaatctttatgagtttcctcaccgtggggaaactcgcgtttcacgttttggctacctcatcaacgaagcatcgcttttcaaaatatctgaaataaccattatcgagcctgatgatgatatctgtctgtatatcctgatggagaaagttggagcacgagatcagggtgaactgatggacttcattctggacagaggcgaagatggaatgtctgattcggacattattcaagcaattctgcgttccgacatgctcgatcagagcagaaacacgacagcaggcagaattgccttgcgtgaatacacattcatcgaggatggggtagagattgactgctatcagattgcaggtgttgaaacagaaagagcaataaggcaaaggggactgtgcaacctcacgtatcgcttcctccttcattggtacgaacatcttgtctgtgattacaatcagaccattcctggcgcaaaaatctgggccggtccattaatgcgaacaggtgatgtaagaatttacaacgcaaaaactgagacgttcgaggatgtgttaggtgaatatgggatgggaaaagaaaccggctttttgccgtggaacagaggattgttacttgatccagaattaagctcttggtttccaaataaggtgcaagttaacgttgagaaatttatcgtacttatcatctcccgcaaaacaagaaccccagttggtttatatctaaaagattaa

SEQ ID NO: 36486 - DNA, 609 bp, Escherichia coli
atgcgtttagaaaattgcctagaagatatgagtgtcattagcaatgcccttgctactgtgacctctaacgcttcacgcttttcaaacgcaaagcctacagctaaatctgggcgtgattttattgaaccgcgtggatatcgacgcttccgtggcacgatgaagccctctgcgaaattcacaggattcaaaacacaaacctatgtgagcactgcggctattcctgttcaagaaaaccgcgatgcggcacagctggcaaagattgaaagcaagctcgcagaattgacggcgaaacacgttcgcttagcccatgccatctctggatggaaagcggaaaagattcgcagcaacttcggtgaaagtcgttacgaagaactgaagaacgttgacctgaccattcgtggtttggagggattcgttaacaagttgattcgcgactctgagcaacctcatccatatttgaaacgcttgagcgattctgtaactgagtatcgtttagctatctctgatctgctattgattttaaatcagtgttttaacgacgtagacgtcatcgaatcgcagactggcctcattgatgaggacgtcttcgccaacttctcattccattga

SEQ ID NO: 36487 - DNA, 411 bp, Escherichia coli
atgaagatcacatggaacagtgatagttacgcccaatttttaaagccgaccttcgatataaagcctgacttagagattacgttactcaacgatttcaagtcgtttaaacaaggcatgtacccagccatattcggcaaagatggcccgtatacggctcctggtgctatcgtgtcctcccgcgtctatcacgttcatctcttgttcacgaagcaagaacgaaccagcagccgcagcagattcaattgcacaagcgaccgtgcactcgtttacagtcaacatgcacatttccaagatgtgtatagcctattggcaatcttccctaacaacgcacatcagtacgcgaaagatccaaaaattatggtcgatatcgctgcctacgcggccgcatttcaagctctcactaacccttaa

SEQ ID NO: 36488 - DNA, 1191 bp, Escherichia coli
atgactgataccgctttttcaaaatcgttacaaaaagaagtcgatcctgagcagtacttggcgctaaagaatttagatgacagctcggttcatgctattgcccgtgacgatatcatctgccccatttgcaaagttggaggtggttcgttcgttagagccactaggaatggtggctatcacaagaaggcgcatttcagatttaccggtgaagatggtcaaggccatcatccatcatgtgatttctatggagatagactaacatctgaggtgaagcagcaccttgtctcattcacaaaagatcgaacaaagtattcgcaggtaatacgaaagctggtctgtgccggcatacaggaagggatatttactcaagaaaaaatgtggcagatgagggaatggttcttcaataagcgaaaggattccacatttgaaatatggttagaaagcgagcatttagactggctttattatattagtgggttacgtgatgcatatctagcatggacaactcctgatattctacctttcgcgcccattcaggttactgtgcctggtttttcttggaagcgtgcgattgacaaagaggtgctaagagttcacatcaagactctccagcaattgcgtgaaatttcagtctcacatagagacattgctgtaatcttagaacacataaacaataatcgtgaccgcacaattctcgatccatcgcatttggaggacgagataagtaagacctataagcttactagttttgtgatgggcaattacattgagtttcagacaaaaacggttagcgacagagcatacggggaagctaagtttctggcatttgcagcacttttgttgttcgtgtcagattgggacctcaacattgctattggtaagttttctaagattgccagagtgaaggaggttgatgacatgctggctggtaatttcattggtcttaatccttacttccgatacgacctggctaatgcagtgaagagattgcaggataactggccgattgaataccaagagttggagcattggaatgttgagaaatccatgcgtgacgcatatgaaaagtggcgtgcgacagagcctgaattcgctccacccctattgccagacttgtatattgccaaacatgagaaagaagtcgcacaagacgagcaagtcaggcagtggattaagaacggggatgtttga

SEQ ID NO: 36489 - DNA, 627 bp, Escherichia coli
atgagcacggtagcgaaagatctcacagaagatattctcaatgaaattattgctggtgcaaatacctcgcttgagcaacttcttgcgttagcactgagagccgaacgtcgagacagaaattgtttttatgagcgattaccagggaagcgaccagatagatcggatgaagaaggttgcgatatagactacatggagccttcagagatttatcaacttggtaaagatgacggctggaacgcttatcacgatgctgtgatgaagttggatgaaaaagttaaacctctttctcgaccggtagatcacggtttccgcgataactgcgaatgctctagttgccagaccacggcccgtatttgttccgaattgacagataagtccagcctaatctacgaagttaatgtaggcggtaatacatgggtcgaatgcacaagagctgcatacgtaagagcaaaagacaagggtgaattaaccagagttgttaccaatcacccaaataatgagcttaaagatcaccagattcgagaactggtgaacgagttgagagatattgcggttcagtaccacggaacgcagcaattgcgggagaagattgccagagcagtgaacaactcagtccgtaaaaaataa

SEQ ID NO: 36490 - DNA, 684 bp, Escherichia coli
atgtcccgttttgtcctcggtaactgcatcgatgttatggcccgtatccctgataacgccattgatttcatcctcaccgacccgccgtacctcgtcggttttcgtgaccgtcaggggcgtaccattgccggcgataaaaccgatgaatggctgcaaccggcctgtaatgagatgtaccgcgtactcaaaaaagacgcgttaatggtgagcttctatggctggaatcgcgtcgatcgctttatgtctgcctggaaaaatgcgggattcagcgtggttggccacctggtcttcaccaaaaactacacatcgaaggccgcatatgtgggctatcgccacgaatgcgcctacatcctggcaaaaggccgtccggcgctgcctcagaagccattgcccgacgtgctgggctggaaatattcaggcaatcgtcatcacccgactgaaaagcccgttaccagcctgcaaccactgattgagagcttcacacatccgaacgcgattgtgctggacccgtttgcaggcagcggatcaacctgcgtggccgctcttcagtccggacgccggtatatcggtatcgagctgcttgaacagtatcaccgtgccggacagcaacgactgaccgccgtgcaacgggccatgcagcagggggccgcgaatgataactggtttgaaccggaggctgcgtaa

SEQ ID NO: 36491 - DNA, 927 bp, Escherichia coli
atgccaaactggtgctcgaatcgtatgtatttttctggtgaaccggcacagattgctgagattaaacgactggccagcggtgcagtcacaccgttttatcgccgcgccacaaatgaaggtattcagctgtttctggccggaagtgccggacttctgcagatcactgaaaatatccgctctgagcagtgccccggagtgacggctgccggacgtggtgctgtatcaccggaaaatatcgcgttcacccgctggctgacacacctgcagaacggtgtactgctggatgagcaaaactgcctgatgctgcatgaactctggctgcagagcggtactggacagcgtcgctgggaagagttaccggatgatgtcagggaaactatcactgtgcatttcaccgcaaaaagaggtgactggtgtgacatctggggtaacgaggatgtatcggtgtggtggaaccgtctgtgtgacaacgtactgccggaaaaaaccatgccgtttgacctgctgacggttttgccgacccgcctggatattgaagtgaatggctttaacggcggtgttctgaacggtgttccttctgcatatcactggtatacagaacggtatggcgtgaagtggccttgtgggtatgacctgaatatcagcagtcagggggaaaacttcattcaggttgatttcgacacgccgtggtgtcagccggaaagcgacgttgttgcagaattaagccgccgtttcggctgcacgctggagcactggtacgccgaacagggctgcaatttctgtggctggcagttgtatgagcgcggagagcttgttgatgtgctgtggggggaactggaatggtcttccccgacagatgacgatgagctgccggaagtcaccggacctgcatggatagtcgacaaggtggcgcattatggcggatga

SEQ ID NO: 36492 - DNA, 153 bp, Escherichia coli
atgcttccccgttttgccggtatttttcagcagggaaaccgctggcttaactggctggagaaacaaccggaaggggcagtccgtccggtggtaattgaatcagtgacaaaaatcatggcctgcgggaccacactgacgggctacacgcagtag

SEQ ID NO: 36493 - DNA, 318 bp, Escherichia coli; identical to SEQ ID NO: 7542

SEQ ID NO: 36494 - DNA, 363 bp, Escherichia coli
atgtttatttccctgatgacagggcaaacagaaacaacggagataaaaatgaacatgcgtaatattattactgcacgctctgtaccggataaaaacgtatcagatgattttatgaatgctgttctcagtaactgcaccacaagaatcgtacttcctgcactgaaggaattcggttctgaatcattgccgcacaattttaatatggcagctgtcggtgtgatgaagaagggaatgtcgatgagcttattttcttctccgggaaatacagtggtctccggacatccctgtgcagggaaaacaaatctgacagcagagttaatttctgctgttgtggggagtaataaaaaaggagaagggcaatga

SEQ ID NO: 36495 - DNA, 135 bp, Escherichia coli; identical to SEQ ID NO: 35191

SEQ ID NO: 36496 - DNA, 171 bp, Escherichia coli
atgacaaaggcacagtgggccgccctgccccgggactgtaaggccgtgcgcagtgtggcagaagcagaagaccacggggcataccggtaccgccgcacaatggacaataatttccgcctggtgaatgtgtatatctccgacatgaaaatcacggaaatcccacagaaataa

SEQ ID NO: 36497 - DNA, 171 bp, Escherichia coli
atgacaaaggcgcagtgggccgccctgccccgggactgtaaggccgtgcgcagtgtggaagaagcagaagaccacggggcataccgctaccgccgcacaatggacaataatttccgtctggtgaatgtgtatatcaccgacatgaaaatcacggaaatcccacagaaataa

SEQ ID NO: 36498 - DNA, 294 bp, Escherichia coli
atgatcgtatctgaaaaaataaaggcgattcgaacggctgaaggactcagccagaatcaattttgcaaaatcatggagataccaattagcaccttgaaaaaactggaagggggatataacgaaccaggctggacaacactgatgaaactcacccagcacccactatttgaaaagtacacgctttggctaatgactgataagaccgccccgcaagctggtcaaatcgcaccggctctcgcacacattgggccagaatcaacggaatcagacctctccgagaaacaaactggttaa

SEQ ID NO: 36499 - DNA, 285 bp, Escherichia coli
atggtcatgaaacatgagggagaggaagaatcgggcggagccttacatatgagattccgccagattaaggggagtcaaaaacgtagatttctgcgggttattgcagaacgtttgtcactggtgttccttcgagttgctcgtccagaaatttgtgtgtcctcgctaagttcaatgcaagtgattgtgttacccctgctgaaaactgcaaccgcagaggaatatcaccagcagggtgcggaagcactacatcgagttgtaattcgcctgtcttggcgtcgaatttaa

SEQ ID NO: 36500 - DNA, 579 bp, Escherichia coli
atgagcaaaattaccagagaacgcgcagcacaaattgcagcaggcggcggatataactttgatgaggtggaggagctggcgcgtatcgcgctggcatcgctcgaagcggagccagattattatgtggtcgttacgagtattggtgtttggcagtcgttctgtaaaacaagggcagaggcagaattcatcgtttcgaagccgttcaacccaggctattcgatacgtgagatatatactaccccgccagcgccggtatctgtggctgatgagtcggcggttgagttgttggtaactgacctgatggagaggatcgacaagataactggcgagcgtcacagcgtagacacactaagttctttgcggattagcattgtgaaagcctgccgctccgccatgctccagggtgcagatggtgccctcactaatgaggataccaaacgggtgggcgagttggtcatgtgggttaagcgtttagcacactcactcagaaaatcaaaccctgatagcaagttacaaagcgatgcaatggactacttgagccggaagggattaattggcgtggaggatatactgcgatga

SEQ ID NO: 36501 - DNA, 300 bp, Escherichia coli
atgatgccagataaagacctgagtgatgatgtactggacgagattattgccggcgctaaaacatcaatggagcagtatcttgctctatcgcttaaggctgagcgtgctgccaaacaaaaggccgatggcaactctccggtgattccggatggttgggtgatggtgccggttgagcctacgccagatatgcgtgaggcataccatcaggcgcaggcggagtatgaagatgccgatggattatggagcccagaccaccaatggcaggcaatgctcgcagcagcaccgaagcaggaggcgtaa

SEQ ID NO: 36502 - DNA, 504 bp, Escherichia coli
atgacattagatgccacaacactacaaatcatcagtaatgccatcgtgcttcttggcgttatcgttgccatcggaacgattgtctacaacgtccgtacagcaaagaaaacgcaaacggctaactttctcttcgaaagtcgccaggatacgcagtacatagaatcgctacatgtccttaagcaggtacatcgttcaggaaaatccttccgtgcctacgtcttcccgtgcgacggcaacaagatcaccgaagacgaaatggccgaacgccgcaagtttcagtacatcctgaacttttacgaaagggttgccgtaagtatccgcgaaggtatttataacgagcagatgatcaagcggacttcatataccaccgtgatagaaacctacgatattgccgaaccgctgatcaaagccatcagggaacacatcaaatcagagacaacctatcaagagtttgaatggttggttaagcggtggaaagccaaaccgcttaagaagaataagtaa

SEQ ID NO: 36503 - DNA, 333 bp, Escherichia coli
atgcacgacacaccaccgggactattcgaacaaacaatgaaatggatcgccacttatctgccaacgctttacgcggctggtgcggcgctgagtatttcggcgctaatgagtatctacgatgggcagtcaatcgttaaaactgccaccggttcactggtctgcgggattgtcacgcttgcggtagctggttcgcttgagtatttcggtttgccatcaaacgcagcaattttcgtaggtgcctcaatcggattaatgggtgctgacaaagttcgcagcaaagttagcgggctattcgacgcgcgatttggagggccaaaaagtggaaatgagtaa

SEQ ID NO: 36504 - DNA, 285 bp, Escherichia coli
atggaagagaaaatgcaatatgcggctgaaccgcagaaatttaaattttgcctctcgcaactggtgaatattcgtattagcgatgaatggggagaggtacaggcccgcgctcaatattcaaatagcgagaatcaatatctcattcactaccaggcagcagataaatgcgcccgtactgagtggtttactcaatcggtactggatgcggtagaggatgataaacatccgggttgcccggtatttggtgctatcgctctccccaaaggtgcagtagtcgaagaataa

SEQ ID NO: 36505 - DNA, 597 bp, Escherichia coli
atggcgcaggcagaattaaatagcgaacttattgccacggtggccggtaatattaccgtatataactatgatggtgatacgcgtgaatttttatcttcttcaagtgaatatctggccgtaggcgtcggtcttcctgcaaactcctgcgttgatgcgcccggtgaggctaaagaaggttcggctatttgccggacagccgattttaccacctgggaatacgtcgccgatcaccgtggtgaaacggtgtacagcactgaaacaggcgaatcgttgatcgtttctttgcttggcgattacccggaaggcaccaccacgctggcacctgccacgccttacgataagtgggatggtagcgagtgggtcacggatacggaggcgcagcacgcggcggacgtggaagcggccgagcaacagaaagctgcgctactccttgaggcgcaggcaacgatcagtctctggcagacggagctacagttaggcattatcagagatgaagataaagccagcctgatcgcctggatgaactacatcaaagcagtgcaggcggttgacacgtcgaaagcgccggatatcacctggccggataagccggaataa

SEQ ID NO: 36506 - DNA, 183 bp, Escherichia coli
atgagagatgataattatcttgatggattaattgccggaggtactgttgcaatttcttttgcgggactgattctgttaatcgtgagtaatttgaaaaacgaagctgagacagaaaaaactgcattttatgaatgggccgattcacactgtgaaaaaattgaaaaaaattttaaatgttactga

SEQ ID NO: 36507 - DNA, 168 bp, Escherichia coli
atgaagcataaaaattttattccgaaatggtatgattcaactcttgagtcaattccccatcaagatgttaacacgattcacagtatcattgatgaacaccacaaattatggaatatccagatgtgcaacaggaactatttaacagactgttatccggtaaaaaactga

SEQ ID NO: 36508 - DNA, 159 bp, Escherichia coli
atgtcaggtttgacaaaaaatgaacatttagcatcatatgcttatatgcttatatgcttatatgcttatatgcttatatgcttatatgcttatatgcttatatgcttatatgcttatatgcttatatgcttatatgcctatatcattgtgtttgtgtga

SEQ ID NO: 36509 - DNA, 435 bp, Escherichia coli; identical to SEQ ID NO: 5323

SEQ ID NO: 36510 - DNA, 234 bp, Escherichia coli; identical to SEQ ID NO: 10186

SEQ ID NO: 36511 - DNA, 435 bp, Escherichia coli; identical to SEQ ID NO: 13693

SEQ ID NO: 36512 - DNA, 237 bp, Escherichia coli; identical to SEQ ID NO: 14872

SEQ ID NO: 36513 - DNA, 174 bp, Escherichia coli
atgcagcgtgtggccgggaaaaaccgttaccccattgatgtggtgaaaatcccgatggcggtgccgcttaccacggcgtttaaacagaatattgaacggatacggcgtgaacgtcttccgaaagagctgggctatgcgctgcagcatcaactgagaatggtaataaagcgatga

SEQ ID NO: 36514 - DNA, 267 bp, Escherichia coli
atgaatgattctctgataaaaatagttgactggatggttaataccactcgttctaatggtgtgttgtatcagtccgaggttgttgaatttctaatcaatgactttggggacgagttcatcaaaactaatgagaatggtaattacgctataagcagtactgtgttagcaaattttagaaaggctagcaaagacgatatagtttgggatcgtgaacagttagcttggcgtttacgcaatgaaagcgatttacccggacggatgcagtag

SEQ ID NO: 36515 - DNA, 1512 bp, Escherichia coli
atgcgccccaaaattggtgattttgaatttggtgaggtttatggagagaatgaggtattatttctcgataattactcgaaatatttttatgatataaataattcattaagtaaacttgatagaaaaaataaaatgctcgtaattggcaggaaggggacgggtaagacattgcttgttaatgtctactgtaacgccaagcgaaaaaataattatattgcagttgtggaatcattaaaagattttgtttttcatgaacttactcactttcaggggcaggatgtgtcttccacaaaatatgtaccaattttcaagtggatgatattggtcaatcttgctaagaatattgtaagtaataaaaaaggatttagtgaggataaaatagttcatttggaaagttttttacgttcttttggccatgtcgcgggcgagttaaggcctgagcaaacagttgaaataactagggagtaccaagcgtcgggtgaggttggtatcggatttagattcccagtattacgtggtgaagccaaagcaaaaggtggtgaggtcgagaaaacaaaagaaacaaaaaagaattatttggaatgtatggaatctttgcagtgttttattgttgacatgctaaaagagagtaataaaaaaatatatgtattttatgatgagttagatgataagtttgatgcaacagttgaatataaaaatgcaatgataagttttttaaatgctgttgtgtcaattaataaaactctaatgcaaaataaaatagatgctaaaattggtgcagttattcgtcatgatataataaatactttttcatcgccgaatattaataaaattattgaagataactctgttacacttgattggtgttctgctggagaacgagcaagtgattctgagatttttgatatgattgcttttaagatcaaaaactccactgattattataatgatttaaatggttctaatttgttcgggaaaattttcactgagagagttgcaggtgagcatagctctatttatattttacatagaactctaggtcgcccaagagatgccgttaggatgctaacttatattcaagatgaatatggagaaaatactgaaagatttgaaagttccatgtttacaaagatttctaaaaaatactcatcttatcttttacgtgaaattagatctgagcttgcgggacatttaagtgattcagaaatagatgacagtttttctcttttacgttcagtaaaaaaaagaggtttcactccacatttaatcaaggaaaaatttgaagaattgaagttaggagatggtacattaacgcttaataaaatactgagttgtttatttaaagtcggtgctatcgggaatgtactcaggagatctaaaacagatggcggagatgtttatttgtggtcatttaatgatgaagatttagaaatggacccaacgttgaattttgaaatacactgtggtttgtgggatgcactaggaattatcaagcctaaacttaggcaataa

SEQ ID NO: 36516 - DNA, 1179 bp, Escherichia coli
atgatgatgtacatcaacctgatttgggcctggggccacccggaagtttacatcctgatcctgcctgtattcggtgtgttctccgaaattgcggcaaccttctcgcgtaaacgtctgtttggttatacctcgctggtatgggcaaccgtctgtatcaccgtgctgtcgttcatcgtctggctgcaccacttctttacgatgggtgcgggcgcgaacgtaaacgccttctttggtatcaccacgatgattatcgccatcccgaccggggtgaagatcttcaactggctgttcaccatgtatcagggccgcatcgtgttccattctgcgatgctgtggaccatcggttttatcgtcaccttctcggtgggcgggatgactggcgtgctgctggcagtaccgggcgcggacttcgttctgcataacagcctgttcctgattgcgcacttccataacgtgatcatcggcggcgtggtcttcggctgcttcgcagggatgacctactggtggcctaaagcgttcggtttcaaactgaacgaaacctggggtaaacgcgcgttctggttctggatcatcggcttcttcgttgcctttatgccgctgtatgcgctgggcttcatgggcatgacccgtcgtttgagccagcagattgacccgcagttccacaccatgctgatgattgcagccagcggtgcagtactgattgcgctgggtattctctgcctcgttattcagatgtacgtttctattcgtgaccgcgaccagaaccgtgacctgactggcgacccgtggggtggccgtacgctggagtgggcaacctcttccccgcctccgttctataactttgccgttgtgccgcacgttcacgagcgtgatgcattctgggaaatgaaagagaaaggcgaagcgtacaaaaagcctgaccactatgaagaaattcatatgccgaaaaacagcggtgcaggtatcgtcattgcagctttctccaccatcttcggtttcgccatgatctggcatatctggtggctggcgattgttggcttcgcaggcatgatcatcacctggatcgtgaaaagcttcgacgaggacgtggattactacgtgccggtggcagaaatcgaaaaactggaaaaccagcatttcgatgagattactaaggcagggctgaaaaatggcaactga

SEQ ID NO: 36517 - DNA, 2253 bp, Escherichia coli
atggatgaccagttaaaacaaagtgcacttgatttccatgaatttccagttccagggaaaatccaggtttctccaaccaagcctctggcaacgcagcgcgatctggcgctggcctactcaccaggcgttgccgcaccttgtcttgaaatcgaaaaagacccgttaaaagcctacaaatataccgcgcgtggtaacctggtggcggtgatctctaacggtacggcagtgctggggttaggcaacattggcgcgctggcaggcaaaccggtgatggaaggcaagggcgttctgtttaagaaattcgccgggattgatgtatttgacattgaagttgatgaactcgacccggacaaatttattgaagtcgtcgccgcgcttgaaccgaccttcggcggcatcaacctcgaagacattaaagcgccagaatgtttctatattgaacagaaactgcgcgagcggatgaatattccggtattccacgacgatcagcacggcacggcaatcatcagcactgccgccatcctcaacggtttgcgcgtggtggagaaaaacatctccgacgtgcggatggtggtttccggcgcgggtgccgcagcaatcgcctgtatgaacctgctggtagcgctgggtctgcaaaaacataacatcgtggtttgcgattcaaaaggcgttatctatcagggccgtgagccaaacatggcggaaaccaaagccgcatatgcggtggtggatgacggcaaacgtaccctcgatgatgtgattgaaggcgcggatattttcctgggctgttccggcccgaaagtgctgacccaggaaatggtgaagaaaatggcccgtgcgccaatgatcctggcgctggcgaatccggaaccggaaattctgccgccgctggcgaaagaagtgcgtccggatgccatcatctgcaccggtcgttccgactacccgaaccaggtgaacaacgttctttgcttcccgttcatcttccgtggcgcgctggacgttggcgcaaccgccatcaacgaagagatgaaactggcggcggtacgcgcgattgcagaactggcccatgcggaacagagtgaagtggtggcttcagcttatggcgatcaggatctgcgctttggtccggaatacatcattccaaaaccgtttgatccgcgcttgatcgttaagatcgctcctgcggtcgctaaagcagcgatggagtcgggcgtggcgacgcgtccgattgctgatttcgacgtctacatcgacaagctgacggagttcgtttacaaaaccaacctgtttatgaagccgattttctcccaggctcgcaaagcgccgaagcgcgtcgttctgcatgccactcaggaattggtaacgctggggctggcgaaaccgatccttatcggtcgtccgaatgtgatcgaaatgcgcattcagaaactgggcttgcagatcaaagcgggtgttgattttgagatcgtcaataacgaatccgatccgcgctttaaagagtactggaccgaatacttccagatcatgaagcgtcgcggtgtcactcaggaacaggcgcagcgtgcattgatcagtaacccgacagtgattggcgcgatcatggttcagcgtggcgaagccgatgcaatgatctgcggtacggtgggcgattatcatgaacattttagcgtggtgaaaaatgtctttggttatcgcgatggcgttcacaccgcaggtgccatgaacgcgctgctgctgccgagtggtaacacctttattgccgatacatacgtcaatgacgaaccagacgcagaagagctggcggagatcaccttgatggcggcagaaactgttcgtcgttttggtattgagccgcgtgtggctctgttgtcgcactccaactttggttcttctgactgcccgtcgtcgagcaaaatgcgtcaggcgctggaactggtcagggaacgtgcaccagaactgatgattgatggtgaaatgcacggcgatgcagcgctggtggaagcgattcgcagcgaccgtatgccggacagccctttgaaaggttccgctaatattctggtgatgccgaacatggaagctgcccgcattagttacaacttattgcgcgtttccagctcggaaggtgtgactgtcggcccggtgctgatgggtgtggcgaaaccggttcacgtgttaacgccgatcgcatcggtacgtcgtatcgtcaacatggtggcgctggctgtggttgaagcgcaaacccaaccgctgtaa

SEQ ID NO: 36518 - DNA, 1044 bp, Escherichia coli
atggcgaaggtaatctgtttgtttaatcataagggtggagtaagtaaaactactactgcgtttaacttaggttggaagttggctgagaaaggtcataaggttttgctagctgattgtgatccacaatgtaatcttaccggaatgattcttggatttagaggcattgcggatttagaacagatttataatcaaccagtagccaataatattcgtgacgccctttctcctgcttttgagtctaaaccaagtgcgattgaacctgcagaagtgtttgatatcgagggtaatgcaaacttgcatcttcttgccggccatattgggctttctgagtatgaaactacattaggtgtagctcaagaattaacggggtcattattaccacttaaaaaccttcctggttctatcaggtatttgtttgacctaactgctgaaaaagtaaatgcagattatgtgattgttgatatgagcccgagcctggggccattgaaccaaaacattttaactacatcagattattttatcgtacctcttcatcctgattatttctcgtcgatggccctttcttctctcgctcgtactttaccaagatggaaacaatgggcaaacatggcttcacgaatggagttgctccagaatgctaactatccattccctgagtctaacgtgaaatttataggttctatcgtccaaaagtatagaccacgcaatggtcaggcatctgcggccttccaaaaatggattgatgaacttcgagataacttaatttctttgctaatcccgaaacttgttgagtttgatatgttggatgtagtcgagtttgagcaaaaagcagggatgcctccttctgacccaataatggaagtctctgatttcaatagtctgattgctatgtctcaggaatttcaagttccagtctacacactgacagcccaacagactggtcagaaaggcgctgtttgggatcagacggaaaaaaatatgactgtattttctgctgcatttgacacttgtgcagaaagggttatcgccctgacaagagattga

SEQ ID NO: 36519 - DNA, 624 bp, Escherichia coli
atgtcaacgccaaaatcgatatttgaccgtgcttggattagatgtgatttgttatctgtgacatatgcttatacttctactaatttttcgagtgtatttgattctcgagaaattctgagagctgagtgggttgctagagtttctgctttagatttatatattcatgaacttgtcgcgcagcggatgcttgagatttttcagggaaggagggctagtacgcagaaatacgataagtttacaatgccccatagtgttatgaataatatttttaacaacgcttggactcgtgaccaaatttatgacttagaagttaggcgacaacttgggattcaaacgtatcaaaccagtgaatctattgctgatggaattaggctgatttcaaatatttccttgtggagagaggttgcaatagatcaaggtgctacgaatagtaatgccgatttagaatctaagtcactgagattaaatctgaatgcgattgttgatcgacgtaataagatagcacatgaaggtgacatgcaaccaattacacctcgtgagccttggcccataactggtgatgatatggtagtagttaagaacttcatcgaaaagcttgtaatttcaatagacaagttagtatga

SEQ ID NO: 36520 - DNA, 861 bp, Escherichia coli; identical to SEQ ID NO: 5314

SEQ ID NO: 36521 - DNA, 780 bp, Escherichia coli
atgggaaaaatgaaagaactgctgtttgaaattcaggaagaacgcactgatgaatggattgcggaaaattacccggatgctgaggaaggaactcctgaatgggatgcggcagcacaggaatacagctggtttcaggactggatggaagaggcggctgagcagcaatattttgaggcttcgcttgccagtattcctgaccgtctgcaggatgcaaaagatgaattgtttgagttagagaacctgatgcagttcaaccaaccgggaattgtggagcgaatggcttacgttcattgtgtgagtgtgttggacagttttctgatgtacagtgcaagggcacttcttaatcatcctccacatttgcagcgatttctgcaggtagctgattcgctgattgctaataaggaagacagaagaaaattacgtgcttccaaatgggtcgagcaggaaccggatacagccactcctgagaaggtttatacctggcgagctcagtctcttgtggcgaagaaaacgtttcagagccacaaagtgataggtcggtatttttcaacgatgctggcaacaccgcatgagtggcctttgcaggaacttgagagggtaatcaaggtccgaaacgcactggtacaccgtgatggagttaccgaatctcttgaacccgtgtatatcagttcggggagtgtgcagaatgctatctgcacggtacgagcatttattaccgcggcggctgaaacccttctgcaggaagatgcactatacaggacggatgatggcacgttctga

SEQ ID NO: 36522 - DNA, 483 bp, Escherichia coli
gtgtcattagcatctaaattaagcactatatgttgtgctgacagaaggtggcgttgttgtgggggaaaagaaagatccgtaactatcaggactctgacgattagtcttaagactgtcggtaaattaagtgatatcagttgtcaggatattcatggagtcagtctgtatgcacctttggcattgaaacaaacatatgaagtgtacttcggatatgactgtacgctcaggaagtacggcagattccgtcaaaaatcacctgtaaggacagacttcagaaaaaacagtgctcgccgcagaccggtgaccgggcgaagcccgcgaaccggcgaggaagcgcaatatatctgtagttacagtgagcaggtatgccctgaagccttcataatcggtagtgaatgctgtttttctggaatgatttatccacatattcagaggcccgatccagtaaacagatccatgaatgatcaacaaaagatccattaa

SEQ ID NO: 36523 - DNA, 639 bp, Escherichia coli
atgggggattctgtgacaccggaagtactgagcaacatgattcgtcagtacttcagtcaggaacgaccagaagaagagactatacaggctcttaatcacctgcgcagggtgctgcatgaggtaagcccttttacgcaggaaccagtggactgtgtgctgtgggttaaagcggatgaggtggtggccaacgattacaatcccaatgtcatggcgccgggtgagaagaaactgctgaaacattcactggagcaggatggtttcacgcagcctgtggttgtctcagaagagaaggagcattacttggtagtggatggttttcatcgtcaattactgggcaggaaagcagatacaggaaaacgtctgaagggctggttgccagtgacctgtattaatcctgaaagaaagggacaggcctcacgtattgctgcgaccattcgacataatcgggccagggggaaacaccagataacctcaatgtccgatattgtcagggacctgtcgcggctgggctggacggatgaacgtattggtacagagctgggtatggaccaggacgaagtgctgagactgaaacaaattagcgggctgacggaattgtttcaggaagagaacttcagcccggcatggacggttcgctaa

SEQ ID NO: 36524 - DNA, 783 bp, Escherichia coli
atgttcggaaaattatcacttgatgcagtcccgttccatgaacctatcgtcatggttacgatcgctggcattattttgggaggtctggcgctcgttggcctgatcacttacttcggtaagtggacctacctgtggaaagagtggctgacctccgtcgaccataaacgcctcggtatcatgtatatcatcgtggcgattgtgatgttgctacgtggttttgctgacgccattatgatgcgtagccagcaggcccttgcctcggcgggcgaagcgggcttcctgccacctcaccactacgatcagatcttcaccgcgcacggcgtgattatgatcttcttcgtggcgatgcctttcgttatcggtctgatgaacctggtggttccgctgcagatcggcgcgcgtgacgttgcgttcccgttcctcaacaacctaagcttctggtttaccgttgttggtgtgattctggttaacgtttctctcggcgtgggcgaatttgcgcagaccggctggctggcctatccaccgctatcgggaatagagtacagtccgggagtcggtgtcgattactggatatggagtctccagctatccggtataggtacgacgctaaccggtatcaacttcttcgttaccattctgaagatgcgcgcaccgggcatgaccatgttcaagatgccagtatttacctgggcatcactgtgcgcgaacgttctgattattgcttccttcccaattctgacggttaccgtcgcgttgttgatgtcaacgacggatgaaaagtga

SEQ ID NO: 36525 - DNA, 1134 bp, Escherichia coli
atgaccaatattaatacagcttgtgtaaaaaataatgccagttatcaattaaataacgcattacctaacaaagaaaccatctccagcaatttttgtgaacgactggcacaatggggtaataagtcgcttaataatggtgaagaaagagcaattgccgtagagcgaattaaagaagcttacaattcgaacatggcatctcttgatttgtcatatcttgatttgagtgagttaccgcctatcccctcgacagttaacacgttaaatctggaaaacaattgtctcacttgtcttgactttactgacaatgccagcctcgtcaatatcaacctcagctttaataaaattaaaacgataacctttccaaatagttataaactgaaatttcttaaccttgattataacaagctagcatcgctggatgtctctcagcaagaatctctgattgagttaagtgcccatcacaatatgatcactgaccttatattacacaatcatcccaggatgaaacaaatcactttaaacgacaaccatattgcacatttaaacaccaaaaccactacaaaactggaatatttaaacttaagcaataacaatttattgccaacagatgacattgatcaattaatatcatcaaaacatctttggcatgtattagttaacggcatcaacaatgatccacttgcccaaatgcagtactggactgcagtaagaaatataatttatgacactaatgaagtgaccattgatttatcttataaactggcaatcacaaatatcgataccagtgatgaacatcttgcagaagtaagcgataactccgaaggaaatcatataaaagacaatgactcgatgtctattcgttatagatcaaaatattattccagagattacgccttaatagaagaagatacaatattttctgacgcagaactaaaagctattctgcctatgcgtcgcatgtacggggttggtgactataagtcaaattcctcttctctatcctcacactcggggctaaaggacccaacgggcacacccgtctgttattatattcataatgaggataaaccttccttaggttatggtccaacagccaataattggttaatccaatccttttctacagagttataa

SEQ ID NO: 36526 - DNA, 195 bp, Escherichia coli
atgatgattaatgaagcacaagcgcaggcaactgcggccagcggcagaggagacggacagtatccgtcagggctgcatgatggcgctgaaatcagcacggcggcgggtgggcaaacgaaagcggaagtgccgctgacgatggaagcggtgataacgagagaaaacctgatgctggcttatcagcgcgtggtgtaa

SEQ ID NO: 36527 - DNA, 777 bp, Escherichia coli
ttgaaaccgtggctgaagaagaactggcgcagcgtatggcaggcattgattgacggaaactaccagccgcgggcaatacgccggatggatatcccgaagccggatggcggcgtgagaaccttaggcatcccgacggtggtggacaggcttatccagcaggcgatagcgcagcagttaagcgaaatcgtggacaaaagcttctcagactccagctacggcttccggccggggcgcaacgcatggcaggcggtgcaacaggcacagcgttacatacggggtggcaaacggtgggtggtggatatggatctggagaagttcttcgaccgggtggatcacagactcctgatgacgcgtctgaccagaacgataaaggacaggcgggtgctgagactgatacgccgctacctgaaagcggaaatggttaaagacgggcaaagggagaaacggcaggcgggcatgccgcagggcggcccactgtcgcagttactgtcgaacatcctgctggatgaactggataaagaactggagagtcgtggacacagcttctgccgctacgcaaacgactgcaacatctacgtaagcagccggaaagcgggcgaccatctgctgaaggacatcagggcgttcgtggagaacaaactgaaacagaaggtgaatgagaagaagagcgcggtggcgcgcccgtgggagcggaagttgtgggctgacagtgacggaccgtgctgcttcaccaaacgccttggacggcaggcggaacttggatcgttacgtacttga

SEQ ID NO: 36528 - DNA, 1119 bp, Escherichia coli
atgtcattaacagataatttattacaggaacgtattcttgcggctaaaaataaaagtctgctttggttaaaaagcatgcaacttcagaacgcaaccccgggggtattgcgtgtgagcgagctacaccaggctgaacactggccgcaaatgcttctgccaggaacttatgatggtacgatggcgcgcgcgttattaggagatgacatcccggagaaacaagcactggcggactggatattgcaccatcaacgggaagacgggtattttgaactgccggacttaaactggagcgaaacgtggaaaggtccggatgcctataaaacgcgccagtacatgcgttttcacactacgaattactgtatgggagcgctggaagtgcttgatcagctcaacaggctgaaactgccttttataaaaccgtttcttgatcctcagtatttttgggcatggctggcgcaacgtgacatgcgcgatccgtggcttgaaggtaacaacatcgtcaatattggtagcttcctgctacttgaaaagcaacgagatccgaagggacccgcggcgcagcgattacaggatatgattttctggcataaccagcagagtgaaccctattccggtttctggggacccgggcagcagttcagccaagaggcacttctatttgcactctgcggtgcaacgcataatttgcacgtgttctatgcccttgaagaagatatccccaattttaaccagtcgataagccgttgcttggagcaacccttagccatccgcagcagctgtattgatgtcgatattatcgatattctggcgcatggacatgcgcgctgtccgcatcgtcgtgatgaaattgaacactggttgcgttgtatgctggtagcattactggacttccaaaatgcagatggagggttcccagacaccctgcttggtgagcgcggttatgatggatgggtgaagggttataaagaaccgcagggctacagtaatacgttcgcgacctggttccgctggattgcaattgcgatgatcgctcaagtattatggccgcaatggcagaactggcgtttccgtaaaactattggtataggatatttcaaagctctgtccgggcctgtttag

SEQ ID NO: 36529 - DNA, 399 bp, Escherichia coli
atggttaaccgtggaatagcagtaaataaggcgcgtaagttcaccttattattatgcgcaatctgcgtgctcccgattttattggtctccaacgtttctaatctgtggggggctgtaacgttaattggtattgccgtcgcggcgcatcagggttggtccgttaatctttataccagtgtatcggatatgtttcctaaacaagcagtgggagccgtggtaggtatcggctgcttggtaggctcgcttggctccattctatttgcccaagcgacagggcatattttgcaggcaacgggcagttattggtctatttttctgatgggcggatttgcatatctgctggggttcttgattatgcacgtattaattccaaccatgtctgttgctaaatttaaataa

SEQ ID NO: 36530 - DNA, 126 bp, Escherichia coli
atgctgaatattgatttgtgttatgtatgtgtgcttcttgtattcatcccttccgatgaacatcagaaacatagcatgatgttatgcagagaaaaatatgctgttcgcattggttctgtgaagtaa

SEQ ID NO: 36531 - DNA, 312 bp, Escherichia coli; identical to SEQ ID NO: 26039

SEQ ID NO: 36532 - DNA, 489 bp, Escherichia coli; identical to SEQ ID NO: 13622

SEQ ID NO: 36533 - DNA, 243 bp, Escherichia coli; identical to SEQ ID NO: 8603

SEQ ID NO: 36534 - DNA, 480 bp, Escherichia coli
atgagaacgaaaaaagcattacacaactttaaagttgatttattaattacttttttattggttttgctagggttttatattcgaactgtttttgtttcaaaaatgggaagtgatattactggagtgatgttactattcacacagttgacagcatatctcaatttggcagaattaggtattggaattgcagctgccagcgtattatataaaccgctcagcgagaatgaatacaataaaataacttacataatatctttgctctcagtcatatacaaatatatatttgtgtttgttttgattcttggcgttgttataggtatctgtatttattactttattgattctgtaaaggttgtaaatggcgtttttttatattgggctttgttcgtttttaatacatcgttgacatatagttatgctaaatactccacattattaactgcctgtctcttatacacatctccgagcccacgagactaa

SEQ ID NO: 36535 - DNA, 159 bp, Escherichia coli
atggacaagcaacgcggttttacacttatcgaactgatggtggttattggcatcattgccattttaagcgccattggtatcccccttatcaaaactacctgcgcaaagccgcactcaccgacatgctacaaacctttgtgccttaccgtaccgccgtag

SEQ ID NO: 36536 - DNA, 1104 bp, Escherichia coli
atggaccgcattattcaatcaccgggtaaatacatccagggcgctgatgtgattaatcgtctgggcgaatacctgaagccgctggcagaacgctggttagtggtgggtgacaaatttgttttaggttttgctcaatccactgtcgagaaaagttttaaagatgctggactggtagtagaaattgcgccgtttggcggtgaatgttcgcaaaatgagatcgaccgtctgcgtggcatcgcggagactgcgcagtgtggcgcaattctcggtatcggtggcggaaaaaccctcgatactgccaaagcactggcacatttcatgggtgttccggtagcgatcgcaccgactatcgcctctaccgatgcaccgtgcagcgcattgtctgttatctacaccgatgatggtgaatttgaccgctatctgatgttgccaaataacccgaatatggtcattgtcgacaccaaaatcgtcgctggcgcacctgcacgtctgttagcggcgggtatcggcgatgcgctggcaacctggtttgaagcgcgtgcttgctctcgtagcggcgcgaccaccatggcgggcggcaagtgcacccaggcggcgctggcactggctgaactgtgctacaacaccctgctggaagaaggcgaaaaagcgatgcttgccgccgaacagcatgtagtgactccggcgctggagcgcgtgattgaagcgaacacctatttgagcggcgtgggttttgaaagcggaggtctggctgcggcgcacgcagtacataacggcctgaccgctattccagatgcgcatcactattatcacggtgaaaaagtggcattcggtacgctgacgcagctggttctggaaaacgcgccggtggaggaaatcgaaaccgtagctgcacttagccatgcggtaggtttgccaataactctcgctcaactggatattaaagaagatgtcccggcgaaaatgcgaattgtggcagaagcggcatgtgcagaaggtgaaaccatccacaacatgcctggcggcgcgacgccagatcaggtttacgctgcactgctggtagccgaccagtacggtcagcgtttcctgcaagagtgggaataa

SEQ ID NO: 36537 - DNA, 606 bp, Escherichia coli
atgtctactgatgattcagccaaatttattcgacaaaaaaagcaagagtctcataaccaatttgatattgattataaaatgaattatggtgaccttgcccccctttttaagggtgttgaaaaacaacaaattgaagcgctaaaaatccaattggaaaatataaaaaatttcaaagcatattacgactcagaactcaataagtttgcttccgattttcgaaatttttccggtgcatttgcaattaactgggaggatttacaaaaaaactatcaggaaataaatacttccattaaagattacgatgacttattgcgagaaattaaagagttaaccagaagtcgtgataaattagtagatgataagaggactttatttgataacaaaagggacaattggagtagtcaagaaatacaggatgaagtagaggcgttaaataagaagattgctgactgtgacaataagatacgttctaagcttactattattcgaaataatagacttgagaatcaatataaagacgataaaaatatcagtgacgcgatgcgtaatattctggattggttcgaacggtatcccgatattgtacaaaatataacccgggcttaa

SEQ ID NO: 36538 - DNA, 615 bp, Escherichia coli
atggtttcccgcagccttactattcgccaggtcatatgccgccttcaccgcgctcggtgtcgccgcctccgtcgtactgttgctattggtcgcgttattaagtttcacaatccctttttgtgtcagggtaccgtcaggaatactcgtaatctgtccccaggggtgcgtatgactacccgcagccttactattcgccaggtcatatgccgccttcaccgcgctcggagtcgccgcctctgtcgtgctgttgctattggtcgcgttactaagcttcacaatccctttttgcgtcagtgtgccatctggtatatcagtaatctgactccaggtatgacgatgatttcgagcctcaatcagtgccgctttcaccgcttttggcgtagccgctttggtttcgtcatcactgtcagtggcgttactcaactgcgtaaagcctttttgtgtcaatgtagcatcagggtggttagtcgaatgttcgtgttcatccagttgcgaatcgacgtaatcccgtgttgccagcacaatactgggatcaacggtgagtgttaccgcagtcgtgttggacacttccataatgagacgaatgcaaacttgcttaccgcagccgccgggtaa

SEQ ID NO: 36539 - DNA, 666 bp, Escherichia coli
  misc_feature (559)..(568): n is a, c, g, or t
atggatgctgatgctgcgatcggccaaagtatggagatttttgatgaaattcaacagcaagaacagattaataacttcaccaccaatatttgcctgacccaggaaaaccagaaaaacagaaacgcaacagccacatttatccttttgattacctcagtaatggaagttattggtgataccaattgcgaatccattaaaaatcaatctgaggtaatgaaagaaattaaccatgtaagggaaaataaactcaatgaaacagcgcgtaaatatactaccacgactaaagttttaaaaatcattaatgactgtgtaacagtagctaccattgccatgagcgcaatcttaattgttgttggtcttcttgctgcagttccaagtggtggttcaagtattgcgggtgcattggcacttattggaggaatagcgggcgcagtagtattaggtgtagatatcacttgtcaaatcgctctgggcaccacggctaccggctggattttagggaaagttgtagaaggtctttcggctgcgattaaaacagttgatcccactctgctcgcannnnnnnnnncgcgcttctggacgttattggtgtcgatcaagatacgattgaactggttaaaagtatttacgcaagtgcagccgcttctattgtcatggcgacagtaa

SEQ ID NO: 36540 - DNA, 225 bp, Escherichia coli; identical to SEQ ID NO: 32523

SEQ ID NO: 36541 - DNA, 462 bp, Escherichia coli
atgagtcttattcttcataatgcgaagattgattatgttttacatgccgttaatatgttcgactgcattttcaaagatactaaaaatatttattccatcgatggactgcaagaggtattgcaagctgagaatatcggtgatatatctgccttagttagtttgcaacaagattctagtttattagccacatacaaaaaactgcgaaatattagaaataaattggctggccatatggataatagaaacagcctcgaggatcttttaacttcacttgacaaacttgattttgaagatgttttctgttttgttaatcgccttgataaggctgtgcatgataccgcaaaaacacatgtcgccattggagtgcattacatgcataatcaacccagagcatcaaatatcgatgacttaaacgttattgaagttaatggtcttgaaaatgaaccgtatttcaactcatga

SEQ ID NO: 36542 - DNA, 219 bp, Escherichia coli
atgagcacgcccgtgaaatatgccgatctcataatgctggcaaccgaacgccgcgatctcgggcttgatgatggctctttctggcctgtactggaaggcatcccggcaacagagatgttcaacgtgattccactggcaccgggccatgcctacgggatgtttatggaacactttaaagagctgcataagatacataaacaatccagacagcgaaattaa

SEQ ID NO: 36543 - DNA, 153 bp, Escherichia coli
atgcgtattaaacctcaagattttaagtttgatgtgttgactgttgctggttacgctaaccctaaagctaaaatacatttcgcaccttctgcttctggatttgattttaaatgggagtggggaagaaaaatttataagcttcatatcgagtaa

SEQ ID NO: 36544 - DNA, 207 bp, Escherichia coli
atggatccggctcaggcaaacaacgcctccgatgccacaggcccgaatcccttcatgattaacaaagcttctgcgccaaaagttgacggtgagatcaaggtctcttttgtgaattcgcctccgggtatgcgggttatggaaacgcgatccagcggtatcgacgtgaatcacgacgttggctacacccgatttggtatggggggctga

SEQ ID NO: 36545 - DNA, 336 bp, Escherichia coli
gtgaaaaacacggttgacctgccgacgtgggaagaactgactgacattcgcgacatactgaatacggcaattgataaggagttgtcccgtacaaccagcgatgcgctgtttctggcgctgcgccgggtgaaagcagatctgaatgcggatatcaacacgcgccttgaacagtctgcacggatcattcagcgcacaccggatgaggttttacccgcgctggtgctggcggcgacctggtttgataacgcggcgcgtgacgcggacattatccggcgtaatgccattacgcatcccggctttgtgccggtgatccctctgaaggtgccagtgcaatga

SEQ ID NO: 36546 - DNA, 516 bp, Escherichia coli
gtggttgccagcacccttcgtacgaccgcaatcagcgaagcggcgtatgccgtcacccgattgcctgcgccaacaacttccgcggtgatgcagaatgccgcagtggggcaggcaacaacacctgcgcagagcactggctggccttccgtcacgcatccggcactgaacaatgcaccggcggtgaaaaacacagttgacctgccgacgtgggaagaactgactgacattcgcgacacactgaatacggcaattgataaggagttgtcccgtacaaccagtgatgcgctgtttctggcgctgcgccgggtgaaagcagatctgaatgcggatatcaacacgcgccttgaacagtctgcacggatcattcagcgcacaccggatgaggttttacccgcgctggtgctggcggcgacctggtttgataacgcggcgcgtgacgcggacattattcggcgtaatgccattacgcatcccggctttgtgccggtgatccctctgaaggtgccagtgcaatga

SEQ ID NO: 36547 - DNA, 429 bp, Escherichia coli
atgcagaattccgcagtggggcagacaacaacacccgcgcagagcagtggctggccttccgtcacgcattcggcactgaacaatgcaccggcggtgaaaaacacggttgacctgccgacgtgggaagaactgactgacattcgcgacatactgaatacggcaattgataaggagttgtcccgtacaaccagcgatgcgctgtttctggcgctgcgccgggtgaaagcagatctgaatgcggatatcaacacgcgccttgaacagtctgcacggatcattcagcgcacaccggatgaggttttacccgcgctggtgctggcggcgacctggtttgataacgcggcgcgtgacgcggacattatccggcgtaatgccattacgcatcccggctttgtgccggtgatccctctgaaggtgccagtgcaatga

SEQ ID NO: 36548 - DNA, 522 bp, Escherichia coli
atgtctcttgcagtctacaatgaaactaatattatcatcgatggtactgatttttactcttacatggagagtattttattaaatactatctacgaaaacatgcattttgagtctttaagagaaatatctgacattagcatcgatcacaaaatatctctcttacaacaaaatggggctcatctagtttcggaattagctaatgagtctaaaaactatagttggtattctttcgacctacgcgaaattaaattaccaggagtactattgtgtgatgaataccaatatttatatccaaaaaggaggttgtccattgatttggaagactacatcgataaaactcttcaaagagcaataaggcttgataggctaaaaaataatgagctgagtagaaaacagcatttagaccctagggttgcctcagcttggcttcaagatattaagtcaggtaaaaatagtcgtatgatggttgagtactcttttgacgatgaagataatatggaagtaacaaaatatattagataa

SEQ ID NO: 36549 - DNA, 156 bp, Escherichia coli
atgtttgtcacgaataaagctatttatgttaccaatatcatttcgagtgtgcacactatctatctgttttttcaggacataaaaatcaggaataagttctgcaagtctatcatcatcgacttgatccatgatctcaaatttattaactttctttga

SEQ ID NO: 36550 - DNA, 870 bp, Escherichia coli
atgaaaatacttcccgttatctctcccaaaggtggagaaggcaaatccacctttgctgcttaccttgccggttttcttgccgatgcaggcctgaaaacccttcttgtggatgcagactattcccagcccacagccagcagtatcttcgcgctgcagcatgaatccccttgtggtctctatgaattgctgatgcaaatggtcagtgaccatacgcaatgcatttcgcagaccgccataaaaaatctcgatgtcatctactctaatgatccggacgaactgttgccgactgcgatgctccacgctgcagacggccgtctgcgcttgcgtaacatacttcagcatcctttctttaatcgttatgacgtcattattgtggattcgaaaggtgcaacaggcgttatgactgagctttccctcctgtcctctaccggtaatgtgatgggcgttgttaaacctatccttccggatgtccgtgaatttatccgcggctctcttcacatgcttacccgcctgaaaacctatgaaaattacggtatccgccttcctgatatttccattctcatcaactgtatcgaaaacactctgcttgatcgtgaagcaatggacggtcttgccgccatcattaacgaaaaacattacgacgcctctgcgctgggcaaccgtgacgtttatcgtttactcaatacccgtatcgaggcgctggatattttcaaactggggcacgtcaagcagcagcccgtgcatcgtctggaatacaaaacacgccgcaaaggtccggccgcagctgtcaccatgcacgacctcgcgtgtgaactgttccctgagtggcagagccatttcagtgatgttctgactcgggaggcaaattaa

SEQ ID NO: 36551 - DNA, 852 bp, Escherichia coli
atgaataacgtgacgaccttttcttcgatacctgcggagttgcagcaacctgaatcgctggtcaccattttgcgtgtctaccataaaatgctggctgcagggaccgcgcgcttacccgttggccatcttgctgcattgtgcgctgtacatggcggtcttctgcctcgtcgtttcatttctgcaaccgccaccgaaatatcgactggtaagccggatgcgttacgccagtggctgaacagtgtctggtgcccgttgcatcaggctgcgctggaaaacgatgcagaggcttttttctgcgctgaagttaacctgctgaagaccgaactaaagaaaacagacctgcaatcccttcattcactgggttgcatatcatgggctagcctgacagggttagatcttatctcttctctgcccgagccgctccgggcttaccctttcaggatggggttgctggtaagtcgtcttctggcaacatcagcccagccgggtgggaaacgtcggacaatggcggaatggagggaaattatatttccctcctccctcactttgcaggagtcagagctcctccctcacggctggctggacttgttcatctgccgtgcagagcgtgtcttcaccagcgcctgtcgccaggcagggctcagcgataccaggatgttaacgcttccggcaggggcatctcctgcaccacaacatctgtgtgccagtgtgcaagctcattgccgtattcccgagctttgccctgacgtttcagtcggtgaaacacatctcgcaccagaaactgcttcggctcagggccatgcggccccgttgtgtccagttcaacccattggccttgctgaagaggagtga

SEQ ID NO: 36552 - DNA, 342 bp, Escherichia coli
atgtgccgattcaatcaattccgcggaaaacgggttttcagtgcccgggccggaaatgaccttttcgtttttatagagccagaattgcaacgtaaattttttcccaaaatcaatgtcggacggcagctgtttgtttgtattcatatatcctcgtctatttgtcatatgaatatatatgtgctgtcagcacctcttgaccgagggcaccaaacttatcggtcagaaatagtgcaggcagtatcaggaagtgtaaacctggtggctgttcgtccggcaccctttttctcatatcccgttaataccattcgtttccctctgcagtcggaggtgtaccatggctga

SEQ ID NO: 36553 - DNA, 1371 bp, Escherichia coli
atggctgagatgcttattccccattctgttgatgccgagcaggccgttctcggtggcctgatgctggataacgagcggtgggacgaggtgattctgcaaatctcccctgaagatttgttttcccggcagcaccgtatggtcttccgcgtgatggctgaactggccggagaggggctaccactcgatctcatcactattacggaacggctggagaacagaggcgaacttgaacagtgtggtggctttgcttatctggctgaaatgagtaaaaacacgccttctgcagccaatattctggcttacgccggggtggtggcggagaaaagccgcctgcggcaactgatggcagtgggtaacagtcttctttccgatgtgcaggccccgaaagtcagctcggcggacattcttgagtcggctgaaggtaagctgtttaacattgctgaaaagggagccatgcagttcaacagtgagaccggcgttaatgaggcgctggataaactgctgacgcagctggaaagcatatccgccagtggcggcctccccgggacaccgacagggttcagtgaactggacgcgatgacctgtggcctccagcccggcgacctggccctgctggccgcccgtccttctatggggaaaacgtcgctggccatggccgcctgcaccgcggccataggtgccaaacctgacgatcacgtctttgtgttcagtcttgaaatgccctcagagcagctgatgatgcgcctgctggcgatggaaggccgggtggaactgtcccggcttcgcagcggcaacatggatgatgaagactgggctcgcgtgtctgcggctaccggtcgcattattgagtggaaaaaccgtctgatcattgatgataccagttaccagactccggctacactgcgtgcccgcgcccgtcgctatgtccgaaaatacggcagaccctctctcatcatgctggactatctgcagcttgttcgctcccccgggcaggaaaaccgcacgcaggaaatagcggatatttctcgctcgctcaaggcgcttggtaaagagctgggctgtccggtactggcgctttctcagctcaaccgtctggtggagcagcgggccgataaacgccccaacaatggtgacctgcgtgagtctggtgcgctggagcaggatgcggacctcatcatgtttatttaccgggatgaggtttataaccccggcacccctgatgccggtgtggctgagatcattgtcggcaagcagcggcagggaccaaccggtacggtaaaagtcaaatttgacggacgttacacactgttttcggagtttcaggaaggcagctatgacttcggttactgcagcgggaggaaacaggcatga

SEQ ID NO: 36554 - DNA, 1686 bp, Escherichia coli
atgagccgtaaaagttttaatgtgggggctgccatgctacagcccggacgccagtcgcaggcggctggcaatattagcgtcataccggcggctgaaatgcccatggtcctgacgctcgaccagttaagcccgaatcctgataatccgcgaacatcacgcaatccgcgttatgacgatatcaaggcttccatccgttcgcgcgggctggacaccgtgcccaaagtcacccgtgacccggatggtgagcccggtatgtacatcttcagcgacggtggcaatacacgttatcagatcctgtcagaactgtggcaggagaccggagaagaccggtttttccgtgttcatgtgttgttcaaaccatggccgggacggctgcagtgtgtcatcggccatctggcagagaatgaagtacgcggggagctgagttttattgaaaaagcgcaggggatccacaaagcccgcgctatatatgaagagcagatgggaaagacggtttcgttgcgtcagttgtcagagctactgacccgtgaagggttgccagtccattactcaacagtcagccgtatggaagatacgctgaaatatcttcacccgtggattcctgacctgcttgagtcaggtctcggcaggccacaaataacgtcactgctggcgctccggcatgatgcggaacgcgtgtggaatgagttttgcctgatttcagacaccggcggcaaatccttcggagatgtttttggccagtgttgtggccgtttcaattcaccggaactgtggtctcttgagatgtttcgcgatgaatttatcggtgatttactgcaggcgttaccccatccggaactggactatgaccgttgggtgatggaactcgatcctaaagaacgtaaccgcagacaccactttggcgagccggagacggttgccttccccgccgtaaacaagcctgttaatgctgctcatgcccgacacaccacagactcagatgagagtgaaggcgttccgctacctgtctcaaggtcacgtcctgaggtcacaggaggggctgtaacgcccgttccgggtaatgcgtcttgtccttctgaaacaccggttaatgagtccccccggcatgaggttcagccagatacgtacggtgcagcgccggtcatttcaggtgagagcggggatggtcgcgggctggttaacctctccgatgggtacggagaagcggacaatggggaggatggcctgctttctcttttaacaccagaaccagaagttgtcctgcaggatgacgtgccggtgattaatgacagcgtctggcatgtgccggcccatcaggacgatatcgaacacctgcagaacaccgcttttcgtctggcctgggagctgggagaggtccttggctgtgaagatgaaattcttccgcaacgcgacaatgacatgtctgccggttacggggcggcaggtgaggtgtgttctgaagccgccgcatttttgctgggcctggccggtgaagcgcctgtgctgcatcctgcggcaggagtgggtggtctgccggagcttttcaccggtggcccgggtgagggggaagtacctgtacttacagatgaagatgctctgaaactgctgcgtctgatgcgcgttatgcgccgtcttcgggagctgcaacgcggtctgacgtacggggaggatgacagtgatgaataa

SEQ ID NO: 36555 - DNA, 591 bp, Escherichia coli
atgatgaacagtttatctcaggctgcaaacggattactgatgcagctggttatggatctcagaagtggctatctccgccgctgcgaatcgctgggactgagccgtgaggaaatgcagatgttgcaggggctttcgctcgacgagcttcactacctttccggcagcgaggtgtcgatcatcaatgtgggcatcaatcacggcaatctggtgcgcctgctacagcaggcccgaatggaacagaaacggctccagcgcatcgatcgggcgctggcgctgggcggctccattgaactgatggccaattacttcgggctctccagtacggacgtggcggcccgccgtcgcattgccggtattgatgtccggccggggcgcggtaacgtactgagtgatgaggaaaacgccgccctgtggcgtcagtggcaaaagtccggcgtagaagatgcggaaagtgctgacgggctggacgtcatgatgctggctgcagaacagatgaatgtctcgctgacgtcggtctggcatgccgtccgcggctggcacaagacccggcagtcttctccggcccgaacgccggtaaggaaaacggcatga

SEQ ID NO: 36556 - DNA, 249 bp, Escherichia coli
atgaaatacataatggttgcgccgggcctgcgggctccgcatggtacgccgccgcaatgctgtctgaaggcgttacgtcaggttcgccgtttccggcagggggcgcgtaattacacccggctcgatgagaaaggctgcggttactacaaaatcgatctcggcccgttctggcgtctgctgagtcgcaacgaaggccgttcgtggcttcttctcagccacgaacgctataacagtgccatacggaaatag

SEQ ID NO: 36557 - DNA, 1239 bp, Escherichia coli
atgagtctgcctgcagaaagcctgattgcttacacgctggataaaatgaatgcccgccttgcggccagtccccggcgggatgatggcaggatacgtaacggcctgctgtttaccgggaatgtgcatgattccattccccgccgccttttgctcgacacgcggttgtcaccactggacaagatgggctggatgatgatccggctgtatgctcaaaataatgagggggcggttttccccagctatgacgagctgcagctgcagcttgcctcacccggaaaggggaaagcctcaagggaaacagtaagccgcgtcctgcttatgctgcgaataaccggctggctcagcctctgtaaacgcgtgcgtgatgataaagggcgggtgcgggggaatatctatgctcagcacgatgagcccctgacgttcagcgatgcggaaatgctcgacccccgtttccttgatacggtggcggatgcctgcctgagtaaaaaccggactattagccagaccgcccgcggagtgcttgacgatataaaaaacgaccccaccatgcgccattatcgcagccatcttgcgttgatcgaatcgcgtctggacagcccacagacgcccagccagatggcgaaacatcatcaccgaataccctgctccgcaccgggatcggaaaccgaactcagttataaacggccaggaatcgttgctaaaaaacagggttcggataccgaactcagtccggaaaggtacaacaattcactgagttcggaatccgtactaccagtaaaaacaggtagttatgaccgggttcggaaaccgaatcattacgtacgtagtatcacacacagtgtgaataaaaatacgtacgtaccgggtaaacctgtgcttcccgacagtctgcatgaacttgtgccggcagaagatattgccatgctgaccgcacagctacaggcgctgcctgaagaacaggcacaacttgtgctgctcagcctgcaaaaggtgatggcacgccagcagctcagtaacccggttggctggttgctggccgtgatgaagaaagcccgtgagggcaggttatacgcaccccgtcagggtggctatatacctgacagtgtcggacaaaaaacagttcagcgccccgagcagcaacaatggaaacccgaaccacgcgcctctgtccgcccggtatcggaggaaagtatcagggatctggtgaagaaaattagggaaaaaatcataaattcatga

SEQ ID NO: 36558 - DNA, 459 bp, Escherichia coli
atgttgccagtggcagcagcgctcagttttttaaccagtgttgccagtggcaacagtgctcgttttttagccagtgttgccactggcaacagcgctcagcttttagccagtattgccactggcaacagcgctcagcttttagccagtattgccagtggcaacggcgctcactttttaatcagcgttgtcagtggcaacggcgctcagtttttaaccagtgttgccagtggcaacggcgctcaatttttaaccagtgttgccagtggcaacagtgctcacttttcaaccagtgttgccagtggcaacagtgctcacttttcaaccagtgttgccagtggcaacagtgctcacttttcaaccagtgttgccagtggcaacggcgctcgctttttaatcagcgttgccagcggcaacagtgctcattttttagctggcattttcactggcaaaagtgcatga

SEQ ID NO: 36559 - DNA, 726 bp, Escherichia coli
atgtctgatggtaaaacaaagggcggaacaaccgcttcgcgagcgggggccctacagtcctctgttaatattctgctccatacacattacgcaatccggctttgggaaggcaggaaacgtgatgctccggacgagacaggggtgaaaaaaaagaggcctgaaataatcagcatgccgcaagccattgcgcgagctggtaatgcttcccgggattcagcggcagataatccctatgccgatatggttctgttacggctcgaagaagccctgcaacgagcaacacttaaaattaatgaaaacgtcagttcactggatgccatattgtcagccgtacccaaaggggtaacgctctcggaagtggaatcagccgctccgttaaatgtcagcgttttcagccgttcaccgttaggataccggtgcgtatggcttctggtcggatatgatcagtcagcaatgaaagctttccaggcttttcattacggactgatttcgcgttcgcaacgtgacgctatcctgaacaatggtggccatgctgttcgtcaggtctatggcgtgattcagccttaccggacacttgcagtgactcgccgtgatattgcagaaaaaaccacgcaagggcttgttgccattgaacgaaatggcgaacctgatccggatgtgttaagcggtaaaaaacgttcttcgttctcaccaccgcttaaaaacaccatagcagaggaggaataa

SEQ ID NO: 36560 - DNA, 555 bp, Escherichia coli
atgattcgtcctgtgttcctccttacccccttctttttgctgagcggatgcgcaacaacggactgggccgctattaataaacaggtcagcgataccgctacgaacctgacaaaaactttgggcggcaacggcagaggagaacgtggtgggatgccgctgatgagcccggtggggcaacaggccatgcagtccgtcgataaaacattctccgtgccggtcgatgtggatactgcggcggcccgcctgaagcgccattacaaatttatctccacgcaggagcttgaggcactgcgacaggccgcaaatgacggggactggaaagcggctgctgaagatgatgcgcatcccgtctgggacgccataccgggcagctattacaaaatgggttccgactggaacggacgtgatcacctggatatcgaaatcgagaaaaacggggccggcagcaggctctatgttgtctatcgctcatcatcatcacagcgtctggccggctccggcgtcaggaagctgatggatgatattcgcgctgttgcggcgggggaaaaacgctga

SEQ ID NO: 36561 - DNA, 2010 bp, Escherichia coli
atgcaactctttctgtgtgaaaaaccatcacaggcaaaggatattgcccgcgtgctgggcatcagcaagcgtgagcagggatttatcagcggaggtaacatcgttgtgacctgggcagtcggccatttactcgaaactgccagccctgaagcctatggcgagcaatatggcaggccatggcgtgccgatgttctgcctgtgttgcctgatgcctggaaaatggtcgtcaaagagcagacaaaatcgcagttcaccgttatcagtaagctcctcaaaaaggcgtctgaggtggtcattgccaccgatgccgaccgcgagggcgaggtgatcgcgcgtgagttgctggaatattgccgctacagtggcgcggtacgccggctctggttgtcagccctggatgaggccagcgtaaaggaagccctggacaatattcttcccggggaaaaaacagccctgttgtatgatgccggcaagggccggagccaggctgactggctcatcggtatgaatctgacccgcctttatactctcaaagcccgtgactcaggtgtgtcagaagtgctgtccgtcggtcgggtacagacgccgacgcttgccatggtggttaaccgggataatgaaattacgtccttcgtgccaaaaccctggtggcaggtacatgcgctgattgaaaaagggggcgtctgcttccgggcgggctgggtgcctgttgagcagtactgtgacgaggaaaagcgttgcatcaatcctcaggcagcccgggcggtgggacagctttgtcagcagcagggcagggctgcggtactggaggtgacacagaagcgggagaaaacggccgcgccgctctgttttgacctgggcacccttcagcaggtctgttcccgaaaattcggtatgggtgcaaatgatgtgcttgccattgcccagtccctttacgaaacccacaaagcgaccacctacccccgtacagactgcggttttctgccaacctccatgcagcaggaagtacccgacgttctggcagcagtggcaaaatccgatcccgctgtggcccctgtactgaatcagctggacagggaatttgtctcgcgtgtctggaatgacaagaaaatcaccgcgcaccatgccatcattcccacccggcaggcatttgatttgtcgcgcctcagcgccgatgagctgaaggtctaccagctgattcgccagcattatttcgcccagttccttccgctgcaggaatctgacgtgacggaggcgtctttcaatatcggtggacagctgttccgtacacgcgggaaagttggtgtggtgacgggctggaagtcgttgttccggactgaaaaagatgacgatgaagaggacgtcgacggtgacagcatggccctgccggcgctggcaaaaggggatatttgcgctgtcaccggttctgaggttaaggatatgaaaaccagtccgcccaaaccgttcacggaggggacgctgattgctgccatgaagaatgcggccagtttcgtcagtgatcccaggctgaagaaagtgctgcgtgataacgccggtctgggcacagaggcgacgcgtgcggccgtgcttgaaaccctcttcaaacgacactatctggagaaaaaagggaagcacatccactcaacgcagatggcacgggagttgattgcggcgttgccggaaacgctgacgagcccgggtatgacggcattatgggagcaggcactggatgatatttcgcaggggaaaatgtcgcttgcggcctttatgcaaaagcagctgcagtggacccgccaccttgtcgaaaaaggccgccaggacagtgtgaaaatcactgctcctgtcacgcctctctgcccgttatgcaaaggccccacacgtaagcgtaaaggaaaaaatggtgatttctgggggtgcatacgctatccggactgtgagggaattatcagtacaggtaagaagaaagcagcgaagcgtaaaaaaacatcgattaaagctaaaacagaataa

SEQ ID NO: 36562 - DNA, 468 bp, Escherichia coli
atgtctgcaaacaacacttctgcacctgcaaaatctgagtacttcaacctgacaatcaaaggcatcgggtatctcagcaacatccgccaggttaaccatcagaatggctcgttcctcagttgtgtaatcaatgcactgagtggcccgactgataatccggcctacgtccgttttgacatttctgtctcaggtaaagaggctaccagccttatcgcccgctgccagaaagccgtcgatgaagacaagaaagtcctgttgggttttaacctgagtaacccgtccacggacatatttacgctgaacaaaggtgaccatgccggcgaacagcgcgtcagtctgaaagcccgcctgatcaaggtggactggatcaaaataggccaggagatggtttataaggctgaaaaaacggactcccagccgccacaaaatggcaccatgcaacagcaatacgcagaaaactctttctga

SEQ ID NO: 36563 - DNA, 204 bp, Escherichia coli
atgcaacaaccaaatggcattctggccgcacaggccggctatacgttatcccttcaggttctcagcagcgtgcgtggttattatattggtactcagtgtgatgagggactggtgtcccgtgaatccgtggagtattacagaggccatgagcaggcggcacaggcgctggaaaacggcacatggacgcagcggacgtctgcgtga

SEQ ID NO: 36564 - DNA, 249 bp, Escherichia coli
atgactatttcagccaaacgggtcagcttcgatgaggccacgatgtgggttgaattcagcgacgcctgtagcatcggtgtgccgctggcatggtttccacgcctgttgaatgcttcaactgaacagcttaacagctatgaactgattccccgtggtatccactgggacgcgctggacaaagacacttctcttgcgggtttgcctgaaggccgcggcgacgtggcccatcgtccccataaagtagcctga

SEQ ID NO: 36565 - DNA, 666 bp, Escherichia coli
atgaaacgtaacacctctcacaacgtattttcaccaggcaggcttgctactgttctttccctgctgctccttgcgggttgtgtttcccagccgcaaaagttgcagcaacgcgcgcctgccgacccgatacccggcaccaccgtcacccgcaacgttcagtcggtctctccggacgagtatgcgcggacgccggaagtggtgcgctacgatcgttatctgctggtcagtaccgatccgcaggcggcccagcgcgaccctctctcgcagattattgatatccgcatcccctcatccctgcatcccaccgtggcggatgcactgcgttacgtcctgcaccagtccggttattccctgtgcgcgaccggctccgccaatggcgtgctttatcgccaggcattgccggcagttcagtaccagctgggcccgatgcgcctgcgtactgccctgcaggtcctggccggtccggcctggcagctggaagtggacgatgtgcagcgggtggtctgccacagcctgcgcgatggctaccggctgccggtcacccagcttccgccgccggtcagcacatggtccacgcctgcgccgtcagcaatgtcacaacctgctatcagcacacctcagtcagcacccgttaaacctgtcagcggagggtttctgagaaaatga

SEQ ID NO: 36566 - DNA, 750 bp, Escherichia coli
atgagcgaacagcaaccattccatacggccgccgcgccggcccgtaaaagattcagctggcgtcctcgccgccttatctggagcgctgccgcaggtgtggcgctggccggcattctggcgctgggctacaccgccttcagtccgggcatatcgaaccttgatgagcgtcttgcacgccttgaatctcagggcaatacagcggccactgttgagacagtggcggccctgcagtcagatgtgaacgcgctcagaaccggtctgcaggatacccgggaaaaacttggtgagatgcagcaggcgcttaacgcagcagcgaaacagaccggcagcgacgaagccgtgcatcagtcattacgcgcccttcaggatgcccggcaggggctggaaacccgcctgagtgcgctcgctgagcaactgacagcgctgaaatcacagtctgcacccgacacatccgtcgccgcaccggttaaaaaaactgaacctgcagcaaaaaagtcccgttccgctgacacacgtcgtactgctccgtcccttcgcgtggcccgcactgcgccttttgtgctgacgggcgtggagaaacggggagcggagtcctgggctgccatcgccccccggggctacagcagcctgtcgcaggtgaagctggtcggagagggcgaaactgtggccggctggacgctggtcagtgctggttatggtgaggcgacgtttcgggttaacggtcgcctgaccctgctcagagcagaataa

SEQ ID NO: 36567 - DNA, 723 bp, Escherichia coli
atgaaactgaaacatacctttttagctgccatcctgctgagtccactggccctggccgcgaccatatcaggacagacggatgtcagccgactggaatcaacacaacgggcggactccgcacaacgaaatctgcagcagcaggccggtcagtggggactcagtgtcgatgattatcagcgttatcagcagttgatgaaggggccccggggtatccagtcgccggggctcgatccgctttccaccctgggtattgaggcgcagacgccggcagagcgccgtaagtttgctgaaaagtgggtgaaggaagagtttgcccgtacccggaaggagcttgatttccagcgagaggtgaatgcggcctggcagcgcctgtatccgggcacattgccggtcaatatggggaacgcctccggcgtggcgcacgacagtggtggccggctggcgctgttcgtcaggtcaaaagactgcgctacctgcgacgcaaaactgtctgccgtgctggctgacaaccggccggtggacatctatctggtcgacagccagggcagtgatgatgtgctgcgcagctgggcgcgggaacatcacattcctgtggaaaaggtccgcaaatgccagatcacgcttaaccatgacggcggccggtgggtgcgctttggtaatggcctgatgccggttttactgcaacaggcgggagacggtaaatgggcaatcgcagcattctga

SEQ ID NO: 36568 - DNA, 636 bp, Escherichia coli
atgggcaatcgcagcattctgaccggcgtgctggcgctgggcttactgatggcggtcgtccctgacggccatgctgaccagacggtgccggagggttatgtccgcgtggccatggcgcacggtgtgcctcctgaagcgctttactcggtatcactgagcgagtcttcgcgcaaacttccccgcggcgtgcggccatggccctggaccatcaatgtggcaggcaaaggatatcgctatgagacgcgcctgcaggcctggcaggcgctgcaggtttttatgaagcgtcacccacttaagcgcatcgatgtcggtattgcccaggtcaatctgggctggaatggtcaccattttgcctcgacgtgggaggcgtttgacccttacaccaacctgaacgccgccgccaccattctgcgtgagtgctgggcgcgtaagcccggcagctggctggatgcggctggctgctaccaccatcccgcaggtggtcagcctgctgcacgttaccgcgccatcgtgagaggacatctggcaaaaatcaaccctgtcccccgcatttctgcgccggcagctgaagcgccccgttcggttgctgcacttacccccgatccaggcttcgtctggactgagcccgggagataa

SEQ ID NO: 36569 - DNA, 522 bp, Escherichia coli
atgaaaatgctttcgttactgctgttcaccctccttcccctgaccagccatgctgaactgaacgtcattgctgacctgggggggcaggatgctgccccgtattttgaggccatcaataaacagcccggcatgagcatggaaaacgacaccacatcttcacctccgtcacctgtgctgcagggcgaagccgccatgctgccggtactcactccggagttgcgcccgggcagtgttcccgaccgaccgctgcagttgcccggcatcggggcgttgtttctgattggggatgatgatctgtcccgtgaatggctgaaggccaatgccggtgcgctggctgaacagcatgcggccgggatgatagtcaatgtcacagacatggatgccatgcgcgagctgcgcgagctggcacccggtgtcagcctggccccggcttccggcagtgaactggcccgtcgcctccagattgcgcattatccggtacttatcaccgataccggcctgacgcagcaggttaagccgtaa

SEQ ID NO: 36570 - DNA, 573 bp, Escherichia coli
atgagcgcgccagatatcaacggtctgctgatggcgcacccttatggggcggtcatactggtcgtccttttccttgtggtgatggcctttctgaacctgcgccggcaggagaaagccagcacccgtcgtcaccggcgataccgggcaacggcggagcgggtactgaataagcttaacagcctgccgggaggcgggcagcgcctgacttatttgcgcaaaatcagtccctatgtctttgaagagctggtgctgtctgcctttgagcgtcaggggctgaccgtggtgcgtaatgcctcctacagcggtgacggcggccttgatggccaggtcatcatcgacggcgagtactggcttatccaggccaaacggtacagtcgtgctgtttcccccgcacatgttgaggacttcgacaggcttctcctggagtcgggccgccgggggctgtttatccacacgggccgtaccgggaaaaaaagccacattcttcgtatgacgtcaccgcgcctgcgcattatcagcggacaacgccttctggccattctcgccggtcaggacgtccggcagtatctctga

SEQ ID NO: 36571 - DNA, 282 bp, Escherichia coli
atgcatatcatcatcctgaacagcctgcgttacgttttatgtcttctgtcctgtttactccgtcatgccgttttcctgccttgcgctttcagcggtgtccttctgcttgcctggcttgttttcggccatccggtcagtgacctgaacgacctgctgcagaaggcgttaacggcatggcgcaccgcgtcgcccggacacgacatgtgggaggaatgcccggagccggataatgcggctccgcaaagggggcgtatacctgcatggccgacggtaaaattataa

SEQ ID NO: 36572 - DNA, 2100 bp, Escherichia coli
atgagtaaccgttacgttattgaagccctgctgcgtccggccgttgagctgaataccgccgtggtatcgggcgtggcggcgtatgtctgtgtgcaggccccctgggctgtcgccctggctccgtctgtcagctatgtcaccgctgccgggtttgcggcgctggctgtcacccgcacccatcaggggatgaagattattcgctaccgccggaatctccgccgcctgccgcgctatgtcatgagcactaaacagatccccgtcagtcatcgtcgtctgtttctcgggcggggtttccgctggacccagaaacacacccagcgcctgcaggatacgctgcgcccggaagtggcccgttacctgcagccgagccgcttttacctgggggcgcgtcagctcgaaatgatgacagagcatcgtctgccctggctgagcaagctgctgagtgccgatacaccgctgaacccggtgcggccactaccaccggtgggcgggaatccggcgttacacggcatcgaacccgacgaaaaagatgtcacccttgccctgggggagcgagttggccatacggtggtttatggcaccacgcgcgtcggtaagacccggctggcagagctgctggtcgcccaggatatccggcggggtgaagtcaccatcgtgtttgatccgaaaggcgacgcagacctgatgaaacgcgtctgggcagaggcccaccgggccgggcgcggggatgaactttatatttttcatctcggctggcctgaaatttcagcccgttataatgccgtcgggcgttttagccgcgtgtcagaggtggcgtcccgcgtggccggtcagctttcaggggacggcaataatgccgcctttcgtgaatttgcctggcggttcgtcaacattattgcccgtgcgcttgttgccctgggggaacgccccgactacacgctgattatgcgctacgtgaacaatatcgccgatctctatatccgctacgccgggaaaatcattcatgagcaactgccggctctgcagacacagattgaaaataatcagcaggttctggaagaggaggacgtgccccgtaacatgcaggaacagccggatgccttacgcatctgggccatcgaggttgccctgagttcagaggaaggcaagaaactctatgatcctatcctcgacggactgcggtcagcggtgcgttatgaccgcacttactttgacaaaatcgtagcgtcgctgctgccgctactggaaaaactgactaccggcaaaactgctgaactgctggctcccgactatctcgatatggatgactcacggcccatatttgactgggagcaaatcatccgtaaaaaagccgtggtctatgtgggactcgatgcgctcagcgacagtatggtggcaagcgccgtgggcaattccatgttcgccgatctggtgagcgtggctggccatatctacaaacacggtattcatgccgggctaccgggagagggggagagcaaggtcccgattaacctgcactgtgatgagttcaatgagctgatgggggatgaatttatcccacttattaacaaagggggcggtgctggcatgcaggtgacggcctatacccagacgtcttctgatattgaggcccgcatcgggaatgcagccaggacggcccaggtacagggtaactttaacaacctgattatgctgcgcgtcagggaaaaccgcaccgccgagctgctgaccacgcaactgccgcaggtggaaatttataccaaaacgctggtctccgggcaccaggacacggcagatgtcaacgctgaccaggacttcacctcaagcacccaggaccgcgtcgggacggtaaaagtccctttgctggagccggctgatattgtgacgctgccgaaagggcaggcatttgccctgctggagggcgggcagctgtggaaaatccgcataccgctgcctgccggggacgctgatgatgtgctgatgccggaaagtatcgagaaaatagcggaagagatgcgacgcagctatcacagcggcgaatcctggtggcgggatggtccgggcctgaacgtgccggtcactggaggggagaatggctga

SEQ ID NO: 36573 - DNA, 759 bp, Escherichia coli
atggctgaggtaaaacgttccccacagcagcaaacgctgccggagcgcaaacacggcatgctgtataacctgctctggggctggccatgggccctggtgggcgtggtgctgtcctcgctgctgctgagcctgctgatggaatatatcggcatcgccttcttctggccggaagccggggcggcgcacagtgaagcggttatgaacaccgagctggggtggctgtccactgagttcacccgcagcctgctgctgtctgagccatcggtgacggttgtgcgctgggtgagcacagcgtatcagagggcctttgtggacagtggctttcttgactgggtccggcagcagtatgcgcaccagatgcacagtgacaatgccgttacgcgggaaatcaacagctggagcggctggcttaccggctacctgcgtgaatacctgctggccacggtatggataagcattatcaccctggtccgtgtcaccatcctggtgctgtccgttccactgtttgtactggtcgtggtggtggccctggttgaggggctggggcggcgtgatctgcggcgttatggggcggggtatgaaagtgcttttgtctatcaccatgccaggaggctggtcaaaccggcagccgtggtgcccgccatgctgtacctttcctggcccactgcagtctaccccaatctgctgttgttgccggcggctgtcctgttgggtatcgctgtgaccgtgaccactgcctcattcaagaagtatctttaa

SEQ ID NO: 36574 - DNA, 324 bp, Escherichia coli
atgatgaaacagcgtgatacccccctggaactcgataatctggtctgcaactattttgggcatgattacgacctgattgatgacagtgaagcactccagccccaaattgacgcctataaccagcaggcaggaaaggcgatgcagatggcgcttctcgaagacattgacgattttctggctctgggggaaacgatgaatatggccttcagtaaaagatatggcgtgtatttcgatccgttgctgtggggcatcaccccccatgattttctggttctgatcagggagcaggtaaatatcgccttagcgaattctcaaaacaactga

SEQ ID NO: 36575 - DNA, 360 bp, Escherichia coli
atggctgaagaggcaaagagaggtctgacctacgacatggcattgcgggaaggcttcgaacctggagaatatgactggaaaaatatacctgagggaacatggccggcacgactggatttcaaaatatggtccaataaatccaaagtcggccatcttgtctgttatatgacgtctcttgataattcgcagcgttacaggctgtcagcgttccgcctgggggacggaacgacacgatatacccccaaagacggcgggatcgatttttcagaaaaaggccttgaagggcatatctttctggtcacaaccgtgacgacatcaaaagggggaagcacctgggtcgccgcggaatatgatgaataa

SEQ ID NO: 36576 - DNA, 345 bp, Escherichia coli
atgaactcaaatcgtccggccatgcggcgcaaccgtcgtgtcccgggcatcactggcctggtattgctgatctttctggcatcagctgcacaggcatccgagaaagacgagcttgcgtctgttcagcgtcagctggaccaggttcaggcttcgcttgaaagggcccgcgtggcggctgtacaggccgacccggctgaccgtggccgctttttctttgattaccgtcaggccacatccgatctcaacaccatccgtagcggtattgaccgctatctggagccctcccgcgcgcaaccgcgtgacccgtcttttgtggccggtaattaccggcgggagcggccctga

SEQ ID NO: 36577 - DNA, 243 bp, Escherichia coli
atgcctatgacgtccgaacaaacgaacgcgtttaaagccggctccggcagtcttgatgtgaacatccttcatctgctctgcatcggggcactgctggcgtttctttttctgtgggccgcgtgggcgctgtcggatgtctggaccggctggagtaacacaacagtgcgggacgcggcgctggggcgtttcgccgtccgcaccgtgctgctgttgcttgtgtgtatctggatgttcgccagttaa

SEQ ID NO: 36578 - DNA, 387 bp, Escherichia coli
atgcatcaatttgagtctgttgttgcccgtctgtgccgtctcgccagtcgtacgctgacccgcgccggtacgcttgccattctgggctggctcaactgcaggccggcctttgcggggttgccaagcgttgaagcgcctgcgtccggaggcggaagcggactgtccggacaaatcaagggctacctgcaggacggcattgttatcggggggctggtcgtggcggccgttgccttcatcaacgttgctattgcagccctgcacaccttcaccgaagtccgcaatgagaaagccacctggaccaaattcggggcaattgtggtggtgggggtggttctgctggttaccgttatctggctgctcggcaagtctgccgacattctgctgtag

SEQ ID NO: 36579 - DNA, 357 bp, Escherichia coli
atgcagaccattcgttttttacctgaccgtctcaacagtgagcctgtggtgtttcgcggattcaccacccatgagatggggctggctgctcttgccggcgcgggtgcgggtctgctcctgtcactgccgtttatcccgcttgccggctgggttgtcgttcccaccggcctgctggtcatgccgctgctgcttgtctggttcggcggccgctggatggccagactcaagcgcggtaagcccgagaactggctctggcagcgactggagacgaaaaaacgccggctggggatgggcaatccgaaactgattgttgatgcccggggctggtcagtgaaacgtaacaggagagcctcatga

SEQ ID NO: 36580 - DNA, 660 bp, Escherichia coli
atgagccgttttcgccatgcggtaaaagaccgcgaccagcatattcagacgctgcgtattgtctgcgccgtgcttgcttttttccttatgtttgcctgtgccggctggatgctggcacccagtaagctgaccgttcataacccgccggatttacgcaccggcagcacgcgcccgtggtgggaagtgccgcccccgacagtctactcctttgcgttctacatttttcagcagctcaatgcctggccgaaaaacggcgaggtggactattccgccaaaatcaatgctctgtcgccgtatctgacgccgtcctgtcaggatttcctgaaagcggatgcaaagaaacgcggtgacgccggggagctcaccgaccgcgtgcgcgtggtgtatgaagtacccggtcgcggttaccagtcacagagcgtgaccgtacaggatcgcgatcactggatagcccgcctggacgtggtggccgatgaatatttccatgccgagccggtgaaacgcgccctggtgcgttatccgctgaaagtggtgcgctgggaaggtgatgcggagcgcaacccgttcggtctggcgctggactgttatgccggtgtgccccagcgtctggaggcgacaccgcctatacctgaaccggagaagtcaggagtgtttcagtga

SEQ ID NO: 36581 - DNA, 951 bp, Escherichia coli
atgagtataaaaaaacactaccgcgccgggctgatggcgctgtccttcgccctgctgcccctggcgacgctggtatcacgtcctgccggcgcagatgagctgatgaaatgggagcgtattccgctgcagatccccctgaaggtggggcaggagcgggtggtctttgtggacaaaaacgtccgcgttggttttccgccggcgcttaacggcaagctccgggtgcagagcaccggcggggccgtctacctgaaagccgacagcgccttcccgcagacacgggtacagatgcaggatgtggaaagcggcgaggttctgctgtttgatatcgccgccggtgaaaaggggccggccgaaccagtccggctggtctacagcggtgacgtcagcacgctgagtcacgccagcgatgcggctggtcagtcaggtggtgcagaccggagtgcttccggatcaggctcgtcagcccccaccgactgcgatgatggcaagcagacaaagcgaaaaagaatccgctacagcgcccccattccggtgctgctgacccgttatgccgcccagagcctttatgcgccggcccgaacggtcgaggcggtgcctggtattcacccggtcaacctgcatctgccccgacgcgtcagcacgctgtatccctctgaaccattaacggttacgccgctggcggcctggggggtggcaaaccgcagcgtggtggctctcaggctcacgaataccagcagccgtaaggtcgttctggatccgcgtgcgctgcaagggcagtttgtgtccgccaccttccagcaccgctgggttggtcccgccggcacgccggaagacaccaccacggtttatgtggtgaccgctggtcgtccggagagcgccttcatcgctgagccgtctgtactgcgtaaagcggcccgcgcagtaaaacaggaggcccgccatgcagattaa

SEQ ID NO: 36582 - DNA, 1500 bp, Escherichia coli
atgcagattaaatccaatgccctggtgaagtttatcgtgccggctgtggtgattgccgggctggccgttgggctcaaaagctgcaaaaacgaaccggcagagcaacctcaggcaaaacaaagcggctctctgaaaaaactctcgccggatgaactgaaggcgctgggggtggaaggtgacacgccgcaggacaccctgcgcacgctcattggccggctgaatgatgtgcgtgaccgccagaaaacgctggataagcagaacgcggatttgatgaaagaaaacgagcggttgcgccgacgcaatcaggacgtttcaggacaggtgaatgaggccgttaatgatctgcgtgagcagtacgacaagcggcaggctcagcttcagaacgaacaactgaacatggcggcgaaaatccgggagctgactgacaaacttaaaaagtctgacagcgagaaaaaaacggcggacagcgatatcccgctgggactgggcctggacggcatgggtagcagcaccggaggaagcgcttctcagggcagcgacggcatgatgtgggtctcgccgacggaccagaaagagacggatctgcgcgacgcggccagcggcaaagcgtcccctcagttcccgacctcttttctgggggacaatgagctgacccgccagaaagcggcctatgaagcgaaagtgaagggccgtacgaatgaaaaaggggcggaagagagcgccgagccggtttacacgctgccggaaaattccacgctggtcggtagccgcgccatgacggcactgcttggccgtgtacccatcaacggcactgtgaccgatccttatccgttcaaggtgcttatcggtaaggataacctgacggcaaacggcattgagctgccggacgtcgaaggggcgattgtttccgggacggcaagcggtgactggacgctgtcctgcgtgcgcgggcaggttaacagcgtcacctttgtcttttccgacggtacggtacgcacccttcccggaccagacaccagtaacaacgccggcgggcagaataataacgctcaggctaaacaggataccggcaccagtggcggtatcggctggatttcggatgaaaacgggatcccgtgcattggcggcgaacgtaagtccaacgcctccacctacctgcccactatctttggcctgtcggctgccggtgcagcgggtgaagcgatgagccagggacagtacaccacgcagaacaacgtgaatggcatttcggccaccatgaccggcgacgccgggcgggcggcgctggggaaagccatttccggcggtatatctgaaaccacggactggatcaaacaacgctacgggatgacgtttgatgccatttatgtgccgccgggtgcccgtctcgccgtgcatatcacccgtcagctggccattgattatgaagataaaggccgtaaggtgcgctacgacttcaccctgccgggtggcgtcagcgacaacggcggactggactga

SEQ ID NO: 36583 - DNA, 408 bp, Escherichia coli
atgtacagaacggttttcattctggccctgagctgtgtaatgctcagcggctgctcaacctccaaagaggaaatgctgccggcgggcgataacaccatgctggaactgtggaacggggcagatggcggcagtacttcccgccagtcagcggtggcccgtgacacgctgcggcgaccgctgactggcagcgaaacgcaggcggacgcgcaggccgaccgcagctacagccgtactcaggaaagtgaaatcacccagcagtttccccggctgcccaaccccgacatggtgatgtacctgtatccccatctggttgacggtaacacgccggtgccgggttacagcactgtgttcccgttctacagccagacgcagtatgccatgcctggcgagcgcacggaggctctgtaa

SEQ ID NO: 36584 - DNA, 2859 bp, Escherichia coli
atgttttcactgtttacgcgtaataaatccaccgaccggcagacgccggttgatgacggccagtccgttcagtcagatgaaaccctgaccgcggccgtgaagggccggcaccccctgaagcgccccgggaaaatgacgcgccaggatgaggcgaaggtctatcacgccaatccgtccatcattgactttttgccctgggcagaatttctcgatgaagagcagtgtctcctgcttgacgacggcgtgtcggtgggggccgtttatgatgtgacaccggtggcgaccgaaggacgaaccgaagagcgcctggagcagatcagggactcagttgaggatgctcttcaggacagctttgatgaacatgacgtgaatccctgggtcgtgcagttcttctgccaggacgaggacgacactgacgcctacctggacagactgcgcgggtatgtcaagccgcatgcacagcacacggcgtttactgacgcctggctgggtgaaatggagcgccatattcgcagtatttcccggcctgagggactttttactgactcgctgattaccggccagccgtggcgcgggcagcagcgccgtaccaggatggttgtttatcgctggctggggaaaagccgggatccaatgccgccggtggcgatgctcaaccaggtgtgtgaccgggttgtgaatgccctgggcggggtggggatccgctgcacccgacagaatggtctgcaggtgcatggctggctgctgcggctgttcaatccgtcaccggactgggtggagaaaaccacgctctatcggcaggctgcttatgcagaccctcgcgagacgcctgaaggcaccgtgccggtcagcaatgattttgccgaaaccctgtggttcacgccgccggtttcagacccggaaaacggcgtgtggtggattgacaacaaaccacactgtgcggtggcggtggaaaagctgcgcacaccgccggagccaggtacccttaccggcgagaaaagccggggtgaaaagaaaattaatgccctgatggatatgtttccggaagggaccatggtgtgtatgaccgtagtggtgcagcctcaggaccggcttgaagagcagtttaaccggctgtcgaaaaatgcggtcggtgagaataccgagtcgggccgtgttcgccaggatgtgaagacggtaaaagagtatctgggcaaccggcacaagctgtaccgggcggggatcaccttcctgctgtgcggcgatgatatggtcagcctgaagcgcaagcgactggcgctggccaccgtattgctgggtgccggtctgcagccggtacgtccggagtttgaagaaggtccactgaactgctggctgcgggcactgccgatgtgttttgacccggacagtgacaaaaaacactggtatacccgtctgacctgggttcagcacctggccggtcttctgccggtaaccgggcgggaaaccggcacggggaatcctggcttcagttttttcaaccgcggcggggataccctgacattcgatccgctcaataagctcgaccgcacccagaacgcgcatctgctgctgttcggcccgaccggggcgggcaagtcggccacgctgtgtgccgcgctctcccaactgatggccgtccatcgtccgcggctgtttattgcggaggccgggaactcgttcggcctgctggccgacttctttgacagcctcgggctgacagtgaataaaatcagtgttaaacccggaagcggcgtcagtctgccgccatttgctgatgctcacaaactggtggaagaaggcctggccgcacaggccgtggatgagagcgacctgccggatatcgacacggacgacgatggcgaggatgacaagcgtgacgttctcggtgaaatggaaatctccgcgcgcatgatgatcactggcggcgacccgaaagaagaggctgaccttaagcgtgcagacagggcgatgatacgtgaggcgctgctgatggccgcgcataccacgtataaggaagggcggcagatgttgccgtcggacctgcagaaggcgttgtatgacattgcctctgacaacgatgagggtgccatcaatgtccgcaatacccaacgcaaggcgaaagcggcggaaatggcggaatccctgggcatgtttacgcaggccggcagctttgaagcggagctgttcaaccgcgaaggagagctgtggccagaagcggacgtgacgctggttgacctggggcatctggcgcgtgagggctatgaggcgcagatggccctgaccatggtctcgatgaccaatatgattaataacatcgcggagcgtgaccagttcctggaccgggatatagtcttcacggtggatgaggcgcatatcgtcacggtcaacccgctgctgtcgccgtatatgaccaaggtggtcaagatgtggcgtaaactcggggcctggctgtggctcgctacccagaaccttaaagattacccggatattgccgaaaaaatgctgaacatggcggaatggtggatttgtctgaccatgcccccggaagaggtgaaagatatcagccggttccgcgcgctcacgccggagcaggaatcggtgctgctttccgccagtaaactgtcggggtgttatacggaaggcgtggtgctggcgaagcggatcgaagcgctgtttcgtgccgtgccgcccagtctcttcctggctctgggcatgacggaaaaagaagagaaagccgaacgccgtgcgctgatgaatgaatttaactgcagcgaactggaagcggcaaaacgcgtcgcgcagaatctcgaccgtctgcgcggtttgacggagaaacaacaggggcctgccacggtatga

SEQ ID NO: 36585 - DNA, 378 bp, Escherichia coli
atgatgacactgaagtatcctgaacccgccattcatgagcacagcggcggcgcgcttttcaccctgtcgcctcagggggagcccggtgtgcttccggcgacccatcagcaccttatgaggctgcgggcaatgataagacagcgactgaatggcccggtgatcattacctgtcaccctcatcgggtgggcctgagcagctgtgtggcggtgacggtggaggacagactccgcagagtggttaatattcttatcaccgtcagcgggcagggaagctggccggcagaggaggagtacgaacatccccgctggtatattaccgtgacggatacggctgatatgctctatctggtgctttggttaggtgatatattaggctaa

SEQ ID NO: 36586 - DNA, 3798 bp, Escherichia coli
atggctctattggatataataaaaggctgttggtcagcaaaagaaaccggtgctctgattaacgaacaacagggagtctacgataccttaacgccgaaaataattactgatagtagtgttgaaccttattttgatgcgctggattttgctttttccaaatcagatgtaaagaatattgctattactgggccttatggtgcaggtaaaagcacagttattctgtcttatcttaaatctcgccttaaaaaagattttatcaatgtatcacttgctgatttctctttgtcaggaaaaagtaaaaaatcagaatcagagagtgtagagattgaattaagcatactccagcagatcctgtacaaggaagataaagataatcttcctgactcacgtattgatcggatccagaatagaaatgaaaaacacattctttctctgttcgctacagtattaacagtgattgggccgatactattgttagctgtgtcgctttttcctaaaaaaatactgtctttatttagtgtagatgaagttactttaaatacgatcattgatgcctatccagcacggttgatatttagcgctgttataggaactgttggtttgttttttattgttcgggctgcttccaaagctggtgtttttgataagaaaatcaagcttagcaagatagcatttcttcaagggagtgccgatatggcatcccaggatgcttcttcgctgcttaataactgcctggatgagatagtctatttcttttcccgttcacaacataaaattgtgatatttgaggatttagaccggttaggtaataccgaagtatttgttaagctaagagagattaaccagatagtcaataataatattcggggggagccggttaggtttgtttatgcctgccgggatgatattttccttggcgcagatatccggactaaattttttgattttattttacctgtgatcccggtgatggattcccggaatgcctacactcatttgaaaaataagctaaatgattttcctgccaatgagcagccgcttcttaaacagatgtcattgtatataagtgatatgcgttctttgcaaaatattgtcaatgagttcaatctgttcaagaaagtggttgatgataacagagatcaggcgaagattttttcacttatcttttataagaatatctatgcacaagattataacttgacggataaaaaatctggtgttctatattcatttattcacgactatcgtctgcgtaagttacatgaaaattattttattagtctggataaaagattagagcaacttaataataagttggtggagataaaaaaagaatctgcaaatacagataaagaattacggaagcagattgttagtcgatttattgctcctgaattatggcctattgtgaattttaacctcgaacaatattacagcaatggtcattatgtggttcatgctgaaaatttatgtaacgatgaaaaaagtttcattgagttctttagtaaaaaatcacaactttatgtggggtatggtaattataattctagtaattatcaaccgattaaccattcatccataatagaagaatacaacctaagaagtgaagttattgccaaggataaagcagcagaatataaaaaaatcgtcagtgaaattcatgaagttagggaaagcattcgtactcggaattccatctcactggccgagttattaaaattgattggttgggaaagatttaaggcgattgctgaaggctatattgaaaaatgtgatgatcgcaccattattgatcaggaacagctggaaactatccgcgatggattccgattcggcggcttagaggctctttattacctgttgaccaatggtcatattatgcaggatttcatgatgttccggtctgtctttcatcagggaaccatctctgttaatgataatgactatatcaaagccgttggtcgccatatgggttgcgaagaagtaaaccagaattttttactggataaccccaaagatgtgttggcagagttaattgaccagcgttatcaatatcgcgctggagccatccaccatcagatcatagcattattgcttgatagccgtcataacgttgacacaaaaaacttgtctgagatggttgcgatgatatttcaacaatcctctatggatattctggctatatttaatgttttggaatccagttttgttgatgccgattattttacccgatttgtggttttttccttgggggataaccgctatctggataagatgatcgcggtgattgaggaacaggaacgcagcagtattgtcacgtcaattgttacgaaaatgatagctttaatcccacctgcagtatcagccaatcaggaaaattatcgacaattcattgtcgagcaaggatttagtttgatttcttttgttgaagattgcaatcttcaacagtttcttaacaatataaagcttcttggcgttatttaccatgatatttctttgccgatcactccctctgaaacacaggcattaacctttatcgctgaaaaccagatgtatactcttgataagagcagttacagagttatcgtttctggattgttacagtatgaaaatataccttgcgatcaggtcgatgagctaccgtggtcattactggagatgtaccaattatccagcgtaaaagagtacgtgaatgacaatatcgatatttttgttcgggaaatatttatagactctaaggaaagtagtgaggctattgtatcggtgcttactcaccaaaatttaagtgatgaccttaaaattcttatactgaaaaagatgcaattcactgtggtggatttacatggttttccagagcatattgatgctgatatggataaattatcataccatgatctgttctaccgctacgatcgcgtagcaccgggatgggatgctttattaaattatatttgcgaagagtgcaaccttgaggtattaacccaatatattgaagagcatgctcaggttctgagcaaaaaggaagtcagcttggtggatggggaccgctatgaactcctttatatgaaggttatttgtaatgataaacttagtgatagtgcatatttctcagtgttaaaaccagtttatattaatgttcatcattgggatgaacggttgagcctggataatttcctgcgtttgataaagaatagcaaagtagagttggatgcagactcctttaaacaggctgtgcaatgtttcatttcggacacggctaagaggaatgttgaaccatttgtactttggttttctcaatttaaagaaacctttttctccgatacggattattatcttcgggatgaccatgaggataattttcttgaggaaatgttggttgctattcataactcccagtgcttcactcttttggaaaaagccacgttgctgttcaaataccgtgagcgttaccatgagtcctttcttggtgggctaactatctctaacgaaggtttactcgctataatcgcgctttctgccgatgatgatttttccatgaatctgatagtcaggctgttaaaaaatggctatcgcagtcgagtggagatcgcacgtctggtgggcaggcttgagcaaaaagaattttctaagatatttaatcaaaaaagcgcaacactgaatctaagtaatggtcaacaagcggagctatttctgtctgctttacagcaagctggccttatcaaaaaatggtcacttcgggaagcaggcaaatatcacgtacactgctgttatgaagaggatgagaacgacatcgattga

SEQ ID NO: 36587 - DNA, 399 bp, Escherichia coli
atgaaattacgtaattttatccttctgacggcattgatgccggtatccgttctggctggcatggtggtatataccgacagccaacatttgcctgaaaacccaccccctgacgtcgtggttgttttgctggatgaacctgaccaactgcaggccgagatgttcggggaactgcctgcagacccgcagcaggccgaagcacaggtcaggcaggttatggcatcatctgcctggcaacaaaaacagctgcaactgaatgattcctatcgtctggtggtccgggcctgggaactgggcattaaaaaagtcccggctgtggtgtttgatgatcgcgatgtggtgtacggcaccacggatgttgacgtggccacttccctgcgtaaacggggaggtggtcagtga

SEQ ID NO: 36588 - DNA, 993 bp, Escherichia coli
gtgaatacaaaaccttcccgcatcagaaccacggtgtgctcgctggcggttgccacggtactgggtacggcaactgcgccggctgctgttgcagcacttaatacggcacagattattgccagcgccgtgtcgcaaaactgtatcagctggcgtgtcagtggcatctgttactggctgttctgtaccccctttggctgcaaagtgcgcacgtcggtcaaggtcacccacttcctcccccagacagtcgtttcaacctatgtcgcaccgggcggcaacccgtggcaggaaatggcgtttgtcagccagaccaccggtgggccggagaatgcggtaacccgcgggctttccggtgtttctgccggaggagccaatccggccgacatgaaaaatcccggccagcgcaagtccgctgttcgtttcaagtatgccgatgcgattggccacccggccacgtccctcattggcggcagtattccgggctattcctgtgatacagccgccaccccgttaatgccttacttcctgagtacgctggattcggttgcctggcgcacgggcgtaccggagtcgctgtatccggaagcgcttgtgcccggccagcgggaaatcggcagtcaggccgcagcgaacatgtggggcaacgtctatccccgttcgggatttatcagccagaccgatgatgacaaagcctctgccgttgtggcgcagcgtgtggcagacattatcacccgcgccgggcagccgcacgtgtatcaggtgcttaaaggcaaccgccgtgccggatactggccaccggacgaggtcacggaaaataccggtacgcgcaatcacaaatggcagcggctgaccccccacatgacacagtcatgtgccgtcttcccggacgggagccacactgccgctagcgataccaatgaagcttttgcgctctggcagccctacagctgctgtaaaaagcgcgggcagaaatttctgggcagcactgatatctga

SEQ ID NO: 36589 - DNA, 1461 bp, Escherichia coli
gtgaaaaaaataccttcattttcagccgttcgcgtaagcctgttgctgaccggctccctgctgaccgtcctccagctcgctcacgcagccggtgatgacaattccatcctgggcatgtccctgccgcaggtgaacaacagcgccatcggttacggcaagtccgtcgatggtgcggtgtcggacaaactgttctacaccctcggcggcggttcggtcatttcccagccggccacacgcggcaatatgcaaaagctggggctgaatgccggctggagcagtgacctgatgtgcggcaactttgacctgaaaactactgtcggcaaccagctcaacggcgtcacatccggctttaaaaacctgatgggtgacgtaattcagggggccaccggcgcggtggccagtttgccggcgatggtcattcagcgggccaaccccggtctgtatgacatgctcaccaacggcgtgcttcaggccaatgtgtcattcgacaaggcgcagctcaactgccagaacatggcgaaaaagatgatggacttcagcgacagtagtaactggacgcagcaggccatgatggatgaatacaagtctgttgtgaacagcggagacactgacgcggttcgtgcagatgaggcggggaggaaagtcaccggcacatcgggcaacaactggattggtggtcagaagcgcgggggagcggggcagcccgcaatacgtgtcacccatgaccttgtcgctgcaggctacaacatgatgaacggtttacctgttaccgctaattcgacagtcggcaaaagcagctgtaacggtggcgcatgctctaaattcggtagtgctgaagaggcggcggccatgaccgtgaaggtgttgggcgacaaatccgtgcgtacctgcgccaatgccagcgaatgtaccagcggagatgcagatgaccagccaggtacgaccgttgccggcaccggctttgccccactgctggaagaggcaaccaaatccaacgctgagcagctggttaagctcgtcaatggtacagaaaagcccacggccgcgaatctggcgaaactgaaaacaggcggactgccggtgacggcaggcgtgattaaagccctgcagcgtgatccggataacgcggccctggctgcccgccttgccggcgagctggccatgtctgacacggtcgaaacggccctgctgatgcgccgcatgatggtcaccggtatgtcagagcctaatgccgccgcccagccaaaagcaataggtgctgccggtgagcgcatcgaggcactggaccgtgaaattgcggcgctcaaaaccgagatggagatgaagcgcgagctgtcacgtaattcggtactgaccatcattgagcgggacaacgaacgtgtcggcacaaacccgatgattcagaagacggacaatgccgacagtagattccagaagctcgataccccggatgcagaataa

SEQ ID NO: 36590 - DNA, 354 bp, Escherichia coli
atgaaaatcagtcatcgcgacctgctgcgtaaaacaggaaaaggattaaaagttgggctgctatatctgctgctcctggcactgatgatgaccgtgggactctggctggccgatatcgggatgcgtcatccggagagcgtggcgtctctgaaacgatggatgcacgcaacgcgctacggatggctggcatggcggttggttctttactgtgcatttgggtgggggctgtggaaaatctggcattcaccgggcttacggcctgaatatcgtcggccactgctgcgcatcgccagtgccagcacattattcttcttggtctgcgaatactccgtttttttcggtatgggaggttga

SEQ ID NO: 36591 - DNA, 1536 bp, Escherichia coli
atgacaacgaacagctatctggagtatttcctgactctgctgggctggctggtcaataatggcctctgggacgtccttgtcagtaccggactgtttgcgctgcctttggcctttaaggtagtgggtatctggctgaaggttcgcgaagaaggagaagatgaaggcaacaagggcatgctgtcgttacctcgtatcgagaatgcgctttatggtgcgttcttcgtgatgattgcctgctgcgtgccgctgattcaggtgagcctggccacgctggaatttgataaaacccgggcgaaaacgtgcggaacctggacgccaaaagcgcctgatgaaagtggttacaacaacattatctccagtatggacggtgaaagcgcagctgcgccgctctggtgggtgcttgtccataagttatccaaaggcgtgactcaggcatctgtggccagcattccctgccggccggatctgcggaaactgcggtttgaggtgcagcggacgttcattgagaaccgtgcactggctgatgagttgcaggattttaccaacgactgctactcacttgcgctttaccagtggaaacggcgtgaccaggggcagacaacggataaagccgttttgtcagatctcagttggataggcagcagtacctttcttaaaggggactataccaccctgcagtcgaaattgccgcgcaggatgttctcctggagtgacgctcgtgacagcggccggccgaataccggtaatgggggatacccctactgttctgagtggtggttagcagcagacactggcctgaaggccagggtgatgaagcaggttgatgacagctactggctacggttatctgcggcgatgaagatgattggcagcagtcagactgattatcaggaggaggttatacgccggctcgtcagcccggcgaacctgacggtatctcatggcggtgaagtgtataacggctatggtggtaatgcggatatgactgcaatgaacgctgcttcccgtatcgccggtacggcaggcgcttcagttgcttctctgggcgcattccctgctctggatgcgatgcgccaggctctgccgatggtgcaggccgttatgctgatggccatttatattatggtgccattgatcctggcctttgcggcctatgaattcaaaacggtgatcaccctgacatttgttatttttgcagttaatttcttgacgttctggtgggaactggctcgctggctcgacagttggttgctgacagcgctatacagttctgatacccactcacacttcaatatgatgggattccagaatacatcggatgatctgattatgaatctggttatgggaacgatgtttctcgttctgcctgccgtgtggataggggcactgagttgggcgggggttcatttaggaggctctattagtaacagtgtgaaagctggaacggacaaagctacacaatcaagtgaaaaaggtggaaaagtcgcagaacaagctgtttcgtctttcgcaggtggcgtgatgaaaggtaaataa

SEQ ID NO: 36592 - DNA, 219 bp, Escherichia coli
atgaatatgttcatgaaaaaaatgctgaatgcgatgctacctaaccctcagccgaacaatcacactgacgatggctctttacatacatgcttcaacgatgaagctgaagcgcttttcaatgatgaccctcttattgaaagaacctacgaggggttaaacgctattgatgatggtgcaccttatggagagtcgtatggaacatggtctgatagcgactga

SEQ ID NO: 36593 - DNA, 564 bp, Escherichia coli
atgcttgaaaggagattgttagttatttgtatctcgttagggcttatgactggctgttctatggaggagatttccacagcaaacaaacagttaagcgatggtgcctctaatatcatgaatacattacggggaaatagtggttcaactgataatggtatgcctcatttggctccatcgcagccttcaaaaaaagagtcgtcatctaaaaaatatgatttacctgttgatgtggatacagctgctgcaagacttaaacgccattatcagtttgtttccaacgacgaagtggattctatcagaaagaaaaatactgatggtgattgggttgcaagcgcaataaccggtaatggccaggaatgggaagcgatgcctggaagttattataagatgggatctgactggggagatcaggatgatcatcttaccatagaggttgaaaaaaatggggcaggaagtcgactttatattacctatagttcatcgtcacaaaaaagactggccagtgacagccttcagcagttaatgaagaatattaaagatgtagctgaggggacaaaacgataa

SEQ ID NO: 36594 - DNA, 657 bp, Escherichia coli
atggataatttaaagcagcgccttctgattctgattttcgggttatctaactatctcttcttttatttattattaacatccatcgatctaaatatattcttaatgaccaggcttaatttctcaatgttacatttgcagataattaagccactaatcatgcttttaatatttttatccataactcacttattaaataacacctcaatttatcaagggataagctggggaaaccccagtaaacagtcatttgtttttcttacgctcataattattgcttacgctgcttcatactaccttacgccgaaagaacccttcgttacagatttcactaaaggtttgtcgcacgaaatggcagctgtaaaaattgcagccactattattattatcccacttctggaggaacttgttttcagaggaattatcctgagttcttttctaaacgcttttggtgaaaaggcgggctatattatcggcggcttgactgtttctgttttgtttgcgcttatacacacacaatattcatttcccaccaaaatacaaatgtttgcattgtcattaattttctgtggagcaagatatcaaagcagagggcttcttttgccaattctgttacatgctttttgcatcgcacttggtttgtatattgaattaaaatga

SEQ ID NO: 36595 - DNA, 903 bp, Escherichia coli
atgtccagattcagtaaacaactgcacaaacaactcgtcactcttgctcgccaggggcggggaagttataaaacggtggctgaccgttcaagaattgcagaacggttttctgagcggctttctgaactgaatattcagatcagggacgtaaaacatataaaaacttcccatatagaaaagtatatagagagcaggaaggctgacggtctttctctcagaacgttacagaatgagatgtctgctatccgttctgttttattatcagcaggaagaaataaactggccgatccgaatcatgccagcctgagtaatcaggcactgggaatttctggtgctaaccgggacggtactaaactccctattacagatgaaaaacttaacgctgtagttaattttgctcaaagaaaagatgaaggtgttgctcttgctgtgcaactttcccgatatcttggattgagaacagaagaaaccgtgcagtctgcaaagtcactaaaaacatggagacaggcactgattaataatcatgaacgtgtccgtgttgttttcgggacgaaaggcgggcgtccaagggaaacaacagtttttaaccgtgaaaaagtgttatcaattcttgatagggcaattcattatgtcaataatcataacggaaaactgattgataaaccctctcttcataccgcaatagatcgttaccgcaatattgtaagagaggcaggaatgaacggtaaaaatgcaccgcatagtttacgttacgcttactcccgcgatgctgtaaatcatcatattaaaaatggaatgagccgtgatgaagccgaggcacttgtttcaatggatcttgggcatggcgatggaagaggacgatatataaaacaagtttatttcagggaagatgtgtccgattga

SEQ ID NO: 36596 - DNA, 333 bp, Escherichia coli
gtgaacgagaactttttctatctcagtattggcagcctactcctgtttattcttgctataccgcttgcacgacaaaaaatcaaaccgaaccgatggtatggtgttcgtacctcattgactttaaataaccctaatgtctggtttcaggtcaaccgtatttatgggctgtcgatgttcgtctctgtttttttctttttcttagtgtcagtattgtcaggcatttggcgcaacggtgacggcaacgctgacctcattctggtgttgtttatcattgaagtttcagtgcctgtagttgttacatttttgaaaattattgtaatgaaaaaggaatga

SEQ ID NO: 36597 - DNA, 258 bp, Escherichia coli
atgtggttacctaagcgtaacgcagcattgtttttgtttgcatccattgtcctcatgcccgttagctatgcacatagtcgtgaaaagaccgacattaaaacgctcgttatcgtctctcatccttatccggagcgttcagttctgacaaaagggctgcaggaagccgctgaaagtctggaaggcgtgacggttcgcaaccttgagacgttgtatggctatgacacacgtcggattatggcgacgcggagcgaaaaatga

SEQ ID NO: 36598 - DNA, 309 bp, Escherichia coli
atgatgcgtgagcacagtcgtgtcgtttttatcttcccgacacactggtacaatattacgccaatgatgaaagcctggttgaatgaaacctgggggagtgtcgggcccggtttatggcagggaaaggagatgcttgttatcagtacggctgcggggggtaactccacttacgggccggacggcaggatcggggtatcgcttgcggatgtgtttttatcgatgaaagcaagcgccttgcacgcaggtatgacgtggcttcctcccctggtctttgagagtgccagcagcgatcggttaccttcctgctaa

SEQ ID NO: 36599 - DNA, 726 bp, Escherichia coli
atgaaaaaggcctttatgcttttaatttacatgctaataagcagccctgtctttgcaacagggtcggacacgcaggataaacgagtgatgagtatcttcgagctcggcatcaggcccgatcgggacaaagattttgcggaattggccagacagacgatttccgcttcggttgctcatgaagaaggtacgctggcgatgtacgccctgcaacgcagcgaccatccacgtcatgcattcatggtggagctctatgaaaacgaaagtgcttaccacaaacatctgaatggcgacccgtacaaggcattcgctgctcgtgcacctgacattattgacaggaaaaagaaaattaccctggagccacagtttctgggggacaaacacctcataccgaatgagcaaaccatcaataacctggtgatcgttgaggtaaagcctgaatttcagaccgcattcaaaaacatcgtcctgcctgaaatggcggagtcactaaaagtagagaaaggcgtgttggccatgtatgccgccacagactcacagactccgaaccgctggtatttctatgaggtttacgccagtgaggaggattatcaactgcaccgacaaacgccacactttcgggactatctcaggcaaacgacgcatatgagcgccagaaagaacgctatcccggtaaaaccggtatttcttcgtaacaaaggcggaatcaaacaggatccgcacaattga

SEQ ID NO: 36600 - DNA, 714 bp, Escherichia coli
atgaataatatggcagtaccacacggtcagttcagcagagaaagcatcgctttcctgggtgaagtaaaacggcaaaacagtaaagagtggtacgagaaaaacaagtctgtatataattcgtatctacttgagccttttcaaaatcttgttgaattgctcaccccgacgatgcaaaacatcgatcctcatattgaagttgcccccgcaataggtaagaccatatctcgcatctatcgggatacgcggttttctaaagataaatcccgattccgcgacagaatgtggataacgtttaaacgcaataagaagcactggattgattctcctgtttatttctttgaaatcagaccagatggtttttattacggtttgggctattacgctgcaacacgggccacgatggatcgcgtaagagaaaatattatccgtcgcgaaaatgaattccggcgcgccacggcacatctgttaccgatgtttgcactggtaggcgaggtatacaaacgtagcttgcagcctgaacaacccgaagagatcgccacctggtataatcgaaaatctttctcggtcatgaaagaatgccatgatcttgacgagctgttcaaaccacaattagtgaatacgttaatagatgcttttacccagttggcaccactttatatcttcctgattcgtgttgaagatgaaaaacatcgacgtgaaaatatactaacataa

SEQ ID NO: 36601 - DNA, 153 bp, Escherichia coli
atgaaaaatacccgctataccgacgaacagactacatctgcactgaagcaggcaaaaaccggcatccgcacgggggaaatctgcagaaggatgaacatttttgaaactactttttatatttatacctatgggcttcgttatttttggacatag

SEQ ID NO: 36602 - DNA, 513 bp, Escherichia coli
atggctgtgccatcatcaaaagaagagttaattaaagctatcaacagtaatttttctttactaaataaaaagctagagtctattacaccccaaatcgcttttgaacctctgttggaagggcacactaaggggactacgatcagcgtggcgaatctggtttcctatctgattggctggggagagctggtgttgcactggcataatcaagaggcaaaaggaaaagctattatttttcctgaggatgggtataaatggaatgaattaggacgtttagcacagaaattctaccgcgactatgaggaaattacggagtatgaagctttattagcacggttaaaggaaaacaaacagcaactcgtgactttgattgaaggattcagtaatgacgagctttatggtaagccctggtataataaatggacccgagggcgtatgattcaattcaatactgcctcaccttataaaaatgcttcagggaggttaaataaactgcagaaacatcttgctgaatag

SEQ ID NO: 36603 - DNA, 369 bp, Escherichia coli
atgtctgtcatttcttctgcggttttccctgaacacctccttacgcaacttcagcagtctgctgacgcagttgtccggagattaaaatctttcttttatctgcgccgcaacagcggctggtatgtcaacggctcgggcaattatgccgttcgtgcgcatatcacctctgttaaagaccagggcgttaaggtatttcttaccgtccgcaccgggtgccaccgcgctgagtatgtgtttcaccgcctgtcagttaccccccctgagggcataacaggtcgtcgaaacgcatacctttatgcctgccgccaggcacagcacctggcactcctgcgctatcgttttcttatacgtactgaactgaaaggctga

SEQ ID NO: 36604 - DNA, 366 bp, Escherichia coli
atgtacacagacgtttacacacttaaaacacctctggacacactcagctggctttgcctgcttgagagtgaacttctgagcatcagggcatttcagcgtctcgatcttcatacggaacgggatgaaccgaatgaactgacgtatccggaagaagccatcattagcgccggtatagcctacggctggtttgtctgttttctcagggacggtgacattccaccgctgcctgccacggccagagaactgctctgcacccttgacggtctcggtaaagaaattaaccggcctttctgggagcaggctgtggcccgcgggcaggatgaggcctgtggtgacaaagctatcgccgccctcgaaatgatgtaa

SEQ ID NO: 36605 - DNA, 648 bp, Escherichia coli
atgaaagacctgccttcttccccggctttcatgtcggttgtctataccatcgagcatgtcagtacagttccgttgcgtcactggcatgctttcgtcctggccgtaacagaaaccttctggcaaatgccggtgcgtctgcgtcccggaaatatgtatctgccgtcgcttaatcgcgcggctgacctgtttccggttgctgacgctatggcgttctgcggcgattcaggcagctgtttctggccggtcaacatgaccattgagcgcgaacgcagccacaatacgctgagtattcaggagctggattttcagcatcagccctgcgatttctttgcgcgtgtcgtgatggtcctgctgcacaacctgtgtccgggcagcttccggatacattcttctggcgaaggttgcagctgggcaataccgttacgctggattgagcgccatattggcctgcctgagcaaccgtcactgaccacgcctcagccggtactgcaaacgccggtgagtgagggcgcgtttgattccctgctgctgcagctgctctctggtggtgagcgggtgctgagcaatgaggactggaatgccttcgtgctggcggagtttcatctgtacgaactgaagcgcgtcactgaaaaagctgacgcgctgtaa

SEQ ID NO: 36606 - DNA, 966 bp, Escherichia coli
atgaaaaaaacgacttcacgtaaggcggcccgccgtccggcaaaacagactgacttctatcgccagataaccgaccgcattgttgtcgcgctggaaaacggcgttgcgccctggcgtaagccgtggcgagaggctgccggcagcggtctggccggcctgcccctgaatgccacaaccggacgtcactacagcggtgtgaatgtcctgcttctctggatgtcagcggaagagcagggttttcgcaataaccgatggatgacttaccggcaggcgcagcaggctggcgggcaggtgcgtaaaggtgagaaagccaccctggcggtggtttataaggactggacgaaacaggcagtggatcgcgaaggcaaccgcctttatgacagcgacggcaaaccgctgacggaaaccgtgccgatgctcaaacccctgcagctgttcaacgctgagcagtgtgagggggtgccggcagaggttgcaacttcacctgagcaaccaccgagggtggatgaggacggtatactctgtccggacgtgatgaacagggtgatccggatgtttaacgccacaggggttaaacaccggatgctgcctcaaaaccgggcttattaccgcccgctgacggatgaaattgtgatgccgatggctgagcagttttttacggaggcggactgctggtccacgctgttgcatgagctggtacacagtaccggtcatgcgaagcgacttaaccgggaggggataacctcctcatcccggcagttcggggacccggtgtatgcctttgaggagctcatcgccgaaatgggcagtgcgtttttgtgtgctcaactcggggtgttcggtgaggttcagcacgacagctatgtagactactggctgaaggtgttgaaatctgacaaaaaggccctgttccgcgcctgccggcatgcccgggaagcgtcggaatatctgctggcactgccttaa

SEQ ID NO: 36607 - DNA, 336 bp, Escherichia coli
atgtcaccgccacgacgtgtagcagagcatacagctgtttctggaaggcgtggcggggatactcaagctggtgcgcacaacgtcgtatccgccctgtcagagcccgtgagcgggctcagcggttacgactgctatgacgacgaacatgtcgacggacataaaggtacgaccggcgcgtctaagcccggtcaggtgctttatctcgtcagcgatgacccagagttaccggctcaggaagcagcatcttatcgtgaggtccggggcaacccccgttcctcagttaaccccgccatggcaatgccgtggctttttaccctcaagggacacgtcccctag

SEQ ID NO: 36608 - DNA, 225 bp, Escherichia coli
atgcctggcatgattaaccacgaaaaagcctttgttaagttgttcagtcagacggcccggtatcataaccggtttaaagtgttcgaagacttcatcaactgcagcgtcatcgcgctggaaaaccggctttgcttcagtgaagcccgggagcaaaagtatttgcgtatagttcgtggatacgagaaggaggacgtcacgtgcatggcgcaactgctggctctgtag

SEQ ID NO: 36609 - DNA, 1824 bp, Escherichia coli
atgaatattctgatagataaagttcgtatatctgggtttagaggaatatcaaatattgagataactctcccaagagtaactgttttacttgggcaaaataatgcagggaaaacatcagtaataaaggcaatgcagttagcaatgggagactattcgcgttacttatcggatgaagattttcatataggtgaagatgaaaaacggcaagaggctatcactgtagatcttcgatttatagctgttgatggtgagagtaggactaaagagttttcagaaaattggcagcaagtgtttggcgataaaattcagtcagagcctgatggaaatcaatttgtatgcatacgaaccattgcaaaacctgatcgagttaaggggggttacattgttgagcggtttcatttggatacttggccagaacgtactaactggcaagatgcccgggttaatagtaaaaacagattaggtaagcgattggagtttgtaccttttattccgattgatgcgcaaagagatatacatagtgaattgaaagagaaatcctcatttgtggggcgtgtgctatcaagtgttgaatatgacgataaagatgttgctgcgctggaaaggatggtggctgaaataaataaagaagctatcgagaagagcgaaccactcaagcgtttgaaaaatcacctggataatttaaaccaatcatttgaaggttcagggcaaacagagcttactccatttccgaaaaagatacgagatttatcaaagagatttagtgttaattttggtgaatctgataagagctcattttcgatggaatatcatggtatggggacacgtagttgggcatctatgttgacagtaaaagcctttactgaactcttagttaaaaatcacgaagaagaggcagagccattttttccaattatggccgcagaggaacctgaggcacatttgcaccctaatgcacagaggactctatatagacagcttgtagatgctccagggcaagtaattatcagtacacactcaccttatattgctggtttggcggagttgcatgaaattaggttcataagtaagcaagagaattcggtgtgtgtatatcagttaagagataaatttgacggtgatgatctaagaaaattagggagagaagttgttcactctcgtggtgagttattattttcaaaagcaataatattatctgaaggagaaactgaagagcaagccttacctgaactttttgaatcctataccggaaaacatcccttctcgcttggtataaatttcgtaggagttaatggctccggagcgaaatatcgtccgtttcttattttggcgaaagatttcaacatacctgtatttatatttagtgatggtgaagagcaaacggttaaagagctcaaaaagaactatgagaaagtgtttggggttactgatataatgaatgcagataacatcactatacttgaagggactgattttgaaggctatttgttaagtcaaggtttcgaacagttgattgaagaaactatacatgaaatcgacggggatgatgcaattgataagtggattgaaaaaaagaatggaacatcgttaaagcggattcgaactgataagccaaactgtggtacttgtaatcaaccaatttttgaagatgttctgagggattatattggcgatgatggacgagttcgtgcaatcctcgagattcttgattcgcggaagccgctttatgcaaaagcaatcacagataatctgagtaaattgccgaaagaaaaatttcctcagaagatagttgaactattcaaaaaaattgaatcgggagtttga

SEQ ID NO: 36610 - DNA, 1893 bp, Escherichia coli
atgaatctatcaaatgctcagcgtcagatcgttgaagcccctatggatatagctattcaagtgcttgcctctgcaggttctggtaaaactcgagtcttaacagaacgtgttcgatatatattgaataatacaaagagagatgctgttattgccctgacctttacgaataaagcagcggaagaaatgagtatgcgtttaagtgatttcgagccggatgaagatagggcttggattgctacgattcattctgttgcgcagcacattttagaaaaatacggacacaccgttggtttgccatcagatttgtatatatatgatagagacaaggatcgtatggaagtttttatgcagtctttgcgtgaagatggcattgatatagatgaatatctctctattgcagattccaaggaattaaaaaatagggagcgaaatctgcaatcgtatatggatatattctcaaaaataaagagagagttgcttacggagttcgatgtatctgagttgtatccaaataataatatctggaaaatatataaggattatcaggcttcattgcttaatagtggaggtatcgattatgatgatattttagtatatgcgcatcggattctactcacgcatgattggatagcaaaaatatatcgttcaaaatacaaacatatttgtgttgatgaagctcaagatcttaataaagcgcagtatgagtttattaaggtgctgtgcggtgatgtaataaaaagtattctaatggtaggtgaccctaatcaaatgatttatggctttaatgggtcgtcaaaagactacttttgtgaaaattttattaatgatttttatcctaatcagtttgaattgaaggaaaattatcgtagtaccaaagctattattcgtgcagcaaataagttaagaccgggatcacaagcagagattgattatgctttggaggggggcgttagaatctcagaattcgcttcagaagaggatgaagctgagatggttgtcgctactataaagcatcttttggaattgaaagttcacgatgagattgaaggggatatttcactgaacaatatggttgttatcagtcgtaatcggtttgtttttggcaagcttgaaaaatgccttaaaaataattcgattccttactctttgagaaaaggagagagagcgttagaaccttcgactagatttggaaaagtcttggactatgccattagagtgaagttgaattcaaaggattgggttgatggaaaaaaattatgtcaagtacttggcatatcagagccgactggctggacacctgatgtattgcgagagatggcggttaaaatttcatcatcaactgatgattactctgttgtatttgaaaagcttcttactactattgatagcttaaatgttgaaaatcctaaaattcccaagctaataaaggaatttaatgatcttctaacatcgttagttgaaaatcataacggtatttcagatgataaaatagaagacgttaagctgagtattgaagagcttaaagagtttagtggtacgtggactcgatttaagcgtaaggggttaggtgattcattagttgcgtttaggaacgcattggcattggggcaactagctgaaagtagtatggatgaaggcttaactttaagtacggtgcatacaatgaagggactggaaaaggatattgtgtttttgataggtatgtgtgaaggggttttcccggattacagagctagaacaaccaaagagcttgaagaggaacgcaataatgcttttgttgcggtgacaagagcgaagcgttggctgtacgtttcttaccctaagcagagaatgatgccttggggtgaccttaggtttcagcggaaatcccgatttgtcagtgaaatagaataa

SEQ ID NO: 36611 - DNA, 699 bp, Escherichia coli
ttgaagcttgttttcaacattactggtgatttcgataaggtgtttttaccactggagttttctggttttcatggacggaatggatattgttatttaagaattcaaattaaacatggctttattgttttctcatgtgctcaattattgaactactatcgtacgtcagtaacaaatgcaattgaacagatcagagaagctgcagttaatgctctcttcagagaaggcgtgttgtcatatacgcaacaaaaagagtgctgggatttattaaagacatcacaacgagtaaacaaagaaatcgattcgcagttatgggattatataaatactaactcactatggtttgaatactataatcatgaggactcattgtttttgaatgatcattttcatatcgcttctttcgaagggaacagaaatccagtttggaggaaaacctcactgaaggatttagaaataacatatccggagtttgatttttttattcataaacaccatcttgaaaaatggatgaatggaggccttaccgctgaaagtgtaaaaaaaactctcagagaaaaaggctggaataacaaaatgttagctttgcgttggggatgttcagaagtttgggtgagtaaaattattaatgatgaaaaccgaaaggttcagtggaatgatgctatcaatgggcttcctgttataagtgataatatggtttaa

SEQ ID NO: 36612 - DNA, 660 bp, Escherichia coli
atgagtatctgttttaacttttccagattgcgctcaatatattcatatgcttggataaataaagaacccacaatcgcgttcgagacatgtattggtcgaggacattttgtttttatgatcttttttgctccagaagataaaaatatatctggagatagtttatttatttatcttcgcaatgttaatattctgttgcgactaaaactgtatggaagtcgaaaaaacggtatttttaacgtatatataacttcttcgcagcagcaacttttgtcagatgaattacagttgacatctggcggtagtcatttttcatttgataacttcctgaatgaattaaacgacgcgattccgcagacgctttcctttaaaagaaaaatagaaactatcagaactatatggccgcaagtatgtaactcattaactggggttattgatgatgctcataaaacaatattaataggcatcaagaaactccccgaaaatcaacaccccagggaaaaaacgttacgaaaattgtttacctgtacaaacagcccggcaaatgatgttcaatattttattgatatattaaaaaaacacaactgtacactgatgtggaccagtgatcagagccggataccgaaatcatttgcagagttaattaataaaattgttaactaa

SEQ ID NO: 36613 - DNA, 399 bp, Escherichia coli
atggaatacacgcttacagcagacttgattaaagaccttaaaaatataagagaaaaggccaccatatatacacatgcctaccactacattgatgatgaaaaatgtgttatggtgccacggacatctctaccatcactgaaattaacactgttgcagtcagaaataattattcgactacttctcaatgatgtcgactatataaggcacgacgggtatgttcagggatatggggaaaaaactgtggcaactttcacaatacaggggagtgaacgtcatcgtttcaaagtagacttatcacaaaatggggaaaatgatatagccaacaatacaataaatcactggctacatcgtatacatgaaacagatatcattgttctgtctgttgttctgatgcaatag

SEQ ID NO: 36614 - DNA, 1584 bp, Escherichia coli
atgcgcgacagaatcaggactctgaggtttctgttttcaaaagatgaaccggaaccagcacatcatgtatccgctgttacacctgccggctaccatactccgcgtatggtcgatacgctgtgctgtagcccgttgagaaaaaactgcctgcagcaaatatgggaaaatagcgcacttccggcggatgtttatcaccggttttatataatgccactgcagggcttactggctagggtacagaatgtgccggcaacacaacatggaaggtggtcgcagtcagacggcttcggggaccttacgctgcagttcacaacctgtgcggtcagactggccaaaggatacatgtttccacccggcgctgcgccagaagagcaggcagagcaaaacgtgatgtggaatacggtcatcttcttgtctgcactgttctggcatttgccactcctggcgtctctggagggggagttgcttaatggtaaaagctggcttccgggcataaccgttccggactcgccttatcgatttcgctttcgggaagcagacaattcctcagcttttgcagctctggcagccggacaacttatgccagcagaggcgacaggatggctggcagaaaatcccaaagctctgggtaatcttgccggtgccttatggaatcagcatccggcgatgccacttatcagaagattaatgaagcaagctgctgaaaaggtggaatcgcctttgctggaggtatctggggcaaatgagaaagttaacactctcacagagcgggcctattcagttctgcaaacgccatctgatcaagagactgaatcaaaactgtcagtagaagcaaaacttaaaactgcatcgccagaagttccagatttgcagggaattcaactcacatcttctattgtaccagtgccgatggcagatgacagcaatctcgtcagcaatgaaaaggcaggcgagattacggaatgcgatccaaacgaaacagagaaggctgatacagagatgctgctaagtctgttcagcgcaattgaagagccttcaatcagtaccagagcagaaaatgagccagaatccctccccctcaatgaactactttccgaagctgacaaacctgagataaatcaggtagtagcagaagacgctttccctgaatacgttgtagaggataacatcaattcacacggcattaacattgatgcacaaaaaacagtgataaaaaaacagactggctctgaatttctcaggtggctttctgaaggactcaggagcaagcgaattgatattaatcagcctgattcgagggcgcatgcagtagcagggttcatctttctcagggttccggacatattttatctttatatcagagaaagcggagtcgagctaagcagggataccatacaaatggaatttgagaagctgcatattcacagggtgcgcaggggagagcgttttattaaggcaaagctgtaccactcccctggcaaagaagatgcgtttaaacctgtaagtggatatcttgtcaagactacactccttttcagaggggcaccttcccctgaagatagcgggcttctgtctttcctgtga

SEQ ID NO: 36615 - DNA, 1032 bp, Escherichia coli
atgtctgacaaaaaccattatacgacatgggaagaattgcttgaggagtacttcttcgctcgaaacctgcgtgctgcaacagaatggagctacgcaaaggttgtaaagggattcctgaagtttatgggggcagatataacaccatcaatggtttctcatcatgaggtattaagatggcggcgatatgttctcagagaaaaacaacaatcgacgcagacctggaacaataaaattgcacatctcagggccctttataactatgcaatggaaagtggtttattgcctgcgggcaaaaacccttttaacgactgtaccgtacagcgggacagaaagaaaaagcgtactttaaaccgctctcagctaacccgcctttatctgataatgcagcaggctgaaattgaatccaaccggaaaattttcgcacgtggtggacgaagtgcgctttacccggcttggttttggataaccgtcctggatacactcagatatacgggaatgaggcaaaatcaacttctgcatattcagctcagggacgtcaatctgacagagggctatatagacctgcgccttgaggggagtaaaacgcacagggaatggcgcgttcccgttgtcaaacaactgcgtttgcggctacagcttcttctgacacgggcaacggaggctggcgcgggaccaaaagataacctcttcgatgtcagttttttcattgccgggaaaaaggcaaaatttgacaggaacgatgtgacagtgatgcatcaaaagctccgctccttttttcgccgtttgtcaaaagaatgtggttttgccgtttcgccgcaccgtttcagacataccctggctacagaactgatgaaagcaccggaaaggaatcttcagctggttaaagatttactgggtcatcgcagcgtaagtacaacaatggaatatgtggaactcaaaatggacattgtgggcaaaacgctggaagaagaattgtcgctgcacacagatctgtgtgtagaaaaggaattgcaactattgacacaaaactga

SEQ ID NO: 36616 - DNA, 789 bp, Escherichia coli
atgaagaatgacacttccgaattgagcaacctgccaacagcctttgtaaaaaagttacaaaactatgatgagcttaaaaaacgtcaggatgaatcagagaaatcatatgctttaattgtgataggcattttagctctcatatgtttggctttaggtatagcaaagacagactcagatgattggttctctcaatggcaatttacatgcatactattatcaataattttttctacattatggttaggtgtatttattgaaagaacattgatttttaaggtgctatggaactcaataattacaaaatgtattacctctatagccatatcaggattgattattttttgcaccgcaaaatcatcagcacttttaaatagtgtatttggcattgattcatcatcctttccttatacacgttcttttttaactggttttctatttttaaaatatatcaaccctattttattgtttattctagcaacattctttttaactcacataataaaaataatttgttttttatttaaagataaagctttcagtgaagaaaaccttccagtcaaaacctatgctcttgctcacttgttagactttaatataaatcatcattgcattaaccttagtgcagataaggtcaatgttatttttattggttcatcccaagataaggtgctcattgatgattatgatatgcacataaatagcatagagtcatttttaaaagggaactcttcatccttctttatgaaggataatctcaacttcaaaatccaagaatgtgtatacaattaa

SEQ ID NO: 36617 - DNA, 888 bp, Escherichia coli
gtgcaagacaacactggacttgaagagcttagccaagcacagagagaacgactcgctcatattgatttcactttgttatttaaaggtgaagctgggcggagttatttaaccgagcgctttagcgtagcgccgtctgtggcaacacaagattttgcgcggtacaaagcgttggctcctaacaacgttatgtatgacgaaaagcgcagagtgcacttgaagacgagcacattccagccgttgtttgattatgacattgttcgaacgcttgcgacgataagccaagggttcggtgatggctttcttggcaaggttaggccacctatggcttgtgaagcaccatttcatctcaataagccgaaattggaagtggtagcggcggttagtgaagccatacataaacgcgcggtgattaatattgagtacacctcattgtcgagtggtcatgggagcaggcaaatagttcctcataccttgattgacaatggcttgagatggcatgtccgagcattcgatagaaagcatagagaatttagggattttgtgttaaccagaataagtgaagttgagttgttagaagatgaggttaacgacgaagttgagactcttcagtgggataagcaatggaaccgaatcgttgaactagagctgatacctcatccaaaactagcacatccagaagctgtattgatagactacgcaatggaaaacaataggttgcgtgtagagataagagctgcgttcgctggatatttactgcgtttatggaatatcgattgttcaaagaatagcaagagcaatgggcgagagttccatttagcacttaaaaatccagaagcactatacggcgttgacaatgctgcactcgctcctggatatagcgaatcgtga

SEQ ID NO: 36618 - DNA, 600 bp, Escherichia coli
atgaatataaaagaatatttaggcgatcttatcggaagcagtttattgataactgaatctagaataatcgcagaatcgctactgaaaaaacttccagaagatgagtggaagtcgctgatcgttgagcaaaatgttcttcagaaaaaatccggtcagacggctattcgttatgccagaacaatccgttggcgtattgaaggcctgggtgatgagtttatgactgatcttttagccgcgagtgaacgtgcctatgtccaaatgctgatgatgtcattactcattcattctccggttgtcgctgattttatgcgacataccttagccgaggctcgtcgcacctataaacccgctttaaccgctgatgcatggtctgagttttatgacacgagagtgcgggcatatgccgaacttggcggtttttctgactcaactgtcaaaaaaatgggtaacaacgcaattaaggcattggttgatagtggctacctgagtgatagcaggacaaagaaaatacaacctgtttacctaatgccagaagttaaagactggttagttcgtctgggccgggaagatttgattgaggtcatggagtgcacaatatga

SEQ ID NO: 36619 - DNA, 585 bp, Escherichia coli
atgaaggctctccagaccaggcttgatcttatacaggaacgaattgaaagccctaagtttttgaaaaacgatggcttgggcaatgaaattggattttgggtatttgactatccagccaagtatgaactgcttgtacgagagcaccttaagcacgttgacgaaaaactcaacaagcgtggttaccgttttgtccatctcaatatttttgaagtcttgatagatatgcttgaggagcgaggccttttcgaccgagcttgccagcgtgaattgcaagtcggtgttgatggtcttcgaaaaacactagccgggcctctgagccaagagaaagtggcaaggtatatcgcggacaaatataagccatcagaacttgagtttgtgttgctgtcaggcttaggcagtgcgtggcctcttgtccgaggacatgagttacttagtgctctgcaagacgtgatggggagcacgccattagtgcttttctatccgggtgaatatagcggaagggatttgcatccttttggcatgatcgaatctaaaaactactatcgcgccttcaaacttgtgcctgaagacggtaaaaaaatttaa

SEQ ID NO: 36620 - DNA, 3678 bp, Escherichia coli
atgaaaattgaacagattttttccaagaagttgacgcgtgacattaatggcgttgttaaagcggaacaaaaagacaatgacagtgtgtatgtcgagcttgatgagtatgttgttacccgagagttagatagacactttcgtgcattttttgaggcttacgtcccatctgtgacgcaaagccacggtgatatgtcaggtaaaattggtgtgtggatttctggcttctttggctcgggtaaatcgcacttcctgaaaattttatcttatttgcttgagaataaatctgttgaaaaagatggccaaggccgacaagcgtttgagtttttcaaagacaaaatcaacgacgccatgctgttggcggacatccaaaaagcggttaccaaagacactgatgttattctttttaacatcgattcgcgagccaatacggacgaccgagaaaatgccattcttaaggttttcctcaaagtctttaatgagcgtgtaggatactgcgctgactttcctcatattgcgcacttagaacgcgagcttgataaacgtaatcaatacgcatctttcaaggacaaatttgctgagttgactcaatcaacttgggaaaaggagcgtgacgcctatgacttctatcgagacgaactttcagaagcactcgctcatgccagtgagcaatcattagagtctgccaaagcgtgggttgagcaggttgaaaacaatttcccgctagatatccgaaacttctgtaagtgggttaatgaatacttagatcgcactggggatcgtaaccttcttttcttagtcgatgaagtcggtcagtttatcggtaagaacacacaaatgatgttgaagcttcagaccattactgaagatcttggcacatattgtggtggcagagcttggatcgttgttacctctcaggcagacattgatgctgccattggtggtatggataagcgcgatggcgaggacttctctaaaattcaagggcgttttagtacccgcttacagctgtcgagctcgaatacctcggaagttattcaaaagcgattgttgtccaaaacggaagaagctcgtacatacctcatcgatgtctttgctgaaaagggcgacattcttcgtaaccagctgacatttgataaaacgacaaccgcgtctctaaagggctacaccgacgctccgtctttcgtggacaactatccgtttgtgccttaccactacacgctggttcaaaaagtgtttgagtcaattcgaacaaaaggcgcgacgggtaagcacttagccatgggtgagcgttcattacttgatgctttccaatcagctgcaaaacaaatgaaggactctggccttgatgtgttaatcccgttttacagtttctacgcaccgattgaaagctttttggagccagcggttaagcgaacgattgaccaagcctgtgagttggattccttaacggattttgatggcaagatcctaaaaacgcttttcttgatccgttatgtggacgttgtcaaaagcacactagacaaccttgtgacgctgtcaattgatcgaatcgatgccgataaaattgcgctgcgtaaacaaattgaagagagcttgaatcgtcttgaacgccaattgctgattgcgcgtaatggtgatgagtttatcttcctgaccaacgaagaaaaagagatcgaaaacgagatccgtcacactgacgttgaaatgtcagaggtctcgaacaagctttcagccatcgtatttgacggtattttgaaaggtaatcgtgcctatcgttacccgattaataagcaagactttgcggtgagccgtttttgcaatggtcatccaaaagatggcaccacactggaagacctagtcattaaagtcatttcacctttggattcgcactttgaaaattacgcccacgatcaagcgtgcctcaatcatacgcttgaggctgatgggtgcgtgctcgtcaagctgggcgaacataagcgtctttgggatgagctgacaacctttataaaaactgaccgattcttaaaacaaaattcaggacagcgaccagagcaagaacaccttctccgcgaaaagcagatggaaaatatggagcgtgaaaaacgcttaagaacggattttgaagctttgtttgccgaggctgacgtttacgcgatcggcacaaaactgccgaagaaatcagcaacgccaagtgccatcgtcgaagaagcatacaaatacgttatcgaaaataccttcgctaaattgaacatgctcaaggcaacgcctggtgaagttttgcgtgagctacaggccgttcttgttgctgatgatattgctcagattggactggatcttcaagcggatgaatgtaacccagaagctacgcgtgaggttgagcagtacgtaacgctaaaagtcgagcgtaatgagcctgtttacttacgtgacatcgttgcccacttcggcaagcgcccgtatggctggccagacaatgaaatcttattgctcaccgcaaggctgggcttggctggaaagttatcttttagtacccaaggcacagatctggcgttgaaaaaagcttacgagccgtttaccagcgtgcgtaaacgcggcgagatccgtgtacataaaatcaggcaacatgacgagcgccaaattaaaaaggctgctggtcttgttaaagagatcttttctaaaacttttaccggatctggtgagaaggagctctacgaattagtgcgcgatgaattactggcttggaatgaaaagcttaaatcattcagaaccaagtcacagacaggccatttcccaggtaaatctcaaattgacgagggtcttgcattggtcgcgggtattcttgagcaaacttcaagcttcgctcttatcacccgattcttagaagacgctgatgcccttgaagagtttgctgaggattttgaggatcttgatgacttctacaatagccaatttcaaacgtggcaagcccttgctggcgcattgaacgagaagtttaaggccaatagacctgcgttagaaaaagacagtgaagcattaaaagcgctcactgaattagaacgcatttacaatatgccctcgccgtatgagcagctgcgccacattaatccgcttatcgagcaggtggcaaaaattaactcaacattggttgaagaaaaacgcactcatgccttagagcgtgttgatctgcgcatcggacgtgtaaaagaagcgctagctgaagctcatgcaccgtctgaattacagaaccaagcactgcgcccgttacaaatgtgcagacagcgcattgaagcaacctcttcaataccacaaattatcagtgagcaaactgaagcggaaggttacgaggacgaagcttatgagttgctgaatggctttatcgaagatcaacgcaaaaaagctgaagctgagcaaagacgtcgtgaactcgaacagcagacacgcgaagaggaagcagcgaaagccggtaaagcagctccagcacctgagccagtctctgaaccagtgcagccacagccggttgcaaaacgtaccgtaacgattaactcaaccgatgccatggctaagtcagtaacaaccggattcattgaaagtgaagccgaagttgatgcctatcttgccgctttaagagagcagctgattgctgcggtcaaagctggcgaccgagtaagaattaagtaa

SEQ ID NO: 36621 - DNA, 3618 bp, Escherichia coli
atgaatacgaacaacattaaaaaatacgcaccaaaagcgcgccgcgaatttatggatgcggtagctaaacgattaaatacctttggtatcaccgcgaataaaaagggcgagctacaaattgcagaagcgaatctacaaggttctgtgcttcaaatcgccggtaacagttttgacggtaaactggcggagcccagaaaacgcatagtggccagaagccagaagctggggtatgcacaacttattgaacaagtagcttatacctggttcaaccgtctgtgtgctattcgctatatggaaatccatgactatctaggccacggtttccgtgttttgtcgcacccagacaaccctaaaggctttgaaattatcgaccatgcgcaagatgctgcggatgaactcgggttagatagagctcgcattatcgaactcaagcttgcgggcaacaaagacgaagagctgtatcgtgaactgctgttgggccagtgccataagcttcatgaagcgatgcctttcttatttgacgcattggacgatgaaacagaacttctgctaccagacaacctaatgcgtaccgactcaattctgcgtgggttggtagacggcattcctgaagaagactggcaacaagtcgaagtgattggctggctttaccaattctacatttctgaaaagaaagatcaggtcatcggaaaagtagtcaaaagtgaagacattcctgccgctactcagctatttacacctaactggattgtaaagtacctggtacaaaactcagtcggtcgtcaatggctgcaaacctacccagactctgccattaaaagccagatggaatactacattgagcctgctgaacaatctgacgaagttaaccaacagctaaaggctattacgccagaatcgattgagcctgaaaccatcaaagtactcgatcccgcttgtggctcgggccacatactgattgaagcttacaacgtactaaaagccatctacgaagaacgaggtttccgctctcgtgatattccaaagatgattttggagaataacctctacggcctagacatagatgatcgtgcagcacagttatctggctttgcgttgatgatgatggcgagagatgacgataagcgtatttttacccgtaatgtgcgactcaatgtactgtcattgcaggaaagtaaccatattgacctgccgaccttatggaaagcactcaatctatcgggaagttggcaaagcggcacatcacaaggcttgttctcagatgatgagcaagatttaagctcgttcaatgcagacaaccgctaccaactgctgacgcgaacattggcaagattttctcaagctaagacctttggttctttgattgatgttccaagcgatgagcatgaccagctaaaagagttgatgaacacgcttgtcgagcttcaagagtcaggcgactcaatgcaaaagccagcagcaaagcaattgattgaaattgtgcatcaggctttggttttatctattcgttacgatgctgtgattgctaatcctccctatatgggagcaaaaggaatgaatgcagatttgaaagagtttgctaagaaacaatacccaaatagtaaatcagacttgtttgccatttttatcgaacgaggatttggctggctgaaaaaagcaggtcttaattcaatggtaacaatgcaaagctggatgttcttatctagttatgaacaaatgagggactttatattaagacataaaactattgaaaacatggtgcatatggggaatggagttatgaaaattgcatttggtacgaatgcgaccattttccggaatattcaattgagcggttataaaggatttttctcatatgctgataatgaagatataaatgaatatggtgtgccctatgagtttcctgtgaagaatgaacgattgtcggtagctgcatcagatgatttcaaaaagattcctgggagtcctttagcatattgggtaagccaaacagttagagattccttttgtgggacattaattggcgacgtgtctgagtcctcaaatggaattcagactggtgataatgatttatttgtcaggaactggcatgaaattgattttagcaagtttttttataaatggtttccatataataaaggcggtgaataccgaaaatggtatgggaataattattatgttgtgaattgggaaagtgatggcttagacataaagtctcgtgaaaacagctgtattcgtggtgagcataattattttaggccaggcttaacttggtcggatataacttcagcctattcttcatttagatttttcccgtctaattttttatttgacgctaaaggcccttctgcattttttgacaatgagtctgttgatatagctttggggtttcttaactctaaagctgtagaggtgttcactaagcttttaaatccaacattaagttttcaaattggagattttaaaaagctcccatttttacatgatagtataaagagatatagcgactttattcctgcggtaagatgtctcatagaaatttctaaaaacgattgggactcatctgaagtttcttgggatttcaaaagggactccttgattacagcgtgccaacgatattcattatatagaatatctgattcagtgatgcaggttgaaaaatttgagagcaatcaaatttctgatgctatgtcattagaaatgaaaattaatgaagtaataattgatgtgtataatttaagatcaattttagattcttcaataaatgcagagcaaattacattaaatagcaatcctttatacaggtttggtactactgataactcaaagatgaagagtgaacggattgttcaatttattagctactcaattggctgcatgttaggacgttactctctcgatcgtgaaggcttagtttatgcccactcaggcaacgaaggctttgataaactcgttgccgaaggtgtttaccaatctttcgctgccgacgaagacggcattattccactaactgaccaagaatggttcaaagatgatgccaccaaccgttttcgtgagtttgttcaagtcgtatggggtgaagaacatctgcaagaaaacttggatttcgttgccgaaacactatgcctaaacgccattaaaccgaaaaaatctgaatcagcgttggagacgattcgccgttatttatcgactcagttctataaagaccacctgaagacttacaaaaaacgccctatttattggctgtttagctcaggtaaacagaaggcttttgagtgcctggtttacctgcaccgttacaacgagggtacgctttctcgtatgcgtaccgagtatgtcaccccgttactcggcaaatacgatgcttatgcagagcagcttgagaagcagattgaaacggcagactcgaccagtgaagcgaaccgcttcaagaaagagttggatgccttaatcaagaaacaggttgaactacgcgagtttgatgacaagctaaaacactacgctgatatgcgtatttcactggatttggatgatggcgtgaaagtgaattacggcaagtttggtgatctgttggctgatgttaaggccattaccggttcggccccggaggttaactaa

SEQ ID NO: 36622 - DNA, 2670 bp, Escherichia coli
atgcagattagtgaactggcacaaggcgttgctgccaaatttgaacaaagccgcattgtgttttggtacgacccagagcaaagctttactgaagagcttgagcatttagctaattctttatcgcttgcaaaagaatcaggtgataaagcggcagatataactgccagagttctgccaaatgatttgactatcctcaatatgggcaatgagtccgtattggcagtgaaaaaacgtattgaagtggatgagcgtgaagctaaattccttatctattttccaagcgctgagccagagcctgaccgcgattggttgctggacgtgcgtttgtatagcgagcagttttttgctgatcacagctcaatgttgcttaatgagctgggtattccgaaaatggcgcttcgcacgtacattcgtaagcgccagagtttttttgccaataaacagcgcatagccggtttaaaaaagtgggtgactgagaacgaagacgaactgtcgttagacaggaagatgatggcagtggttgtaaaagctgattctgcgtctttgtcggacattctgcttgggttactacgcgagtatgcggcttatatcgaagatgaaagccttggccaacctttatggagccagctaagtaagtttgatcttgagacctcactctgggcctatctgagtgagggttttggttatacagtcgaagagccaaccttctcagacttcgtgttgaaattattctgtactgaattctggagccaaattgaaggtgttgaacgcgattggttgcttaacaatgttctaaaaagcgcatcaggccgggcgacagccttggcgtttatggtgagctggcgcgacagccggtctttcgccgtttactacgaaagcatctctaaggtgcttagccaacagttggaaatttcgactcgtgctggccagtaccatccggttgagcttatcgaatgcgaaacgttcgaagctgtggagcaggccataatccgtggtttagttcgtgatttgctcgatagcagtaaagcgctagaccgagttcagtttgatacggtcttatcaagacgtcttgctagccattggacattatcacgcaaagaatatttcgcaatttatgaagctatccgcaacgctgaagagttaatgcacttgcgaaatcgctatgtggatgggttccactttgataacgcgaaagcaatgtacgacgcctataccacagacatttatcgctttgaccaggcttaccgtttgttcaatgaacatgtgcactctgtattgagtaaaggtgcggacatactgcgtcagctcgacgacgaagtcgaaagcatttataccaactggtacttatatgagcttggccttgcctgggatcgtcacttggccaatgagaaattacttgaaaagtggcagatttctggcgtaccgcaccagtataacttctatgaaaaagaagttcgcacacgactgagtctgaaacagacaaaacgcgtgtttgtgatcatctctgatgccctgcgttttgaaattgcgaatgagcttggcgctatcattaacaacgagaagcgatttaaggctgaggtgtctacgcagttgggcgttttgccgagttatacccaacttgggatggcggcattattgcctcataaggcgctcagttaccagccagagcaaggcacggctgtttatgtggatggtatttcttcacagggtttagacaaccgcaacgccatcctacagaaggtaggtggtatggcagtgagttctaaggaactgatgagctggagtaaccaggaggggcgtgacaaggttcgagacgtagaagtcgtttatatctatcacgataccattgatgcgattggtgataaggctgcaactgaagaaaaaacgtttgaagcctgtcgtagtgccattgaagagctaaaagacctcgttgggcgggtcatcaaccgtctaaacggcagccgagttgtgatcaccgctgaccatggcttcctcttccaacaaaaagcacttgcagcggctgacaaaacctcgttgaaaaccaaacctgctggcgcgatagaagccaagaaacgttatatcgttggtaataacttgccttcagatgaagcctgttggaaaggctcaataaacgatacggctcatggctctagtggctcttcatatcaggcagagttcctacttccaaaagcggctcaacgcttccacttcgttggtggtgccaagtttgtgcacggcggagcgatgctacaggaagtctgtgtaccggtactgcatgtgcgcgagctacaaaaagaacaagcagcaaaacatgagaaacaaccggtaggtgttgtagcagccactcagcccattaaattagtaaacaatatcgacaaggtcagatttattcagacagaccctgtaggcgagcgttttgtcgcacggttgttggatgtctatatcgtcgatgcacaaggtaatgaagtctccagtcgtgaaacgattaactttgatagcgtgagtaaagtgatggatgagcgtactcgcgaagctaggttaaagcttattggctctcagttcgacaggaacgctcaatacacgttagttcttgagaatgcggaaatgagaacgcgttatagccaatacgcggtaaccattgatttggcattccaagatgattttttctaa

SEQ ID NO: 36623 - DNA, 2241 bp, Escherichia coli
atgaacggtaacaacgacaaagatttgattgaccatcaaggccaatccggagagtggattggtgcagagcatgaaactcccgcaaatgttacgcagaacatatatgttgccaatatgcaagtgaacgtagatgaggctggtgtcgaaccagaagcgcctagtgaggttattccctcagatatttccatgtctgaaagggagattcgtgacatgaaaaattcagatctcgatgggttgctaaatctgcactttaaaggccgtgtcgttcgaaaagatctgacaaagcaattgaaagaaggcgctaacgtccctgtttacgtgctggagtatttactagggatgtattgtgcgtccgatgacgacgaagttgtaatgcaaggccttgagaatgtgaaaaaaatcttggctgagaactatgtccgacctgatgaagcggagaaagtgaagtcacttatccgtgaacgcggcacgtttaaaatcatcgacaaagtaagcgttaagcttaatcagaaaaaagacgtctatgaagctgcgttgtctaacctggggatcaaggatgcccttgtaccgaccaaaattgtacaagacaacgaaaaattattaactggcggtatctggtgcattattaccgtgcagtatttctttgaggaaggtcagaagacatcacctttctccattatgagtttaaaaccgatacaaatgccgtccatgaacatggatgaggtgttttcaaccagaagacattttagtaccgatcagtggatggatgtgttgcttcgttccgtgggtatggagccaaccaacttagagcatcgggtgaagtggcatcttattactcgcatgatcccattcgttgaaaacaactacaacgtttgtgagctcggaccaagagggacaggtaaaagccatgtctacaaagagtgctcgccaaactcattgcttatctcgggtggacaaacaacggtggcgaacttgttctataacatgagctcgcgccaagttgggttggtcggaatgtgggatgttgtcgcctttgatgaagtagcgggtattcactttaaagacaaagacggcgtccaaataatgaaagattatatggcgtcagggtcttttgcccgtggccgtgattcaatcgaagcgaaggcttccatggtattcgtcggtaacatcaatcaaagcgttgagacactggtgaagaccagtcatctgttggcaccttttcctgatgccatgattgacactgctttttttgaccgtttccattcctatattcctggatgggaaataccgaagatgcgtcctgagtttttcaccaatagttacggattaatcacagactatcttgctgaatacatgcgtgaaatgcgcaaaagaagttttgcggatgcgatcgataagttcttcaaactcggtaataaccttaatcagcgtgatgtcattgctgtacgcagaacggtttcgggcttgttaaagctactacaccccgacgcacagtacacaaaagatgatgtaagagcctgcctgacctatgcgctggaaactagacgtagagtcaaagagcaattgaaaaagcttggcggaatggaattttttgatgtgcactttagctacatcgataatgagtcattagaagaattcttcgtcaatgtaccagaacaaggtggtagcaagctaattcctgaaggcttacctcgcgctggtgttgtgcacttagttactcagggaagcactgggcagcttgggttatatcgctatgaaacccagatgatggctggttctggtaaacactcagtgtctggccttggttcgaataccgcagcgaaagaagctgtgcgtgttggctttgattatttcaaaggtaacctgaatagaatcagtgcgtcggcgaagttttctgatcatgagtatcacctccatgttgttgagctccacaatacggggccaagtacaaagtcatcgctcgctgcattaattgcgttctgttcaattctgatgaaccgaccgattcaagagcagatggttgttttgggagagatgactttaggtggtgtcgtcaatcctgttcaagatcttgcaggcagtcttcagttagctatggacagtggcgcaaagcgtattttgctcccaatggcctcagcctcagatattccaacggttcctgctgagttgttctcaaaattccagatcagcttttatgcagaccccgtcgatgccgtgtttaaagcgcttggggttaattga

SEQ ID NO: 36624 - DNA, 2652 bp, Escherichia coli
atgtttaccaaagctcgtttctttaaatgtgcattgcaggtaaatccggcaggatacataaaatatcgtgggcaacagcagaccatcacggaagatgaatataaccaaaatctgcttgcggcatcactggaagcgggcatagaggtcattggattagctgatcatggttcagtagatggtgttgataaaatccgcaatctttttgttgagaatgggattgttgttttccccggctttgagattgcgtcaagtgagaaaattcactttgtttgtctgtttgatgaaaacaaaacttcgcaagaacttgaacggattttggggcgtctagatttacttgatccagaggatggtatattgccgaccaacctcacagcaattcagctgattgataaagtgaatgagataggtggatttatctttgcagcacactgcataaatgatgatggtgtgctcagtcgaaagatgaaccatgtatggaaacatgaagggttgatggcagctcagataccaggcgacaagtcgattgaagatcttaaaggaatagaaaatgatttctaccgtaaggtcttcctcaacaaagatcctaactataagcgcgagcgcgaaatggctgctattaactcctcagacgttgcaaaaccagaggatatcaaagcatcgggtgcttcttgtttgattaaaatgaccaacccttgctttgcttcctttaagcaagcctttttagatgcaggttcgagggttcgtttgaactcagataagccagaaagctatgcttcggcaattgagcgtattcgatttgttggtggttatctggatagcgtcgatattgaactatcggaccatctcaatgctgtgattggtggtcgtggaactggtaagtcaaccttgttggaatgtattcgctatgctttcggattagaacctaaaacacctaacgcaatcaaacagcacaaaagtgtcattgatactaaccttgggaaagaacgaggtttagttgaaattacgttgcgttcatcagttatgcacggtcgcagattcaaagtaagccgaaaacacggtagtgatccggtagtggttgactcccatggaaatatatccccctatcttccaacggatattttgcctggtatagagctttacgggcaaaacgaaatctatgaaatgacacgagatgaacaaagtcgtaatcagctcatcgaacgttttcttgagggcgaacatgagaagtttgatgcagatatcgctgacgttttagcaaagttaaaagataatcgagaatccatcaagcgagtcctaggtcagaaagatgacattgaagcagagatcgagcgcttacctaagttattggatcaggcaaaacagtatcaagcattaggtattgatgaaaagctggagcttattcctaaacttgaaaaagaaaaacagttgaatgatcagattggtgaggatgttgcaagcgtccaactggctatcgatgcgctcaaaaacagtttgccagatactttgtatttaagtgataccaatttggatggcttacctcatgctgagctcttgaagcagcagcgtgaagttttgaatgccctgaaaacgggcgttcagcagacattaatacagttagaacagctaactttaaatgcaaatcaacaattgttaccggtcaagcaatctttatcagaaaagcagcaacttgaagagcaaaaacttgagttggcttttaaggatatacctgcaagccagggtaaaactggccgacaaattggtgctgaatatcagactctgttaaaacaaattgagcagatacgccctaaacaaaccaccttgcaagatcgccagacacaaattgacgaattgtacaactcgcgaaagaagctgcttctggagttagaacaacatacaagtgcgcgtgcgagtagtattactaaatctgttaaaaggttaacaagaaaactggagcagaaggtacggctcaccctacagccagaaggtggccgccaagaacttgtgaattttctgactgggtgcaatttagagggggttgggcctaaacgtctcgcctgggtattagaaggtaacttctctccaagcagtttagcctcgactatccgtcaaggagagtcggagctaggacgaaagtttggcatatcaggcactgttgtttcagctttaattcgtctttcagaagtaaaactaatggaactggaagaattgcagttaccggataccatggcgattgagttaaatgtgactcatggagaacgagaagctgtatttaggtcaattgatgaattatcgacgggacagcagtgcactgctgttttgcacttattgctgttagataatcaagacccattaatccttgatcaacctgaagataatttggataacgcatttatagctgagaggatagtcgcagaactacgtagggctaaactgagtcgtcagtttctatttgcaacacataatgccaatattccggttttcggtgatgctgaatggattggcgttttgagcgtagaagataataaagggctaattcttccagaacaacaaggtgcgatcgatgttcccaatgttcaggctttagccgcagatatattagagggcgggaaaagtgcattcaatcagcgtcgtgagaaatatggattcgtgtaa

SEQ ID NO: 36625 - DNA, 2151 bp, Escherichia coli
atgttcaaaaacctattttttcaaaccaaagcactaccagaactgtcatctcaactggatgcagacattccacgctatccgccatttctgaaggggttgcctgctgcgtcacccgaggatttgcagtccacacaagacgagctaattgccaaactgcgccaggtacttggcttcaaccagcgtgattttcaaaggttaattcagccctgtattgatcatctggctgcttatgtccacttgctgccagcatctgagcatcatcatcacagtggtgctggtggtttattacgtcattcgttggaagttgctttctgggcggcacaagcagctgaagggatcatctttgttgccagtggcacaccggttgagaaaaaagagctagagccaaggtggcgtgtcgcggcggctcttggcggtttgttccatgatattggtaagcctgtttcagatttgtccatcacagacgaagatggacgctatcagtggaacccttttttagaaaccttatcccagtggaccactaataacagcattgaacgctatttcattcgttggcgcgacggacggtgcaagcggcacgagcaattttcaattctggttttaaaccgggtgatgacacctgagttgctcgcctggttaacccagccgggccctgagattttgcaagccatgctggaggcaattggcaatactgatctcgagcatgtcctgtctaaattggtcattgaagctgaccaaaccagtgtccagcgagacctgaaagctcaacgaatttccgttgacgacaatgcccttggtgtcccagtcgaacgctatctacttgatgccatgaggcgattacttgccagttcccagtggctggtcaatcagcgagacgccagagtctggttacgaaaatcgaatcaatcaacccatctttacctggtttggaaaagcgcggctaaggacatcattgagctgttggccaaagacaagatacctggcattccaagagatcccgatacccttgcggacatccttattgagcgaggattggccactaaatccgcctcgaatgagcgatatgaaagccttgcccctgaagtgctgatcaaagacgacaagcccatctggttacccatgctgcatatatctgaggccgatttattgttcagctcgaatgtaccaagtagtgtgagactgtttagcaaatctgagtgggaagcaacacggcaaacacaagcagagccacagagtcgctccagtgagcattcagacttgcctgaagcgtcatcatcaatcgaacatagaaaatcgactgagtcaccatcgacaaactcgtccgaacaagatgatgaacttcgtcttgccagtgatgttaataacccccaggcaactgaaaatgctccaggtgatggatgtgaaaagcctaacaattcatatgatggcgctatctcaaataacgtaaaccagtacgatacagaagcattgaatctccctgaatctttggcgtggctcccagaggccagcagtgcgttggttatggttggtgaacagatcttgatccgctatcccgatgccgtaaggccttggtgtgctccccgaaaactgcttgctgaactcagtcaattagattggcttgaactagatcccgcaaacccgacacgtaaggccagaactgtgactacgaatgatggcgttcaggagcaagggttacttctgaaggtatcgatttctaaaaggctaattgcactgatagacatctccaaacaaggcacagaaccggcggcagcaattcagaacgaagaggctttacagcgtccgagtcgaactaagacaactaatgcccaagcaaaagagcccgccacaagagcggagcgaaagcaaaagccgattgcgcccaatgcgaaatcgagtacagaccccaaatacgtgcagcgccaacagatggttaattttgtgaaagatttgcccatcttactgaccgatggtgattacccagacgtggatcatagtgccgatggtattcgcgtcacgattcaaaccttacgccaagtcgccaatgcgcatggcattccagccggacagctgcttcgggggatctcggccagtgacgaatgccagtttgatgagggggaaacggttctgtttaccgctcacgctaaacgttaa

SEQ ID NO: 36626 - DNA, 1821 bp, Escherichia coli
atgaaagaaaacgcatacgaaatgccctggcgcacgaactatgaggccatggcagcagcaggttggctggttggggccactggggcgattgccgcagaaatgctgacagagttaccgcccgaaccattttggtggatgacagggatttcctcgggcatggcgttgtatcgcctgcctgaggcttaccgtctttataagttgcagaaggggctaaaaggcaaaccattggcatttatggcgctgtcgcatttgcaaaaggtaatggcaaaacatcctgatgaattgtggttaggttatggctttgagtgggaccaacgccatgctcaacgtgcttatgaaatcttaaagcgggataagcaaaccttgcttaaccaaggtcacggcaagcaaatgggttcgacctggattcatggtgtcgagcccaaagaagaagatgtgtaccagccagttggtcacactgaggggcataccttaatagttggtacgaccggtgccggaaaaacccgatgctttgatgcgatgatcactcaggccattttgcgcaatgaagccgtgataattattgaccccaagggagacaaagaacttaaggataatgcacagcgagcctgtattgccgccggtagtcctgagcgctttgtgtattttcatccgggttttccagagcattcagtacgtcttaatcccctgagaaactttaaccggggcactgaaattgccagccgaattgcggccttaatcccatccgaaaccggtgctgatccatttaaagcctttggccaaatggcactgaataacatcgtgcaaggtttgttgcttacgtcacaacgtcctgatctgaaaacactgaggcgttttttggaaggtggcccagaaggcttggtagtaaaagccgtcacagcctggggggagcaggtgtatcccaattttagtgtggagatcaagcgctttaccgaaaaggccaataccttggctaaacaagctatggcgatgctgcttttctactacgaacgcattcagcccgttgccgccaatactgatttagaggggctattgagtatgtttgagcatgacagaacccactattcaaagatggtggcctcattgatgccggtgctcaatatgctcacatcaagtgaactaggtccattgctatcaccgattgcaaacgatgtgaatgacagccggttaattacggattctggccgtattatcaacaatgcccaagtggcctatatcggattggattcattgaccgacgcaatggttggtagcgccattggttcgttgcttttatccgatctcaccgcagtggccggtgaccgctataactatggtgttgaaaatcgtcccgtaaatatcttcatcgatgaggcggctgaagtcgtcaacgatcccttcattcaactgctcaacaaaggccgtggcgcaaaaatgcgttgtgtgattgctactcagacctttgctgatttttcagctcgtacaggcagtgaagctaaagctcgccaggtgttaggtaacatcaacaacctgatagctcttagggtgatggatgccgaaacgcagcagtacattaccgacaatctgcctaagactcggttgcagtacatcatgcaaactcaaggtatgtcgtccaactcggacagccccgcgttgtttaccggcaatcatggcgaacgcttgatggaggaagaaggcgatatgtttccaccgcagttattaggccagcttcccaacctggagtacatcgccaagctttcaggtggccgcgtgatcaaaggccgtattcctattttaaccagctctacacaggcagcataa

SEQ ID NO: 36627 - DNA, 561 bp, Escherichia coli
atgcatcattctgtctgtctgaaaatgacaacacttaccagtaaagaaatgctcgttcaatggcagcaacataacccccagttcaaggaaaccttaagactgcttgaaaccgactggcctcatgctttggcctcagtgcactgtttggcggactatttaacagatgcgttcacgttagatggccatgccatctttgatttgtgtctgtgtaatggcttgggcagttatgaagaagttagttgtgatgatgacagtgtacgcctgtggcatttcattgaggcactgacctggactgccgctagtgctttaacggggattcgcttgcgtgatcctgaccatttcgagtgggccgccgtggatggtgtgtatttctactcctggattcgtaatcgtccaaatcggatggcgtatttggctgaaggacgcatcgacgtgcgttatgtcagtggccatacgacgacaaagcggcttcaacaagtgattaaagcccggattatgacgccaaccgttgcagccatgttggcgcgagtagaagaggatgtttggcatgagcaagcataa

SEQ ID NO: 36628 - DNA, 636 bp, Escherichia coli
atgagcaagcataagtcggtttggctactttgcctggcgctgatgctggagattattgccattggcgtgttagtgcccggtgattggactggccgggttattagtaaagagaagcagatgatccaaaatcaattgggcgcacaaacaagctattggattggtcaaactagccatcgctggtatcagtcatggattgtggatacgcagatggagcaatctgtgcgagattttctaatccccactgaagagcagcgactgcgctctaaagggatggagaacatgggaggcttttggtttgtttgggtggaagatcgtattcaggcattttttgatgtgttgtaccaagtgttcactcgatttgctttgctgatggtctggttgccctttgcgcttattctcatgttaccggcgctgtgggacggcttgatgacctggaagattaagaagacaacctttgatttttcgagccctatcattcaccgctacagcatgatcatcttgggctcaggcgtcattttgctgtttatgggattgttcgccccgctggccattccaccggtggtgctaccgtcgctgatcatcggtttagcattaatggcggggttggcgttaagtcacttgcagaagaagatatga

SEQ ID NO: 36629 - DNA, 588 bp, Escherichia coli
atgcaaattactaaaatcatttcctctgcctcggttgaacgtttaaagcaaaaagcacgaaagcttaaacgtgaaaaatccattccacacactcaagcactcgatgaaattgcaatctctgttggctttaatcattggcatcaggttgtacaagccaatgacgtactgaagccatcagaggtggcgttatcttctggatgtgtcatggcttttgatgtcaaagatggtatggaagccgataccagtgatggggttttaattgaagaccacttcttggagatgctcactgaaaagcagctgtttgaaatttatgccaattcccctgatgaagacgacgtacaaaataggccgctaaaagaaacgctatcggattcagagcttcatgagtattttcgagattattgctcattcatgtactttcgtcttgccgagcctcatgcaaacaaaccgttaaaagaagtattggctcttatacgacagtactctttttggatgcctcaatatatttggcttcaaggccaccttattgatacttatcatttgccagcggaagacgagaacggcaataccgtaggcgtcaggttttag

SEQ ID NO: 36630 - DNA, 282 bp, Escherichia coli
atggaacctgtgagtattccatcctatatcgatgacccgccgcacttcctgctttggagtgccgatgagatggctcccattctgttggggctagtgatcggcatttttaccggtaatgccttggttttatgcctattggggttggtaacaaccaagctctatcggcgttttcgtgatggtcgcccggatggttttattcttcacgccatctactgggccggactgttgccaaccaaagccaagacgatccctaacccatttatcaggagctatctgccgtga

SEQ ID NO: 36631 - DNA, 627 bp, Escherichia coli
gtgaagttcgacgtgtttttaaaatcatggcaaggcacgcaattagagaaccgatggcaacggttcctgattgcggtgctggtgctatctaacttgctacttgcggtagcggcattttctcgcaataccgtggtagccattcaaccgccaaccttgtctgaaccggctgaagtgtcacgaaaccaagctactcaaccttaccttgaatcctggggactctacctggctgagcttatgggtaacgtgacgccaggtaatgtgtctttcatccgggttgccattgagccgctactttctccagcggtgtaccagcaagtggtcgatgcactggagattcaggcaagacaaatccgcgaagaccgggtcacgctcaaattccaacccagacaagtggaatatgagtatgaaaccggccatgtctttgtgaccggttattccttggtttctgggccatctggagatgagcagcgccaaactcgcacctatgagtttgacatcgatattgagcaataccgtccaaaacttagctggatggatacgtatgaggggcaagctagaacgaagcgcgttcgtgaaaagttgacccaagagcaaaaccggagggtgaatgatgcgaaccaaaattag

SEQ ID NO: 36632 - DNA, 900 bp, Escherichia coli
atgatgcgaaccaaaattagtcgatggatgacaccaagcttaatcgcaatgagcttgagtggcgtcctgttatctcaagcgtcgtatgcagacgtggaattgccaattgtgccagccagtgtgatgaagcagtctgctactgcaaatccaccggttcaaagcaatacggttgcaaccgatgcgccaacaacgctactgatgacaccgggtgttaatgaactgatccctgtagcacttggtcatctgaatcggattgtaacgccgtttgaatcgcctcaggtgagaacaaccagtgatgctcagacgcaaatcaaggggaatgttgtatatgtggccacggacaaagaatcaccggtttcactttacatcactccgcctggtcaggaagcgcctgcattatcagtcaccttagtacctcgtcgtattccaccgcgtgaaatcaccttagctattgatggtcagcagtggcctattaagggcgtcgtgaaccgaaaagccgccacttgggaaacggctcagccatacgtcgataacctacgtgacttactcagacgccttgcactaaatgagttaccacaaggctatgacatccgtttagctggccaaactgacacaagcccgaaatgttttcagcctggcttaaagtttggttttaagcaggggcaaattgtgacgggacattacttcaccgtctatgtaggactggttgaaagctttgccgatgagccgatagaagccagtgaaatagcctgtcatgcaccagatatagtggcaagcgcctactggcctcgcaatatcttgttgccgggtgaaaagactgagttgtatgtggttgttcgcaatcatcgtgaagaagcggtggaaagtcagcgaccttcgcttcttgtgggaggtgaataa

SEQ ID NO: 36633 - DNA, 1290 bp, Escherichia coli
atgaaagcacaatgggaacaaatgagcccgaacatgaagcggggtctatcggttgctggtattgctggtggtctcatccttatggtgatggtgttttcacctaatcctgacgatggctcaagtagtcggaaccgacaggaaacgatccggcacattcttacggataccaatactcgtgatgttggggtcgatagtttggctgcgaacgtaaaactactcagtgagcgcaatgaacagttacgtcgtgaagttgagcgcttgcgtcgtgacgtcgattcaggacggctaagcccaggttcgccttctataccaagtgaggtcaatgcggagttggctcgccttcgagcggaacttgatgatgttcgcgctggaggttatgcagcagttgaaggcactaatagccgtttcgaagtgcctttatctgccatggaattgcctaaagacgaaaagccattgccgtctaacccagacgactattttgccaatgcgccgctgcctgatccgctctatcagcagccagccaatggccaaggcacacgagcacgggatgttccattgccgccaatcacgattcgtatgattgagcctgaagtggttgctgaaccagaggttgttgtgcaagaagcgccgcctttgtatctaccggcaggcagcattatctcgggtactttgatcacgggtttggatgcacctactcacgagtccgcaagacgtgagccttttcctgcattgctgaggattcaaaaggaagccattttacccaaccgatttagagcggatatcaaagagtgtttcttgatcgccgcaggttacggtgatttgagctctgagcgtgcttatttgcgaggcgagaccatttcatgtgtgagagaagatggtggcgtcattgaaacacgactggattcttatgccgtgggtgaagacggcaaagccggtattcgtggccgattagtgtcgaaacaaggccagctggtggccaaatcgatgatggccggattccttcagggcttggctggcgcatttgatgtgaatcctgtaccaacgattcagacgggtagtgccggtgatactcagctgtaccagcaagtcatgagccaagaagcattacaaggcgctgcgattaaaggcacaggtaaagcattggatcgagtggccaagttctatttggacatggctgaaaatatgttcccagtcatagaggtagacgctgcaaggaaaattgaagtcatagtcactcgtggggcctcgttgtcattggccacttcacaaggggtaggtgcaagaagatga

SEQ ID NO: 36634 - DNA, 573 bp, Escherichia coli
atgacgacatcaatgcagaacaacccaaagcaccagtcaaaacagtggtctaaagctggattacttttattggcagtcggctcaaccttattgtctggctgtagttcattgggtcttgggagtagtgaatatggatgcccaggtatgcctgacggtgtgcgctgtttatccgctcgtgaagtctatgagcttaccagtaatggcgctgcacccaagacgattgatgctgtggcgactcgaattggttctccctctgggtattcacaatctgatttagagacaggactgctgagccatccagcattacctgagacgcagcaatctgcacctattcgcattccttcaagggtgatgcgaatttggattgcgccttgggaggatgaccgtggagatctgaatttatccagctacgtgtttaccgaaattgaaccgcgccggtgggatattggggtgtcagcacctcgaacggtttcgcctgtgctacgtccacttcagactcagagcgattcaacctcagcgggagctgatggtaagcgcgataacttgagtatctacggagaaactaacgaatga

SEQ ID NO: 36635 - DNA, 387 bp, Escherichia coli
atgacaaatgcggttcgcaccattcaaactcagcgcctaatgaccattggtgcgcttggtttgatggcgttaatgatttcggagccctcatttgcgggcaccggtggtgatgctttcactgatgtgtgggataccctaaaagattggacccaaggtactttgggacggatcgtagcgggagccatggttctggtgggtattgtgggcggtatcgctcgccaaagcttgatggcttttgccttgggcattggtggcggtatgggtctctacaatacgccaacagtcgttgaaagtgttatgtctgcaactttacctgttgttgccagcactcaagaagtcattggcacaaccgttccagcaatcagcgccgtcttactgggcacctga

SEQ ID NO: 36636 - DNA, 834 bp, Escherichia coli
atggtttatactgttcgtgatattcatactttgggtgttaaaatgtcatctaaaataaactggcttgttgctcatacttctcctggtgcgctagtacttcagcaatggctgactgaaaacggcgtgagctactcgttggctcaaaagtacgcgcagaacggttggctgaagaagcttagttctggtgtgtactatcgtccaaatgcgcagggcgatataaagccaacttgggttgatgccattcaagcattggatgtgcaattgggcgttccagttcatttggctggactgagcagcttaactcaccaaggactgagtcactatttacagctgaacaaagagcaagtttggatttgcgttaaaaacaagtcgtccttaccgaaatggtttcgtgaattcccttatcagaattggttttactgtggaaaccataagcttgaagtgaatcccgagaaagatttgaaaaggatcacggttaaagagaaagaactcactgtcagctgtgcagaacttgctgcctatgaagtggtagatgcgattggaaagctgatttcatttgagcatgtcgcagaattatttcagggtttagtcaatcttagccctagaaaagtacaagatattcttgaacgaagcagctctgttcaggcaaaccgaatatttctatttctgggtcgatactacgatcaccagtgggtcaatcgcgtagatgaaacaagaattaaattgggggcaggaaagcggcaggttgtcgaaaaaggacgttttgatgagcgatatcaaatcacagtgccagagatattaagcgtcaaaaaaggtgaacaacataatggataa

SEQ ID NO: 36637 - DNA, 939 bp, Escherichia coli
atggataaagatagcccatattacaaacaggtttccttgctcataagaatgcttcctgtggtagcgacagagacggtttttgcacttaaaggtggcactgctattaatttatttgtgagagattttcctcggttatctgtagatattgatcttgcttatcttccacttgaaccaagagatgaggctttgattaatgtcagggctgcattgcagcgcattacagacagaatcaatactcaaccagatatcagagcggcatttcaggataataaagctgatgaactgagaatagttgtatcaagtccggttgcaacgatcaaaattgaagtgtcgcccgtcgccagaggtacattgcatagtgcagaaataatgccagttcaagagtctgttgaagacgagtttggttatgctgagattcaggtagtcagtcttcccgatctgtatggtgggaaattgtgtgctgcaatggatcgccaacatcctcgcgacttatttgatgtgcgtatgttacttggcagtgaagggatttcgagagagattttggtgggttttttaacctatacattaagtcaccctcggcctattaatgaagtcatgtcgccaaactggcagcctctgaatgagaaatttcaggcagaatttgacggaatgacttttgaaaaagttgaatgcgaagacttagcctctgttaggcccatgatgttaattgaactgcaaaaacatttcacagaaagggatcatgctttccttatgtcattcaaaagagggcaacctgactgggcattgtttgactatcctaatgcagcagacttgccagcgattcgttggaagttgcagaacataaacaaattggcaaagaatcaagcaaaacatcaagagcaattagataaattgaagcaagtacttgatgattggcttgttaacgcaaacgctgagtaa

SEQ ID NO: 36638 - DNA, 693 bp, Escherichia coli
atgcgaaaactatctccaattattctggcgcttgcgctgtctccattggttcaagctgaacctgtgtctgaagtgtcgcccgttggcaaaattgatggcatggtttctttacctgtcacgggtatgaaagcggtcgaaagcaatggccgtattgttttcatgtcagacagtggccggttcgtcattgatggcacgctctatgatgcctggtccaaaaagccgcttaccagtcttgaagaaattcgagaagcgggaaacacgctggacttaagtcgtcttggcttaaaaatggatgatttgaatccactgacgctgggtgaaggcaaaaagaaagtggtggtctttgttgatccccggtgtccgcattgccatgagcttttgaaacaagccctaccgctaaccaaggaatacaccttccaaattctccctgtgccagtgcttggtcctgattcagagcgtcaggttcgccagcttggctgtgcgcgtgacaagaaagcggccgccgatgcattgctcaatggccggattggtaacctagagcaggatgatgcctgcaacttagagccaatgcagcgtaccttggtgaccgctcaaattctgggaattcaaggtgtgcctttcatcgtcgccaatgatggtcgcatcagccgaggccgtccttatgatctttctgcttggttggaggggcgttaa

SEQ ID NO: 36639 - DNA, 2400 bp, Escherichia coli
atgaaagcctctctgtattcagggcaacgcgcttctgagctgttgccagtattggcctattcagacgatgagcaactgtttttcatggaagaccagagtgttggctttggttttctatgtgacccattgcccggtggtgatgagtctgttgcagacagggttaatgttcttctcaacaacgactggccaaaagacactttgctgcaatttggcctgtacgcctcgcctgatattcaaaccgaccttcagcgcatgatgggcttacggcatcgtcaatccgatccattactcagggcgtcgatacgcaaacgtgcggattttctcgatgggggcacggttcaaccgatagaagaatcgacccagactcaggttcgcaactttcaactgatcgtcacctgcaaattgcctttggaaagtcctattccgacggagcgtgagttgagtcgagcatccgcgcttcgggcttctttctcgcaagcgctggcaacggttggttttcgcgtcactgagatgactgaccgaaattggctcgcggcattaagtgctcagcttaactggggaaaagatgcttcctggcgcaatccatcaccaatccgcagtgaggcagataaaccacttagggagcaagtgttggattatgaccgagctatcaaggtggatagccaaggtctgatgctgggtgattaccgagttaaaaccttatcgtttaagcgcttgcctgagcggatctggtttggtcatgccgcaagttttgcgggcgatatgatgacgggcagtcgcggtttacgcggcagctttttgctaaatgtcaccattcactttccttcagccgaggcgatgcgatctcgtctagagacgaagcgtcaatgggcggtcaatcaggcctatggcccgatgctcaagtttgtgccggtgcttgcagccaagaaaaagggatttgatgttctttttgaagccttgcaagaaggtgatcgtcctattcgggcaaacatgaccttaacgctgttttcaccaacggaagaagcgtccatcagctctgtttcaaatgctcgaacttatttcaaagaactcggatttgagctgatggaagacaagtacttctgtttgcccattttcctgaatgccttgccatttggtgctgaccgccaagcgatgaacgacttgtttcgattcaagaccatggcgacacggcatgtgatccctctgttgcctttgtttgcggattggaaaggtacaggtacgccagtgattaactttgtttcccgtaatggccagatcatgagtgtgtccctttatgactcgggcagtaattacaactgttgcatcgcggcgcaatcggggtcgggtaagtcattcctggtgaacgaaatcatctcctcctacctatcagaaggaggccaatgctgggtaattgatgttggccgctcttatgaaaagctgtgtgaagtctatgacggtgagttcttacagttcgggcgggacagtggcatttgcttaaatccgtttgaaatcgttgaggactatgacgaagaagcggatgtactggttgggttattggccgcaatggccgcacctacgcagtcattaacggattttcagatggccaacttaaaacgtcagacccgtgaactgtgggagaaaaaaggtcgtgccatgttagttgatgatgtggcagaggctttaaaaaatcacgaagaccgacgtgtgcaagacgtgggtgagcagctctatccgtttacgacacagggcgaatatggccgtttctttaatggtcacaacaatattcgcttcaaaaaccgtttcaccgttttggagttggaagagctcaaggggcgcaagcatctacaacaagtggtgttgcttcagcttatctaccaaatccaacaagagatgtacttaggtgagcgggatcgtcgcaagattgtgttcattgacgaagcctgggatctgctgactcaaggtgatgtcggtaagttcatcgagacgggttaccggcgatttcgaaaatatggcggcagtgctgtaacggtaacgcagtctgtcaacgatttgtatgacagccctacaggtaaagccatcgctgaaaactcggccaatatgtacctgcttggccaaaaagctgaaaccatcaacgcgctcaaaaaagaaggccgcttgccactgggtgaaggcggttatgaatacctgaaaaccgttcataccgtcactggtgtctattccgaaattttctttattaccgaaatgggcaccgggattggccgcctcatcgtcgatccgtttcacaagctgttgtactcgtcccgtgcagaagatgtaaacgcgattaaacagttaacgcgcaaaggcctttctgttgctgatgccatctctcagttgttgaaggagcgaggctatgaataa

SEQ ID NO: 36640 - DNA, 348 bp, Escherichia coli
atgaataagaccacgctttggccatttatggcctctattactttgtctattgctggtagcggtttaatgaccagctggcttttaatgaaaacactcgaacccatccacagccagttggcgttaagtacgcccattgcagtcgtggattttggggaggctgtgctgtcactgggccctaatgccagcgaacaagacatcgaatctaggttgcttcagaccaatcagcaaattgaaaagttaaaagcagccggttttatcgtgctggatgcccaagcggtggtgggtgcagatgattccatatttgtgccagtaggctcaaaggaggtgtctcatgcagatactccgtaa

SEQ ID NO: 36641 - DNA, 513 bp, Escherichia coli
atgcagatactccgtaaaaaaatgccttggcggccatatctcatccgtttgaccgttcttgcgttaatcatggccgtggtaggcacctacgccatgatgcgctaccgaataggtattgatacccagcaagagcgctgtctgcctgataccacggtgtatctgattgacctatggaataaagagcccgttaaggagggtttgtatgccttccactcaaaaggactcgctccgttatataacgacggtactcggatgctgaaacgcctaacagggatgcctggggatgaagtcaatgtgacgcctgagcatgtgctggtgaacggtgctgaagtctcaaccggcatggcactagcccagcgtcttggtgtggctgaaacagaatttagccgctcattgacgctgcaagaaaacgaatattggttttccggtgaggctgcaacgagttttgactcccgctattggaattccgttaagcgcgagcagattgttggtcgcgcttggccgctttggtag

SEQ ID NO: 36642 - DNA, 1125 bp, Escherichia coli
atgagaagactatgcctcttatttttgttggttgctccattggcttgggttcaagtgtcctgggcacaagagccttatccgttgtctgacgaggacaaaaagatcgttgaaatgagccgcagcattttacaaagtgctgtggatggttcatctgaatttatcgagcctttttcaccgattgaacaacctgcgtcgctcaaacacaacgatgaatggttgatttttgcgtcgtcttcactgggggatgcctcactgaagcagctatttaaagaggccagtgcaaccggcgctattgtgttgtttcggggaattcctgaaggaaagaccttgggggcggctatccgtgattggcatacgctgatggtgggacttgatcctgttcctcaggttcgaatcgatccgaaagcctttgtgcactggcgggtgactagcgtgcctgccattttccgcatagaagatgacaaggtgactgcaagtgcactaggggtttacagcaaggactggttgcagcgtcaaattgaaacaggcaataccggttcattgggtcaacgcggtcctattcattccattttagaaccggatttaatgcaagtggcgatgcagcgtttacagtcgcttgacctgggcgcgttaaagaaaaaagccattgagcgtttctggtctcgccaaactttcactgacttacccaaagccacgcagtatcggataagaacggttgatccaaccatcgtcatgcagcggccactattggatgccaatggccgaacattgatcccagcaggaacgcgtattaacccgctcaaagccttgccgtttactcagcagcttgtggtgtttaatgcgtcgaacgctgaagaagtggacgcagttgcgcattggcttgagacgcaagataggacactgcgccgcattacgcttatcaccacgcagctcgaccgtactcaaggttggaatcgcctcaatgcgctcgaaaagacattggatagtccggtttaccttctcaatgcctcgctaaagcagcgctttgatttgcaagtcaccccatcgtttgttcaagcaaaggggctcgcgtttgaaatagaagaaattccagcaaaggagcttgttcatgaaaaagctcaataa

SEQ ID NO: 36643 - DNA, 1029 bp, Escherichia coli
atgaaaaagctcaataatacgtatcgtctgttgcggactctcgttgtcatgtttgtcctgggcgcatctatttctgctaaagccgaactgacctgcccagacgcgggtttattgtccggtaagttgctgacggatgtttgctggtcatgcatttttcctatccgggttgcaggtcttccacttggctctggcagtgtcccaagcggcgcatcaaacaagtcgttttgcttatgtgaagacaacttaggtgtgccaaggccaggtattgttaccagcatgtgggagccagcgcgtctgattgaactggtcagaacgccgggttgttcgccttcccttggagggattcgcttaccgttaggtgataggcgattgcaaggtggtcatggtgaaggtgaatacgataccggtgatcttgctttctaccattaccattattacgcctttccgcttttggtcatgctcgatttgttcatggatggcaattgcaatgccgatggttacatggattttgacttgatgtatttgtcggaattggacccaacatggctgaacgatgaactggccttttttactcagcctgaagctgctgctgttgctaatccattggctatctctgcttgtaccgctgacgctgcttcatcaacgcttggtaaacccatcgatcagttgttttggtgtgctggcagttggggccatctctatccgttatctggccacaccttagcctttggttcattagcagaaaacaccagccatttagcggcgcgtgcaatcgcggctcaacacaggcgtggtcttgcaaggcgaacaatggggaacagtgcgctatgccgacctgttatcgaacccatgctgccgaaatcccaatacaagatgagtatgttcttccctgtaccagaaactgaaagtgcgcatgtcatcggtgaaagcaccatgaaatggggagagtggcgaacgatccccggtgccggtgaagatgcgctctacattttgtggcgctggcaagactgctgtaactcgggaggttaa

SEQ ID NO: 36644 - DNA, 3693 bp, Escherichia coli
atgaaaccaacacttttcacccgagtgttagcgggtattttatctatcactatggcgtgcttgcccctacatggtgtcgccgctgatgtgcagcgccaatccggcttaagcggacaacaagaaggtaagcaattgctgcaaaactggacgatgcccgcactcaatggcaatacattgtcggtgccgaatggcagtggtaatgagacgattaacttgcaagagcttttccctggtatggatcagggctcattggatatcttaatgggcgtttatggctctgatgccagtatgaatcaattggggacgcagcgccaagagagcatggcatccgaaagtggcgctacgggtgaagcatttcgctcgctacagcaaatcaaagacaggtctcggccagatatggtcaatgatccgctttgggcattaactgacgcggttcaaactgaccccaatctattaactcaaagcttccccggctgtgagtctcaaggtgaaggcagcccaaattaccagcaatgtgacaggctcaatacagctgttaacagctgcactattactcacgattacacggcaggcattattgagcatgtttcagggtcgatgaaccttcgctcttgtggtgaggggtgtcttgaagtttggataggacgaattggcgacaactactggagtggcagttgtaaagtatttgaacaggccatcacactcaaagtcgtgaatcccgatgcgattacctcagccgttcttgagtacgcaaaatgggatgactacatgcaagtgtggcttggcgatcagaaagtctggtctgggccgaacaataactttccaccagaaacggcaggtcgctgcgagctcagtaccagttgggagcgcaatcctaatactgacctcaccgccaagttaaaagcggtagagccaggtttagaagtgccagtcaaaattcgcgtatcggtcactggtagtggtgaggggtatgcacgcataaaggtgcgctttgatccaaccaaggtggtgatgaatgatagttggtcaccgcaatcctgtattgaacaagcagcggatatcccgacgaagttttcagactacagcattcaatgcacggatcagccgtcttcaaccaacggatgtacggtggtcaatggtgtttcagtttgtgaatcctactttgccccaagccctgtggctggcatatcgcctttgtgtcggcgtgtacaagtgagtgtggatgacgaaagctataaggggattgaaaatcaggcctgccaagtgcttgaagcgaacccttcctgtggcttcatgtcgtcagaatgtgccgagaccaatgataaaggtgaatgcattcgttttaccgatacctatgactgtggattgcaaaccagcgatccaaagtgcgtggtatccaatcttatgccgagtagttttgaggcctgtgagcctactcagacgattacgccatttactgaaaccaagcatgtaccggattaccaggtgtgcgaaaagatcagcacgcttactcagtgtcagttagagcgacgtgtatccgctgaaacccatcaacaaagctggtccattgagcgcggttgctttagctctgaaacgctcagctttgttccacagcacagcaacaccatgcaaactggaaacgcgacgctgagtatttttgataatcaaaatactgagataaaaatcaccgagtcgccatccaaggcaaatggttggaaaacgacactctcattgacgggcaataaggagacggtgactgagacgaaaccgtctattaaataccctgaaatgacctgtccaaaaggaaccttggttggttcattgtgtaaagttgttaatgggtcgattatttcgtggcatgaaccccaagagatcactcgttccagatgtgagtccggctggaacaaagtcgatttcgatacttgcagccgagaagttcagaagtgtttggctcctgcgaaactgagcgcttccttgaccttctccggtaagtacttagaacaggacgttgttcatcaatcaagtgatcccggcatagaccaatgcttgatgcaaacggatcagttcactacggtgcagtggcagtgtttggatacgggcacaaaacgaattgaagggttaacggttggtagtggcgagttggccaatcttgggagcctttatccagcggttgtttcgtctcctgctcatttaaccagtcgcggcagctctgatggactgggactctcatgctggagggcaagagcaacctacaatgcttcgactgctcatccagagttcaatatgggcagctcagatagctgggtagatgccaatggtaatacgcaaaccatcgtcaataacggacaaaacacgaccaccaatacgtgtgccgcgctagagcaaaacccagcctgccagtatatcagaaccgaatgcactgaaggcggggctggtcatgaaggcttctgttatatccaaagtttggtgtatgactgcggacaaagcgttgaagtgcaaaacgctcgaatggaaactcaatacaactgtgaggggccagttcgctgcatgggcacagattgtttagagccagagtcaatcaagcaggctaactttgcagaggccgctgcgatgctcaatgctgcgcagtttatgaccaatgatatgtcatgtacgggagctgatggccaagataacgttgagtgtacggtttttaaaggtaatgctggccagtgcaaaaaagccgttggcggcatagtggattgctgtgaaaagccaagtggcgtgtcgttatcggactacatcacgatgatagtggcggtcaacaagcttgatacggcagtcatggccatgaatccgtcttcggcaatctatggttcctggaatacgctcagggaaccaatcaccagtacctggagtgcggtcaaagagccctttgtgtctgcatgggactctctcatgggggctgggccatcaacggctgctggcgcgggagcagagcaagcagcgacaggcttcatgcaggtgttgaccaacaaaacggctgaatgggtaggtacgacctttggttcgggggcacaatcggctctgtttagtaacgttggtggtgcggttggagccgatggtgtcgtttcgggtggtaactttgcgctgggtggcgctgcgggcgcggttctgagtacggttatgacggcctacatgatttattcagtcaccatgatcctcattcagcttatctggaaatgtgagcagagtgagtttgaaatgaacgccaagcgggtattgaagagttgccattacgtgggctcttactgcaagtctaagttcttaggtgcctgtgttgagaaacggcaatcatattgctgctttacttcgccgctttcacggatcattcaagaacaagtacgtccgcaacttggtcttggctggggcagtgccaagtcaccaaactgtgaaggtttgaccgcgagtcagttaaatcaggtagattggagccaagtcaatttggatgaatggataggtatcttgtcgatcacgggcaacctacccgaagtaccgtcactggatctggaacgactcacaggctcaggaagtaagctaaacgtggatggaaatcgtcagagtgccgcagaaagagctattgaacggctaaacggaatggatgctcagaaactgcgtcatgaggcaacggaagaaatttcggggaataattga

SEQ ID NO: 36645 - DNA, 333 bp, Escherichia coli
atgcctaatttcgatcaaaactttgaagctactcgtttgtctatgctttcaaaacaacaccctgacattgtgaaggtgtcgggtgaggtggtgtttcgtgcggaagatgacgaagaccgcctaagcggaacatcttggactcttgaagatgacatttttgatcaggtcaccgaatcaggcttcaaattacacttgcttgaacttctggataatttcatagaataccgaggtcaatgtaacgagctgccgaaaaaggaagggattgtgcgttttggtggtggcactttaaatattgaatggctacctaatggaactacccatctatccaaatga

SEQ ID NO: 36646 - DNA, 663 bp, Escherichia coli
atggatgataaatatgtttcagaaatagactgtcttgataagttaatggttgcatggtcagaggcattcccgaaggattggtatttcaactacgatggagtgatttcaactgaggactgggatagttgtggtaaaaaagttttgtttgttttaaaggaaacaaatgaagcaaagcaaaatattgtcaacgctattaatagggctattgaggtgaaggcaagtggatggtggcgaggaaaggttcttcgtcgggtggggcgttgggcttacggacttcaaaaatatgatggggctgtgccgtcactgagagatgctaaattaaatgaaaaaaatgcagttaagaatattgcatacataaatataaggaaaacatctggaagtgcgcgaaccgaccaaaaatcatttgacgcccatgccaaagaatttgccccttttgttcgaaggcaaattgagttgattaaccctgatattgttgtgctttgcggcacatataatcaagttaaacgttacgtattccctgagcttaaaaaagttagcgaacgagtgcatgttaatgacggggttgtcttcatcaatgccttccatcctgccgcaagaaaaaagtcggccatgctttatcatcaagtactcgataactaccacgcttacaaaaatcatatataa

SEQ ID NO: 36647 - DNA, 603 bp, Escherichia coli
atggcccaagcaaaacccaattactcaaaacccatctttgaacaatcattcacaattaatagcttacaggcgcaacgtgtcgttgaccgtgtttttagacggacggtcagtgcgctttacggaatcgatgtcatcctgcgcatcattggcgatgagaacgaaattgatgaagtggaacagatcattagccagttgatcgaggattgcgctaaggcggtagacaacgaacaatctcgtttggacaaattgatggagtccaacggcatcgatgaagtacctgactacaccgacccgattaccttcaacgctaaaatcagctcgcctcaggttggccagtttgtcggcttagtgcgcaaactcgattcgttgatgatctcaatggacacactctggttatctagcgtgcttagtaacaagcaacgtgttgatggcaactacgcatggcaacagcgcattatcaaacttgcacgacgcattattgatatcgaaattcgtgcacgaaaatcagcccaagctaagggtaaagaagcagaagttgagcaagcggtgccttcaaccgatgacgatatcactgaagaggaaacagatactcccgccaactag

SEQ ID NO: 36648 - DNA, 327 bp, Escherichia coli
atggaatatatcttcggatttattatccaaatcgcgggcattatgttgctagcaaaactgagctggtcgcttttgcgattgcttgctcgtcaaagcgtgcgtccgtttcgatttgtacttactcaaatcaagcgattgctcacaccaacaccaaaacgtcgtccaatggcagtgcctaaagctcctggtatgccccgtttgacatctgcgttttacaaagagccacatcagtacgacatggctttactcgaaataccaacctatctgcgtcgtcagtcttctttgcccagccgggtagaaacgactgtgtgcacagagttcaactaa

SEQ ID NO: 36649 - DNA, 420 bp, Escherichia coli
atgaaaaaccaagtaacactcataggctacgttggctctgagccagagacgcgagcctatccatcaggtgatttggtgaccagcatttcactggccacttctgagaaatggcgcgaccgtcaatccaatgagctcaaagagcatacggaatggcatcgggttgtttttcgagatcgtggtggatttaagttagggctaagagcaaaagatttgatccaaaaaggagcgaagctttttgttcaagggcctcagcgcacgcgctcatgggagaaagatgggattaagtatcgattgaccgaagtggacgcggacgagtttctgcttcttgatagtgtgaacaaagcatccgagccatcaccggcagatgatgcgggctcccaaggtaattgggcacaaacatatcctgaaccagatttttaa

SEQ ID NO: 36650 - DNA, 819 bp, Escherichia coli
atggaaaaaccaaagctaatccaacgctttgctgagcgctttagtgtcgatccaaacaaactgttcgataccctaaaagcaacagcattcaagcaacgtgacggtagtgcaccgaccaatgagcagatgatggcgctcttggtggttacagatcagtacggcttgaaccctttcaccaaagagatttttgcgttccctgataaacaagctggaattattccagtggtaggtgtcgatggatggtctcgcatcatcaatcaacacgaccagtttgatggcatggagtttaagacttcagaaaacaaagtctccctggatggtgcgaaagaatgcccggaatggatggaatgcatcatctaccggcgcgaccgttcgcacccagtcaaaatcactgagtatctggatgaagtctatcgaccgccttttgaaggtaacggcaaaaatggcccttaccgtgtagatggtccatggcagacgcacactaagcgaatgctaagacataaatccatgatccagtgttcccgcattgcgtttggctttgtgggaattttcgatcaagacgaagcggagcgaattatcgaaggccaagcaacacacgttgttgagccatcagtgattccacccgagcaagttgatgatcgaacccgagggcttgtttacaagcttatcgagcgggcggaagcttcaaacgcttggaatagtgcattggaatatgccaatgaacattttcaaggtgttgaactgacgtttgcgaaacaagaaatatttaatgcacagcaacaagcagccaaagcgctcacacagcctttaggttcttag

SEQ ID NO: 36651 - DNA, 144 bp, Escherichia coli
atgactaaatcagcctcactttttcgcttggtattggttgttgcccttgtcgtaggttcgattcaagccggtaaagcggcaattgattcggttcaagcaagtgttgttcagcaccaaacagcgttagcacaagctgcaaagtaa

SEQ ID NO: 36652 - DNA, 1017 bp, Escherichia coli
atgaaggttatcgacctatcacagcgtactcctgcatggcaccagtggcgcattgcaggggttacggcatctgaagccccaattattatggggcgttcaccctacaaaacaccttggcgattatgggcagaaaaaaccggattcgtattaccggaagacctgtcgaataatcctaatgtgcttcgcggtattcggttggagcctcaagcaaggcgagcatttgagaatgcgcataatgactttcttctgccgttatgtgcagaagccgatcataacgcaatctttcgagccagctttgatggcatcaacgatgcgggcgaacccgttgaactgaaatgtccttgccagtcagtttttgagaatgtgcaagctcaccgagaacaaagcgaggcgtaccagttgtattgggtgcaagtacagcatcaaatactggtcgccaatagcacgcgtggttggttggtattctattttgaggatcaactgattgagtttgaaatacaacgagacgctgcgttcttaactgaattgcaagaaacggcgcttcagttttgggagttagttcaaactaaaaaagaaccgtcaaaatgccctgagcaagattgttttgttcccaagggtgaagcccaataccgctggacatcgctgtctcggcagtattgctcagcacatgccgaagtggttcgactggaaaatcacattaaatctttgaaagaggaaatgcgagaagctcagtcgaaattggtcgctatgatgggtaactacgctcatgccgactatgctggggtcaaactcagccgctacatgatggcaggtacggtggactataagcaattggccaccgataaattaggcgagctggatgaacaggttttagccgcttaccgaaaagcgccacaagagcggttgcgcattagcaccaataagccagagcagcccgttgaaacaccaatcaaaatcagtcttgagcaagaaaacttggttctgccaggtgactcgccgagctcattttacttttaa

SEQ ID NO: 36653 - DNA, 960 bp, Escherichia coli
atgactgaacaatccccatttttggttcaagtgaatcaagcgtttaatgttccggctcctgatgctttcgttctggaaggatttggtgccgacactacccatccaaacattcccgttcgcaaggacgagtatgtttttagaaaagaagacttacgtgacgtattggcgttcttgtctaaccccgacggtgacggtttgtatattacaggccccacgggatgcggtaagacctcgctaatttgccaagttgcttctcgattgaattggcctgttcagcaaattactgcacatggtcgattggagttgtccgatcttatcggtcaccacacgctggttaatggcaacatgacctttgtgtatggaccgttagcactggctgtaaagcatggccatttgctgatcattaatgaaatggatcttgctgagcctgctgaactggctggactcaatgacattttggaaggtgccccgttggtcatcgcacaaaatggcggagagatcatcatgccacataccaagtttcgttttatcgcaaccggcaacagtgcgggcagcggtgaccaaacgggcttgtatcaaggtgtgctccaacagaatttggcttttcttgatcgctttagaatcatcgaagcgacctatgcagagccttctgtagaggaagccattctggagaacgttgcgcctggcttgccagaagtctttcgccaaaaaatggtgaaagtggctggtgacatccgtcgtctttttattgggggtacggatggcggtgcagagcttagtatcaccatgtccactcggactttggtgcgctgggcaaagttaacacttgcttttaaaggcgctcctaacgcagtggagtatgcactggttcggtctttgacggctcgtgctgagttggagcaacgtgaagccattcaccgtattgccgctgatgtcttcggtgaccactgggaggattga

SEQ ID NO: 36654 - DNA, 768 bp, Escherichia coli
atgatggaaaagtgctttgctctttaccgttacagtcattctgatgggacagccaaagaatgggccatttacgttggatcagacacccaggagattgaagttcggtttggaaaagctggtcaattgtcgcagcagcgattgattgattcgactgatcctaacgctgaagcagaccgacgaattaatgagaaaatcaacaagggttatcgattggttggacaagtcggcattgatcatcaagggcggccatttgaactctcaaatgcgctagatagcgtcgcgtgcgccaataacgtcagttgggagtttcgtactcgcaaggacgtcaatggccaaatctcgctggcgcaaaaagcgttgttcgatatggcaaagctgcttgaagcctatggcttggctgttattgatgataaccaggtcaggattggagaatggtcattagggttttgcaaaagcagattacctagtaccaatcaaatcagcatggtgtcaggtgaaggcgctggcattgttaacacggatgatggcccatggccattgttgctgttactggcctttaagcgtcaattaccacctctgtgttcgctcacagtagcgagtcctgaagggatagaagtatccgaccaactgaagttggaaaaagatgtattgaggctattaggtagtgatttagagcgggttcgcccgattgctgaagcactggacttaatgcctgtgaaaatcgatctcaaccaatcgtcgcctgattcgcaaaattactatttctga

SEQ ID NO: 36655 - DNA, 954 bp, Escherichia coli
atgagtattcaaaccctcgacaaacttttgatttgtcacatcgactgttccatctggagcggtagaaaaaaactaaggcctgaagatttcagactagccaatggcagccaacttccaccgaaggatgttgccagcttagggagtaaaaaaatttgcgcccctgaggcattggcgaactttgaaaggcttaagaaagaagcgcagcgcttgtgtgagcaagtcggtgtgcggtttttaggtggctatgccgtccctgaggaccgaattgatcagattgttccagagcttgaccggatcggtcaggagtttgcgcagtgcaagcagttgttcttggacaactatgatcaggtgacgtttgactgggttgcaaaacacccggaatttgcagatgcaatccggcgtgcgctgtcacccattgaagatgtggaacaacggcttcagttcgattatgccatctatcgaatgcaaccggctgaacaagctggtggcttagatgacaaggtcaatggcatgggacacaccctctttagggaggtggctcgtgatgccaatgaactgtttgagcgttccgttgcaggtaagaatcaaatcagccagcgagcccttaatcctctgaagcggttaagagacaagttggatggtttgtcattcctggatcatcgagtccagccgatggtcgaagcgatggacaatttatttgttcgtctgccgaagaccggccctgtgacagacaatctctatcacgaactgatggcgaccattttaattttgtctgatccagacaagatgagaatgcacggtgaaggtcaattggatatcagacaactgatgcccaaacctgaacctaaacccgcacagccagtatctgctcagccagataacttatgtgcaataccacaaccaaccgtcagaccaaaccttggttcgactgtaccaaactcattttatttttaa

SEQ ID NO: 36656 - DNA, 441 bp, Escherichia coli
atgcaatcaaccatccataaccccagccaactgaagcagtttgaagcacattttcgtggtgtgactgatgcggttgaaagtgaatcgataccagaagtggcgtgttgtcgaacgttagtacaacggtcgtactcaacacatagtgtcgtgatccccaagaaccctgttttgatcgcagatgcggacgcacaaggagcttgggtaacggccatggtatttgttccaaacatagcattgcagcaaaccgcttatgagcgggcctggctgcaatatcaacacgaggtgtctactcagttacaagaccagtacggtctgacattggatgacatcctgagtttagaccagcttaaaacgtcatttgagcagcacgagagtccagctcaattggtggcttggttaggtcaaaaatacgacctggataagctagaagcacaggtttaa

SEQ ID NO: 36657 - DNA, 1656 bp, Escherichia coli
atgaatcatccattaaaaaatgcactgccaatcgttgccgccgcttatggcgaaaagtttggtgtgaaggtgcttattcaaggacaagatgcgtttacagatggtgagcggattgtgatcccaacagcaaacccagacgacccacactatcaacagatagcttggggttatctggctcatgaagcggcgcatattcggcataccaattttgacatggtgcagaaggcgtcgtccaagccgatccgtaaggcacttctcaatattattgaggatgttcgcattgaaaacgaattggcaaaggattaccccggaacccggcgcagtatttcgcaagtgattgagtacatggtggacactcagcaaatgagtgtacctgaacagcttgagcctgcatctaacttgcaagcctggttgttgttccgcttgagatgccattttctgggccagaaagcgctgacgcctttgtatcaagcagttgatgaaagagtaagacaactctttcctaccgcagcgatgagccggttaagcgccatgctgacagcagtgcctagcctggtgtctacaggtgaagtgctaaaacttgtcgatgccatcgttgccatgttggaagaagaatctcgtccccctcaggatgagtcggatgctgatagcggtaatgacattagacaagatgcgagtaatgacagcaatagcagtagtgacagtcaaaccccggaaacaggttcgtctgcaacaggggatgctgctgaaacgggtgattctgataactctgatcaagctgacaatttgcgacaagccttagaggccagtgccgctcagtttgaacccgatacctttgcacaagtggcagaagtgttgtcggaacaagctgaaggacatcagggcgtcactccactcagtttgccccaagcagagcaggctatgttgggtgatgaggccatcttgagcttatcggcgtctgagtccgctcaaattcgagcccgacttaggggcatggttcagtccagtcaggacaatcggaatcatgccaaacagcacggtcttcgagttgcaacacatcgtcttgccgcttcacaagcaggtgagtcgagattgtttattcaaaggcagccccgcattgcgcctaatgctgctgtgcacttgcttgtcgatatatcgggctcaatgggtaagcccattggcgaaggtaatcgcaagtactttcatgttgccaatgaagccgctttggctttggccatggcactggaaggcataccgggtgttgtacctgcggtcagttattttcctggtattcatcaggaagtttctatcgcgttattgcccaagcaatcggttcgacatcgggccgcctgttttgaccaaaaaccacgaggttgtacgcctatggcacaagcgatgtggtttgcggcaaacagtttgttagcgcaaaaacagaagcgaaagctaatgatagtgctaacggatggtgacccagatgattgggctgccacgcatgacattgttgaccgatgcagacgaagtggctttgagctgctgggaatagggattcaaacacgcagtgttgagaaattctttcctcaaagcatcgtgattaacgacgtcaaagatctgaagcgtgagttattcgaagtaacacaacaactgttaattcagtaa

SEQ ID NO: 36658 - DNA, 498 bp, Escherichia coli
atgaaaaacaaaaagttcttagctggcgaagaagccggtacttatatcgttcctgagcaagtgactgaagaggatatcttagatatggcgctcaagcttgcccgtggtcgattgagtaaaggtcgaaaaattgaacagccatcgtcggcgttctcatacctgcaaacactgatgcacgagtatgagcacgaagtctttggcgtgctgtttcttgatacaaagcatcgtgtcattcgatttgaagagctgttcaaaggcactttagatgcggcgagcgtgtatccaagggaagtaacaaaacgagcgctagaacttaatgcggcagcagtgatactggttcataaccatccatcgggtgatcctgaacccagtgaagctgataaacgcatcactcatcgactccgtgacgccttgtcacttgttgatattcgaacgcttgaccatgtcgtggtcgcatacgagggctgcgtttcgcttgccgaacgcggttatctttaa

SEQ ID NO: 36659 - DNA, 342 bp, Escherichia coli
atgaatgggcgcattgcccattcaccttcatcacaaaagcagtcccatcaacacacgttatcacagctcgaatttatatttgagtttgatgatgccccagtcacttggtctgacacggaaatctggcagttacgcgaaggcattcttttggatgcgatccgtgtattgctggacggtcgtgtcagtactcggttgcgcaaggatgtgttgtcgtggattcaaaatgacgaattaacgccattttgctttcgtgtttgcgcaatggctgcggttgtcgatcctgatgtgcttcgtgagtccatcatgtggctattaagacgacatggtatccagcttgactaa

SEQ ID NO: 36660 - DNA, 1074 bp, Escherichia coli
atggcgttacctttacaaattgaaacagtaaggccatatcttaatggccaatggcttcaagtattagcggcattggtgccagaacttgatgccgccattgctcgaaaaggccgtcatgtggcgtgtcctgttcatggcggtcgtgatggctttaggctattcaaagatgctgaatataccggaggtggcgtttgtaactcctgcggtatctttcatgatggctttgaactgttgtcttggattaatggatggaactttgctcagtctattgaagcaatcggccaagttctaggtattcaacccggacaaatacaagtgcctactcggccaataccgagtaacgctgttgattggaaggctagaaagcaggacgaggacaaagcgattatccatcgcttgaatcaaacctggggagaaacgttttctcttgcagatactcgtgcgcaaccagtttggaactacttgcatcgtcgtggcattgtgacgcggcttcgtcctgaatgggattcggtgctgaggtttcatccaaacttgccttaccatgatgaagatggcctgtttatcgatagctacccagcgctgctaggtaaaatcgttactcagcaagggcgttcggccacgtttcatcggatctacctaagtgaagatggattcaaagcgccggttgaaaagcctaaaaagatgatgccgataccaagtgacagaacaatcactggtggtgccattcctataggtgagcctggtgaagtactaggtgtttctgaaggtatagaaacggctttagcggttaccagagcaacggggcaaacatgttggtcggttgtgaatgcaacgctactggctaggtttgaaccaccaagtaatgtgaaaatgctgtacatctgggcagatcacgatctctctgagaccggcctgaatgcagcgaatgaactcaagaaaaaagcctggaaaaaaggcattctgacacaagtcttgatccctcctataccaacgtcactcggcgtgaaaagttgggattggaatgatgtgctgaatgtttacggtgccatgggctttcctaaagttcatatctga

SEQ ID NO: 36661 - DNA, 753 bp, Escherichia coli
atgatggtattaaccctgttaacaaagcagattgatggtgagtttaaggtttactggaagaccggacttcgaagaggtggtgagctaaaggtcgatttaggtgagcaatacgacaagctacctgagcagcaaaagccaattgcagctgagctttatgctattcatcacctactgtcagtgaaagagatgatggggagtaaccgaagcggtaatgggcttcaaatccgagtcagtaaaggagctatcaaaaagttacagaaacaacgctcaactcagcattcactttacagcctgactaggtttttgctcactcgataccaggaagcacagatctcggtagagaagcgggacgattggctctcacattccttcgaagaatacagcgtcgataatgctacagtgagagaaatcgatgaggtcatcaacgttccgaatattgggcctgtcgtggtgactcgtcacgcgctagaacgatttgtggaacggctttcagacggcgtacctaagcatccttggaaggctttgacttcaaggttatttagctcatcattgacaaaagcaattttgcctgaaaaggtagctcttcataagaaccaaaaatatagtaacaaagctgatatttggcggcacagtaacagtgatttgcattttgtggtcgttccgtcaggagcgatgaagactttggttactgtttacaggctaaatgagtctctcacaaaagcgcaaaatgaattcaagatgtgtgtccgataa

SEQ ID NO: 36662 - DNA, 1644 bp, Escherichia coli
atgaaaagtagactgaaaaacctatataaatatcttattgagaacaggaagcatgaagtcaatggatggcacaaagcctatcgtgacttttacagtcaggtcgctcaaatccgtgagcgaatcacatctggagaaggcttgtctcaaaatgatgaagcctttctgaagcagttactctatgagaagagcaacggtatcgcttctcgcggacagtcagtgttgagcaatgacaacttccagtcattcattaaaaacaagaatttcatatccgcattagaaaaatttatattgattccaaacagtgaaaacttcacgattttttctgattcgtggtctaaccaaggtaaatccaacaaccctgttctcgttaatcgagtggcagcagcttgtacgctcgaagtctccacaacggttgattccggtaaatttaatcaggtttttagttggcttatacgcgaaggaataattccagcatacccagcagaagaaaatcaaagttggtttgctaaaaacatttttctattaaagagcatcaaaagcgagtttgataatgagcttcgggaaggtaaaactgatgagttttatcttagtcagtttgtttgggtgctttacgagaatttgtcaaacccattcagtttaaagaagcagattgttaaatacggtgcgccggggacagggaaaacttatcaagctcgcctgcaaacttcgctcttgtttgacatctggaaagaggaatttgctccctacagccgtctcacacatgcaagtcagattgagttggttcaatttcatccttctttcagttatgaagactttatggaagggctacgtcctgttttggacagtgatgggaactctcaattaacgttgcaaaatggtgtttttaaagagttttgccgaagcgctggtaagtgggaaatcgatgtgtatgggcttggacttactcagaagtgggagtctcttactatcaaggaacttctcccgtttagagaaaagttatcaggcgagcattggcaggatattttcgaaatatcagatatatccaagcttgtatcggaagcagtaccaccatttttctttataattgatgaggtaaaccgagctgagttgtctcgcgtttttggtgagttaatgtactgtctggaataccgaggcactagaggttgcgttaaaacccaatattccaatctgaacaatgaacatactggtatgcttaaggacgcacaagggtatttgttcttcatcccaacaaacatctatcttattggaacgatgaacacgatagacagaagtgtcgaaagttttgacttcgctttgcgtcgaagattccgttgggaagaagtggtgcctgatatggcgctattgaaataccatttgaaccaattttgcaaagcttggctgcccttggtggataaccttgaacgcttgaatgaattgatagctaaagaacctttgcttggtaatgattaccaaattggtcatgcctatttgatggacttgaagtatgcaaccagccttacagtttcggaggtacgagagcgtgtatgggatgattgtattcgtccgttattacaggagtatcttcgtggaacaggtaaggagactgaactgattagctccttcggaaaggcatttggggtttaa

SEQ ID NO: 36663 - DNA, 1428 bp, Escherichia coli
gtgtggcttttcgatatcattaagaacggcacactggtcgataaccagtcctattttgtcagcgaaggcattttgacaaatagacgtttaggaaagtcgataacccttagtgccaaatcaaaaggacaatggacctatcctcataacgacgagtctgcaatttggcactttttgaattcggtatctcgtgatgtcgaaaaaacgctgaatgataatatttccgatgctttaatactcttcaatgatgaagattacgaacacaatacagatggcggtttcatcggtgtctctggtacggatgcaagaaattttaatctcgacacgggcaatctaatcggatttgttaagcgaggagattactctctgaagatcagctcacgttttggtgatgctttccttcaatacatcattgcagatgccgatggatttctcgaattagaaaacattggaggagaaagtcacgcagacggttacgagtggcttttagcatatctatggaacattaagtttaagagagcataccgcctgggcttgccaaagacttatattacaagaaatgatcgtatttcccgcgtaaggggaactataaatgctacagattatttccagaataagtcatctggaaaatatttatgctcgtaccgagagcacagctacgacagccctgcaacttcactttttataaaagcttatgaagcagtcgcacattactcattttgtcaccaaacacgaaatatctatagtgcatttctgactgccaatcaggggattaaaaggtcacagcaagaaattttgaggacttctcatttcaccaaccctttctacaatgattataacgtgctcattgacttatctaagcaagtcattgaccggaagggctctgattttgattcgcagcaggattcgagtgctttctttttcgatatttcgatgttgtttgaatatttcattcgtaagctcattaagcgagatgggctacgcctgctaggtaagttcgagcaacgtcagcaaatagcatctggtgctctcagtggttatatgagaaaacttgaacctgatcttgttatagaaatcgatgagagtttattcgtatttgatgtgaagtataaagcatttgattcacaatttggggtgaagcgtgaagatctttttcagctacatacttacatagggcagtatggaaatgttgccgcaatcaagggatgtggatttatttaccctatatcagaagaacgatgggcttcacttaaccttgaaaaaacacagggtgtgatttcagatattattcaccagcaaggacaagagataccgttccatgtgctttttctaaaaatccctgaagatacgtatattgattttaataggaaaatgaaagagcagtgcagcatttttattaatgccctttattctaaggtttttaatcggtga

SEQ ID NO: 36664 - DNA, 945 bp, Escherichia coli
atgagaacccctttgttaccttggttcatcctatgggtgaccatcccaatcattattttctttctattcatcttgcccgcccatgctagtgatgggcaattctatcagcgtggccaggaaggctggttttggtatcaggtcattcctgagccagcggaggctgaagagcttattaagccggaatctggtgcggcagagtcgattcagagcgagctgaagcccttcagtgctgcctggtttcgtgagcacatgcagtcgttcatggacaaggcaattgatgagcctacgaatgagaacgtcagagcctatctgtacctccagcgcgtcatgatggataagggctcacagtttgctgatgttagtcagcaggtggtcatgggtgatccagttttggatgaaatcagtcgcagacccttggcgacctatgctgccaatcggatggatcgagaagctggcgctcaacgggatgttgctttaggtgaggtagcaaaacgggctggcttgttcttcttctatcgttcggattgcccttattgccacgctcaagcgcctatcatcgaatcaatggctttaaactacggtttcgaggtatttgctattgctgtcgatggcttgcctttaccgggtggagagtttcccaatttcaaagtcgattcaggacaagctcaatcattgtccgttacgactgtccctgccgtgttcttagttgatccacctaatgtcatcactcccattggtcagggtgcaatgagccttgatgagctcaataatcgaattattctcgcagcccatcaagccggttggattgacgatcaaacttactatgccaccagacctgttcaacccggcgtgtcactcgcgatgtcagcccaagagcttaacgaaaagatattacaggaccctgagttccttgttcgctatctgcgtgcacaaggagggttataa

SEQ ID NO: 36665 - DNA, 1389 bp, Escherichia coli
atgaaaaaagtaatccgagtatcgctaatcgcctgtgcgattggtttttcatctatgagccaagcaagcttgcaacaggagatgaaccagttgtttggttcaatgaccaacaccactgcgccaggtgtattcgagagtcagcggcgtggcgttatatctggtggaagcgttgttgtccgtaacagaatcatgaacgagaacctcgtctctatggtgcctccgtcattccaagccggttgtggtggcattgatatgttcgcgggaagtttgtcatttgttaacgcggatcagtttgttcaattacttcgctctgttgctgcaaacgccaaggggtacgcattccaattggcgctcagtgctatgtgtgagaaatgctcccagcacatggagacactgcaaaagaaaatccagcagttgaacgagtattttggcaattcctgtcaaatggctcagggagtcgtgaacgataccctggccgcttttggtaaaaaggggcaaacagaagccagcatgttgagctcacttaaaggggctggagacgtttttaccagttggagtgagtccaatggtaagaacccatatgagaatgcttcgagtgtcgcggcatctgatgtgaacaaaacgattaaaggcaacttggtttggcgagcactgaaacgtcactcggcatcaagctggtttgcatctggggatgaccgttttcttgaagcggttatgtccgtgacgggctcgatcatcgttggtgatctagctaatgcggctgatggtcaaggtaaagccccaaaactgaccagactgaatggcaataaagtgactattgagcatctaattcatggcggtaacgtcgctatgtaccgatgtgacacagtgacacaagacggctgtctaaatccgacaatcactaacgtgaccctagccgggttatcaactcaggtcgaaaatttacttcttggtacaggttctagtaacggcattatttttaagtttgctcgaaatactggggcagctagcaccaccgaaaaggcttttatgacctcggctcctgcaagcattggcggcatgattcgaacactttctgcattaaatgaaggggctgctaggtcgtttgcttcaagagctgcgccatttattgctgttgagatggcccgagcattggttgaagacatgctcaatgcagctagaagtacctccggtgtggaagatcatgcctatgcgaagttattaacggaagaccttgaacgtgcacgtcgccaaatcaatgaggagtacgctgcgttgcagcgaagatacggctcagagcaagagttgctggcacattttaaccaggtgattcagaccattcgcaaacagcgttattacaccgttaaatctacggcactgggggaatag

SEQ ID NO: 36666 - DNA, 3570 bp, Escherichia coli
atgtgggagatctattccatcggggattcggcatttttagagcaggtcctgaacgctgtcgcgatgataactggtacaggcgactttacttcaatggttcgcattggcttgctcattggggtattgatggtctctgttcaggccttaatgcaaggcggtcgtgggattaactttcaacacgttttagtctcatggctagtctttgcaaccatgtttggacccagtacccgagtgagcattgaggatgcgtacacgggacaagttcgagtggttgataatgtgcccatcggtgttgctgccgcaggtagtacgatttcgactgttggctttcaaatcacgcgattgtttgaaacggcgttctcaactcccgccatgacggaatacggctttgcatccagtttacagtcactgattaaagtgagaaaacaggtgatggatcgctctggtttgggtgatgcaaatcgtgtcgccggttcggacatcgagcaatcgtggtttaactacatcaaagagtgcaccttgattggtatcgacattggccaaaagaatctagatcaggtgctgagtgatcctaacccgatgactgcgattaggtttgattcgcgcatttatggcactcgaatcatgctcagtggtagcagtagcgatctggactgcaccgacgcttacagccaactgaaactcatgacagaatcaaccttcattccaaggcttaaacaggttctgtcggcctcattggggacttcgtcagcaacggacactgatgacgtgatccgaaatgcactgaataatcttggtttggcttcggttaacacccaagagtacatgagcgcgtcagtgcttttgcctatttatgagcaaagcgtgacgggcaagtatatggatgatcaagctttcaccgcagccgttatggttaaccaagcgattgagcagcgcaatacgcaatgggcggcggagcagaccttgttccaaagtatcgttcgtccgatgatgacgttttttgagggtttcatttacgccatcaccccattgatggcctttgtgatagcccttggccaaatcgggatgcgaatggccgggaagtacttgttaatcctgctttggattcaactttggatgcctgtcatggccatcattaacctgtatattcatttaaccgttgcagggaaaatgtcggctcttgatgcctttgcaggtacagaagtgccatcttttgctgggatgatgcagatggattcagtgctgcaaacctggatagctactggtggcatgttggcgtcgagtgttccggctatttcgctcatgctcgtttatggctcagcaataaccgctacccacttggctgggcgtcttcaaaacggtgatgccattgatgaaaagctggctagtccagatgtcgcgaaaaatgccccggtaatgcaatcacagtcaatgttccaaaattcagcccttacgggttctgctatgaccggcgcgtcaaacctactaagcagtttctctgtcggaaacgcagtggggtcaatggtcggctctgcaaaagaatccatgactcaggcaactcaagcctttagccgtcaggttggcaataccatgagtcgaacttttggtgaaaagctaagttacgacaatctatcttcagttggacgtcaaatcggttcttctaattccgcatctagcgccgttgttaatcaggtcactgatgaccttcaaacacggtatggtttcggagacgataaaaaagacgctgtacgtggcttggtatcgggcgtgctatcgggaggcctaaggatcggtggcgatggaactattactaatcccggtgagaaagaagttgctgataagggctttcttggaaggcttcttggtactggcggcaatgattctccacagggcaacttgccaggagtcgataagccagactcatctcgtgtaccaaaactatcaagggtacgagcaggcttggatttaggtggtaactttagtggccaagttgagtcatcagagggcagttctcgatctacgaccgcaaatacgctcactggggagatgcaaagcttggcatcaagtgattcacgacgtgctgagtttcgcgatgcgatggttaaggacctttcagattcaagacgctctggcgttgagatgtcgttgtctaatcaagactatcagtcacttcagagttcagcacaagacgttatcacggcatcaaaccgctttagtgagcttgatcaggccagctacagtctatcaggacaaaggaacacggatggtgcgacgttaactcgattagcagcggataatcctgaagtcatggattatttaggtcgctatatgaaccagcatgttgaagcaggtaaccgattacgtgaaaaccttccaatgtatcagcgcttgctacctgatgataatcaggcgtatgtggccgcagctatggagtctttaacctatagcaactcctcgacgcccgctgaacgagacaatgactatcaagcagcaatgactgttatggccatggctaccggagccgatttacgatctattcagccacgctctaatgaaaggttgtcatcaactgcacctacttttggtggcactcaaagccaagttgaatccggtgttctgggaggctatggggatgctgcaacagttcaaacgcagttcaattcggctcaatccgcttaccaaaccaatctttctggtgtagatggacagctgaatgcgcatcagcaacaagcccagcaggccgtagcttctgacacaagtacctatcaatctggactaaacagtgaagctggctctcagtggcgatctcgcattatggctgatgatagcggagtctctggtgctgaaatgttcttcaacagcgccagtgctattggtgatttcagtggtaagcatactgatgcagcactgcataccttgaatcattttggcgaagactatgagagttacaaggagaaagcccttgcagaacctggctcacgaggtttcttgcacaatgcaacggtggccagcaaatcaacctgggatgggttaaaagcagccgttgatgccggaacctctttggaaaatcctttgacggcgtttaatgatgcatacagtggatcgagttcgcagtatgcctccgaagttaactggggcactaagtctgaagccatgttggctggggcattcggtgcggcagttaacaatcgatacggtgagtttttagaacagtacgccgatgattttaaacaggaagcatacagcgaagggcagagaatgggattgaccccgattcaaagtcaagtgttcgctcaagctttcaatgaaggtttggcggggcgcgtattcaactctgaagactcatcgagttggtcgcctgaaatgctaggtctaagggagcaaatgctaaatgagtatcgtcaaaaggatgagagtggcgcttacatttctgacagtgtgtccgaagaagataaagcatttgtggataagcagatagcggtgatctcaaatgcatcgcttgcgggagattatgctcagaacaacttgatcgatattagggcttataaccaggcatcaggaaggaactga

SEQ ID NO: 36667 - DNA, 534 bp, Escherichia coli
atgattgataacctgtccaaaagtgagctgtttacccgagcctcactgcttattaaatacggatttcgaacaacgatcatcgcgctcgatactggtttgccaatccacattatcagaaggctgcacaaagaagtgactggcaagtcaccttgtcctggtcaattaccagaatctgatgccattgttaaaagcagaagagccctagttgaaggctccctgctgatggcgctttatgtcaatattggtggtgataatgtctacaagcaattaaatattgatgctttgatgaaggcttacgatgcgtacttggttgcaagggaagaagcagatcttccatctgagatcccctggaaaaaactaaccattaatgaaggttgggttctagctcgtgatttaagatcacagctagcatccttacaccggtgtcgatgcggcagtctgtatttgacggtatctcaacagcgcattcagcttaaatgtcctgtgtgcgagattatggccgagcaaaccactagagcactttttgagaactaa

SEQ ID NO: 36668 - DNA, 300 bp, Escherichia coli
atgacaaccaatcaacaagacttctatcaattaaatttggcgtacctgcacgcagcacgcgaattagcgcgcattgatccgcaagaggctgtcttgcgctttggacttacacgcgatgtggtggatgcactgattaatgccggtgttgacgacctgcaacgagtggcgacctcatcattcatgctgtttcaaccaaggggtaaccaaagccaactgattgagatggtgaagagcaaaggcacaggtatcccaagaatcgcttatttattatcaaccctaaacaacaagggggatgcatga

SEQ ID NO: 36669 - DNA, 549 bp, Escherichia coli
atgaaaacgattaaatcaaaaaccattgccctagtgatagccatgtccgcaagcacttcagtctatgcgtttccgggctatcagtgggaaaaagcagcacaaagcgttggtattgatccagtcatgctctacgccgttgccttggctgagtcggcctcacatcgtggtctcaacatgaccagtccatggccatacgcaattcgcaatggttcaaacgcaacctacgccaaatctaagacagaagcagagaaactgttaaaccaagcactgcaagagactgaaaaatatcagctcgatattggccttatgcaaatcaatttgcattggcatgggcatcgggtgagctcagcagcggaactgctagaccccatcacaaaccttacggtcggctccagtattttggccgaagcaatcaagtcttcaccaaatgatttagagcttggcataggccgctatcacagttggaacgaagagcgtgcacgctggtatgggcaaagagtgctttctatctatcgcaatattttacatgaactggaggtccgtcaatga

SEQ ID NO: 36670 - DNA, 663 bp, Escherichia coli
gtgcaggaggttgataaacgcgagtttgctgaagtttggggagctgcttgggccatgtatggcaaaagcgtatcaccacaattgctatccatcgcatttgaagcccttcgtgcttatagcattgaagaagtgcgaatcggtctgactcggcatattcaatcaccggatactgggcaattttttccaaagcccgctgacgtcatcaagcatatcgatggtaactcgggttcaagagccatggttgcttggaacaaagttgacaaggctgttcgtcaggttggcgcttggacatccgtgatgtttgacgatgcgcttattcaccgcgttatttcagacatggggggatgggttgaactctgcaaggtagatgacagggaatacccctttaaacaaaaagagtttttaacacgctaccaggcttacttgttgcgggacgaagtgggtgaatacccaaggctattacaaggtattgcagaccatcagaaccagcaaaaagggtttgatatgcaagcgccggttgccgtgggcgactggtcaaaagcagcacaagtttatacaagaggcatcaccgactttatcgcagtgcctttgaaaagaataagcccgaaagccattcaggcgcttctcggaaatcaattagaggacaaaaatgaaaacgattaa

SEQ ID NO: 36671 - DNA, 870 bp, Escherichia coli
atgcgtgactatggcaaggtctatacccgcttttggctaaagcaaaacgttttgtcctggagtgactcagcgaagttgctaggactgtatttgcttacatgcccacattgtaatttgcttggctgctttcgactgccgattggttacgttgcttctgacttgaactgggatgagcaacaggttgccaaggctctaaaggagttagaacaagatcagttcctcattcgttgcgaggaatccggttggactttgattcggagctttctgaagcacaacccaatcgaaaacccgaaccaaggtaaagcagcctttcggttgcttaaagatgtacctgccgacttcattggtatggcatcgcttttgaaatctcttgccgcttttcaagctcggctaccagaagaattttcatcattgtttatgcctgatggcaacccggtaagggactctcaacggtcggatgactctgagagaagcaataaaccaacagttaaaactgttgactacatacagtttgaagacttctgggatgtacaaatacgcaaagaaaaaaaagcgaaagccaaagaagaatggctacgcatgggcctcaatgaagaccatgaactcgccttggaagtgctaacacgctggaaagagcaacgagacaaccgattgcagtatcaagatcggactaagacccctatgccacataactggcttttaaaccgccaatgggaagacgagtacgttcgcattgatgaagtacagcaatcatcgacgagcctaaagggcagcaatcaccagttgaacattgaagaaagcaatcgccgcattgctgaaagctgggccggaccaggtattcgggaggttcgttcaagtgcaggaggttga

SEQ ID NO: 36672 - DNA, 252 bp, Escherichia coli
atggaagtgttcaacacgacacaaaaacatctccgccgtgccattgacttggtcggcgggcaatcagcattagcacgagccatcaactcaaaacagcaaaacgtctggttttggttgaataaatcagggcgtgttcccgctgaattcgttttacccatcgaacaagctacgcaaggacaggtaacccgatctcagttaagaccggacatctatcccgcatgcccaagcgagctgaaagccagtaaccagtag

SEQ ID NO: 36673 - DNA, 648 bp, Escherichia coli
atgaaaactttatccgaacgactaaaccatgccttgcagcttactggggtgactcagtctgagttggctcgtcgcattggtatcaaacagcagtcgatcagccagatttgctctggtaaatcggctaggtctcgttacaccatgcagatcgcggaggcgcttcgcgtgaatgctcattggctcgccacaggtgatggcgagattggcttgggagtcggtaatgtagaagtcgggcctgacattaagggaagaattcctctcattaactgggttcaggccggtgattggactgaaatagcggagggatttgcccatgaagatgctgaggagtggcgtgaagtcactgggaaagcacatgagggttgtttcgcacttcgcgtaaaaggcgacagtatggaaaatccaagcggaaaaaaatccatacctgagggggcagtgatcgttgttgatcctgagttaccttattcttcaggttcattggttgttgcgcgtttggatgattcgaaagaagcaacctttaagcagttagttattgatggtgaacagaagtacctaaaacctttgaacccgcaataccctgcaataccgatcaacggcaactgcaccatcatcggtgtagtacgacaagctatcatcgatttctggtag

SEQ ID NO: 36674 - DNA, 1599 bp, Escherichia coli
ttggcagcatcaccggaatatcagacgttaaaagcgcgtgccgaagctggtgcgaaaaggttgttatcgctgaacctgaaaaaaggcgatcgcgtggcgctgattgccgaaacgagtagcgggtttgtagaggctttttttgcctgccagtatgccggcttagtcgccgtcccgttggcgattccaatgggcgtaggtcagcgggattcctggagcgccaaactgcggggtttactggcaagttgccagcccgcagccattatcactggtgatgagtggttgccactggccaatgccgcgacgcataacaacaaccccgaattacatgttttaagccacgcctggtttaaggcattaccggaagccgatgttgtgctccagcgtccagttccaaacgatatcgcctacctccagtacacctccggcagcacccgttttccccgtggcgtcattatcacccatcacgaagtgatggctaatctacgtgctataagccacgatgggattaaattacgccctggcgaccgctgcgtctcctggctgcctttctaccatgatatgggactggtcggctttctcctgacccccgtcgccacgcagctttcagtagattatttgcgcactcaggattttgccatgcgtcctctgcaatggcttaaattgatcagtaaaaatcgtggcaccgtttccgttgcaccgccgtttggctatgaattgtgccagcgccgcgtgaatgaaaaagatctcgctgaactggatctttcctgctggcgcgtcgctggtattggcgcagaacccatatccgcagaacaactccatcaattcgctgaatgtttccgtcaggttaactttgacgataaaactttcatgccgtgctacggactggcagaaaatgcgctggctgtcagcttctctgatgaagcctgcggggttgtggttaacgaagtggatcgcgacatcctcgaataccagggtaaagccgtcgcgccgggtgctgaaacacgcgccgtatcgactttcgtcaactgcggtaaagcgttgccggaacatggcattgaaatccgcaatgaagcagatatacctgtcgcggaacgtgtgataggccatatttgcatctccggccccagcctgatgagcgggtactttggcgaccaggtttcgcaagacgagattgccgcgacgggctggttagacaccggagaccttggttatctgctggacggttatctgtatgtcaccggacgcattaaagatctgattattattcgtggccgtaatatctggccgcaggatattgaatacattgcggaacaggagccggaaattcattctggcgatgcgattgcttttgttaccgcccaggaaaaaatcattttgcagatccagtgtcggatcagcgacgaagcacgtcgcgggcagcttatccacgagctggcagctcggatccaaagcgaatttggcgttaccgcggatatcgatctgttgccgccccacagtattccccgaacatcctccggcaagcctgcccgtgcggaagcgaaaaaacgttatcagaaggcttatgctgccagtcttcatgtgcaggaatccctggcatga

SEQ ID NO: 36675 - DNA, 198 bp, Escherichia coli
atgggctttgattttcagttgttagaaaatgcagggatccagctaattgatggtgacagaggcaaaaattatcctaaacataatgattttatggagaatggctattgtcttttcttatccgctaaaaatgtcactaaatctggttttcaatttcaagaaacattatttatcaatgaaactaaagatcgtgaactatga

SEQ ID NO: 36676 - DNA, 546 bp, Escherichia coli
atgtctctcactaaatcactgctgttcaccctgttgctgagcgccgctgctgtgcaggcctccacccgggatgaaatagagcgactctggaatccgcagggtatggctacgcagcctgcacaaccggcagcaggcacgtcagccaggacagcaaagccggctccccgctggttccgcctcagtaatggcaggcaggttaacctggccgactggaaggtggtgctgtttatgcaggggcattgcccttactgtcaccagtttgacccggtactgaaacagctggcacagcagtacggcttttccgttttttcctacaccctggatggtcagggggatacggcctttcctgaagcattaccggtgccaccggaggtgatgcagaccttcttcccgaatatcccggtggccacaccgaccaccttcctggtcaacgtcaacacgcttgaggcattaccgcttttacagggggcaacggatgccgccggttttatggcgcgggtggataccgttttgcagatgtacggaggaaaaaaaggtgcgaaataa

SEQ ID NO: 36677 - DNA, 201 bp, Escherichia coli
atgtaccaagacacctacattgaatactggggcgaaatcttcgtctctgcccgcatcattgaatttggcatcacgttcgagcgctttcttaaagaaccatggaagcatttgatgtcctgtggccaagagtctgccccagacgcgattgctgaagggatgctcccattgctaccagcccaggcagaagttgctaggcgctga

SEQ ID NO: 36678 - DNA, 909 bp, Escherichia coli
atgacaagagcccctgcgccatttccgctagagcgcctcgcggatatcccagaaagaccagaagattttagattgctggaacgcattcctttaacgcgtgagccgcagtcctggccacttgaactttctcctatggtcggtgatgaacagccgatggtgctgctcgatacagagacaaccggactgtctgccgatgacgagtccattattgagcttggtatggttaaggtgctttacagcccctctgctcagcggattgtgtcgattgttgatgtgatcagcctgtatgaagatcccggcaagccaatccccgagctgattaccgaattaaccggtatcactgatgagatggtgcaaggccagcgcattgatgatgctctggtagcgagttggttatccgatgatccgctggtggttgcacacaatgcgcagtttgatcgtcctttctttgaaaagcggtttgccgcattaggccatctatcttgggcctgttcagctagcggcatagattggaaagcactgggctttgaaagtcggaaacttgagtacctgctgcttcgcttaggttggttctatgaaggacaccgagctgcaaccgattgtttggcgatggcctggttgtttcaattgttgcccgagtccgttgcaaacttgttgtctgaagcagacaggcgaactgtgttagttcgtgcgtttggtgcgccgtttgacgtaaaggactatttaaaagagcgtggttaccgctggcatgacggtgttaaaggtgccaacaaacattggtggcgcgaaatcagcgaagacgagttgccgcaggaacaaacttacctggatgatttgtatcatcgtggctcagaacatgcccactatgactacaaagatgcccgcaatcgatttaaagctttgtcatag

SEQ ID NO: 36679 - DNA, 450 bp, Escherichia coli
atgagtgtctcgctgataggccgtagcggcgtacttgccttcatcaaagccaagcgccttcgtattccattgttcatggaacgtgtttctgctggttttccctcaccagcgcaggattatgttgagcaaacgctcgacctcaacgagctgtgcatcaagcgaccagctgcaacattctttgtgcgtgttgaaggtgattcaatgattgatgctgggattcacccagatgatattttggtggttgatcgctctgtccaagcagaacacggtgacattgtcatcgcgggaatccatggtgaactcacggtaaaggaacttcaactaaggccgtgcgtaaagctgatcccaagaaaccaggcgtatgagcccattcatattcctgaagggacagagttagagatatttggtgtggtcaccaatgtggtgcgaaacatgcgccgtaagtcgtga

SEQ ID NO: 36680 - DNA, 1269 bp, Escherichia coli
atgcctgtatttgccttggtggactgcaacaacttttacgccagttgtgagaagctgtttcgtcctgatttaaaagatacaccggttgtggtgctgtccaataacgacggctgcgtggttgcacggtcacgtgaagctaagtcactcggtattaaaatgggcgtacccgtctttcagatcaaagctgaaatgcagcgccatggtattttggcattctcgtccaactatgcgctgtacgcagatttgagcagtcgagtgatgcgcactttggaagagatggcaccacgagtagaggtttactcgattgacgaagcgtttttggacttaaccggtattgagtctgccatatctcttgtcgagttcggacaacaagtgcgagagcgcataggtcactggattgggatcagcgtctgtgtaggcattgcaccgactaaaacactcgccaagctggctaaccatgccgctaagaaatatcccgctactcaaggggttgtagacctgaccaatccagatcggcaacgtcgattgctcgcattagtcccggttgatgatgtttggggcgttggtaggcggctttctaagcgattaaatgcgttgggtatcactacagccttagacctagccaatgcctcacctagagccatcagagaccagttttcggtggttttagagagaaccgtcagagagctcaatggtgagtcgtgcattgaacttgaagagatcccgccaactaagaaacaaattgtctgtagccgttcatttggcgtaaaagtgacgcactttgaattcttacgtgaagccatatgcgaatacgcaacccgcgccacggagaagcttcgcaaagaacagcagcaagccaaagtgatgaccgtgtttatacgtaccagcccctttaaggacaacgagccgcagtacagcaactctgcatcgggtgagttgctgatccccagttgcgatacgcgggactttatcgagctggccaatcacttactcaagcggatttggaaggatggttttcgttatgccaaagcgggcgtcatgctgtctgacttttacgatcctggtatgtttcaaccaggactattcgatgacgtatcgacccgctctaatagccagcagttaatgtctgtattggacaccattaaccaaagcggtgccggaaaggttttctttgctggacaaggtacgaagaaagattggtcgatgaagcgagagcatttatctcccgcttatacaacacgctgggaccaattaccgcgagttaagtag

SEQ ID NO: 36681 - DNA, 426 bp, Escherichia coli
ttggtagaaatcgtcaatgaacaatggaaatcagaagtatcaaatttattgcagcaagaaacggacaggctaaaagcgctggcaagagctgaagttgatgacttttgggttacccattacaaggttcgtgagaatgagccctttaaagactgggggctgcttggtgtccgtatcagagactttaagtatggctttggcatagagtggtacatcaacagctttcacggtcaacgaggtaagcgcgtagtctttagtaaaggactgcgtatctcaaagacgaagctgagatactcatttttggactgccaaggtttggccaaagaatgggagttagcgctggctatggagaaagaggaatttttcagtgatattcgacgccaggttgataagctcaacatgctgcgtcgcagagtgaatgcctactga

SEQ ID NO: 36682 - DNA, 975 bp, Escherichia coli
atgtttgtactaggcgtagatatcggttactcaaacctgaagctggcaattggccaatcaggtagtgaaccgaaaaccattattctacctgcgggtgccggtccagcggatcgtatgccggagcgtatcggtggaggcgatgatgaaacttgtttgtatgtctctgtcgataatgagcgttgggccgctggtgtgcctgctggacgccttcaaggttgggaacgggaacttcacccagaatatcccaccacaaaaacctataaggcgctttttcatgccgccttgttaatggctgaaactgagtccatcgatttggttgtcactggattaccggtttcccagtttcatgaaccacaacgtaagtctgaccttgtacagcgtttaaaaggtgtccatcaagtgacgccaaagcgcagcatcaccgttcatgacgtcaaagtgctgccgcagcctgccggtgcctatatggatctggttcaaacaggtggtgatttgggcttgattgaagaaggtcgcgtcgtcgtcatagaccccggcttcttttctgttgattgggttgctcttgaggccggagaaattcgctacagctcttcaggaaccagccttcaggcaatgtccgtgctactggaaaccattgataagctgatttcagaagatcacggtgccaaagtaggtatggatcgacttgaaaaagccatgagaacaggcgacttgcaggtcctgctatttggagaaaaagtcgatatttcaccttatctgaatgctgccatgaaaaaggtagcgcctgttgctcttacagccatgcgccaatctatgcgcgacgaaagcatcaatgcggacttggtattgatcgccggaggtggagccttggcttataaggaagcggccaaggagattttttcacgaagcaaaatcatcgtgccggaacagtctgttttggcgaacgtccgaggcttctggttttatggggcctga

SEQ ID NO: 36683 - DNA, 1242 bp, Escherichia coli
atggcgttatcagttagctggctcgatgccaggttaaataaagaagcaaaagaaaccgtagtaaaagccgaccgagatgggctaagtgctcgggtatcgcccaagggcaaaattgtttttcagtttcgttatcgtttcgatggcaagcaacagcgggtagacataggtacttacccacttatgaagcttgctgaagctaggaatgagctggataggttaagggctgtacttgatcaaggccgaaaccctaagctctaccttcagcaggaacgggctaagtattctgccaaccaaagcttcgaatcgatttttcgagactggatagactctgccggtaagcaaggattaaaggagaaaacgtggcacttccaaaaacgtagcagtgaaatatatttgctgcccagacttggcaagtacccattaactgacatcaatgaattgtccttaagaaactgtcttcgtgaggtttcagagtcgtctccgtcaaacacagagcgcctagtgtctgtactgcataagttctatgactggctgattgatgaacaaatcttggaaattaacgctgctgctgggatcacagcaaagaaggttggcggtaagaaaggcaaacgaactcgggtgctaaatgacaacgagatcaggatactttggcgctatttgcatgagtcaaaaatcactgagaagaatcgcatctacataaaattgcttctgttattgggaggccgtaagggagaactcattcaagctgaaaagcatcactttgacttgcaatctgcaatgtggacagtgcccatagagatccgcaaacaaggtgagaaaattggagcgccgatcatgcggccattgattaagccagctattgagctgattgaactggcgatgcagatgagcaaatcaacctacttgtttcccgcgaacggacaagaagagcttgccacaaatggctttgataccactattcctaataatgtgaaaatctgggctcgcagatcgcttggtgttgagatggaacattggtctatgcatgatcttcgcagaacgatgcgaacgcgaatgtcagccatcaccacgcaagaagttgccgagttgatgattggccacagcaaaaaagggttggatgctatctacaaccaatatcagtacctggatgaaatgcgtcatgcttacgacgtttggtatcaacagctagaaaccatcatcgagccgacaggctttccattcaactggcgtttcggacagtaa

SEQ ID NO: 36684 - DNA, 195 bp, Escherichia coli
atgacagcagtagcgcaccaagtaaccccttttctaacgtcttacgaagttatggctcgttaccacattagctatacgactctctggcgaagaataaaagatggcagcttgccgcaacctcgcatcaaccgaaatacacgaaacaagctgtggcacattgaagacttggaggagtatgagaagaaagaggactga

SEQ ID NO: 36685 - DNA, 1215 bp, Escherichia coli
atgactaaccatgtctctacgctcaacgtgttgctctatggtgaaccgatcgcaacgattaccaacgtgggtaatgacagaacactttttgcctttatggattcgtacattaatgacgaatcgcggcctgtgttagggcttggctttaaagattcgctcggtggcctgctgactagcttcaaacctacccaaactaagttaaccccgtttttctccaaccttttaccagaagaaaccatgcgtaattacctggctgagcgtgctggtgtgaacccagcacgggagttttttctattgtgggtgctagggcaggatttagctggcgcgatcacggttgaaccggcggatggtgaagcgctgccacctaatgtgcatcaaggcattgacgatgaaacgaaaattgaagcgccgatgcgcttctcattggcgggggtgcagttgaagttttcagccgtgcaacaggctaacggcggcttgaccattccagcaactggtaaaggtggctcttggattgtgaagttgccgtcatctcgatttgacgctgtgccagaaaatgaatattcgatgatggaactggctcgcatgttggggatggatgtgccagaaacgcagctactcccgattaaccagattgctaatattccagcaggcattggcaaatatggtgacagtgcgtttgtgatcaagcgctttgatcgtgttgatggccaagcgatacacattgaggattttgcgcaagtgtttggcgtctatcctcaagataaatacaaaaaagccagtatgcgcaatattgctcaggttatcggcattgaaggtaaagacgaagacattgcagaatttactcgccgattggtgttcaacacgctaattggcaatgccgatatgcatttgaagaattggtctgtgatttacaaagataagcgcactgcgtctattgcacctgcttatgactttgtttcaaccattccttatatccccgatgatagtgcatcgctgaaggtgagccgtagcaagaaattcagcgatttcacgctggatgagatatcacacttagcggctaaagccatgttgccagaaaaattggtgttagatacagccaaacaaaccgtagcaggcttccatgaggtatgggcgaaagaaaaagcgcatttaccccttactaagtcagtcattgaagccattgaaatgcacttacgaagcataccgctacgctga

SEQ ID NO: 36686 - DNA, 321 bp, Escherichia coli
atgagctatgtaacagagcagatactagaaagtcttcgagaagctcgggtacgaaaggggtttagccagagagagttaagtgctcgttcgggtgtgcctcaaagccatatttcgaaaatcgagtctggcagtgttgatttaagaatatccagtttgattgcacttgcccgtgtactagacctagagctattggttgcacctaaaaagtctgtacctgccatcaagtcgatcattcgaagtggccaaggtattaacggcatcagcgatgagggtgagccaatgtcgcccgcgtatcagttagaggaagacgacgatgactaa

SEQ ID NO: 36687 - DNA, 309 bp, Escherichia coli
gtgagcagttgctgcgctatttcccttattaccctgctggttaactccacttttgccgtaactgctgcgctgggtgctgccgggctggacagcgaagcgaatctgatggctcgtgtacgaacattgctggctgaagtgcgtgaccaggtgactcataaaacctgtctcaactatgttctggaaagtccgtactggaacgtaaaaggtaactttttctgttatctgaacgatcataacgagaacaccatcgttgacccttcggtgatctattttgatttcgctaacccgctgcaggctcaggaggtctga

SEQ ID NO: 36688 - DNA, 720 bp, Escherichia coli
atgagaaagacactgttaacatttattctgattttatctggctgttcgaactggattgacggaaataatattcttgcggataagaatataacagaacagcaaataaacgcaaagattgaaaaccataaaacatcaataagtgaagtgaatgcattattcggggataaaaagcaggagggaagaaacattgttaagaagagttttcctgatggcaggtataatgttacatcctaccagggacattttaatgatttaggtggaacttacgcacatcgtgttctttttgtcgcttatgataaagatggtgttattatcaatcatgatattgctataaacaatttcagagaaaaaaacaagtttgagaaaaaaccagatgagctacgcctgacagcctttaatgaattaaataaaggcgacagcaagtcaaaggttgtgaatcttctcggtgaaccaaggactatctcgttttctgattatggaaatattctgtgggtctatagcaatacagaaatatcaagagatatgtcatcatacataccagtctttaacatgatgaaaggtactgaatccggcatatcagaacgggtatatatcgagctaaaagagaacaggattgaaaatatatatattgtttcatataagataactcaggggcggggaattatcaatgcaggagactatcaggaggacatcatatccatcagaaaaaaatacgactaa

SEQ ID NO: 36689 - DNA, 246 bp, Escherichia coli
ttgaaaacaggaaatacccagccacatggcccatcccgtagtctgatagacaatatacaccgtgttttcaccacccttacaggaatattgcatatccgccttgagcttattccaattgagctggaagaagaaaagaaaaatactctggggttgctgctgatggtggggttaactctcattttgctgtcggtctcaccggaacatcggcttatcatatcaggtggtgcttctgctgttttcttgtga

SEQ ID NO: 36690 - DNA, 1200 bp, Escherichia coli
atgtacaaacctgtaactgtttttatagggcttcgctataaatatggtagcgcagcagaccgcttcagccgatttgtatcctggctttcaacgattggtattactctcggcgttatggccctgataacagtattatctgtaatgaacggatttgaacgtgaattacagaagaatattctggacctgatgccccatgccattctctctgcagagaaaggttatattaatgacgacatattacctgcagacaggataaagcttgaaggtattcagcgaattgcacccttaacaacaggtgaggttgtgctgcaaagtgccggcaatgtggctgccggaattatgctgggtatcgggccggcagaaaaggaccctctgtcaccttatctggtcaatgtgagccagtccgtattacaaccgggtgagtataatgtcattcttggtgaacagattgcggctcagttgggggttaatcgcggtgataaagtccgcattatggttccgtcagccagtcagttcactccactcggtcgtctgcctgctcagcgcctgtttactgtcgcaggaatttttgctgccggcagtgacattgacaagagtgagctactggtaaatatacaggatgcgtcacgccttatgcgttatccttcggggagtttttcaggatggcgtctgtggctgacagccccattgcaggtgggagaacttagccgtcagactctgccggacggaataacatggacagactggcgtgagcgaaaaggagagttattccaggcccagcggatggagaaaaacatcatggggcttttactcagtcttatcgtgattgttgccgcatttaatatcatcacttctcttggacttatggtgatggataaacaggccgaagtggcggtactgcagacgcagggattaacttcacgtcaggtaatgatggttttcattgttcagggagtcagtacaggtgtcatcggtgcgctggttggcgcagtatcaggtatagtactcgcaggccagttaaataacctgatgccggtaacggggttactgaccggaaatatcgagttacccgtagccacagaaccattgcaggtaattttcgtcgttctggcaacaatactcatctccttactgtccacactgtatccggcatggaaagcagcatccataccgcctgcagaggcattgcggtactcataa

SEQ ID NO: 36691 - DNA, 402 bp, Escherichia coli
atgaaaattaagagcatcggtaaggctgtattgctgcttgcactgctaacctcgacgagctttgctgcgggtaagaatgtcaatgttgagttcagaaaaggccatagcagcgctcagtactccggcgaaataaagggatatgattacgatacatataccttctatgccaaaaaaggtcagaaagtgcatgtgagtatctctaatgaaagcgctgatacttacctctttggaccagggatcgatgattctgttgatttatcccgatattctccagaacttgatagtaacggacaatacgtactccctgattctggcaaatatgagttgcgagtgctgcaaactcgaaacgatgcccgtaaaaacaagactaaaaaatatagcgtcgatattcaaattaaataa

SEQ ID NO: 36692 - DNA, 1491 bp, Escherichia coli
atgaataataaattaattttatcatctatactattaacattatctggtgttagcctttgttcttttgctgctaatcctaaaggctactcatctatagctattggtgcggataatacagaatcttcaggtattggcagtatcgctattggtaagggaattggtgatgctacaagatcagaacaaaatttctcagtagtaataggtccaaattctaagtctttgaatataccagaaaaaggaggagcaggagcatcagtagtaataggatacgattctgcaacagaagcagggactttttcgactatagttggatccagatcgaaaattgattcagaaggaaactattcaactttaatcggtaacaaagcttcagtaactaaattgcctgaaaataattcatccttagatgtgagtggtaaaaaaataacagtatccgctgatggacatatttctgttgactcatctgttgatcctcatgctaaggagaaatatgggaatcaatatgcgtcatctgtaatgggatataaatcaagttcccacaatattgaaggaacggcagtaggttccttttcgacggtggttggtgaatttggtacagcattgggtagtcaatcattatcaattggctctggcagttctgccataggattagagtctcattccattggtaaaaatagtattgcattaggatcatattcagcctctcaggaaactgattctgtttccattggatatttatctgagtctaattcaaaaggcagtattgctcttggggcaagatcgaaaacgcataatcaatatgatgatactgtatctaaatataccgctgtagagaacacagatagtaagaatggtgttgtatctttaggaagggaagcaacaacgacagagcccatgataaacagaagaatcacgaatcttgccgggggcgtaaatcctacagatgctgtgaatatgtcccaattagatgttgtcactaaagctataggcatgagtgaagatgaaattaaaaatatagaaaaagaccccagcaaatcagtagttgcaagaataaatgaagaaaaaaaagccagaacaagtgcaatcaatgaagagaaaagactccgtgaacaaggtgatttaaacactctagaaatggcaaacaaatatactgcatctagcgttgatacattaggtaaaaacttcaataaaacattaaatgatttacagcagaaaaatgagcaaagattctcacaaatgaataaaaaaatagatagagtcgaaaagcgtgctaatgcgggtattgccggagttaccgctatttcatcaattccttatgttaataatgagcgcttttcatttggtatgggcgtggggcattatcgtgatgctcaagcaatcgcagccggagttcaatataaagtgagccagaatgctaacatacgagtcaacacatcatggaacaatggtggtgatacaaacttaggagctggttttgccattgggtggtaa

SEQ ID NO: 36693 - DNA, 819 bp, Escherichia coli
gtgctctgcggtcacttcattggcattgataagttagaacgtctaaagctacttcaaaatgatcccctcgtcaacgagtttgatatttccgtaaaagaacctgaaacagtgtcacggtttctaggaaacttcaacttcaagacaacccaaatgtttagagacattaattttaaagtctttaaaaaactgctcactaaaagtaaattgacatccattacgattgatattgatagtagtgtaattaacgtagaaggtcatcaagaaggtgcgtcaaaaggatataatcctaagaaactgggaaaccgatgctacaatatccaatttgcattttgcgacgaattaaaagcatatgttaccggatttgtaagaagtggcaatacttacactgcaaacggtgctgcggaaatgatcaaagaaattgttgctaacatcaaatcagacgatttagaaattttatttcgaatggatagtggctactttgatgaaaaaattatcgaaacgatagaatctcttggatgcaaatatttaattaaagccaaaagttattctacactcacctcacaagcaacgaattcatcaattgtattcgttaaaggagaagaaggtagagaaactacagaactgtatacaaaattagttaaatgggaaaaagacagaagatttgtcgtatctcgcgtactgaaaccagaaaaagaaagagcacaattatcacttttagaaggttccgaatacgactactttttctttgtaacaaatactaccttgctttctgaaaaagtagttatatactatgagctgacttccacgtcggtgccgtaa

SEQ ID NO: 36694 - DNA, 387 bp, Escherichia coli; identical to SEQ ID NO: 12817

SEQ ID NO: 36695 - DNA, 429 bp, Escherichia coli
atggcatctttgtctgtgattcgttcaccaaaactgcgactacagacaatctgctgttttgccggtggtgcttcttccagggatatgcaggactcgccgttgagttcgcgtaccgtacgctcaagaatgacgctgaagtttttccggatgaatgccgtgttagcctgcgccagctgcagtgctgtgttaatacccagcgcattcagcttttccgtcagtctgcgtcctactccccatacctcaccaactggctgcagccccagtagcttcaagatccgattacggttttctgccgtcagcgcgaccacaccggaaaactgtggccattgctttgtagcccactgtgcacttttagccagcgtttttgtaggcgcaatgcccacccccatggtgagtcctgtccagctttttacctgttccctgagctga

SEQ ID NO: 36696 - DNA, 882 bp, Escherichia coli
atgttccgttatgaggcgcatgtccgcccgtcatcggtgcagagccaggattacacgtttaaggtgccggactggccggggatgtatgagcagcagggtgagagcctgaacggacagcttgaacagtatgaaatatttgattatccgggaaggtacaaggatgaacagcacggcaaggatttcacgctgtaccggatggagagcctgcgcagtgatgcggaaaaggccacagggcagagtaattcgccgaagctgtggccgggaacgcggtttacgctgacggggcatccgcagaagatgctgaaccgtgaatggcaggtggtacagagcattctgtcaggagaccagccgcaggcgcttcacggcagccaggggagaggaaccacgctgggcaatcagttagaggtgataccggcggaccggacgtggcgtccacggctgcaaagcaaaccgaaggtggacgggccacagagcgccattgtcaccgggcctgcgggagaggaaatcttctgtgatgaacatggccgggtacgggtgaagtttcactgggacaggtataacccggcaacggaggcgagttcgtgctgggtgagggtgtcacaggcgtgggcggggccggggtttggtaacctggcgataccgcgcgtgggccaggaggtgattgttgacttcctgaacggggacccggaccagccgataatcatggggcggacgtaccatgaggacaaccgttcgccggggagcctgccggggacgaagacgcagatgacgatacggtcgaagacctataaaggaagcggctttaatgaactgcggtttgaagacgccacggggaacaggtctatatccacgcgcagaagaacatggatacggaggtgctga

SEQ ID NO: 36697 - DNA, 309 bp, Escherichia coli
atggagactttcgatactgataaatttcgctcagaactggatattttatcaagaaagattatgcctggttgtggtcttgtttttgagctatatcaacgtcgtttgagtgcagccattgataattttgttgccggattaccagaagaacaacagactctggcatttgaactggctcgccaagaatttgattatcgttctgcagaagagatcacggatgagatacgccgagacacggaaaatggctattgttgtcacggccttgatcgcaattgctgccctcttggttgcggtgatttagatcagtattaa

SEQ ID NO: 36698 - DNA, 279 bp, Escherichia coli
atgcctaacatcaaatttaactttagtgggttaaatacaatttacgctgaggcttgggcgaaaaaagatccaactattgcttttgaaataagactaggtgcaggttgttttgtctttatgatgttcctgtcaaaagaagatagtgaacagaatgataaattattcatatattatcgaaatatcaacacattatcacagttgaaactatacggttctcatctaggcggcgatttttttgcttacatcaagcctaaagaagaagctcttattaggcactga

SEQ ID NO: 36699 - DNA, 528 bp, Escherichia coli
atgactatcaaatcaaatacgccagcgtcagataggtatcggcttattgaggattatctgtatttagacggagatacagtcaggtacaaaaaggactcgctaaaacaccccaaccacagccaccgggccggagatgaaattaaaacatcgataaatggatctgggtatagacaggtgtgttttgcaggcattcagatgtttgttcacgtagttgtttttgcgctgcacaacaaaagaatgccattgaaaaatattgaccatattaacggaaacaggctggacaattccccaaaaaatcttagggaggcaagccggatagcaaacagccgaaatcagaaaactaagtgcaatagccgttctggaataaaaaatgttttatggaacaagcaaaaaaataaatgggccgttcaagtgcgcacagattttggccggttgcattttgggttctatgaagatcttgagcttgctggtttggttgccagtgaggctatcaacaaatatcacggacaatatgcgagggttgaatga

SEQ ID NO: 36700 - DNA, 978 bp, Escherichia coli
atgaaattacttatttgggtagctccttgggccgcacatggtgatctccagttttataagaatgcagtgcaaaaacatttgataccgcaagggaatattttatcaaacgaagggtgggaggttgatctttttttaccagaaagtttaagctttctacagtctaatatagataaaaagataaatgtcatcgatttcacgattgaagatcaactgttttgcttcggttgtttaaatgatttatccggtaaactttatgaaaataaagatttaaggcttatcgagagcatttcagataaaataaagaaatatttagaaagctattatgatgttatattgctatgggaaacacctgttcctttcttagaaaaaatatatcctgattcactaattgttcatcagatgcctggagtatttagccggctaccttacccgcatactattacctttgacccgtgggggttatataacaatagtagtttaactcagtattctaaagtaataatgtctggggtcactacatctgatgagaataaagtggctgaaaaattcaagtttctggtagagtctgcaattgaagatcttcagcctttctctcgacatgatttagactttgataataaatataaaaaattacttttagtaccattgcaagtgagtgctcattatgcgtttcaaacggatactagctatagcaatcagatggattttttattagatgtaatgaaagatgtagattctgatactggtgttgttgtaacacaatatgtaacccctagggtgagcgacacaattatagataatgatacccttcatgccctacggaagaaatggccgaatattatatataatcctatatttgataaaatcaatggcatttcacaatacatattgccacatgttgataatgtggcgacatgttcttcttcgatgggaatgcaggcctgtctcttatacacatctccgagcccacgagactaa

SEQ ID NO: 36701 - DNA, 534 bp, Escherichia coli
atgagagatgatccaggtaaagtaaaggagtatgtaaggcgtaaagttgatttgtatattttatcattagctattttgttttgtttttttatttttatcacaataaagctccctgtttgtcttggtgcgcaatgtaagtctgttggctggcttttgttattgaaaaacaatattgtcccattaatctgtttagggttgcttttatattgctggattgcctacaaaagatttaaatatgacacaaacaaaagtgtagaactcccaatggaaataacaaaaattgaaaaaataaactatgaacatcttacttttttagctacgtatattatcccattgattacatttgattttgatttgttttacgccaacccctccctggctttattgggatttaatatttataaattgaacgttagtataacaggtggagttaataaatcagggataatattgattacgagacggcagttaaaagaaaatgacatggttagctatatagtgcttgatgaaagagtttactattctggagattaa

SEQ ID NO: 36702 - DNA, 1179 bp, Escherichia coli
atgattcaggctctgaccgttcataacaagactgacacccatgataagcaatacactcaggcggtcacattgcagagtcacttttcgctgcctgctaataatgaacttgttaccggtgcacagtacaaacaagacagggtcaaccaaaggtccggtggcatgacctcaagcaaatctctgaccggcttcattaataaggaaacacgaactcgctcctattatgagtcagagcaaagtacagtctcactattcgcacaaaatgactggcaattcgccgatcactggacatggacaatgggagttcgccaatactggctttcttcaaagttgacgcgtggtgacggagtatcatataccgcaggcattataagcgatacctctcttgccagagagtctgcgagtgatcacgaaatggtaacatctacaagcctgcgctattcaggtttcgataacctggagttacgcgctgcgttcgcgcaaggctacgtatttcccacactctcccagctttttatgcagacatctgcgggcggcagtgtcacatacggaaatcctgatcttaaggctgaacactccaataactttgaattaggtgcacgatataatggtaatcagtggctgattgacagcgcagtttactactcagaagctaaagattatattgcaagtctgatctgtgatggcagtatagtttgcaatggtaacaccaactcctcccgtagtagctactattattatgacaatattgatcgggcaaaaacatggggactggaaataagtgcagaatataatggctgggttttctcgccatatatcagtggcaatttaattcgtcggcaatatgaaacttcaacattaaaaacaactaatacaggtgaaccagcgataaacggacgtatagggctgaaacatactcttgtgatgggtcaggccaacataatctctgatgtttttattcgtgctgcctctagtgcaaaagatgacagtaacggtaccgaaacaaatattccgggctgggccactctcaactttgcagtaaatacagaattcggtaacgaggatcagtaccggattaacctggcactcaataacctgacagacaaacgctaccgtacagcacatgaaactattcctgcagcaggttttaatgcagctataggttttgtatggaatttctga

SEQ ID NO: 36703 - DNA, 165 bp, Escherichia coli; identical to SEQ ID NO: 18027

SEQ ID NO: 36704 - DNA, 807 bp, Escherichia coli; identical to SEQ ID NO: 7671

SEQ ID NO: 36705 - DNA, 135 bp, Escherichia coli
atgcagaaaaccctcaaggctggaagccgaattactttgcgggatcagttgcaacttatgatgcaaatcgaattgttaaatgtggtttttatgatgaatacaatttccataaaggaacatttagagctgatttaa

SEQ ID NO: 36706 - DNA, 417 bp, Escherichia coli
atgattgcgattgccgacatcttgcaagcaggagaaaagttaactgctgtggcaccttttctggcgggtattcagaacgaggaacaatacacccaggcgctggaactggtagatcatctgctgctcaacgatcctgaaaaccccttgctggatctggtgtgtgccaaaataaccgcgtgggaagaatcagcgcccgaatttgctgaatttaatgccatggcgcaagccatgcctggcggtatagctgtgattcgtacccttatggatcaatatggtttaaccctttccgatcttccggaaattggcagtaaatcgatggtgtcacgcgttttgagcgggaagaggaaattaacgctggaacacgctaaaaaactggcaacgcgattcggcatttctcccgccttgtttattgattaa

SEQ ID NO: 36707 - DNA, 1029 bp, Escherichia coli
atgaacataacaaaaagcgccccgttgccggaacgcccttgtgaacaattaacctgctgcgccttatgtgtatgtgatcccaaacataagcacgggaatgatagccgctatcaggctggtgggcaatgtgatcagtgtggtggtttgctggtgggctatcagcctttgggttctatgccttctttgcgtagcttgtcacgacaggcatttttaacccatgaactgaaattaccaggcccagcaacttcgttaatttgttgtaacaatgtgtcttcgaagcggatatttttctttgtgctgccggagcggtcaaattttggtttctcatttttttcttgcattggtacgtaccatcattataaactgaaatccaatggtacgtaccatattaaaaatacgcaaccattaaatacagcgaagccccgcagtggtggaacactcgcagggcttctaaccaccaacgatagcaacagtatcgaggtagctatgagaaatcataccacacacccgcaagggcgggactcacacaacctgaataaagcgggtgtaaaaaaccagttgatcgccaccagcaaaaatggctatgattcccgcgcacctcataaaacgggtgccgggattgctaccccgctgacaatcgaggcgatacagacgccgcaagcgtctttttttgtatcggcgcacacgcacacctatacaatggtgggctgtatggggctgacttcggtcaggctggttcccttgattgccagttgtagcaaccctgtacagtccaccgccagcgagcttgctacctcctgcggtggttacattccatcaatcaaggaggctgccaacatggctactacccctaccctcgtacattctcagactgcctttatctggcgctttattgcctttggcgcgtcagaacatcaaatcatccacgtaaccgcctggacggaacgcgaagcgcgtagccgttgcccgtccggttgtattgcggtattcgccgcccgtattcgccagggggaaacctatgcacaataa

SEQ ID NO: 36708 - DNA, 222 bp, Escherichia coli
atgcgtgatgatcgttttaattccctgaaacaagaattttccggcgttcctgatgatgcggttgatgcgctttcgttaatatctgaaattatgcgggtggcttttttctttctttgcactgatgagcacagagatacagggctaaatattcttgatattgccgctaactatgccgatttcgtgacagaagctgttttaagaaaaacaacggacggggattaa

SEQ ID NO: 36709 - DNA, 234 bp, Escherichia coli
atgcgtgatatttatcttgaaacaatagaccgcgcatttcttgcactttctcacagtgaaagcatgatggaaatattgcgcatatggcttgaaacacttggcgacaatgaacgcgacaaacaaaaatcaagaattgccacggcattaataacgattcttgagcatgtaataatggaactgcaagaaatagatctattgcacgacagatataaagaacagcacaccggagaataa

SEQ ID NO: 36710 - DNA, 300 bp, Escherichia coli
atgaaacttaaatattctggcttaactgccagtggcaacactcaccctaaatttacgcgcggtgatatttaccgcgaccagtacggcggtacggtaatgattaagggcgtggcgggacggtgcgtaacttaccgccgtgaaggttacgaatatgattgcgtgatgcctgtttatcagttccggcgtgatttttctctggtacagaccgcgccgcataacgtgcccaccagcaacgccagggcacgggcaaacatccagaagctgaaaaccatgattaacggattcaggggtaaaaaatga

SEQ ID NO: 36711 - DNA, 195 bp, Escherichia coli
gtggaagagataaagcaaagcgctaccgtgatgattgatcatgaaatccttaacgagcttaaaaagttgcagttcgatattgtgcgccggatgaatgaatcaggtatctacggcagggcggcaacaccaacaatagggcatcttgcgcgcgtactgttacgcgaacgcctgggcattgcaacaagtgaggcgtaa

SEQ ID NO: 36712 - DNA, 162 bp, Escherichia coli
atggctatcacagaacgcgaagcaagcatcattaaagccattggcgaggaaacaagagacaccatagcgccattgatggaaaagatcgcagagcttgagacacgaataaacaagctgagtgatgaagttgaaggcctgatctcgttactcggtgagcaatga

SEQ ID NO: 36713 - DNA, 489 bp, Escherichia coli
atggcattaacgaccaaaaaaaagcggtttgctgatgcgttatcaaagggcacaaatccaacggaagccgcgatacatgcgggatacagcgaaaagactgcaagggttaaaggctggcagctatccaatgatccggaggtgaaaaagtatcttaaggctgtaacttctgatgtaacttttcaggttacaaaaccgaaaaaagttacaaagaaagttaccgaaaaagttacaccggaacgggcatcaattaacaccattgagatgatggataacggcctacccgaccccatcaaagcaatgggcaggatactgattgacaacatggacacagatccaaaactggctttagatgccgcgtttaagctggcccagttcacccaccgcaagatcggcagcattgggaaaaaagaggttaaaaaactcaatgccgctaatgtctcctcaaatcggttccccatccctaagccaccaactggcttaaaacactga

SEQ ID NO: 36714 - DNA, 162 bp, Escherichia coli
atgagcgaatacatcacagaccctattgatgtactcacggaaatcatgaacgacaagcagcagccaaccgaaatacggttacaggctgccgctgttctgatgccatattttcacgaaaccctaaccccatgttaccaggaggaagaagatgatgatttctaa

SEQ ID NO: 36715 - DNA, 927 bp, Escherichia coli
atgatgatttctaaaaacatgaaaggcgtgtcggcagttcgcgccgccagcgtgcttacatcgtgtaaattcagccatgcagacgcaattgaaatgacgaaaaaaaatgatccggcagtatcgaaatttcttgaaaaatccattgttgccggaatgactacggataatatgccgtcgctggtggcagagccgatagtaagagagcttggcgagtatattttttcgcagtctgtaccaggcaagctaatcagcagcgcgctgaatcttccgtttggcgcaaaattgcagtcaatatcaggcaagggtagtaaatggcttaaagaagccgaagaaatccctgtcaaagagggagaagtaaacgaaagtgcgctaaaactgtgcaaacttggcgctattgtgatgctgaataacgagctaatcaaatttagcacccctggtaccaattcagcgatcagagacttgatcacatcggaatcggtgaaagaaatagataaaaaatttctttccagtgaccaggaggtggcgggcgtatcccctgagggcgtgcttaatggtgctgatgaggccgaaaacttcatagagcttttcaaaaagcacatagcgaacggtaacacgcttgccacgtcgtcgctaatcttgcccgtagaaaacgccttacagcttactgatgctgagttctggcagatagagcttttgagaataccggtaattgtgagcgaacaggcggatcgcatgatgctgatagacgctcaaaagctgattattaacgttgaagccacggttataaccccaactgatgaggcggtaataaaaaccgaatcagggacggttagccttttccagaatgacgctacagcgttcagggcaatcacctattgcggatggcaaaaactcgataaggccgtcaccgttctggcgaaaagctga

SEQ ID NO: 36716 - DNA, 861 bp, Escherichia coli
atgaatatcgcaattgtgacaataaatcaggaacatgccgcaatggcgggctggctggcggcgcaggatttcagcggcagcacactaacgcattggcaaatagaaccacagccgatggttgcggaacaggtgctggatgcgctggtggaacagtggcaacgaatgcctgcggaggttgtcctttttcctccgggcgcgtttggcgatgaactgtcgacccggctggcctggcgtttacatggtgcaagcatctgccaggtgacttcgttagatattccaaccgtaagcgtgcgcaaatcccactggggaaatgcgttgacggcgacgctgcaaacagaaaaacgcccgctatgcctttcgctggcacgtcaggcgggagcagataaaaacgccacgttgccctttgggatgcagcaactgaacattgtccccggcgcgcttccagactggcttatcagcgtcgaaaacctgaaaaatgttacccgtgacccattagctgaggccagacgggtgctggtggtggggcagggcggagaggcagataaccaggaaatcgctatgctggcagaaaagatgggagccgaagtgggctacagtcgggcacgagtgatgaacggtggcgttgatgccgaaaaagtgattggtatttccggacatctgctggcacctgaggtgtgtattgttgttggcgcttccggcgctgcagcgttaatggcgggcgtacgcaatagcaagtttgtggtggcgattaatcatgacgccagtgcagcggtattttcacaggcagatgttggcgtggttgatgactggaaagtggtgctggaggcactggtgacaaacattcacgcagattgccaataa

SEQ ID NO: 36717 - DNA, 471 bp, Escherichia coli
atgtcgctgccgcacctctctcttgctgatgcgcgtaatcttcacctcgccgcgcaaggcctgttaaacaaaccccaccgtcgagcgtcgttggaggatattccggcaacgatctcccgcatgtccttgctgcaaatcgataccattaatattgttgcccgtagcccatatctggtgcttttcagtcgtctgggaaattatcctgcccagtggctggatgagtctctggcgcgtggcgaattaatggaatactgggcgcatgaagcctgctttatgccgcgtagcgattttcgtcttattcgccaccgcatgctggcacctgaaaaaatgggctggaaatacaaagacgcctggatgcaggaacatgcggcggaaattgcacagttaattcagcatattcatgataaggggctggtacgttcagccgatttcgagcattctcgtaaaggtgcaagcggctggtgggaatag

SEQ ID NO: 36718 - DNA, 795 bp, Escherichia coli
gtggatcggtgcggtaattatttacttaaagatggtcgcagtttaggacaagggagttttggcgaagtatttaaggttgatgtctataacttaacccagacccacatgaccacatatgctcgcaaatacttttcaccttgcccggactttgacaagaccgctataaaagagttgactgatttaagacagcgttttttagttgagatcaaaacacaatgcactctcaatagaataaactatgattcaatagcgccaatagttttatttaatacaaatggtgataaaccttattttgttatggaattggcagagtgtaatttatatgaagccatccgcaatggtatgaattacgcggagaggaagtctgctgttactcagattttaaaaggaattatcaccatacatgaaaacaactatatacatcgtgatttaaaaccaggaaacatactttattatgccgatggaaagtataaaatatctgattttggtctagtaaaagacagagataccttacgggccgaaatcaaaacaaaatttaagcctaatcacatgggcacagatggatatcgagcgcccgaaatacatgatagcggtcttttttcttttcaaagcgacatatttgcagcaggtaaaattatcactgatatatatcccacagaaagaagtgaaaaattaaaaagactgattgcaaaatgttgcgcacattggcctgaagaacgatatcaaagcacacgggagttactggaagattttttaaaagtgacgggggaggtaaatcatgaagaacataattga

SEQ ID NO: 36719 - DNA, 717 bp, Escherichia coli
atgaagaacataattgaaatggcatgttttagcctaaaacaaccccaaaaaaaagaaaatgaagacttttatttaccgccatcttttgatagcgattttaacattgtctttgcagtagctgatggggttggttcctctgaacattcaatgcttgcatctcatgcagccattcgtggcattagacacacgctaggcacttcctttttctcaattgaaagtgcatttcattcagctaaaaaagaaattgacaatttagatattagcactgccacaaccttaacaattgttcagatcaaaaaaaatgaagtgttaattggtcattccggtgattgccgagtatacttcaataaaaacaataaactaaatcagttaaccactgatcaaacgagatatcaagaactccttgattctggtgaacataaattacgtaatttaagaaatcataaagaacggctatcttcagtcctaacgaatgctttatcaaatacaacggatttgaattttgagttaatgtcttttccgattagccagctaatttataatggctatcttcaactctatgcaatgactgatggtgcctataagcattgggatgtcagaccaaggttttctgagaagacaatgctctcaccaacagcttttgcgagtagtttaagaaaaaggattgagaaaaacataatggatgattacacctttataggcgtaaaagtaacctga

SEQ ID NO: 36720 - DNA, 396 bp, Escherichia coli
atggcgaaaccttttacacacgaacagcgtgaagaactgaaggcccgaattatcgggttggtacgcaaaaatgaacgcatgacgatatcacaactggagagagcgacgggagcaggctggcattcagtcagacgttgccttgtggatgtactggcttgtggcgatttatacatgtccggtaaatacggtgtttttgcatctgaacaggtgtatcgcgtatggcgtaagacaccggagaaaacaaccgaccagacattgattcgaaagttaccagacggagaaatacgccgctatgacaggcatcagaacataatttgcagtgagtgccgaaacagcgaagtcatgcagcgtgtactggcgttctgtcaggggaattttcaggaggtgatggagtga

SEQ ID NO: 36721 - DNA, 264 bp, Escherichia coli
atgaatcttggagaatatttgcatcattcccgtataacccagaaagattttgctgaaattgttggggtaacccaagggatggtaagccatgttattactggacgggcgaaacttacgggggggaaagttttacgctggtgtgaagcaacagggtgggtagtgaccccgcacgagattgatagcagtacttaccccaacccaaccgatggcatacctgttgactatcaggctaacacacaacccgcgctgggagttgattcatga

SEQ ID NO: 36722 - DNA, 501 bp, Escherichia coli
atgaaaagaaaacccctgtcagagatcgacctgcacgccgcccagagactgaaagaaatctggacgacgaaaaaaactcaacttgggttaacccaagagcgtgcagcagaaattctgggtttttcgacacaaggggcagtaagccattatctaaatggtcagacacctttaaatctagaggctgttatcaagttcgctgggttgctacaagttccgcctgagtcaattagaccagatatggcagacttgttacgaattgtaaggatgtacccccaagaactgcagcaggataatgttgtcgctttacccgcagagatggagcaatcggaaaacgaacttccgtttaatatagaacctatagagcgagatttgatccagacgttcagggctttcccaaaagaagacaaagagaaaatgcttaaggaaatgaaggagaaaaaagaatcaattgaagaaaccgttgcgcggtggctagaggcgcaaaaaggtcgtcgcgcctaa

SEQ ID NO: 36723 - DNA, 2544 bp, Escherichia coli
atgagcactgataaagaagaaattgcactgtattacgaagccaaaaatgacaaagtcagaaaacgccttgggattaaaggcggtttttactggcgcacagcaaaaaaattatcggttgcaatatcacggggtgttgtcgcaatggacgatgctggatttgacgaagaggatttcaaaaaacctgttcgcgtgaatttgcccattgttaatgacctgccgcctgaaggtgtgtttgataccgaattctgcaaccgctatgaaaaaggcggagaagatggcatcacaatgatatttatagcgccttccccctcagttcaggacaaaccagccagcactgacaataccagcggcgaagctgttacaggtgtcagccgtgactgcgatgaacaaagtgactctcagacagagaacgcagataaaagcgaatccccggacagcaacgatgactgccctgaatgtgaaatccccgtctccaccctgagtcttacccatcgcttcctgcacctctacttctttggtcaggagttcgacgagaaatacaaacatcacgccacaccagaacaacgcaaggacgtgatccgcatcgaaatggatatggaagatggaaacatacagagcctgcttactgcagtacgttcgcatcctgagctggataagctgacaaaccatcatcttggaagactggcgcattcggtggaaaaggcattcactcacgcaacaacacgccgtatcagcccggcagaattcgacaagttcatttccacctggatgaagactgactaccttgatcaggggctgttgacaaaagagtgggcaaagggaaattgcgtatctgaaatcaatcgcaccccgtccggcgctaatgctggcggaggaattcttaccgatcgcggtgaaggttttgtccacgatgatgcgtcagtggaacgtgacgttgccgctggcgttctggcccgttcaatggacatcgatatttacaatccacatccggcacacgccaaacgcattgaagaaatcgtttcagagaataagccgcccttttctgtttttcgtgacaaattcatcgccatgcctggtcacctggattattcccgcgcgatagtagttgcgtccgtgaaagaagcaccaattggtatcgaggctactccccaccgtgttaccgaatatctgaacaaagtactgaccgaaaccgatcatgccaaccctgatccggaaatcgtggatattgcctgcggtcgctcctctgcccctatcccgcagcgtgtaacaaaagaaggaaaacaggatgatgaagaaaaaccgcagccatctggcgcaatggcagatgaacaggcaacgactgaagcagtggaaccggatacaactgaacataatcaggacacgcagtcgatggatgctcagccacagataaattctgttgatgcgaaatatcagaaactgcgtgcagaactctatgaagccaggaaaaacattccacccaaaaatcctgtcgatgcagataaattactggctgcttctcacggagaatttgttgaagggattagcgacccgaatgatccaaaatgggtgaaggggattgaaacccgcgattcggtgaaccataaccagcaagaaacggaacagaaaggccataaagcggaacaacacagtccaaatgcgcaacaaaacgagccagaaacgaaacagcctgaaccagtagcgcaacaggaaccggaaaaagtctgcacagcctgcggtcagaccggcggcggcaactgtcctgactgtggcgcggtgatgggcgacgcaacataccatgagacattcaacgaagaaagccaggatgaagcccgggaaaaagatccggaggaaatggaaagtgccggactcccgaacaaggagtgcaccgaaggcgatcaacatgccaatggcaataatgaaacaggcgagacagcaaatctcttaattaaggtgaacggtcatcgtgaaatcacatccaccagcaggttgtggcaccatctgatgattgaccttgaaacaatgggcaaaaatcctgacgcaccaatagcctcaataggcgctgtatttttcgatccacaaaccggagagcaggggcctgaattcagcaaaataattgatatgggtacatgtggcggcactgtcgacataagcacaatcgaatggtggctggtacagtccagcgaggccagaactgcaattttggtaaatcaaatcccattagatgatgcgctgctgcaactcagggaattcatcagcgagcattcagatgaaaaattcgtgcaggtatggggcaatggtgcaactttcgacaacgtgattttacgccgttcatacgaacgacagggtatcccctgcccgtggcgttacaccaatgatcgcgatgtaagaacgatggtcgctctggggttggtgatggatttcgatgcccgcaacgtcaccacatttgagggtgaacgccataatgccctgcacgatgcgcgttaccaggcaaaatacgtttcagctatctggcaaaaactgttcccgaatcaggctgatttttaa

SEQ ID NO: 36724 - DNA, 222 bp, Escherichia coli
atgtgcaataacatccgtccggacgcagccgccgccgcactcactacgctgatgcacgcgcttattgatattgaatgcacggcagagcttgcacaaaaggaagaacgggaggaatacacattgttcgccctggaatgtatccgatacaccgccacgcggtcgctgaatgacgctaaaaatattcttgttgcagattgtgaaaatggggggggttatgcgtga

SEQ ID NO: 36725 - DNA, 279 bp, Escherichia coli
gtggatgtggactggctgatcgccgagcgtcccggcagggtaaaaaccttgaagcagcatccgcgcaagaacaaaacggcaatcaacatcgaatacatgaaagccagcatccgtgccaaggtggagcacccgtttcgcatcatcaagcggcagttcggcttcgtgaaagccagatacaaggggctgctgaaaaacgataaccaactggcgatgttattcaccctggccaacctgtttcgggtggagcaaatgatacgtcagtgggagagatctcagtaa

SEQ ID NO: 36726 - DNA, 138 bp, Escherichia coli
atgaatatgatgatctcatatcaggaacttgttcgcaccttccttagctccaatttccgtaaggcaaaaaaaaagaaaggtaacttcccccgcgagagggaagttacctttctcattatctctggtaactggagataa

SEQ ID NO: 36727 - DNA, 276 bp, Escherichia coli
atgcgtatttttctcttacttctgatgctatgcggttttcaggtattcgctgaacgattgccttcagtgactgacttaaccgggacattaacgacagaagaacaaagtgctttaaatcaacaattacagactctcgagcagcaaaaccacttccaggtggccgtgttggttacgccgacacagggggcaaaaacattaaacttgcagcctcgcagagatacggggtatatcactggaaacccgttggagagaagcgatatggcgaaggtatcttaa

SEQ ID NO: 36728 - DNA, 168 bp, Escherichia coli
atgttattgtgccagcaggggcagggtaaggtgctgtatcgatatgctttggcaattgcgcgtgccgcagagggagataaaatgccaataaaaaagcctgagttcgatgagggacgaactcaggctagtgttaagttttacagtaacacgccgcggcgcgttggctga

SEQ ID NO: 36729 - DNA, 309 bp, Escherichia coli
atgaaaaagttattaccctgtactgcactggtgatgtgtgcgggaatggcctgcgcacaggccgaggaaaagaacgactggcactttaatatcggcgcgatgtacgaaatagaaaacgtcgagggttatggcgaagatatggatgggctggcggagccttctgtctattttaatgccgccaacgggccgtggagaatttctctggcctattatcaggaagggccggtagattatagcgcgggtaaacgtggaacgtggtttgatcgcccggagctggaggtacattatcgagttcctcgaaagcgatga

SEQ ID NO: 36730 - DNA, 153 bp, Escherichia coli
atgaacaaggttgctcaacattaccgtgaactggtcgcgtcactgagcgaacgcctgcgcaatggcgaacgtgatatcgacgcactggtggaacaggcgcgcgagcgcgtaataaaaacaggggagttaacgcgaaccaggtcgatgagctga

SEQ ID NO: 36731 - DNA, 294 bp, Escherichia coli
atgagctatgaagagagcctgaaagaagagtctgacagcgtctttatgcgggtgattaaagaaagcttgtggcaggagctggcagacatcaccgataaaacgcagcttgaatggcgcgaagttttccaggacctcaatcatcatggggtttatcacagcggagaagtggtagggctgggaaatctggtctgcgagaaatgtcacttccatctcccgatctacacaccggaagtgctgacgctatgccctaaatgtggtcatgatcagttccagagacgtccgttcgagccgtaa

SEQ ID NO: 36732 - DNA, 1041 bp, Escherichia coli
ttgaacatagacactcgcgaaatcaccctggagccagcagacaacgcacgtctgttgagcctgtgcggcccgtttgatgacaacatcaaacaactcgaacgccgtctcggcatcgaaatcaatcgccgtgataaccactttaaactgaccggccgtccgatttgcgtcaccgctgcggcagacattctgcgtagcctgtatgtcgatacagccccgatgcgcggtcagattcaggatatcgaaccggaacagatccaccttgcgattaaagaagcgcgggtactggagcaaagcgcggagagcgtgccggagtacggcaaagcggtcaatatcaaaaccaaacgcggcgtaattaagccgcgcacgccaaaccaggcgcagtacatcgccaatattctcgaccatgacattaccttcggcgttggcccggcgggtacgggtaaaacctacctggcagtggctgcggcagttgatgccctggagcgtcaggaaattcgccgtattctgctgactcgtccggcggtcgaagccggtgagaaactgggcttcctgcctggcgatttaagccagaaagtagacccgtatctgcgcccgctgtacgacgcgctgtttgaaatgctgggctttgagaaagtcgagaaactgattgagcgcaacgttattgaagtcgcaccgctggcctatatgcgtggtcgtacgctgaacgacgcgtttatcattcttgatgagagccagaacaccaccatcgaacagatgaagatgttcctgacccgtatcggttttaactcaaaagcggttatcaccggcgacgtcacacagatcgacctgccgcgtaataccaagtctggtttgcgtcatgccatcgaagtgctggctgatgtcgaagagatcagctttaacttcttccacagcgaagacgtggttcgtcacccggtggtggcgcgtattgttaacgcctatgaagcctgggaagaagccgaacaaaaacgtaaagcggcgctggcagcagaacgcaagcgcgaagaacaggaacaaaaatga

SEQ ID NO: 36733 - DNA, 471 bp, Escherichia coli
atgattatcggtaatctcaaccatttgtcgctggcggggcttcctgcctgggtgagaaatattctgctgcgcccggagtgttcgttatcggcgttatccaccagagaggacggtcgctggcaacctgaaggatgtcggtggttctgcacgctgggaacttcagacacgcaacccgccgaactccgccatacggagtatcaccatctatgggccgatatacaggtggtgattactggttgtgagggcattaatgcgggaacgcggcccatcgctcgcgaaaacgatgaagaacgtaagcccgatctgtttatcgccccatcccctgaaaacagtgtcgccatcaccctacacgccggtgatttcgccgtctttatgcctgaggaacctcaccaggcgctgtgcgcaattggcacggctacttcaatacgcaaagcggtctttaaagtaccgcgcgacatgctggaagcctaa

SEQ ID NO: 36734 - DNA, 276 bp, Escherichia coli
atgctgcatgcagtgaatacgcagcatggtctccagcggatagggccgtcggccattgcccgccttgggataaaacggctcgatgacagcggtcatattctgccatggcagaatctgctccatgcgggagaggaaaatctcttttcgggtctgacggcgcttagtgctgaattcactatcggcgaaggtgagttgatggctcatgatgtccctctgggatgcgctccggatgaatatgatgatctcatatcaggaacttgttcgcaccttccttag

SEQ ID NO: 36735 - DNA, 300 bp, Escherichia coli
atgccagaacaaagcaaagccgatcggcagggcaatccagtggcgcaagcgatgcaggctgtagcgcggaatgggcatcagcagaaacgcggcaaacaccagattgaggagcggatggaagttaagatatcccgcccacaacaggccgaacttaaccagaaaatagaagttccagccggaaaggccgcgctagtattgccagagggaagaaggcatggcggtattttgcgtaaattgagtcattttttggttgccctggctttttccgtgcggcgtaacgtcccggccggtttaacataa

SEQ ID NO: 36736 - DNA, 276 bp, Escherichia coli; identical to SEQ ID NO: 36734

SEQ ID NO: 36737 - DNA, 306 bp, Escherichia coli
atgtctaattctattgagatccatgcaattaaggtcacccaaccatacggcgaattctttcagacggttatgtctgccgaagatttattgaaatgtatttatgtgaatcaggcggaaatggatgatggggaaatatcaggtgtgcagaggaaagagtctatgccaagagccttagacatagcaaaattcatagactccgatgaggctgcatttccaaactcaatcatactctctgtcaatcataatgaagatggtacacctgcaaaggaagatgacaaatgggagtttaaaaaaagtgagaattga

SEQ ID NO: 36738 - DNA, 519 bp, Escherichia coli
atgtcgagaaatgatatgatacattgggtgaacttgtggaaagatatcttaggattatatccaagaatcattcagccaaaatttatttttatatctttggtgacattatttgtatcaacctgcggaatatggattggcccattatttttaaaagataatacgcagttgggtttttctattttttcatttattattaccacattgggcgtattagccgcggagtgtttatccagagatgacgagaacgaaaatcctatttctttatctgaaaggcaccgtaaacaagttagaatatcttgttcaatatttttatggttcatatcatttgtttttttattttttggattaaaaaatgacgtcaatttcatgttaatttcatcacttattataactataatattatggttttccattaccgttgttaagcctgattttaaaatccctgtaactccagattcattagtgtctgatgaattaaggaatatgagttctaatgatgagccaggtgaggggctataa

SEQ ID NO: 36739 - DNA, 219 bp, Escherichia coli
atgatccaggaatcaaccgttatccggttcacagccaacggccgtcagtacgaggtagacgaagccctgattgattacagcatgacccgccagagctcacgctttcaggacatgtaccacatccggctaatcaacggttcgtctttcaacgccacaaacgtggaagaagtacgcgtgctgacagcaacacgcaacacgggaggtaaagcatggcagtga

SEQ ID NO: 36740 - DNA, 411 bp, Escherichia coli
ttgcgtgctgccgaacgtgagcttgcaagaagtgaggggtttcacagttttgttgatgcccgtgctcatgcagaactctttcgtattggcgcgcgttcccctgtgattcttcgctctgtaaaaaaatgtgctcagtcactggtgaatgataaatatcaccttgtcttcttggttacggaatctacgtctggtttttgcttgtcactttcgtatcctgaaaacattcacttgtatgatgaggtgtttgagtcttttgaaggtgccgaatcgtttgctcaacatctctcatacgatgtgttcgaactggctgatatttatgattgttgggggtcgcttattcatcccttgcaacattctcgtttttacagaaatgtgtttgatattgaggatgatcatccatcagcctggtag

SEQ ID NO: 36741 - DNA, 453 bp, Escherichia coli
atgtcaggatttaaagaagattttttatggggcggtgcggtagccgcacatcaattggaaggtggctggaatgaaggaggaaaaggcatcagtatcgctgatgtaatgactgctggcgctcacggggtgccgcgtgaagtgacagaaggcgttatcgacggacttaattatcccaatcatgaagcaattgatttttatcatcgctataaaacagatattcagttatttgccgggatgggattcaaatgctttcgaacttccattgcctggacacgaatctttccgcaaggtgacgaacaggagccgaatgaagaggggtttcatgattgcctcagtgacgttgtcacgttatcaactagttgttgtaatgatttaatggatgtaaaaagcgcgattcaccctgcatattggtcatccggtatttatgcggcggaacatcaaagtaatttttga

SEQ ID NO: 36742 - DNA, 246 bp, Escherichia coli; identical to SEQ ID NO: 29631

SEQ ID NO: 36743 - DNA, 276 bp, Escherichia coli
atgtctgttgttgatgcgatgcaggttggggttattccaatcgttaataatgttggtgagataccaaattacgtaaaaaacaatattaacggcattatcttagatgataaaaagcttggtgatgaaaactatcttaatttaaatatatcatgcttattaaatatcataaagaatgatggtggatattttttatataataacgcgataaagacatttcaggataataatacttatgtagatgactatataaagaaaataataaatgctaacaactga

SEQ ID NO: 36744 - DNA, 165 bp, Escherichia coli
atggacatgcctaaaattaacaaagaaaatattgaaaagctgtgctctgcattgaaaactgtgaatcctgaggagtttacaaaaaatacagagtatacatcaacaactgtgggtcagcgaaaaatatatgattatttaaacgaaaatgtcaaaacagatttttaa

SEQ ID NO: 36745 - DNA, 174 bp, Escherichia coli
atggtaacgctgaccattaaccgtaaaccgcagggtattttcagtaagtcaccggcaacgccgctgcaggataaaacgaacactgcacacaacgtgaaggccagggaacggataccacagttgaacgataaacagagccctgctctgctgaaaaaacaccgtggcggcatatga

SEQ ID NO: 36746 - DNA, 294 bp, Escherichia coli
atgttttgtgtgatttatcgaagcagcaagcgtgaccagacctatttatatgtcgaaaaaaaagacgatttttcgcgtgttcctgaggaactgatgaaaagttttggtcagcctcagttagcgatgattcttccgctggatgggcggaagaaactggttaatgccgatattgaaaaggttaaacaggcattaaccgagcaaggttactatttgcagttaccgccaccacccgaagatttgctgaagcaacatctttccgtcatggggcaaaaaacagacgacattaacaaataa

SEQ ID NO: 36747 - DNA, 1005 bp, Escherichia coli
atgaatatgatgatctcatatcaggaacttgttcgcaccttccttagcatgttacttattgtggtggtttatcttctcagtatttcttgttttgcaggtcaacactttgcgctcggtttattcctgtttgctctcttgatctgcggtattccttgtatggcagtgaagagtctgcagtatcaggcgaacatgacctcactgaatgacattcgctttggctttaactgctcaatgatgcgtgcatggtgggttatgctaggactgcctgttctgttggcgttagttttttggttcgcactgtatcttattgcacaagtgacgacatcaatagggggggtattctttaacttagtcgcattaagtttgctttctgccatcgggctaggtgttgtccatggtataacctatagtaaatggatgccattgctgggtaataatgcaacttttggcattcataagttttctattcaggtaaacgtaaaagaatgcattaaaggttgcatgctcgcaatattaaccatggttcctttcatcattgtgattggtattatgatcgcaccagtattccagcagttaatgatgatgaccatgttgggtaggtctgatgctggcagtgagtttgtattacaatattacccgcagattatggcttcttatttcctgtattttgtcgcgatccttgtttttgccagttatctctatgtcacgttacgcaatctgtttttgaataatctgacgctggcaaatgggacaattcgttttcattcatctgttaccgcgatcggtatgcttctgcgcatgttggcggtattaatggggtcctcaattacctgtggtctggcttatccctggctgaaaatgtggatggttagctggattgctaacaatacccatgtccagggcgaccttgattcgctggagttaaccaatgatgacaaaccgcaggatagcggttcgttaatgtggatatctcgcggtattatgccgtatgttccgtttatctaa

SEQ ID NO: 36748 - DNA, 723 bp, Escherichia coli; identical to SEQ ID NO: 21925

SEQ ID NO: 36749 - DNA, 513 bp, Escherichia coli
atggtcgcgaataattattacgcgttcactttggggactggctggaatacacgcattggtgccatttccgtcgatgccacgaagtcgcatagtaaacaagacaacggcgatgtgtttgacgggcaaagttatcaaattgcctacaacaaatttgtgagccaaacgtcgacacgttttggtctggcggcctggcgttattcgtcgcgtgattatcggacatttaatgatcacgtatgggcaaacaataaagataattatcgccatgatgaaaacgatatctatgacattgccgattattaccagaacgattttggccgtaaaaatagcttctctgccaatatgagtcagtcattgccagaaggctggggttctgtgtccttaagtacgttatggcgagattactgggggcgtagcggcagcagtaaggattatcagttgagttattccaacaacttgcgaaggataagctataccctcgcggcaagccatgcttatgacgagaatcatctttaa

SEQ ID NO: 36750 - DNA, 285 bp, Escherichia coli
atgactaatcaactcattcccgttttcgatggaaccatcaacaacgaaccagttttactttgcaatgctcgcaatctgcacgcttttcttggtattggtaaaatgtttgctcactggatcaaggacaggctgggtgaatatggattcgttgaaaatcaagattttgtgattgcttgccaaaattggcaagcaaaaggtagaggcggtcacaaccgcaaggaataccacctcaccctcgacacagccaaagagcttgcgatggttgacgactgcgtccaatactga

SEQ ID NO: 36751 - DNA, 831 bp, Escherichia coli
gtgcccccgctggtcccctttcacctcgtggccctgccgggcctgcatcacctttgggaccagctgcaccagccggtccccgtgggcctgcgggccccactgctcccgcaggtcctgtcgccccctgcagcccacggaggccctgctcacctttctgtcctgcaggcccctgaggtccgggttcaccgcgctcacctttcggacctgtgggacctgccggtccttgctcgcccctgtcacctttcggtccaggtatgctttctcccgacgggcgggttgtcgcaacctcttctgccttctgtttcgctgccctggcctcatccattgccgccttcacagctttcggtgtggctgccttcgtttcatcatcactgtccgttgcgctgcttaactgcacaattcccttctgtgccgtcgtcgcatctgccacatttgctgcgctgcccgccgggcctggctccccacgaggtccctgaggtccggcttcgcctcgttcacctttcggacctgccggacccggctcacctctcggaccagcatccccctttggtccctgaggcccccccgggtctcctttttcgcctctggccccggtttcaccacgcggccccattgctccctgtggcccggtcgcaccacgtgggccagatggccctgttgcgccagctggcccctgcactccctgaggtccccgttctcctgtatcacctttctggcccggtatgccctgaggtccgcgctctccctgctcacctttctccccacgcggacccgccggacctgtttcaccacgaggaccagcatcacctttcggccctgtatcgcctttag

SEQ ID NO: 36752 - DNA, 522 bp, Escherichia coli
gtgaaacgatacgtaatgacggcagtgtggcccctgctgctgtgcgcggctcaggctggcgcggaactcagggttattgcggaccttggaggcagtgatgcctccgtgttttatgaggcaatcaaccgccaggaggggagcagtacgcctcccccggttacggcgcctctgccggcgcagggagagacgctggcgctgcccgtgaccacgccggaaatgacgccgggtgaggtgacgccgcgaccactgcagttgccggggatcggggcgctgtttctggtgggagacgatgcgctttcccgtcagtggctgcaggcgaatgcggccgctctccgtgagcggcaggctgtcggtatggttgtcagcgtggcggatgaaaacagcctgagaacgctgcgtgagctggcgcccggcgtgatgatggtaccatcatcggggtcagcactggcacgccgtctgcagctgaatcactggccggtactgataacggacagcggaatatccggggtggtgacaccgtga

SEQ ID NO: 36753 - DNA, 600 bp, Escherichia coli
atgctgcggcaaatgacggatattgtgccggataagataccgtacggcgttctgctgtgtgtcctgaccgtgttgttcctgcttttccccgtcctgtgtggtcgccgccggcgtcgtgaacgcgccagtgagtggcgtcaccgccattaccggagcaaggctgagcgtgtgctggcgcaactgtcgtcgttgccggagggcggtgcaggcgtgaaatacctgcgaaaaattaacccgtatgtgtttgaagaactgctgcttctggcgtttgaacgcaggggaatgcgggttatccgcaattcccgctacagcggcgacggagggctggacggacaggtgctgattgacggcgagcggtggctgattcaggccaaacgctatggccgcaccatccgaccgtcacatatcgatgattttggtgaattactgcgtcgtgaaggttgtcgtggattttttgttcacaccgggcgtacgggaccggccagccgggcacggcttgtgctgtggccggatattgaactggttagcggacagcgtctgctgaaactgctgaacgggcgattactgaccggtgaactcaccggagaaaagcgaagatga

SEQ ID NO: 36754 - DNA, 2574 bp, Escherichia coli
atgtcccagccggttggtgatcttgttattgacctgagtctggatgctgtccgtttcgatgagcagatgagccgggtaaggcgtcatttttcaggtctggataccgacgccagaaaaaccgccagtgctgttgaacagggcctgagccgccaggcgctggctgcacaaaaagccgggatttccgtcgggcagtataaagcggccatgcgaaccctgcccgcacagtttacggatatcgccacgcagcttgcaggtggtcagaatccctggctgatcctgctgcaacagggcggtcaggtgaaggactccttcggcgggatgatccccatgttcagggggcttgccggtgcgatcaccctgccgatggtcggggtcacctcgctggcggtggcgacaggtgcgctggtgtacgcctggtaccagggagattccacgctttcagcgtttaataaaaccctggttctttccggtaatcagtccggactgactgccgatcgtatgctgactctctcaagagccgggcaggcagcagggctgacgtttaaccaggcgagagagtcactggcagccctggtgaatgccggtgtgcgtggtggtgaacagtttgatgccatcaaccagagtgtcgcgcgttttgcgtctgcatccggtgtggaggtggataaagtcgctgaagccttcgggaagctgaccactgacccgacgtcgggactgatggcgatggcgcgccagttccgtaacgtgacggcagagcagattgcgtatgttgcacagttgcagcgttccggagacgaggccggggcattgcaggcggcgaacgatatcgccacgaaaggctttgatgagcagacccgtcgcctgaaagaaaacatgggaacactggagacctgggcggataaaacagggaaggcattcaaatcgatgtgggatgccattctggatatcggtcgtccggaatcctcagcggatatgctcgccagtgcgcagaaggcatttgatgaggcggataaaaaatggcagtggtaccagagccggagccagcgccggggaaagacctcctcttttcgtgcgaaccttcagggggcatgggatgaccgggaaaatgcccgtctgggtctggcagcggccacgctgcagtcggatatggaaaaagccggtgaactggcggcaagggacagggctgagcgtgagtcgtcacagctgaagtataccggagaggcgcagaaggcgtatgagcgcctgcagacgccgctggataaatataccgcccgtcagaaagagctgaataaggccctgaaagacggaaaaatcctgcaggcggattacaacacgctgatggcgtcggcaaaaaaggattatgaatcgacgctgaaaaagccgtcaggtgtgaaggtgtctgccggtgagcgccaggaagaccgggcgcatgcagccatgctggcgcttgaaaccgagctcaggacgctggaaaaacacagcggtgtgaatgagaaaatcagccagcagcgccgggatttatgggaagcggaaaatcagtatgtggtcctgaaagaggccgccacgaaacggcagttatctgagcaggaaaaatccctgctggctcatgagaaagagacgctggagtacaaacgccagctggctgagctgggagacaagattgaacaccagaagcggctgaatgagctggcacagcaggcggcgcggtttgaacagcagcagagcgcgaagcaggcggcaatcagcgcaaaagcccgcggcctcactgaccgtcaggcgcagcgggagtcggaagagcagcgccttcgtgaggtgtacggtgataatccggctgcgctggcgaaggccacatctgcactgaagaacacctggtctgcggaggagcagcttcgtggaagctggatggccgggatgaagtccggctggggcgagtgggcggaaagtgcgacggacagtttttcgcaggttaaaaacgcggccacgcagacctttgacggtattgcacagaatatggcggcgatgctgaccggcagcgaacagaactggcgtggtttcacccgttctgtgctgtccatgctgacagagatttttctgaagcaggcgatggtggggattgtcgggagtatcggcggcgccattggtggtgctttcggtggtggcgcatccgcttccacggggacggccattcaggctgcggcggcgaacttccatttcgcgaccggaggatttacggggacgggcggcaaatatgagcctgcggggattgttcaccgcggggagtttgtcttcacgaaggaggcaaccagccggattggtgtcggcaacctgtaccgcctgatgcggggctatgcggaaggtggttatgtcggcagtgccggaagtccggcgcagatgcggcgggccgaaggcattaattttaatcagaacaatcacgtggtgattcagaacgacggcatcaacggacaggccgggccgcagctgatgaaagcggtgtatgagatggcccgtaaaggtgcgcaggatgagattcaggcgcagatgcgtgatggcggcgtattttccggaggcaggcgatga

SEQ ID NO: 36755 - DNA, 927 bp, Escherichia coli
atgatttactgcaacgcctgcaagaacatttcaccgttcaccaggtggcaaacctcagcccacaaaaatgcagcaatttttgtcgaagctgaaggcttgctgggttcaaacgagaatgttgatgccgcattgctggaaaaaatgccgaaactgcgtgccacatcaacgatctccgtcggctatgacaattttgatgtcgatgcgcttaccgcccgaaaaattctgctgatgcacacaccaaccgtattaacagaaaccgtcgccgatacgctgatggcgctggtgttgtctaccgctcgtcgggttgtggaggtagcagaacgggtaaaagcaggcgaatggaccgcgagcataggcccggactggtacggcactgacgttcaccataaaacactgggcattgtcgggatgggacggatcggcatggcgctggcacaacgtgcgcactttggtttcaacatgcccatcctctataacgcgcgccgccaccataaagaagcagaagaacgcttcaacgcccgctactgcgatttggatacactgttacaagagtcagatttcgtttgcctgatcctgccgttaactgatgagacgtatcatctatttggcgcagaacaattcggcaaaatgaaatcctccgccattttcattaatgccggacgtggcccggtggttgatgaaaatgcactgattgctgcattgcagaaaggagaaattcacgccgccgggctggatgtcttcgaacaagagccactgtccgtagattcgccgttgctctcaatggccaacgtcgtcgcagtaccgcatattggatctgccactcatgagacgcgttatggcatggccgcctgtgccgtggataatttgattgatgcgttacaaggaaaggttgagaagaactgtgtgaatccgcacgtcgcggactaa

SEQ ID NO: 36756 - DNA, 594 bp, Escherichia coli
atggacattgaagattttctggaggcggaagacaatgatctgtctctgtggaatgatgatattttaagcattgactggttcgttatcctcaaagagcttttgaaataccagaacaggttaaagttaaactattcagaattacttctgctggctaattttgtttcatttcaccaggacgtagattcgcaaacattaccatcaatatctctttttgccaccagaatgcgtgcatctcgtgccattatagaagaaggctttcaacgcctggaggagaaagggatgttacagaagataagttatgctcaaatcggtcatgattatgatttgcggaacgtttatgacatcaagccattaattcgtaagttaattgaggtgctgaaaaccgagtatgataaaaagcacacttgccccctctgcggcaaaatagctgtctctgatgaggaaattgagaaaaaattcggattcagaatttgcgggaataagaaaaggccgcaaagctggtgccgttcatgcagaagcacgaaacaacgcagactgaattcatcgctaattggcaaaaaaaagccccgaaaatctccgcccgaggtggtgtga

SEQ ID NO: 36757 - DNA, 195 bp, Escherichia coli
atgaatgctaaaattcaaacgatacctgaattactgatctgcaccaggggaaatcagacagaagtcgccagaataccgaaatgcaatcgtgctacagtcagaaaatacattgatgataaagatgcgaaaaagcacgccgtcgtcaatggcgtccttatggttcatcgcggatggggtaaagatactgatgcgtga

SEQ ID NO: 36758 - DNA, 771 bp, Escherichia coli
atggaaaccgtattgcatgcactgaaagcgatgggaaaagccaattctgttgaactggcggcgcggcttgatatcagccgtgaagaagttctcaacgaactgtgggagctcaaaaaaaatggcgttgttgataaaacgggtcacacctggtttctggctgtcgaaggtgaagccggggtaaccgaagggcaggcactgcaacctgaagcgccggatgtggtaaccgaagaggtcgctccaaaagttaccgcagacatgatgattgagtttatcgatcaggatggggctaaaacgtgtgaggaactggcggggaagttcggtgtcagcactcgtaaggttgcttccacgttggcggtggtaacagcaacgagacgcctggtacgcgagatcagcaacggaaaattccgttacaaaatgcctgatgtcgaaaacggcgatttgagcgctttatcatcgcagaataagcaatcacaccatgacgcagaaaacagcgcggcaggcgatgaaatgaatcgttttccgttggcatcagagagcacggcaaaggccagtacagatgagtttatccgagaagttccatcattcaccgaaaaatctgccagttcggtgatgcttccatcgctgcatgctgccagtcgagaacttcgtcgcgccaaaaaacaggtccagaagtgggagcgagtctgcgccgcgctgcgggagctgaacaagcaccgggatattgttcgacagattgtcgattcatccggtcgtattgtgtcggaaaagtga

SEQ ID NO: 36759 - DNA, 243 bp, Escherichia coli
atgttcgctttgattcaacgcgggcagatatacacggacagagccggataccccgtggtgattactcgcatcactgagcactcagtgttctttcgacggatggacggacgatccgggcgggtacgcattggtgagttaaactgcctgttcgaacatattgaccaccaggagtaccgcaaaattctcgcggacactgagcaggaaaagcacctgaaaaaattacgatccataaaaaggaagtaa

SEQ ID NO: 36760 - DNA, 1230 bp, Escherichia coli
atggcaaagatcgctaagaaacttactgacactgaaatcaaaaataccaagccagcagaaaaggagatcaacctttttgatggtgacggcctgatgctacgaatcgcccctctctctgtaggcggcaagaaaaaatggtatttcaggtatgcagtgccagtaaccaaaaagcggaccaagatgagcttaggaacctatcctcatctcacacttgccaaggctcgggctttacgtgatgaatacttgtcgttgcttgcaaatggtatcgatccgcagattcacaacaacgataaagccaacgcccttaaggatgccactgagcacacgctacaggcagttgctaagaaatggttagatgagaaggttaagacctctggtatctctcaagaccacgcagaagacatctggcggagccttgaacgaaatatcttccccggtttaggcaaccttcctatcaaagagatccgtcccaagctcttaaaacaacatcttgaccccatagaacaacgaggcgtattggaaaccctgcgccgcatcatttcacgtctaaatgaaattttccgttgggctgcgacagaagaacttattgagtttaatcctgctgacaatctcggccagagattcagcaaacccaagaagcaaaatatgccagctttaccaccagatgatttacctcggttcttgattgctctatctagcgcttctatacggctcgaaacacgtcttctaattgagtggcaactgcttacgtgggttcgtccgggagaagctgtccgcgctcgttggagtgatatagaccaagatcatcgattctggaacatccccggtgagtttatgaagatgaagcgtcctcacaagattccgctgagtaaagaggctatgcgtatacttgagttaatcagaccaatcagtggtcatagagagtgggttttcccaagcattaaggccccgcttaaccacatgcatgagcaaacagctaatgctgcaatcatccgtatgggattcggtggtgaactggtagcccacggaatgcgttctatagcaagaacggctgctgaagaaagtggtaaatttagaacagaggtgcttgaatcagccttagctcatactaaaaacaatgaaatcatagccgcttacaatcgtgctgagtatctactagaacgagaggttctaatgcagtggtggggagattatgttcagacaaaaaagcacaaaattctcgcagcttaa

SEQ ID NO: 36761 - DNA, 300 bp, Escherichia coli
atgcgctgcatgttccagggacggcattttctgcaactgggtgcggaatcactccgtgatggtgagcagataagtgatgccatacgcaatggtgtatggacgtataacagcgttgcccgtccgctgacgatgtcagagatggtggtgatgtttggctacgtctaccgccagtcgagaccctgtcgccttgccagtgaaatgggtattcacacgaagacggtgaatacctttctgtatacgggaatggcgaaaaacgggctgtatggtgtgagcgtaaagcagattgcctgtgcggagtga

SEQ ID NO: 36762 - DNA, 219 bp, Escherichia coli
atgtaccgccataaaggcatcctctttcaggctacgaggatattgcaatcacccgaaggcgttcctctcagactgctggaacattggctggtcgccggagcgacatgtgatcacccgaaggcgtccctctcagatcaccgggacattggatggtcgccggagcgacagttaatgcagatgcaggttaacaaaaagagaaatctgccgtcaaccatatga

SEQ ID NO: 36763 - DNA, 906 bp, Escherichia coli
gtgtccagacgtgagaagttgcttaaaaaggatctggttgctcatgtccgaaaagaaaagggcagttttaaaaagttgagcgactatagcaggatcatgcatcggtttgctgaaacgcttgcgcgacttaatgtacagattagttctgcttcacaattaaaagttcgacatattgaattatatatgaacagcaggactaatgtttcaaaacgtacgagagaaaatgaaatgtctgcgatacgtgctgttttacgtcaggttggtaaaaataaactggcagaaccgagtcatcctcgtctcagtaataaagcgttaggtatttcaggtgaaagtcgtaaaggcactaaaacgatgattacagatgagcgtttcagggaaattcttcagcgtattgaagaaaaagataaaggcatagcagctgcagttaagttgtcacgttatctcggactgagaaatgaagaggctatccagtcagctaaatcgcttaacacatggaaaaaagcgttagagcgtggagatgacaaattacgcgttattttcggtacgaaaggtggtcgtgagcgaatgacgacagttgtggacaaaaataaggtgattgaagcagttaattatgccattaagtatgccagtgaacatgatgggcgtttaatcgacaggggtaatcttaaatctgcaatgaattattatcttaacacattacgtcgctatggtgaaatgaaaggtggtgatgaaacgcctcatagttttcgttacagttatgctgcaagtgcaatgaaataccatattatgaatggttatagttatcacgaggcacttgcattaacatctattgaccttggacatggggatggaagagggcgttacattgaacaggtatattgtcagttattaggacatgatgagtga

SEQ ID NO: 36764 - DNA, 294 bp, Escherichia coli
atgggtgattatatttatatggcaatcatttctgttgaggatattacagataataacccgttttggtcttattatattgattcttatgtctattctggttatctggtgaaatttaaatgtataggggagacccatgaatgggatatatgtgaggctattgctgatcattttgatatcgtcggtgacttttcttttgatgtcgtgcgtaagggaaaacgaagatttatgaaaggctgttgcgtatttctgtgcgaacgttccgattctggaacctataaaataccgctttactga

SEQ ID NO: 36765 - DNA, 129 bp, Escherichia coli
atgagtcatgccgatatgagcgactctagcggctttaacgaggccactgcagcattttcatggaacggcccgaaaaaggccataaaccctgaaccgccccgggtttcctggagagtgttttatctgtga

SEQ ID NO: 36766 - DNA, 249 bp, Escherichia coli
atgagcaacgacatttcaattcgtgtaccaaaagtgatggcgacccctgcagagttcgcggaatgggaaggccgatctcgtggttcggtatatcaaatgattcacaatggtaaacttgctaagtttttggaaaaaaaggaaaaatcgaaagacagagtatgtatacgttaccttgagtacaaaaaggaacaagtcaggaaaaacatgggccaatccaatttcaactttaatgtcatcgttggtgactaa

SEQ ID NO: 36767 - DNA, 1116 bp, Escherichia coli
atgccaccttttaaacctaaaggtgacatcgtttctgattttaactctcgctgcaatgaataccttaaatttttaaatgaatttaaaattaaaaacaaaaccaggcttaatattgatctgctaataaagcgagtattaaaaatacaactaggaataaccgagagccttcaagagtttttagcgggtgacatcaaagaggcatatgatattttcgatgacactttttcagacaatcttattaataagcatattcaaagaatcacaatcccccttaaggaaatatgtaattatgatcaaccactctatagagtacgcaaatcagacaagccattacttaacagggaagatattttccatataccattttcctgccgacaccttgtcagtgctcaacgttactcagtagcgggactcccctgtttatatctaggttcatctctatatgtatgctggcaagaaatggacaaaccagattttgataaactatatatatcctcattcatatcacaagatactaaatctaaaatccttaactttgttccacaactgaaaacctcaatcaatactaaagaatggagcagcgaagagttaagaacaaataattatatcaaagcttcgtatttggttctctggcccttaattttctcatgtagctatataaaaacacatgaaaactcaagttttacgcaagaatatataatacctaatttactcatgcagtggataagcacacggggtcaatctccaatatctggcatagcctattcatcaacgaaaatgaaaaaaagtctaggttcaaaactttcaataaatgttgtattaccccccaaagccacatatagacaaacgactcaaaaagatttttgcccaaggttgtcatcattatttgattttactccacctgtttcatggcaggttttaaaaacattagagtatcagaatgcaatccctaaaacatctgagcaggggaaagctatcagatttcttgctcgaaaagaaaggctatctggcattactgattttgatagtgacataatcagactttacccattaactgacttttataaactggaagtttgtatggatcgcttatttgattattcacctattagatag

SEQ ID NO: 36768 - DNA, 174 bp, Escherichia coli; identical to SEQ ID NO: 24696

SEQ ID NO: 36769 - DNA, 789 bp, Escherichia coli
atgaacgtttcatttactgaacaggtgcagaggaatatgccgcaatgggcgaatgaacctttacgggcatgggatgcggcagagtttgcggcaatgtcggattttattacggaacactactggacggggcagggcagcatcaatgtgttccgcattgtggggacagaccatccacagtatgccggaatgagctggctggagttgctggagcgcggtaagcgtatggatatcaatatcccgttggtggagaagaacccggggtattacacgcaggcagaacaactgcatgccgggatgagttttgtcagcacggatggcattcactggtatgtcagtgctgatggtaatcaccgcagttgtctggcccgctttctgtttcacctgcagggagaggagcgcacacagcttcacaacgtggcccagagcatttatcacgcagaccgggcgttctggtctgcctgtcgggaaattcacaatctggctgatgttctctcccggcatggtgtgtatcttcgtctgcagacccggcggcagagtgtttcccgcgaagacctggcctgctggaaagtggaccgtttcagaacagaggctcagctgacagtggatgacggacgggctggcggacatgcgtctgcggagtataaggcattgttactgaatgcagcagacgcatggcgggaggtgaggagattgcagaacagagctgaggcgttgtcagcgtcaccggagacagatatcccccgctcatggtggctgcgtcttttacagcgaggacgcggacatgagtaa

SEQ ID NO: 36770 - DNA, 612 bp, Escherichia coli
ttgaattccgcctacagttacgataatgaaggtaatcaacaaataaactatggcatcagtggtgctcttgttgtacatgaaaatggtcttacgttgagtcaaccattaggtgaaactaatgttttgataaaagcgcctggagcgaataatgtggatgttcagcgggggacaggaatatccactgactggcgtggatatgcagttgttccttatgcaacagaatatagacgtaataatatttcattagatcctatgtcaatgaatatgcatactgaactggatatcacttccactgaagttattccgggaaaaggtgcgttagttcgtgcagagtttgctgctcatatcggtattcgtggtttgttcacagttcgttatcgtaataaatcagtcccattcggtgctacagccagcgcacagattaaaaatagtagtcaaattaccgggattgtcggcgataatggacaactttatctctcaggattgcctttagaaggtgttattaatatccagtggggagacggtgttcagcaaaaatgtcaggctaattacaagctccctgaaacagaactggataatcctgttagctatgcaactctggagtgccgctaa

SEQ ID NO: 36771 - DNA, 1089 bp, Escherichia coli
atgcgtatacatacttattggtatagaagatgtttcattttattgattattatattttcaaatgttctttcttctattgctaatgctgaagatatggggcgagaacgtgcatattgttatccgggttcaccgagtaataatactacgcctgcatccttttcttataattttggtactatagtggtttctgatgtcaacaaaaatgcgcctggcactgtattgccatcacaaatctggaaggttggaacctataaggcttattgtaattctcttgatgattatgaaatttacttcagtgctgtctctggaatagatccgtctggtgccagtggtgatcatcaagggagtgatgtatttattccactcacccatgaaatatctgtctctactcatataaaactttataatcaaaatggcacaatgacagataaaattgtgccattcgaaaattataataccaattatccgggggacagaagcaaaccatctaattgggcatcaggtactgaaggatatattaaaatcaggattgataaaaaaattatatctgatgtttcattaagtaacgtattattggtgtcattatatgtcagccagatccctaccgaacatggtcctatccctgtctttaatgcctacataggaaacttaaatattcaggttccgcaaggttgcactattaatgagggtacgagttttactgttaatatgccggatgtgtgggccagtgaattgagccgggctggtgccggagcgaagcccgctggtgttactcctgtagcaacaactattccgattaattgtacgaataaagatacagatgcggtaatgacgttggtattcgacggtaacatttccgccacacgtgataccaatgggaaacaaagtattattcaggcacaagataatcctgatgttggtattatgattatggatagtcagcaaaactccgtagatttaaatgccctggcaacatcagtaggcgttccgttcagattggtggaaaaccaggctgcttctgcgcaaactgctgatgttacttttctgactttacctgttagggaaggtgcgaacaagttcctgatatga

SEQ ID NO: 36772 - DNA, 279 bp, Escherichia coli; identical to SEQ ID NO: 36725

SEQ ID NO: 36773 - DNA, 3966 bp, Escherichia coli
atgaataaaatatactctcttaaatactgtcatatcactggaggattaattgctgtttctgaactatcaggcagagtatcattcagaacatcagccaagaagaaaaagaataagctcatgcttatattatgttgtttaggaatattaagcccaacatacgcctttgcttctcgcatggatgcatctaatttttacatccgtgactacctggattttgcgcaaaacaaaggcatatttcaggttggcgcaacaaatattgaaataataaaaaaagatggaagtaaactaaaacttccggaggtaccgtttcctgacttctcccctgtagcaaataaaggctcaaccacatctattggtggagcatacagtatcactgctacacataataaaaaaacccaccactccgttgcagcacaaaactggggaaactctacatacaaacaggtagactggtacacttcacaaccagattttgctgtatcccgacttgataagtatgttgttgaaaccagaggggctacagacggcgcagatacgtcgttatcaacacagcaggcactcgaacgttatggtgttaattataaaggcgagaagaaacttattgcattcagagtcggctcaggaaaaattgggattagaaaagatggaagtttaacacctctgaatgatatctcgtataagcctgaaatgttaaatggttctttcgttcatattgatgaatggagtggatggttagtattaaccaacaaccagtttgatgagtttaataaccttgtaactcagggtgacagtggctctgcgctttttgtatatgataaccaaaagaaaaagtgggttgtcgttggtactgcgtggggggtttataactattccaatggaaaaaaccacacagcatatagcaaatggaaccagaaagccattgataatctgaaaaagaacttttcttacaatgtggatatgtcaggagtacagcaagtcaccattgaaaatggaaaactgacaggcgttggctcagacaccaccgatataaaaaataaggacttaatatttacaggcggtggagacatcctcctgaaatcctcttttgataatggtgctggcggtcttgtctttaatgataaaaagacctatcaagtaaacgggggcaatttcacctttaaaggtgccggtgttgatacaagaaacggcagcaccgttgagtggaatatccggtatgataataaagacaaccttcacaagattggtgatggtacattagatgtccgaaaatcccagaacaccaacctcaaaataggtgaaggtctggttattcttggtgctgaaaaaacgttcaacaatatctatatggccagtggcgatggtaccgttaagctgaatgccaataacgcactgaacggtggtgattatgccggagttttctttactgaaaatggaggaacccttgatctaaatggttatgaccagatatttaagtatatagccgcaacagattcaggaacaacgattacaaacacgaataaagacaagatagccactttatctataaataatacagattcctatatttaccatggcaatatcacgggcaatacaaaaattatacattcattcgaccagaaacaacagaatgatcgtctgattctggatggtaatatcaatacgataaatgatataagtataaaaaatgctcacttagtgatgcaagggcatgctacaaatcatgctgtattcagggatggcggattttcctgttcatttcccgcccagttaaaatggttatgtggtacagattatgtcgcagtaatccagaatcaggaaaaatcggttaatcaaaaacaaaatacagactacaaaactaataacctggtctccgatttgtctcagcctgactgggaaaggagaacatttaacttcggcacccttcatcttgaaaatgcggattttgctgttgcacgcaatgctgacgtgaaaggtaatatttatgcaaaaaactccagcgtaatgcttggtagtgatatcgcttatattgaccttcattcaggaaaaaacatcattaatgatggattttccttccgtaaggatattcgatccggaatatcagaaagtacagcaggggatttaagttcattcaccggacgtgttgttgctgataattcaacgctcgctattaacaataagttcttgggagagtttacggcagggaataagagtaaagtttctgttaaaagccgagatgtggtccttaatactggtgccacaatttcagatgacagtactctgactctggaaaaagactcacgactgacggttaatatgtggctggtgaactcaggcacaattaacgttggtgaaaatgcggagttgaatattcatggatatccgattgctgataaattcattccatcaatacatgacctggggaatgtaaaaatgacggcgtcaaatgccaccctgacggcaggtaattatgcaatgttcagcggtgagatcactgccgatgacgccactgctgtcagagttaacttgggctcagagacatcgacactctctgaatttaatcctaatccggaactgaccgacctgatgtttgataaatataatacatcatggaccggcaaaatctctgccctgaaaggtgatgcgtcaatggttaataccgtatggcgtatgacgggagattccgggcttaataccctcaaaaccagcaaatccctgacagtattcagcagtgataataaattctccacgctgacagttaatgacctgacaaccagtgacagcacctttgtgctgcgttctgactctacaggctctgataaggtggtagtgaaaaacaaacttgagggtaaaaacaataatcttcttgttgattatgttgcaaatgatgggaaatataattcgctaaatcttgaactggtcagtgcaccgaaaggaactgctgccgatgtctttaattctcaaacacaaaatgtgggcttcagtgatgtaacaccggtgattgaacagaaggatagcggtgagaaaaccacatggaccctgaagggattcaatgctgtagccaatcagcagtcaactgaaaaagcggaaaatttcatgtcagcaggctataaaaattttcttgctgaagtcaacaacctgaacaaacgtatgggtgacctgcgtgacatcaacggcgaagccggtgcatgggcacgcatcatgagcggtaccggctctgccagtggtggtttcagtgacaactacacgcacgttcaggtcggggtcgacaaaaaacatgagctggatggactggatttgtttaccggtttcactgtcacacacactgacagcagtgcctccgccgatattttcagcggtaaaacgaagtccgtggggactggcctgtatgcttccgctatgtttgattccggtgcctatatcgacctgattggcaagtatgttcaccatgataatgagtacaccgcaacctttgccggactcggaacccgtgattacagcacgcattcatggtatgccggtgcagaagcgggttaccgctatcatgtcactgaggatgcctggattgagccacaggctgagctggtttacggtgctgtatccggtaaacagtttgcatggaaggaccagggaatgaatctgtccatgaaggacaaggactacaatccgctgattggccgaactggtgtggatgtgggtaaatccttctctggtaaggactggaaagtgacagcccgtgccggtctgggttaccagttcgacctgctggctaacggcgaaaccgtattgcgggatgcatctggtgaaaaacgcatcaaaggtgaaaaggacagccgtatgctgatgtccgttggcctgaatgcagaaatcagggacaacgtccgctttggactggagtttgagaaatccgcctttggtaagtacaacgttgataatgcagtcaacgctaacttccgttactcgttctga

SEQ ID NO: 36774 - DNA, 135 bp, Escherichia coli
atgaaaatactggcagccagaaaagcggtataccagctggcacgcgagcagcatcctgaacgttggggcaagcatctacgtaactgggactacatatcagaagtctacctgaatccagaaaaagaggctgcataa

SEQ ID NO: 36775 - DNA, 933 bp, Escherichia coli
atggggggggtacctccactgacaccggttattttatattataaatatgatcttattttcttgccaaaaacaagtatatctgcattgaatctatttattataactttatttttcgcattgctatttaagcaaagcacaaataacagaaatagaatcctctttattttattatgcataattttatgttctaactctaacttaccccctaagcctgataaaaaaaaagtggcggtgattcaggttgggctttactttaaacaaggagggcatcatgatacgctctataacgatcttaagttatttttaagcaaaaataatgttgatatagttgtgttttctgaaaacgtatactacggctataagaatcattatatagcagagcgaactagacaacttataaaaaaaatagagcaagacaagctttttactaaacacccacttttattaagcttttatggctatgagtatataaataatgttgttgcagtatattggtctcaacaagatatgattttaagacaaaaagaaatactaattcctttctttgaaaaaggagtatttggagaggagtattcccttatatcagatagattgaatcaacccaaaagcaaaaacaaacatggctacttcactatgaataatatccgtataaatgccagaatatgttatgatgcattattccccagcattagtaaaacatatcccggtctaacaataatccagtcggattattcatggctaaataacgggagtgcatacaaaaacaccattctaaacgggagcatactatccaagttttctgtcaacatccatagcccattaattaatatacagaattatggaggcactatcgtgattagtgacgactggaaaatcaattgggacgtttacaacaagtctctttatatgccatttatagttattgaaatttaa

SEQ ID NO: 36776 - DNA, 1200 bp, Escherichia coli
ttgaatatatttaagtttgtatgcgcgttaattttattgcctataacctcttttgctaaatgtgaactggatactttttttcagcgctcaagtgaatatatagcatatcagattgataaagaaaataatgagatttcttcccaagatagcaaactatcattacttcctgatatctctgtaggggttgggcagtatataaataacggtaagggattagtaccatttgaaaaaagtaacctatttatatctatttctcatgacctattgtccacttatcggtactttagtattgcagaaaaaattaggataaagaacatgctaattgataacggaataaatcaaaagagaaatgaatatattttaactctttattcagagttgttaaatttagagttcaagaaatacgaaattgacttaatcaacaataggttaaacaagagtaaaatagagctagcaaaaactaataatgactaccatttaggcatggtgtcaaaaataactgtcgatacaaaaatacaaaatataaaaaaaatagagttaaagaagaaagaattagaaataaatagagacgccatgcaaaccaggatatcaaagcgtttttttattcctgaaaacatggttaactcaataaactcagatgttattcttacatgtaagaaaaaaacgattcaagatttatcaaaaaaagataccttcttaaaatttaaggattctttagcagatgagcacatgataaaaacatcaagactaccttctgtttatatttcctttaacatctcacctaaaaattctggtgcattagaaaactttagttttaagaaggctgactatagcgcaaacataggattaactgtacctctaggctcttttatctcatcgtataataatgagaaaagaagttatattgagatgatgaagaaccaagaaaatcatataaaaaacacacgggatattgatattcagaaagacgacttgcgagaaagaatatcaacacttaaacttgtatctgatagcatcagacacgatataacagcgcaggagttaaaaataaaatatatagaaaacacccccaagcaaagttacggtgatttattagcatatattcatgcacaggatgaactttatgaattacaaacagctcttaaaaaaaatgaagctgaaaccatgtattatacgatatatattgattttttctcttag

SEQ ID NO: 36777 - DNA, 1062 bp, Escherichia coli
atgctttcctttcttttttttatatccataagcttttccggtattattattgtggactcattgatttatagcgtatcattaaaggcagagaaggagttgaacatttatggggaaaatgctgttaatattaaatttacaccaccagtagaccaagtgagaatagatattgcgttaaggaaatattataaagacatttcattctcaaaagattatatttttttttctggacgttcaccatattctgataacacattgcttataacgggcatcgatcttaatggcattagaacaaagtaccctaaaaaaaacattaaaacctttaacaaaaacgtaattatccatgatgacgataatctaaaaaaggatagtcaattttttttgtctgggattccatttaaaattcttttttatcaagaaaaagaacaaacagattttttaaacagtcttggtgttgggggagaaagtagaaataactattttattccacttgatactgtacaccgactaacgaatagtaacaccattgatgctgttcaagttcttttacataagagaattgaagaaaatgacatacaagacataaaaaaaatattagaaaatatatcatttgttgattacaacatctatacatcgttaaatgcaagggagacagtagacaacgtaattaaaagatttgctttacttacaaacctaatttatataatacttatcatatctgccattctgtctggtattattatttgcaagcgtaatttttcatcaagaaaaacagagtttgcattaaaaataattcatggaataaagcagcataatatactttttattgttgttatagaaacagtagttgtattgttaggtgcattgtttgtatcgcttttactttcatcattatcaataaaaatacttacaggcattttaaatactgaacttcatattagatataacatggttacaatgtctacattgcttgtgtttatttcatgcttagtggcaaatgtggcatatggaagatcttttttcaagaaaaatccgattgacataattaaaggatacgtgacttga

SEQ ID NO: 36778 - DNA, 1473 bp, Escherichia coli
atggataaagtcactgataattctccagatgtggagagcacagaatctactgaggggtcattcccaactgttggggttgatactggcgatacgattacagcgacgcttgcaactggaactgaaaatgttggtggaggcggtggagcatttggtggggccagtgaaagttctgctgcgatacatgcaaccgctaaatggtctaccgcgcagttgaaaaaacatcaggctgaacaggctgcccgtgctgctgcggctgaggcagcattggcaaaagcgaaatctcagcgtgatgccctgactcaacgtctcaaggatattgttaatgacgctttacgtgctaatgccgctcgtagtccatcagtaactgaccttgctcatgccaataatatggcaatgcaggcagaggctgagcgtttgcgccttgcgaaggcagagcaaaaagcccgtgaagaagctgaagcagcagaaaaagcgctccgggaagcagaacgccaacgtgatgagattgcccgccaacaggctgaaaccgcgcatttgttagcaatggcggaggcagcagaggctgagaaaaatcgacaggattctcttgatgaagagcatcgggctgtggaagtggcagagaagaagctggctgaggctaaagctgaactggcgaaggccgaaagcgatgtacagagtaagcaagcgattgtttccagagttgcaggggagcttgaaaacgctcaaaaaagtgttgatgtgaaggttactggatttcctggatggcgtgatgttcagaaaaaactggagagacaattgcaggataagaagaatgaatattcgtcagtgacgaatgctcttaattctgcggttagcattagagatgctaaaaaaacagatgttcagaatgctgagataaaattaaaagaagctaaggatgctcttgagaagagtcaggtaaaagactctgttgatactatggttgggttttatcaatatataaccgaacaatatggggaaaaatattccagaatagctcaggatttagctgaaaaggcgaagggtagtaaatttagtagtgttgatgaagctcttgctgcatttgaaaagtataaaaatgtactggataagaaaatcagtaaggttgatcgggatgctatttttaatgcgttagagtctgttaattatgatgagttatctaagaatttaacgaagatatcaaagtcgcttaaaatcactagtcgagtatcttttctatatgatgttggttctgattttaaaaatgcaatagaaactggtaactggcgacctttgtttgtcacgctggagaaaagtgcggtcgatgtaggtgtggcaaaaattgtggcattaatgtttagttttattgttggtgtgcctcttggtttctgggggattgcaattgtcacaggtattgtttcttcttacataggggatgatgagttgaacaaacttaatgagttgttagggatttaa

SEQ ID NO: 36779 - DNA, 777 bp, Escherichia coli
atgagtgaccaacccgttctgttcagcagagcggcggcttcttgccgcctgacattgaaccgtgaagataaatgtcatgctattaatgaagaaatgatcgaatctctcgaccattatttaaatgaaattgaaaacgacaccacattacgattagtcgaattaacggcaaccggcgataaattcttttgtgcgggcggcgatattaaatcgtggtcggcctattcgccattagatatgggcagaaaatggattaaacgcggtaacgaggtttttaatcgcctgcgcaatttaccccaattaacggttgcaaatctcaacggtcataccattggcggtgggattgaactcgccttgtgctgtgatattcgtatcgctcgcccccacgcaaaattctctaatcctgaagtgatgctcggcatggtgcctggctggatgggcattgaacgcgtgcttaatcaggttggcccggtggtcggtcgccagatgctgatgctgggtaaacgcctgacggcgcaggaagctcaggcggcgaatttaattgatgaagtggtagaaaaagaacaggtggaaagctggatggcgaaccagttagcgcagctggaaaaatgtggtccggtggcactggcacacattaagcaactgattctggcgctggaaaataaacacgccgattactcccaccagttactggctggattaatgtccgccactcaggattgccaacaggcgacgcacgcatttgccgaaaaagccggcgtgagcttccacaatcaataa

SEQ ID NO: 36780 - DNA, 303 bp, Escherichia coli
atgacgatcacaaaacaacgtgtagaaaaaatcatatatcgccatgaaatgggactgaacagcgatgtcactgccgaagaggtttatgacctggctgtactggcgctgaatttatcaaatatcgcaaacctgaagcgatacgagcttgatatggatggttgcgactcgtgcggtcaggattgtggcgcagatatgactgaagatcctgatggtgattatgtcctgtttgatgacgtggttaagttgtttgagcttgatacattcgaaagcccagcaaaggaggcaaccagtgagcaagattga

SEQ ID NO: 36781 - DNA, 489 bp, Escherichia coli; identical to SEQ ID NO: 33681

SEQ ID NO: 36782 - DNA, 192 bp, Escherichia coli
atgtttaatgaagaaaaagttgcgcaaatggcagcgtatttgctgaaaaagcatggcggatctatgcgtttcattaagctgatgaagctgatgtatctctctgaccgcaaagcaatggagtctttaaccgggaaggggagaggtttgaatgctcccccacaattccccggcatcaaatctccatgcaggtga

SEQ ID NO: 36783 - DNA, 1431 bp, Escherichia coli
atgggtgaccttgagggccagcagaaggaaatggatcgtcttgtgtcgctggcgaagggcggatggaaaggccagagtatcggtgcatggcattcgttcctgaacctggtcgaggatgccaacggcgcggttgaaaacgctctgcgtctttctgcctataaacacgcccgtgatgccggtttgtcacgccagcaggcggcgtctcttgccaaaaacatgacggtgaactttaaccgtcgtggtgagcaggggatgctgatgaactcgctgtacatgtttgccaacgccagcattcaggggaccgcaaacctggtgagaacgctcggacatcttaatggcgacgggccgttactggagcgccttcgctggaagaatctcaatgtaccgcagaaaatcgtgcttgcagctgtgggagcgggttatctgcttggctcgcttaaccgcagtgtggcgggtgaggatgatgacggggttaactggtacgacaaagtaccgtctcatgtgaaagagcgtaacctcgtcatcatgaaatcgatgttcgggggcaaggccggtgagtactggagtattcctctgccttacgggtacaacgtgttcttcctgcttggtcatacagctgaaggtgtggcagcgggcgacctgactgcttcacgtgctgccggtaatgttgtcggcggtatcctgggggcattcagcccgatcggcagcgagacgtcggaaacgttgtcgggggcattgctgaaaaatgcagcaccgacaattctgcgtccgtttgcgaatcttgccatgaacgaaaacttcatgggggcgcagatttaccaggagaacatgccgtttggtacaccaaaacctgacagccagctgggaagacgttcaacgccagaagcgtacaaggcgtttgcattctggctgaatgcgttctcaggtggcagccagtatcgtcccggcgcggtggatatcacaccggaatcgctgaaattctggattgactatatctccggagggacagggcgcttcatttccaaaaccacggatgcggcggtgaaatcgctgaatggtattgatataccggaacagcaggtgcccttcctggggaaaatttcgggtgaggtgatgccgtatgcagaccagcagaagatgtacgaccggatgacagaggttgcgcagtatcacgcagagctgaagagtctgaccggtgcagaaagaacggcgttcattgacgagaacaacggaaaattgttgatgaacgggcttatgcaggatacccggaagagactgaaggatttgcgcaaacagcgcgatgccatttatgccgacagttctctcagtctggcgcagcaggcggcgatggtgaaatcggtagagcgggatatgaaggttgccgtggatcggtttaaccgcgagtacaacaaaaaagtgggagtggattaa

SEQ ID NO: 36784 - DNA, 279 bp, Escherichia coli
atgccggcagagcagcggcttgctgaacgtcagcgaaaaacgaaaccgctgttgaaatccctggaaagctggttgcgtgaaaagatgaagaccctgttcttcggctctggccatggtggtgagcggggagcgctactgtacagcctgatcgggacgtgcaaactgaatgacgtggatccagaaagctaccttcgccatgtgcttggcgtcatagcagactggccggtcaaccgggtcagcgaactgcttccgtggcgcatagcactgccagctgaataa

SEQ ID NO: 36785 - DNA, 276 bp, Escherichia coli
atgctgcatgcagtgaatacgcagcatggtctccagcggatagggccgtcggccattgcccgccttgggataaaacggctcgatgacagcggtcatattctgccatggcagaatctgctccatgcgggagaggaaaatctcttttcgggtctgacggcgcttagtgctgaattcactatcggcgaaggtgagttgatggctcatgatgtccctctgggatgcgctccggatgaatatgatgatctcatatcaggaacttgttcgcaccttccctag

SEQ ID NO: 36786 - DNA, 1053 bp, Escherichia coli
atgaatcttcaacaacgtataaataaactaccacaattatcatccagtttttcatttggaaaagatattgataatattcattcatttatctttaacgaaacttctaaagataaaattgaagatttactaagaaaatgggtgtcaggtaatcagccatgtgtatttggtaaattggcaagcaagaaaattaaagggcttgatttccatttatctattgtaaatagcccccaactatataatgatgatggtcatttgtttgattttttgcgtaatgaaagagttagttttaaagaacgcgcaagaagaggagaagtcagtgcgcatctcatttattttattcatccacaacttgcctctgctcgtccatcagaggagttagtggatatacaaaaatatatttgttcgctgcatatgccagagtgctatccaataaaagaggatgttatttatactgaaagcgtaccatttcaggataaagatgggctaaaaatatataaggctggtgttaatgttttttactcttctgctcatagaacaagaaatcatgatagaagaataccggggggaatacttatttctgtaaatgcccctgggcattttatgaggctggcgatagaaaaaggtttctataaagatcaagaacaagcgttagcggatattcgtaacatgactattcagtctgttggtaaaggtgggtattcacatccggaagggatttctacaacatggcattcagaatctaaattggatcgttttggatgcccagtgcacaccggtaatagttcttattacagcggtttttatcatactgatgtattaattccaggagaattaactaaggatggaagattgctccatgaaatagataatagcgatccaatgatcttcaactggaatgtattgttttatgtttcattagaagagtttcctatagatgatccttattatagagagtttcttggtattcctgtagatgatgcttctatgttttttaactccttccagccaaggaaatttgaaaacaaacctctttatgagaaagggaatggttaa

SEQ ID NO: 36787 - DNA, 570 bp, Escherichia coli
atgacctacaaatacaaccccttctggcagcaacgtattcgtgagacggtgcggcacgcactggatgttcatccccgcctgacggcacttcgggttgatctgcgtctcccggatgtgccggcagcaacggacgcagctgtgatatcccgcttcatcaatgccctgaaagcccgaatcgacgcttaccagaaacgtaagcatcgggaaggtaaacgcgtgcatcccacaaccctgcattacgtctgggcccgggagtttggggagtgcaaaggtaaaaaacactatcacctgatgctgctggtcaaccgggatacctggtgtcgtgccggtgattaccgcgctccggagtctctcgccgggatgattaaacaggcgtggtgcagtgccctgggagtggatgtcgggtgccatgccacgctggtgcattttccggcctggccggcggtgtggctggcgcgtaatgatgacaccggctttcagcaagtgctggaacgtgctgactatctggcgaaggagcataccaaagctcactgcaccggtgagcgcaattttggctgtagccggagttga

SEQ ID NO: 36788 - DNA, 447 bp, Escherichia coli
atggagtacggtaaatacgaaacacttgcgagatacggttataccggagcagcccgccctcagggggactggcagacatccgcagcgctgacccgccagcaatacgacgactggcgcaccagatatttaccccgtgtagcaaggctggctgaccttggcgagaacaacagcctgatgaatgcacagcttgcccgggtgggcggccttgccacttccagtctccgtacagcgcagatggcgcaggataaccagatggcacgatatggcgttaaccgacctgataatcccaacagtaatacgctggggttacgtaatgccctggcaattgctggcgcgaaaaatggtatccgtgaagcagagcaggatcgtcagatgaacatactgacgggggcttctgcacctgcaagacagcaactgagtgttggcggacaactggtgtcagcgtaa

SEQ ID NO: 36789 - DNA, 252 bp, Escherichia coli
atgggatacggtttactggatattgcgaatcagtcacggcgtgaggcattacagggaataagtgacgcagaccgacgacgtgaagaaattgaggctgcgaacaaacagatggcggcgcagcagaaagcgcagaacaagcagaatatcggtacgggcattggtacgggggcggctattggcgcatccgttggtggtcctgttggcgctgttgctggtgcagtaattggcggcattgctggttctttgttttaa

SEQ ID NO: 36790 - DNA, 129 bp, Escherichia coli
atgaatatgatgatctcatatcaggaacttgttcgcaccttccttagtacagcattgatttatgtgctgaaaattgatttccatcgcaattattacgattgttattgcgtgctaacgctaatggtttga

SEQ ID NO: 36791 - DNA, 276 bp, Escherichia coli
atgctgcatgcagtgaatacgcagcatggtctccagcggatagggccgtcggccattgcccgccttgggataaaacggctcgatgacagcggtcatattctgccatggcagaatctgctccatgcgggagaggaaaatctcttttcgggtctgacggcgcttagtgctgaattcactatcggcgaaggtgagttgatggctcatgatgtccctctgggatgcgctccggatgaatatgatgatctcatatcaggaacttgttcgcaccttccataa

SEQ ID NO: 36792 - DNA, 276 bp, Escherichia coli
atgctgcatgcagtgaatacgcagcatggtctccagcgtatagggccgtcggccattgcccgccttgggataaaacggctcgatgacagcggtcatattctgccatggcagaatctgctccatgcgggagaggaaaatctcttttcgggtctgacggcgcttagtgctgaattcactatcggcgaaggtgagttgatggctcatgatgtccctctgggatgcgctccggatgaatatgatgatctcatatcaggaacttgttcgcaccttccctaa

SEQ ID NO: 36793 - DNA, 582 bp, Escherichia coli
gtgaagcagttcaccgttgccgcagtaaatggcggcatgattagccaccgatgcgccgaagcagcacagcaggatatcgcccggcagtgcagaggacaggggcacccggtaaaagcccgttgcctccatattgtccaggtaaaggttctgaccgttgcaccaccagtcatcctcacggtgaaaatccggcatatcaatgcctgccagatggtatgcatcccggaacagcgtgtaacagtccgtcaccccgtgcgcaaagcgccgtccggtcaggtgcggaacgcagcggaatttgtgaatgtcaccccggcagaccagccaccagggcagggcactttttatctgcagtcgccggtctgcctcactcagccagggcagaccaccgggatgactgtgaaccagcgccacaatctcaccctgcatctccgcccgcagccagtcttccggggcaatacgaaaatacgcctccggcgctgcggagatattcacacagggcaggtaccgctcgccctccgtcgtggttatcacgaagccgcacgactccgcaggcgcacaccgccgggtatgcgccagaatcgctga

SEQ ID NO: 36794 - DNA, 699 bp, Escherichia coli
atgcaggagatcaacgaagaaagcctgaatgagtcggttaaatcagagcagtcaccgcgggtggtactctgggaaattgacctgacggtgcagggtggtgagcggtattttttctgtaatgagctgaatgaaaaaggggagccggtcacctggcaggggcggaagtaccaggcatacccgattgacggcagcggctttgagatgaacgggaaagggagcagtgcccgcccgtcactgacggtgtcgaatctgttcgggctggttaccgggatggcggaggatttgcagagcctggtgggggccacggtggttcgtcgccgggtgtatgcgcgttttctggatgcggtgaattttgtggcaggcaatccggaggctgacccggagcaggagctgacggaccgctgggtggtggagcagatgtcgcagctcacagccatgacggcctcgtttgtgctggcgacaccgacggagacggacggtgcgttgtttcccggccgcatcatgctggcgaacacctgtatgtggacctaccgctctgatgagtgtggttacacgggcggggcggtggcggatgagttcgataaacccaccaccgatatccgtaaggacagatgcagcaagtgcatgcgcgggtgtgaactgcgcaggaatgtcggcaattttggcggtttcctttccattaataaactttcgcagtaa

SEQ ID NO: 36795 - DNA, 645 bp, Escherichia coli
atgaatatgatgatctcatatcaggaacttgttcgcaccttccctaaaaccatctgcgatcatctggcagtactacgcccggatgtctggttgatgattggtcactgtggtggcttacgtgaaagccaggccattggcgattatgtacttgcacatgcttatttacgcgatgatcacgttcttgatgcggttctgccgcccgatattcctattccaagcattgctgaagtgcaacgtgcgctttatgacgctaccaagttagtcagcggcaggcccggtgaggaagtcaaacagcggctgcgtacaggtactgtggtaaccacagatgacaggaactgggaattacgttactcagcttctgcacttcgttttaacttaagccgggccgtggcaattgatatggaaagtgcaaccattgccgcgcaaggatatcgtttccgcgtgccatacgggacactactgtgtgtttcagataaaccgttgcatggcgagattaaacttcccggccaggctaaccgtttttatgaaggcgctatttccgaacacctgcaaattggcattcgggcaatcgatttgctgcgcgcagaaggcgaccgactgcattcacgtaaattacgaacctttaatgagccgccgttccgataa

SEQ ID NO: 36796 - DNA, 519 bp, Escherichia coli
gtggcagaacgacctgaccagctgtgggtggctgattttacttacgtcagcacatggcagggcttcgtctatgtggcgttcatcattgatgtgtttgccggatacattgtggggtggcgggtctcatcgtccatggagacgacattcgtgctggatgcactggagcaggcgttatgggcccgtcgaccgtccggcacggtccatcacagtgataaaggttctcagtatgtatcgctggcctacacacagcggcttaaggaagccggattactggcatcaacaggaagtacaggcgactcgtatgacaacgcgatggcggagagcatcaatggtctttacaaagcggaggtaatacaccgtaagagctggaaaaaccgtgcagaagtggaactggccacactcacgtgggtggactggtataacaatcgacgattgctgggaaggctgggccatactcctccggcagaagcagaaaaagcttattatgcttccatcggaaacaatgatctggcagcctga

SEQ ID NO: 36797 - DNA, 516 bp, Escherichia coli
ttgccattcgtattgtggcaattgctgttctggtctgggcaatccgttggtggtgatatgaatcgtgtgctgtatggcgtgcttattgtcctgctgcttggttgtggatcgctgtggctggcaacagaccattaccgtgataacgccatcacctacaaagagcagcgagatgatgcgaagacaaaactcagccaggcgaacgccaccattgctgacatacagcagcgccagcgtgatgttgctgcactcgatgccagatacaccagggagcttgctgatgctaacgcgactattgaaagtctccgtgctgatgtttctgctgggcgtaagcgcctgcaagtcgccgccacctgtgcaaagtcaacgaccggagccagcggcatgggcgatggagaaagctcaggacttacagcagatgctgaactcaattattaccgtctccgaagtggaatcgacaagataaccgcgcaggttaactacctgcaggagtacatcaggatgcaatgcctcgattaa

SEQ ID NO: 36798 - DNA, 582 bp, Escherichia coli
atgttaaatcaaacgctaacaaaatctcttcttatatttttacttgtcataatcgtttctgtatccatcatatacattgtaagaactccagtcagacttgatgtgaacgatgtcactgagattaaccagaaacatcccattatttttctcatccggcatggggaaagatgcgatcgctcccaaagaatatgtctttcagcacatgagggaatcacagtaaacggagctaacaaagctcaacaatatggagataaattcagaagaatgtttccatactacagtctctattctacagacacactccgaacaatgcagacagccacttttttttcgggaggtaagacagcaactattccggacatatcgacatgtgatgataacgcagtaaataatatccttaaaatatcaaaatcagatcatgttactgtgattttcacacataatcactgtctgtccagaattgcaaaaaaaatgaatggatggagatttaaacctgattatatgggcacactggttctgcatcgggaaaatcacaatctgattctcgacggacatttaaaaccaaacgagcttacccagtga

SEQ ID NO: 36799 - DNA, 288 bp, Escherichia coli
atgttccaggggcgtcattttctgcaactggatgcggagttgctccgtgatggtgagcagataagtgatgccatacacaacggcgtctggacgtataacagtgctgcccgcccgctgacgatgtcagagatggtggtgatgttcggttatgtctaccgccagtcgagaccctgccgccttgccagtgagatgggtattaacacaaagacggtgaatacctttctgtatacgggaatggcaaaaaacggactgtatggtgtgagtgtcagacggcttgttggtgcctga

SEQ ID NO: 36800 - DNA, 495 bp, Escherichia coli
atggtgtcgcactggttcagtgccagtcagtggcagctaccggacgaaagtgattatctgaaattacaggcgctgtttgcccgggtggcagaagagaagcatcagcggggtgaactggaaaagccccaccaccagctgctggagacgtatacttcactgaaccggcagtatgcggaactgcagagtgaatataagcttctgcggcggtattttggcgtgacggcgcaggtgtcgtacacggatgtgtggacgcataaaccggtgcagtactatcccgggaaacatccgtgcgaaaaaccggcagaaatgctgcagcagataatcagtgcgagcagtcgtccgggtgacctggttgcagatttcttcatggggtcgggttcgacagtcaaagccgcgatggcgctggggcgtcgtgctacaggcgttgagctggagactgaacgttttgagcagacggtcagggaagttcaggatttagccagtcagaacggatga

SEQ ID NO: 36801 - DNA, 543 bp, Escherichia coli
atgctcatccgtcatcaacggcacaaagtgaatattctgcgcagctttgcctttatacccaccgtaaaccgcctcatacggcgctgcatacctttccttccagtagtacgtggtatcaccgcaaatccacgggacgctggccgttgtcccgccagtacactgctctgccacatctgccagttccgtacggaactgatttaccatggcaagaaaaagtgcattgtgctctgcatgtctccccgaactgacatctttttccccctgcatccagatcaccgacaacagcacgtttttcggatttttcttcagggctgcacgcgttctgctgaccaggtcataatacagcggtttatccgccccccacagggacgagcctgcggtcgctcccgacgctgcgttaaacgccccctcggcccccgcagtaaatcccgaatcgccacggccacatggaacaagaaggatacccgcattcgcaggcataaacggcagcagctttttggcaacatgcagagcatgccccacacaaccgtactgcccctttga

SEQ ID NO: 36802 - DNA, 1266 bp, Escherichia coli
atgtttaccaacgtaaacgttgattgttgcaaaacaccaggatgtaaaaacctggggttgctgaatagccaggattatgtcgcacagggtaaaaatattttatgccgtgaatgtggttacttgtttccagtgatatctgaacagtcgcttaatatttatcgtaatattgtgaatcactcctggagaggtttgatttgccaatgttcaacttgcggaggcacgtccctcaaaaaatatggatattctgcacaaggccagagaagaatgtattgccatcattgtgagaaaacatttatcactctggaacatgtaattaccacaccacgaggagcccagttagcattgatgattgagcaaggggaggcacttgcggatatcagaaagtcattacttcttaacagcactggacttagccgtgaactgttaaaattagcgcgtgaagcaaactataaagaaagtcgacagtgtttcccagcttctgatattaccctgagtacccgcgcttttcgcgtcaagtataatggtagcaataactctctttatgctcttgttaccgcagaagaacaaagcggcagggtggttgctatctcaaccaattactccccatctgccgtagagcaacattatcaatacacatcgaactatgaagagcgtatgtctccagggacgctggcacatcatgtccagcgcaaagagttacttactatgcggcgggataccttgtttgatattgattacggcccggcagttttacatcaaaacgatccgggaatgttggtaaaaccggttcttccggcatatcgtcattttgaactggtcagaatactgaccgatgagcattccaacaacgttcagcattaccttgatcacgaatgctttatattgggcggctgcctgatggctaatttgcagcatattcatcaaggtcgctgccatatttcctttgtcaaagagcgcggtgtggcacccgccaccattgattttccaccgcgattattccttagtggtggggtacgaaataatgtctggcgtgcattttctaaccgcaattattcaatggctgtatgcaatctcactggcagtaagaaagtccgcgagatgcggcatgcaacattgaacagtgcgacgcgttttatccactttgtggagaaccatcctttccttatatcattgaaccgaatgtctcctgcgaatgtcgtttctacattagatatcctcaaacatctgtggaataaaaaactagggaaggtgcgaacaagttcctga

SEQ ID NO: 36803 - DNA, 2148 bp, Escherichia coli
gtggatttcacactcgggtctcaggggctgcggcacacacccggtgacattattgaaatctgtgataatgactatgccgggaccctgaccggcggacgtgtcctgtccattgatgctgccacccgcaccctgacgctggaccgtgaagtgacacttccggggacaggtgccgccacggtgaacctgattaacggcagcggtaagccggtgagtgtggacatcaccgcacaccccgcgccggaccggatacaggtcagtaccctgcctgatggtgtggagacatacggggtgtggggactctccctgccgtcactgcgccgtcgcctgttccgctgtgtctccatccgggaaaacacggacggcacctttgccatcacggcagtgcagcacgtaccggaaaaagaagccatcgtggataacgggacccgctttgagccgcagtcaggcaccctgaacagcgttatcccaccggcagtacagcacctgacggtggaggtgagcgcggctgacagtcagtatctggcgctggcgaaatgggacacgccgagggtggtgaagggcgtgcgcttcagtctgcgcctgaccagtggaagcggtgagaacagccgcctgctgaccaccgccatcactgccggtacggagcaccgtttcagtggcctgcctctcggggaatacaccctgacggtcagggcgattaacagctatggccagcagggcgaacccgccaccaccacgttccggattaatgcgcctgcagcaccggccaccattgagctgacgccggggtattttcagataacggcggtaccgcgtcttgcggtgtatgacccgacggtgcagtttgagttctggttctcagaggagaaaatcgcagacacatctcaggtggaaacgtctgcccgttatctggggaccggcagccagtggagcgtctccggcagccagattaaacccgggaaagttttctggttttatgtgcgcagcgtcaacctggtgggtaaatccgcgtttgttgaagccagtggacgggccagtgatgatgctgcgggctatctggagtttttccgggaaaagataggaaaaacacatctggcagaggcgctgtgggcagagattgacaacagtcagctgaaggacgagatggcggaaatgcagaccaccatcacagaaacccgcaatgaaatcacgcagacggtcagtaaaacgctggaggaccagagcgccaccatacagcaaatccagcgtgtgcagacggacacccgtaatgacctgaacagcatgtgggcggtgaagctgcagaagatgcaggacggacgcctttatattgccggtattggtgcaggcattgagaacacccctgacggggtgcagagccagatactgctggcagcggaccgcgtggcattcattaacccggaaaatggtaacaccacaccggctctggtcacgcagggtggacagacctttatcaatgaggcgctgataaagacgctcaccgcccccaccattaccagcggcggcaatcccccggcattctccctgacgccggacggcaggctgacggcccgtaatgccgatatcagcgggacgataacggccagtgccggtacgctgaataacgtgacgattgcggaagactgcaccattaatggaacgatgagcgctgaccgaatcattggtgatatcgtcaagggatacacggttgatatggggcagggcgtaatgactcagaaccagctgacttttcagaaaatgattttgctgaaagacaacatgccgtttgatcgcaagcttatgcttatggcgtattcattttccagaggtgaattcatcatgaagataaatgacaaagttgtcgttcatgccaggtcaggcaaagtcaaaaccggggagcgggaggtccagatttccaaaaacgccagcagatatgagccggtatattctgatgttggcggaagtgcgtcaggctcatggggtattcctgccggacagggtgatgcgcgggttgaaattacattcaggtatgaagcaggtgtgcttttttacaggggtggttcaatacttcatgatacgagtcaaattcggatcccggacccggttctgttttacctgaaatcctatacagacgattttgataccgcatcgtga

SEQ ID NO: 36804 - DNA, 1509 bp, Escherichia coli
atgccccataaaccgacagaagaacagacggcaattattcactggcaggggaggaagcttgttgttaatgcttttgccggtacagggaaaaccagcacactggtcagctatgccatggcctgcccggagagcaggatgctctatctcgcctataatcgtgcgattcgtgatgaagctgagcgcaggtttccttttaacgttgaatgcaaaacgtcgcatcagctggcgtttgcccgcttcggaaggcattaccagaagcggcttgttccgggcttgttcgtcaccgatgtggcaagaaaactgaatacccgatactgggcactggcccgggtggccatgacagggctgaatcagtttatctgctcagcggatgcaacccccggcaggcagcatctgccggacaaggacgaaatgaaaggcgttgctccggatgaggcacttcgtgctgtgaggacgctctggcaggccatgagcgatccggatggaacgtttccggtcacccatgatacctatctcaaattgtttcagctctccggacctgatctctcgcgcagatgggacaccattctgtttgatgaagcgcaggatgcgaatccggtgacttccgctcttgtactgggacagcggtgcaggattgtgctggtcggtgaccggtatcagcagatctaccgttttcgtggcgcggatgatgccctgtctcatccgtctctggccggtgccgaccgtctctggctgacacagagttttcgttttggccccgcagtggccgcgatggctaatctgctgctgaaacgcgcaggggaaagtcgggaggtgagcggctgcggcggtgatgatgaggtgcttaccatgcaggaaatgcgtgagcgcatgaagcgtggaaaatttgggggacaccgggcggtactgaaccggaccgtcgccggagtgattggcacggcgctgatggcggcaatggcgggcaggaaggtttactgggtcgggggcattgagggataccgaacggaggcgcttgaagatctttactggttccagatggatatgccggcccggatgcactctgaccggttgcgcagggattaccggaattttgatgaataccgtcatattgcgaaggtgacgaaggatgtggaaatgaatcagtccatacgactgctggagctgtgttttccgttaccaaaaaaactggagctactcagggagcacacagtcacgaacgagcgggaggctgatatcacggtttcaacggcgcaccgcagtaaggggctggaatgggagcgggttgtactgggggatgattttcaggatatcgctgatccgctgatgtcagaacaggagcgccgggatgaaactaacctgttgtatgtggcggtgacccgggcacgcaggacgctggtactcaatgagctcatgcagcaactggcggaggaaaagagcaggacgaaggagaagacgacgtccccgcatgagcgtggcacagagaaggcggtggagggaaaggatgtttaa

SEQ ID NO: 36805 - DNA, 594 bp, Escherichia coli
gtgggccagcgcccccggtccgttaccttttgtcaggttgattgccacctcacccggctcatagtgtgccgccgccttacccttaccacgggcaccaaaagcaagcccaagacgaccgttcagagaaagcgcttttgtcggcacgttcagcacgtcagccaggtcatgcagcgagtcataagcccggttcaaatcagcctgacgacgcggactttccacataattaccaaactgcacaccacgaaaaccaaacgcatcactgaactgctccggcgaaacatcccccttgcggcgttctggtccggtacgatcgcggttggtggcgttacgctgctcctcacgcgagacttcacgcagcgccttcacctgattaaccagctcatcacgatgtgtgcgcacataatcatgtgcatcacgggcagactcaaaaccgcccttcagtttctgcctgtttttgccataaccgataaaaatgtcgccactggccttatgccggtacacgtcaaaggttattctgtcatcagcagaggttgctggcgtttccctttctctggagccttgttcatcgaaatatgctttcgcctttttcagtaa

SEQ ID NO: 36806 - DNA, 2631 bp, Escherichia coli
gtggagtacctggatgaggctcagtgtctgctgctggatgacggaatgtcggtaggggctgtttatgacgtgacgccggcggcgaccgaagggcgtacggaggaacgtcttgaacagatcagggacatggtggaggacgcactgcaggacagctttgatgagtatgacacgcatccctgggtggtgcagttcttctgccaggatgaaaatgacgtggatgcgtatcttgattatctgaaaggctatgtgaaacctcacgcgcagggaacggcgtttactgaagcctggctgggcgaaatggaatgccatttgcggggaattgcccgcccggaaggcttttttacagacacgctggttaccggtcagccgtggcggggacagcagcggagaacccgtatggtgatttatcgtcgtatcgcgaagaacaacagtgatccgatgccgccggtggccatgctgaatcaggtttgcgatcgcgttgtgtcggcactggggagcgccggggtgcgctgtcaccggatgaacggtctgcaggttcacagctggttactccggttatttaatccggcaccgtcctggattagccgggaggatttgtaccggatggcctcaagagctgatccccgtgagaacgatgcggatgttatgccggtgatgacggactttgcagaaagcctgtggtttaatccgccccattccgatccggagaacggggtgtggtggattgatgatctgccacattgtgccgtggtggtggagaagctccgtacgccaccggagccgggcgccattaccggtgagatgtcccggggagaaaaaacggtgaatgcgctgatggatacgtttccggaaggaacggtgctgtgcatgaccattgtggtacagccacaggacaccctggaggagcggtttacccggctgtcgaaaaatgccgtgggtgagaatacggagtccatccgggcacgtcaggatgtgaaggtggtgaaggagttgctgggtaaccggcataaactctatcgtgcggggatcaccttccttctgcgggccggtgatatggacagcctgaaacgtaaacgggtggagctgaccacggttctgctgggtgcaggcctgcagccggtgcgaccggagtttgatgtggggccgctgaacagctggctgcgtgcgctgccaatgtgctttgatccggatatggacaggaagcagtggcacacacgtctgatgtgggtacagcatctcgcagggcttctgccggtgaccggccgggaaacaggtacagggcatcccggcttcagtttttttaaccgcgggggagatgtcctgacgtttgatcccctgaacaaactggatcgtacccagaatgcccatctgttgctgttcgggcccacgggggcagggaagtctgccacgctgtgtgcctctctgtcacaggtgatggccgtgcatcgtccccggttgtttattgccgaggcgggtaactcgtttggtctgctggccgattactttgaaagtctcgggctttcagtgaacaaaatcagtgtcaaaccggggagcggtgtgacactgccgccctttgcggatgcgcataagctggttgaagaagggcagaccctgcagagtgtggatgagcactcgctgcccgatctggatggcgatgaagaggaggagaaacgcgacattctgggagaaatggaaatctctgccaggatgatgatcaccggcggtgatccgaaggaagaggcctcactcaaacgtgcggaccgggcgatgatccgtgaagcgctgctgatggccacacacgcgacgtaccgggaagggcggcagatgctgccggaagatttgcaggtggcactccgggaaatctcctgtgatgcgggacgtaacgaggtacgccgggcaaaggcggcagagatggcggaatcactgggaatgttcacccagaaagggagttttgaggcggagctgttcaaccgcgaaggcgaactgtggccggaagcggatgtgacgctgatagacctggggcacctggcccgtgaggggtatgaggcgcagatggcgctgacgatggtgtcaatgaccaatatgattaacaacatcgctgaacgtgaccagtatctggggcgtgatattgtgtttgccgtggatgaggcgcatatcgtgacggtgaatccgctgctctcgccctatatgacgaaggtggtgaaaatgtggcgtaagctgggagcctggctgtggcttgcgacgcagaacctgaaggactatccggatatatcagagaaaatgctgaacatggctgaatggtgggtgtgtctgacgatgccgccggaagaggtgaacaacattgcccgttttaaatccctgacggaggagcagaaggcggtgctgatgtcggcgagcaaactgtccggctgttatacggagggggttgtcctggcgaagaagattgaggcgctgttccgtgcggtgccaccgagtctttatctggcgctggggatgacggagaaggacgagaaggctgagcggcgcatgctgatgaaggaacataactgcagcgaactggaggctgcgttccatgtggcccgtaaactggacagactgcggggactttccgccgtggagagtgcggcatga

SEQ ID NO: 36807 - DNA, 387 bp, Escherichia coli
atgatgtatctgaaatatccggagccggagctgcagacagcggtacatccgggtggcgttgtgttttttttgccgccacagggtaagcccggggtgaccgagataacacagccgcatcttctgcggctgcgctcacaccttaatcgtcgtctgggcaggctgcgtcgtgttgtatgccagccccagcgggttggcatgaacagcagcgtggcggtgacgctggaaggtgataccggaaaggtctatctgcttgtttccgtgggtggtcatgaatgctggccgtcagaggaggagtatacgcatctgagatggtatatccaggttgttgatgcggccgatttgttctatctgctgttgtggctgaatggtatggaggcagaaaaataa

SEQ ID NO: 36808 - DNA, 216 bp, Escherichia coli
atgacggtcagatattatatcagttctgctgatttaaccgctgagaagtttgcgacagcgattcgaaatcactggcacgtggagaataagttgctctggcgtctggatgtagtaatgaatgaaagacgactgcaaaataggaagaggaaacgttcagggataagacatattgcaattaatattttgacgaaagataaggtattcaagcacggttaa

SEQ ID NO: 36809 - DNA, 807 bp, Escherichia coli
atgaagtcaacacattctaaaattaaaattgcacatgttcaattgatgccactactgagtggtgttcagcgagtatcgttacaagaattcgaattattaccaaatgaacagttcgacattaatttaatttgcaaagagagtggaccattaactgattatttagatgatagtgtaagggctttttttgtcccgacattatgtagaaatatatcgctcataaaggatatgaaatcattaatatctttatataaattattgaaaaaagaaaaatatgatatcgtccatacacactcctctaaaactggtattctagggcggatagctgcgcggctggcaggagttccttgtgtagtacatactgtacatggctttgcctttgaaagcacaaaaagaaaatcagtaaagctcgtttataaatggctggaaatatttgcagccaaatgcactacccgattaatttgtcttcataatgaagataaagaaatatgtataaaagaactatatgttgatccaatgaaaatttctgtaattccaaatggagttgatttggaaaaattcgctccagcaattaataaaggagacttaaaagaaaaaatattagggttaaaaagaaatagctttgtatttaccatggtgggacggttgtggccacaaaaaaatccgttatattttgctgaagcagcaaagtatattatagaaaataacttaatacctgattcagtttttgtcatagttggtgatggggagttgatgaatgatttaaaatacaattatcaaacagatatgacttttaggctggcgaaatga

SEQ ID NO: 36810 - DNA, 276 bp, Escherichia coli; identical to SEQ ID NO: 36734

SEQ ID NO: 36811 - DNA, 1701 bp, Escherichia coli
gtgaccctgaacaccggttcacagtgggataccaccaaaacttctctgattgatactctgagcatcaacagtggttcaactgttaatgttgctgattcaacgctgatttctgactctatctctctgactggtctttctgcgctgaacatcaacgaagatggtcatgttgcaactgattcactgactgtcgacaacagtaccgtaaccatttctgatgaagtttctgctggctgggctgtaggtgatgctgctctgtatgctaacaacatcaaagtgactaacgacggtatcctggatgtaggtaacactgcggcgaatgctctgcaggttgatactctgaacctgaccagcactactgataccagtggtaacattcacgcaggtgtgttcaacatcgaaagcaaccgcttcgtacttgatgcagacctgaccaacgaccgtaccaacgatactaccaagtcaaactacggttatggcttaatcgcaatgaactctgatggtcacctgaccattaacggtaacggcgataacgacaacactgcttctatcgaagctggtcagaacgaagttgataacaacggtgaccatgttgcagctgcaaccggtaactacaaagttcgtatcgacaacgctactggtgctggttctatcgctgactacaacggcaacgagctgatctacgtcaacgacaaaaacagcaacgcgaccttctctgctgctaacaaagctgacctgggtgcatacacctatcaggctgagcagcgtggtaacaccgttgttctgcaacagatggagctgaccgactacgctaacatggcgctgagcatcccgtctgcgaacaccaatatctggaacctggaacaagacaccgttggtactcgtctgaccaactctcgtcatggtctggctgataacggcggcgcatgggtaagctacttcggtggtaacttcaacggcgacaacggcaccatcaactatgatcaggatgttaacggcatcatggtcggtgttgataccaaaattgacggtaacaacgctaagtggatcgtcggtgcggctgcaggcttcgctaaaggtgatatgaatgaccgttctggtcaggtggatcaagacagccagactgcctacatctactcttctgctcacttcgcgaacaacgtctttgttgacggtagcttgagctactctcacttcaacaacgacctgtctgcaaccatgagcaacggtacttacgttgacggcagcaccaactccgacgcttggggctttggtttgaaagccagttacgacttcaaactgggtgatgcaggttacgtgactccttacggcagcgtttctggtctgttccagtctggtgatgattaccagctgagcaacgacatgaaagttgatggtcagtcttacgacagcatgcgttatgaactgggtgtagatgcaggttataccttcacctacagcgaagacctggctctgactccgtacttcaaactggcttacgtctacgacgactctaacaacgataacgatgtgaacggtgattccatcgataacggtactgaagggtctgcggtacgtgttggtctgggtactcagttcagcttcaccaagaacttcagcgcctataccgatgctaactacctcggtggtggtgacgtagatcaagactggtccgcgaatgtgggtgttaaatatacctggtaa

SEQ ID NO: 36812 - DNA, 645 bp, Escherichia coli
atggggaattctgtgacaccagaggtggaggtgctgagcaagatgattcgacagtacttcagtcaggaacaatctgaagagaaaaccatacaggccctgaaccatctccgctgcgtactccatgagatcagcccctttgctcaagaaccagtggactgtgtgctgtgggtaaaagcggatgaaattgtcgctaacgattataatcccaatgtcatggccccaagcgaaaaaaaattactgaaacaatctctggaaaaagacggttttactcaaccaattgttgtttcggaagaaacaagccattacctggtggtggatggttttcataggcagttactaggtagaagaacagttactggaaaacgcctgaaaggctggctaccagtaacctgtattaatccagaccgaaagggacaaacctcacgtattgccgcgactatccgacataacagagccagggggaaacaccagataacctcaatgtctgatattgtcagagatctttcacgtcttggctggactgatgaacgtatcggaacagaactggggatggaccaggatgaagttctgaggttaaagcagattagcgggctaacggagttatttcagcaggcagatttcagccctgcatggactgttacataa

SEQ ID NO: 36813 - DNA, 657 bp, Escherichia coli
atgggcggaaaaaaaggcggtggtgataccaaagtaaaaccaacagcagcgcaaatagcacaggaagaagtggcctggaaagggtggcaggattatcaaaaaatcctccgcccggctgaagataacttcatggaaaaggtcgataaccttaacagtgagcagcagtacgacaatattgctggcaccacaaatctggggtatcagaaacagtttggtgaagcgcgaagggagctggcgggtaatcttgctcagtccggcgttgacccatccagtggtcgttttaatgcagtaatggatgcaaatcaaagcgaccaggtgatcgggcagattgacatgaccacacgggggcaggtatcgcaggcagataaatatattgccgggctacaggatgttgcggctctcggttccggtcagaaggcagatgcgttacagagttttaactccttggctgacagcagtctggcaaaagccaaatcggatgcacaggcggcgtttacgaaacaacaggggcgagcttctcttgttggcgctggtctgggagctgtaggtgcgtacgcgatgcataaggctggcggtaacggaggtggtggcggcgctaaaacgccaggcaccggcgctaatgctattcagcatcaggctcagaactggagactgtaa

SEQ ID NO: 36814 - DNA, 798 bp, Escherichia coli
atgcttccattaatatctattattacgccgacatataatagagcatatactctagatcggttatataattctttagtaacacaagactctgaaaaattcgaatggataataatcgacgatggtagtacagatgaaacacggaagaaatgtttaggttatataaatgattccatttttaaaatacaatattacaaacaaaataatagtggtaaacccgcagctatcaatttaggagtaaccaaagctgttggcgattatatttttattgtagatagtgatgatgctttaacattaaatgcaattggtactatttatgactgtattgtaaaatacacagtcgcatctgactttgaattttccggcttaggatttagaaaatctttttttgatgggaaaatgctcggcaaacatattgagcggaatacgaattcacctatgctgttacatagcacagattgtaataatttatttaaagtcgatttagcatattgttttaaacgagagttgatgattaaatatcctttcccaaagtttaaagatgaaaaatttgttccagaactgtttatatggaataaaattacagatgttgccaaaataatattttttcctaatgttgttgtatattattgtgagtatttggctgatggacttacaaataattttaaaaaacaacttcgacataatccaattggctttgcagtatattataaagatcagttccatagagaacattctatatgggggaaaataaaaatggcaataagatatatccaatgtattatatataaattcatatag

SEQ ID NO: 36815 - DNA, 468 bp, Escherichia coli
atgaaagataacttatctttttctaaactgatttctgaagctgagattaactccagaaatcgttctcaccttaatttgcatgaatctttttctgatcctatacagaaaactttgatttgctgttgttcgaatacgtatattcctcctcactatcataaatttgcccatcaaagtgaattgtttattagattaaaaggatgttttagtctattaattttttctgttgatggagtgcttacccgtcgtataactatagatgaggagaatcctctttatgagataaaaccaggtgttattcatacggtggtagctttagacagacataacattttacttgaaattaagaggggaccgtatgtcgaatctgaagcgaaaaattttcctgattgggtaacattagaaaatagcgataatcaacttgatttagagcgattgcgaacattgaaggtcggtgataagttatcataa

SEQ ID NO: 36816 - DNA, 462 bp, Escherichia coli
atgtatggtaaatctaaatatttaggtgaggtttatggtgataaaacacttactttaaggacatcattaattgggcatgaattaaaatcatcgtatagtttgattgattggtttttgaactcaaactcaactgttaatggttatacaaaagctattttcagtggattgccaaccatagaaattgcgcattttttatatgagcatgttttacaatcccagttgcatggtatttataatttatcagcagcaccaatttcaaaattcgatttattgactttagtcaatgaagtatacaaacttaataaaaccatcgttcctaaaagtgactttgtgattgatcgttctcttgactctcataggttgcgttcattaactaagtatacacctcctgactggaatactcttgttgtaaagatgtatttagattacttaagtttaggagcattgcttaatgaaagataa

SEQ ID NO: 36817 - DNA, 1875 bp, Escherichia coli
atggcatttaaacactatgatgttgtcagggcggcgtcgccgtcagaccttgcgaaacgaataactcaaaaactgaaggaagggtggcagccttatggtagtgcgctgatttcgacagctggttatggtgcggagttcatccagccagttgtgagtgaggggagcatctcatcaccagaggagccaggcaaccgtccgacgacctcagcgccttctgttgcgccagaatattactatgtgatcgcgcttgctggtcagtccaatggtatgtcatacggtgagggactgccattaccggatacattcgacagccctgatccacgtattaaacagttagcgcgtcgcagtacggtgacaccgggcggtgcagcatgcaaatataacgacatcattccggcggaccattgtctgcatgatgtgcaggacatgagccgtcttaaccatccgaaagcggacctgtcaaaggggcagtacggaaccgtggggcaggggctgcatatcgccaaaaaactgctgccgtttataccggcgaatgcgggcattctgctggttccgtgctgtcgtggtggttcagcgttcaccaccggagctgatggcacatacagtgacgcgagtggcgcctcggagaattcaacccgctggggtgtggacaagccgctgtataaggaccttatcggtcgaacaaaagcggcactggagaagaacccgaaaaatgtgctgtttgccgtggtgtggatgcagggggaatttgattttggcggtacgccggcaaatcatgccgcacagtttggtgcgctggttgataaattccgtgcagacctggcggatatggcaggccagtgcgtcggtggctctgctggcggtgttccctggatatgcggggacacgacgtatttctggaagcagaagaacgaatccacgtaccagacggtgtacggcagctataaaaataaaacggaaaagaatatccatttcgtaccgttcatgaccgatgagaacggggtgaatgtgccgacgaacaaaccggaagaagacccggacattccgggtatcggttattacggttcgaaatggcgtgacagctcagccacctggacgtcacaggacagggcgagccatttcagttcatgggctcgccgtgggattatttccgaccgtctggcaacggcgattctgagctgcgcgggtaagtcttctgcgtttgttaatggtactgccggggtggttgttccagacagaccggttaccacctcagagtctgtaattttttacgatgccaaaaaagctacagacaatcagctgaaaccctatggctgggacggtgtgtatggcaggcgcacactggttgatgacagcggcaataaagctctgcgaattgagaaaaataacagcgcgaaatcctggtcaatgtactgtgatattgctgcagacaaggcaaaacttttactggaaaaaggcggggaaattgctgtccggtttaaaatccccgaaaacgtcaatcttgagacaaccagaaacaagtatgcctttggtttgtactggcgaatagcggaatggccgggtgagggtggtgaaggccatctgagttctttctttgtccagacagataaagccagtattaatgttgcataccatcatacagttaatcaacaaaaagaacttggcacgtttggcgcattcgaccatgactggcatacgcttgcatttaaatttaagggcagtaacagcattaatgttactccggtgctcgatggtgtggatggacaggcgtttgacctggtgaaatgggccaatactgctaatggactcaacaggtttgtcattactgaaccgccccgggaatcctggagactaaactccctgagaaagaggtaa

SEQ ID NO: 36818 - DNA, 468 bp, Escherichia coli
atgagccgtgttctgtgtgtggtgattattgtcctggcgggtggctgtggtgcgctgtggctggcaacagaccattaccgcgataacgccatcaactacaaagcgcagcgcgataaaaaagccagagagctggagctggcaaacgccaccattactgatatgcaggtgcgccagcgcgatgttgctgcgctcgatgcaaaatactcgagggaattagccgatgcgagagctgaaaatgaaactctgcgtgctgatgttgccgctggtcgtaagcgcctgcggatcaacgccacctgctccggtaccgtgcgtgaagccaccggcacctccggcgtggataatgcaaccggcccccgactggcagacaccgctgaacgggattatttcatcctcagagaacggttgatgacaatgcagaagcaggtggaaggggcgcaggaatatatccgcactcagtgtattaactag

SEQ ID NO: 36819 - DNA, 276 bp, Escherichia coli; identical to SEQ ID NO: 36734

SEQ ID NO: 36820 - DNA, 1602 bp, Escherichia coli
atgaaaaaatttttctgcgctgtcaccgccttatccgttgttttatcaggctgcagcagttttgaacgaatcagtgccacagaaaaaaatgcatccgatgagataacacgggctgaacgtatagccggtgaacttcgcaaacaacgcgccgttgtgcgcgaaacaaaccagcagtggatcaataccacgccccttccggaaaaaaccgttacccgggcaataccggattgcccggtcgtcataaacacccgggaagccatcacacttcaccagattgcacagcggatttctgaaagctgtcatattccggttcaaatcatgtctgatgtctggacactgctgggtacaggagaaaatcgcacacagaggatcagcggcgacattcccccgcctgacaccagtggcatgcagccactgagcaccgtggggctgtcatcagccgccccctccacggcctcactgccggaactcaatgttcaggggctgcccgctttgcttaacaccgtatcttcacgctttgggatctcctggcgctatgtgaaaggaaaaattgaattccactggcttgacacccgtacattcccggtcacctacatggacagccaggtcgcctacaatgccagagtcgtcagtggcaccatgtcatccacgggcagttccggtggttcatccggcagttccctgagtggggatgccagcaatacgcagacaaccgccgttgatatgaaatccacactctatgaagacacaaaaaatgccgtgaattccatgctgacgcccggtatcggaaggatggtgttgtccaccggctttctgaccgtaaccgacaccccacaggttctggatactgttaagaattttatggaagaacgtaaccgggaaatgcgccgtcaggttgtgctgaatattgaaattctgagcatcaaaaaaaccagcaaagagcaggccggaatcgactggaacgccgttttcagtgacggacatctcggtatcgacctgaccagtgcatttactaatgccgccgatgaagtcgtgaccagtggggtatcgattattgacggtaagctcaccggttcaaaagcctttctgaaagcgctttcatcacagggtaaagtcagtgtggtcacccaaaactcggctgtcaccaaaaacctgacgccggttcctatgcaggtcgccagccagcaggggtacatagaaagtgtcaccacggatacgacggccaatgtgggctcctccacctcactgaatgcggcaacaatcaccaccggcttcaacatgacactgttaccgtttatccagcccggctcacaccggttgcagttactgttcagcatgagcctgtccgacaaacctgtttttgaagtgtttgaaagcggtggcagtcgggcccagacaccgagtgttgagctgaaaaccatcaaccagaccatcgacctgaaatcagatcagacggtgatcctgagcggattccagcagttcagccggaaatcgctcagacagggcgtgggcaccccgtcattcttcggactcggtggtggcgtggacagtgcggatgacgacaccattctggttgtgctgatcacaccgcacgtaatctga

SEQ ID NO: 36821 - DNA, 522 bp, Escherichia coli; identical to SEQ ID NO: 36752

SEQ ID NO: 36822 - DNA, 600 bp, Escherichia coli; identical to SEQ ID NO: 36753

SEQ ID NO: 36823 - DNA, 789 bp, Escherichia coli; identical to SEQ ID NO: 36769

SEQ ID NO: 36824 - DNA, 420 bp, Escherichia coli
atggctcatgtctgctcggtgatcctcgttcgtcgttcattcgatattcatcatgaacagcaaaaaatatcgttgcataacgagagtatcctgctgctggataaaaatttggcagacgattttgcgttttgttcactggatacgcgacggctggatatcgaagagctgacagtttgccattacttacaaaatattcgtcagttgccacgcaatttaggattgcatagcaaagatcgtttgttaattaacctgtcaccccccatacagctggtgacggcgatttttgatagtttcaatgacccccgggtcaattcgccgatactgagcaaaatgctctatctttcctgtttatcaatgttttctcataagaaagggaaggtgcgaataagcaggtcatttcttcccaagctgactcgctga

SEQ ID NO: 36825 - DNA, 1416 bp, Escherichia coli
atggtggtcagacgggatgcggaaattaaaaattttatcccggtaccttactggcaactgaacctctggcttgagaaagacaacgtgcgttttcgcgcagcctgggttgcggcagagcagtactgtgatgtggaaaagcggtgcgtgaatgtgcaggctgccacaagcgtccagtcgcagtgtcgtcaggccggtgttgctgtagtcagagaggtcagcagcaaaagagagaagacgccgcctccgctttgtttttcactcggtacactgcaggaggtctgctcgaaaaaatttggtttaggtgcgcaggccgttcttgatatagcccagtcgttgtacgaaaaacacaaggcaacgacgtatccccgtactgactgtggttatctgccggtatcaatgcataaagaagtgccggaggttctggcggctgtggcaaacaccgagccggacattgcccctgaactggcaaaactcagtcctgatattgtttccagagtctggaatgataagaagatcactgcgcatcatgcgattatccccacccgtcaggcgtttaatattggtgccctgagtgataacgaactcagggtttaccggttaatccgtcagcattatctggctcagtttttacccgtgcaggaagcggacgtcactgaagccacttttgttgttgccgggcagttgtttggcacgcgaggacgggtggaagtggtgaaaggatggcgtgcgctttttattgcagatgcgccgcatgatgaagacgaggggggcgatacagagcagacaatgcctctgcctgttctggctaagggggatgaatgtcgtcttgttgaagcagaactgaaagagatgaaaaccacgcctccgcgtcactatacggagggcacgctcattgctgcgatgaaaaatgcggcgggaatggtgagcgatccggctctgaaaaaagtgttacgcgagaatgccggactgggcacggaagcaacccgtgctgaaatactggagacactgttcacccgcaaatatattgagaaacagggtaagcatatctgggcaacacaactgggggcagagttgatagcaggattacctgaggtgctgaccagtccgggaaccacggcactgtgggagcaggccctggatgatattgcacagggtaaactgtcgctggcgtcatttatggagaagcagaaacagtggctgaatcacctcgtctcgggagcccgacggcagcaattgcagattacggcaccagtgacgccggaatgcccactttgccagggcagaatgcggaagctgaaaggtaagaacggagagttctggagttgccagcgttacccggagtgtaaaggcgttatttcagagcagaaaacgtcacacagtaaacgcggcggcagaaaaattaaaaagcgtggatga

SEQ ID NO: 36826 - DNA, 516 bp, Escherichia coli
gtgcttggggctgccagacgcggtgaaggcctgattgaaggtaacgactttgttgtgacatgggcttttggtcatttgctggagcaggctccaccggaggcgtacggtgagcagtatggcagtccctggagcattgaggttctgccggttattcctgaacagtggcagatggtggtgaaggataagatcgccaggcagtttaatgttatcaggcgtcttctcggtaaggcagatgaagtagtgattgccaccgatgctgatcgggaaggcgaaattattgccagagaactgcttgattattgcggttatacaggagtagttcgacgcctctggttatccgcactggatgagagcagtatcagggaagcgctgggcagaatacttccaggagaggaaactgtgcgtttatatgaggccggtaaggggcgcagccgggcagactggctgacggggatcaacctgacgcgtttgtacacgatgaaagccagggagtgcggcgtgtctggtgttctctag

SEQ ID NO: 36827 - DNA, 204 bp, Escherichia coli
atgctcaaagaaaacttcaacgaactgcaaatctttcttgtggtggcaagagagcgaagttttaccaaagcagcgggcaaactcggcgtctctcagtctgcacttagccatgcaatgaaggctctggaggaaaggctcaatatccgcctcctgacacggactacccgcagtgtggctcccacagaagcgggggagagaatctga

SEQ ID NO: 36828 - DNA, 681 bp, Escherichia coli
atggcaacgacgaacgcattctgtctggcgtcaccgccactggcacgcatctgccttcacggggatttacaacgatttggccgccgcttcagcctgtatgtgaacacggcggcggaagccatccgcgcactgtcgctgcaggtgcccggattccgctgtcagatgaacgaaggctggtaccagatacgcattgccggtgaggatacggcaccggaggcggtgtacgcccgtcttcacgaacagctgggtgagggaacggtcatccacattgtgccgcgactggccggggccggaaagggtggactgcagattgtgctgggggcggcagccatcgtgggctctttcctcactgccggtgcctcgatggcgttatggggttcagccctggcagccggtggtttttctgccaccacgatgctgttttcacttggagccagcatgattctgggtggtgtggcccagatgctggccccgaaggctaaaacgccggattaccgcgcaacggataacggcagacagaacacgtacttttcctcactggacaacatgattgcccagggtaacccgatgccggtgccttacggggaaatgctggttggctcccgccgtatatcccaggacatcagtacccgtgatgaaggcgggggcggaaaggtcgtggttatcgggcggcaggggtaa

SEQ ID NO: 36829 - DNA, 261 bp, Escherichia coli
atgaaaaatctcattgctgagttgttatttaagcttgcccaaaaagaagaagagtcgaaagaactgtgtgcgcaggtagaagctttggagattatcgtcacggcaatgcttcgcaatatggcgcaaaatgatcaacagcggttgattgatcaggtagagggggcgctgtacgaggtaaagcccgatgccagcattcctgacgacgatacggagctgctgcgcgattacgtaaagaagttattgaggcatcctcgtcagtaa

SEQ ID NO: 36830 - DNA, 282 bp, Escherichia coli
gtgaaacaaagcactattgcactggcactcttactgtttacccctgtgacaaaagcccggacaccagaaatgcctgttctggaaaaccgggctgctcagggcgatattactgcacccggcggtgctcgccgcttaacgggtgatcagaccgccgctctgcgtgattctcttagggaaggtgcgaataagcaggtcatttcttcccaagctgactcgctgattaaaatttcgcggatctgggccgatttttttcccgcaaacacatcgaatcagcctatttag

SEQ ID NO: 36831 - DNA, 606 bp, Escherichia coli
atggagggctttgtgctgtatgcaggaacaaatggcctggtgtctgttgatgcaaacggtaatgccgctctggcgacggagcagattatttcgccggaacagtggcagagtcagtttaatccggcctccattgtggcttatccctggcgtggtgaatacattgcctgttacacgaaaccggatggtaagcaggatgtgtttgtcttcaacccggcaggtatggatatccgctacctcagtacaccttttgactgcgcatgtgttgacctggttaacgatgttatgcgggtggtatcaggacaaaacatgtctgcgatcgccggagggagtttgccgtcgacaatcagatggcattcaaaggtattttcccttccggaaagaacctctttctcctgtctcagggtgaagtctccgacgccagagcgggtgggaattactgtgctggcagatgatgttccggtgattcaccttgcacctggaagcttttcgggaagcgttgtgagattacctgctgcaaccgggcaaaactggcagatactggtttccggttttggtcaggttgaacgtattacactcagtacatcgatgtcggagctgccggtatga

SEQ ID NO: 36832 - DNA, 615 bp, Escherichia coli
atggtggcgatggagggattcgtgctgtatgcaggaacaaatggcctggtatcggttgatgcaggcggcagtacagccgtggtaacggaaaaaatcatttcaccagaacagtggcagagtcagtttaatccgtcgtccattgtggcttactcatggcgtggtgagtacattgcctgttacacgaaacctgatggtaagcaggatgtgtttgtcttcaacccggtgaacatggatatccgctatctcagtacaccgtttgactgcgcatgggttgatctcgcaaaagatatgatgcgcgtggtgacaggagacaaaatgtcagtgcttgccgggggctctctgccgtccacgataaggtggcattcaaaaattttttcattgcctgaaagaacctctttttcctgtatcagggtgaaatctccagcacctgagcgggtggggatcaccgttatggctgatgatgttcctgttattcattttgcgccgggtacgtttaagggaagtgtggtgagacttccggcagcaaccgggcaaaactggcaggtgatggtatccggatttgggcaggtggaacgaataaccctgagtacatcgatgtcggagttaccgatatga

SEQ ID NO: 36833 - DNA, 546 bp, Escherichia coli
atgggggttgcttccggatgggttggctcctctgccgttagtgtaactggtgaaaggtcaatgaaatcggcaggtgccaaacttaagctaagtacaccgttttatatgtcgcaaatggttgggaaaagtgtacaggacttttctatcactgtaggtcgttcaaattttgttgttttagttcaggcaacaaatatacaaattgttcctgtaaacaataactatggagggtattctaataactcaacaacgacaggtgctggctctgccgtttccagccgtgtgcaaacacaaaatccggctggttcaataaatggttcgttgttaggttgttcaattacgcatctttctcaaacgcaagactctaccaagatgtatctgggcttaacgaacgggcctaatcaaaactttactctatcatttgatggaaccaatatctcattcataccattatcatttgcaaacaatactcggcattatagtgcaatagtttctaaaaactggctctttaatcaaaacggaaaaactatatctgtttataaggtttag

SEQ ID NO: 36834 - DNA, 228 bp, Escherichia coli
atgtacaaatgtgttttagctgtattgatattattatctggttgcaaatctttgccaactccgctttgccatggtaaagcatatttaggtggggaagaaactataatgccaatttatgggattaagaaaagcgggaagtataaattgtatcatgcagggcatcactacaactggcgttgggttggagctggagcatttgacagcacaacctgctctcaaataatgtaa

SEQ ID NO: 36835 - DNA, 723 bp, Escherichia coli
atgggtattagtgctgttggaatgtatggtattgcttatacattatcaacagtaccaactttatttacatcatcattgtataatgttatctatccaagacttattattttaacaagagagcaaagcagcagtgcgatttcattttttgaattagtatcgaaattaatatatattatcataatacccacttgtgtgattatttcgcttaattcgacccaaatcctaaatatttggataggaaagcacgaaggaataatatcattgctgttaagtattctaataatagcgacgttatttcaggggttgcaggtgattccttttgcactacagatggctcaagaacgactaaaatttacagttttcatgaatgctatatttgtgcccagcctaatattggcatattatttggttagtattcataaaattctgttatacatctccatagtgtggtcagtatataatataataacttttttctctttaactatttatttatatgctaaaaataaaatgtatacaagactacttattttatattttaatatatgcttgtgtgctgtcgtaacagtagttatatgtagcatttttaagaatcaagaatctcaaatattcttgtctctagttaatatttctcttcagttttttatgtcgatgagtttgtgcataatactgttgttctggaaaactatatatggagcattgagatgtgtttgttgtcggtag

SEQ ID NO: 36836 - DNA, 399 bp, Escherichia coli
atgcaccggattatattctgttccctgtttttcctgccgatggcggtgtcagccggcataaccctttataccgattctcaacaccttccggtcaatccgcctgcggacgtacgggtgatcctgctggatggccctgaacaactgcaggcgcgtttttttggtgcactgcccgcggatgccgctgaggcagaagcaagggtcagggcgcgtatgcagtccccggagtggggggcgatgcaggcggagctggctgagcgttaccgggaggtggcgtatgcatggtcactgggcgtgaagaaatatccggccgtggtctttgatgatcgtgaggtggtctacggtaccacggatgtggcagaggccgcacaactgagagcacaggaaggagtacagccatga

SEQ ID NO: 36837 - DNA, 975 bp, Escherichia coli
atgatgagccggtcatttcgtctgcgtgccggggccctgctgctgagtgttgcagccctgcctctggcgtcagcttcactgaataccgccagtattgtggccagtgcggcagcgccggattgtatcagctggcgggtcagtggaatctgctactggctgtactgctccgggttcagctgtaaggtcagaacatcggtgaaagtgacacattatattccggaagtggtggtttccacctacacggcaccggggggaaatccctggaaagagatgtcgctggtcagtcagacagccggagggctggagaatgccattacgaaaggcctggcggggctgagtgccggagggggaaatcctgcggacatgaaagctcagggagagcgtcgttcggccattcgttttaaatatgccgatgcgctggggcatccggcaacgcgtcttattggcggaatggtgccgggattcagctgcgattcgccggtgacaccggcaatgccttatttcctgagtaccctggacagtctcgtctggcggaccggaatgcctgaatccctgtatccggaagccctcgttcccggtaaacgtgaaatcggcagtcaggctgaagaaaacctgtggggcagtgtttatccccgttcaggttttgtgatgcagaccgatgatgacaaggcagcggccgtggttgcccagcgggtggctgacatcatcagccggaccggtgagccgcatgtttataaatcaatacagaccccgaaaaaggatggtttctggccgccggatccggttgaggaaaatacgggcacccgtaaccacaagtggcagagactgacgccctccgtctcccgctcctgtgccgtgtttcctgacggagaccatcaggccgcggaggatggtaatgccgcttttgcgctctggcagccctacagttgctgcaagaagcgggggcagcggttccttggcagtacgaatttttaa

SEQ ID NO: 36838 - DNA, 297 bp, Escherichia coli
atgaacgggcagtcattttcatgttcccggtatcctcagcttgcccgtgcttatcccgggtgtaagctgccggatttgcgcggtgtttttatccgtggctgggacaacggacgtgggctggatggagatcggaacagacatctcctgagttatcaggccgatcaatccggtgtctatcatgagcgtgggggatggctgaaagggcatcacagcggtatgccttactgggcccagggaagcacaacggaaatgcgccccaaaaacattgcctttaactacatcgtcaaagcaagctga

SEQ ID NO: 36839 - DNA, 1014 bp, Escherichia coli
atgtttaacggtaaaaagattttaatcactggtggtactgggtcatttggtaatgcagtgttacgtcggtttcttgagacagatattcaagaggttattattttcagtagagatgaaaaaaaacaagatgagatgagaacgctatatcgcaatgataaaatgaaatttattataggtgatattagagattatacatctgttttagctgcaactagtgacgttgactatatattccatgctgcggctttaaaacaggtgccttcatgtgaattttatccatgggaagcagttaaaacgaatataattggtacagaaaatttattaaatgctgcaaaacaaaataaagttaaaaaaacaatttgtttgagcactgataaagctgtgtatccaattaacgcaatgggaatttcgaaggctatgatggaaaaagtgatgacagcaaaggctagaacgttcaacaatgaagattcagttgtttgcggaactcgttatggcaatgttatggcatcacgcggctctgttatccctctgttcattcagcagattcaaacaaatcaaccattaactataacagaccctgaaatgactagattcatgatgacgttagatgatgctgtagatctcgtattatttgcatttaataacgggcaaaacggtgacatttttgttcagaaagcgcctgccgcgacaattgctgtgcttgctaaagcattagttgaattgatgggggtgccaaaccatcctattaaagtagttggttcacgtcatggggaaaagatatatgaaaccttacttagccgtgaagaaatggcaaaagcgattgatcatggagattattatcagattcaaccagataatcgtgatctgaattatgacaaatatttaagcgaagggagtaaaaaaattgagctgtttgatgattacaattcccataatacatatagactcaatgttgatgaaatgaaaaaattattgttaaaactcaatatcattcaaaatgtgttaaatagttaa

SEQ ID NO: 36840 - DNA, 351 bp, Escherichia coli
atgaagaaaaaatacgaactggttgttaaagggataaatcattacccggataagattactgttactgtggcactggaaattggtgggtatccgtcactgttgttgccaaatgtggcgattagtcttgaccgtactgaaggtgccacgctggagttttacgaagctgaggcgaaaaagcaggcgaagcagtttttcatggatgttgctgccgggttatgtgaagggaacgaaccgttgccggaaaagcgccccgtaattttagaggcgcagaatgtatggataacctacaaaggaaatctaccgggaagaattactggttctctgaagactccaccggaatcacaaccttaa

SEQ ID NO: 36841 - DNA, 540 bp, Escherichia coli
atgaacgcaaaaatcagatacggcctgtcggctgccgttctggcgctgattggtgcaggggcgtctgcgcctgaaatcctcgaccagtttcttgacgaaaaagaaggtaaccacaccatggcataccgtgatggtgcggggatctggaccatctgccgtggagccacccgggtggatggtaagcctgttattcctggcatgaagctgtcgaagggaaaatgcgaccgggttaacgccattgagcgtgataaagcgctggcgtgggtggagaaaaacatcagagtgccgctgaccgaaccccagaaagcggggatcgcgtcattctgtccgtacaacattggtcccggtaagtgtttcccgtcgacgttttataaacgaattaatgcaggtgatcgccgtggagcatgtgaggcgattcgctggtggattaaggaaggtgcgaataagcaggtcatttcttcccaagctgactcgctgattaaaatttcgcggatctgggccgatttttttcccgcaaacacatcgaatcagcctatttag

SEQ ID NO: 36842 - DNA, 537 bp, Escherichia coli
gtgggagagatctcagtaaaaaccggaaataacgccagaaatggtggaaaaaatagcctaaataggctgattcgatgtgtttgcgggaaaaaaatcggcccagatccgcgaaattttaatcagcgagtcagcttgggaagaaatgacctgcttattcgcaccttccctaataataaacaaacaatttatgcttctgcttcggcacaaggcgcaggttcagcaacgcaaaatttaaatttgtctgttgctgattcaaccatctactctgatgtcctggccctttctgaaagcgagaattcagccggtaccacaacaaatgtaaatatgaacgttgcccgctcttactgggaaggtaatgcttatacgctcaatagcggcgataaagcgggtagtgatctggatataaatctttccgatagttcagtctggaaaggcaaagtttcaggggcaggagatgccagtgtatctctgcaaaacgggtctgtctggaatgttactgaaccgccccgggtttcctggagagtgttttatctgtga

SEQ ID NO: 36843 - DNA, 276 bp, Escherichia coli
atgctgcatgcagtgaatacgcagcatggtctccagcggatagggccgtcggccattgcccgccttgggataaaacggctcgatgacagcggtcatattctgccatggcagaatctgctccatgcgggagaggaaaatctcttttcgggtctgacggcgcttagtgctgaattcactatcggcgaaggtgagttgatggctcatgatgtccctctgggatgcgctccggatgaatatgatgatctcatatcaggaacttgttcgcaccttccttaa

SEQ ID NO: 36844 - DNA, 150 bp, Escherichia coli
atgaatatgatgatctcatatcaggaacttgttcgcaccttccttaaggacggtggcagagactgccgtattcgctcaaataactgctacggtcaggtattccgtcgtgaccaggagagcgcgctggtgtgctggggaatcgacagataa

SEQ ID NO: 36845 - DNA, 318 bp, Escherichia coli
atggcaactgactcacaactaaccatagaaacggccctgaatgtcggcctggcgctccttggttatttttacatcgtgttctgcagcggacggtggctgtcgctgttgttcctgaaaaaatggaataaacgccgtaagcaggatgaacgccagaaggcaatgaatgcgttttccgaagccttcggaattgacggcatggaaccaggggatccagctcgcgcaatcagcagagggggtgtagtaatccttgtatatcggagtgaagagaaaaatgacgatcacaaaacaacgagtagaaaaaatcatatatcgccatga

SEQ ID NO: 36846 - DNA, 126 bp, Escherichia coli
atgaatgttggtctgaatgctgagattcgcgataatctccgctttggtctggagtttgagaaatcggcatttggtaagtacaacgtggataacgcggtgaacgccagcttccgttactctttctga

SEQ ID NO: 36847 - DNA, 297 bp, Escherichia coli
atgaacggccagtcgttttcctgttcccggtatcctcagcttgcccgtgcttatcctggctgtaaattgcccgatctgcgcggtgtttttatccgtggctgggataacgggaagggacttgatggtgatcggaacagacaactcctgagttatcaggccgatcaatcaggcgtctatcacgaacgtggcggatggctgaaagggcatcatagtggtatgccatactgggcacaggggagtaccacagaaatgcgtcccaaaaatattgcattcaactacattgttaaagccagctag

SEQ ID NO: 36848 - DNA, 372 bp, Escherichia coli
atgaagtttaatgtagtaagttttgccgtcctttttggtggtgaagtagcgatccgccatcattgccatcggcacagggcgctcgacaacttcgcgaatggtttcaccagtttcctggtccttgcgctctgcaatcacacgcattgtatccggtctgtcatcagtgaatacctgccagtaatccttgtcgggattatcctgtaccagtttcaggaaggcgttacccacttcatttttgcgattgcggatcagcgattcactcaaatcctgtatcgcctgagtggaaggagactgtgcgcgggatgcacgccccatggcctgcttactttcacgcccgccgatggtgaatcccttgcctgtacgtggctgtga

SEQ ID NO: 36849 - DNA, 276 bp, Escherichia coli; identical to SEQ ID NO: 36843

SEQ ID NO: 36850 - DNA, 351 bp, Escherichia coli
atgagcaagaaatttacaaagactattctttcttctgctgttgccggattgatgtttgttagttttagttcgttgtctgcaaaacctaccgacagagttgtaggaaagtatacaattaaattttttggagaaaatggtgagcaagcaacaatttttgacagcggtaataataaagtaattattgctgacacggtcacaggaactattacaacgtttaatagaggtgagttggagaaaaaagtaaatggtatagatgtaaaaaaaaacaaggataaggttcaatcacttctggagtctgttcgttacactattgatgcaccagaactaaggaaggtgcgaacaagttcctga

SEQ ID NO: 36851 - DNA, 300 bp, Escherichia coli; identical to SEQ ID NO: 24813

SEQ ID NO: 36852 - DNA, 210 bp, Escherichia coli
atgatggggctgcagaacacgtcggacgatatcatcatgaatctggtgatgggcacgatgtttctcgtattaccggcggtgtggctgggggcattatcctgggctggagttaatatcggacaggctatttctgagggattcaatcgagcagggcatgttacacaacaagcaggccagcatgctggaagttttgttaaaagaataaaataa

SEQ ID NO: 36853 - DNA, 501 bp, Escherichia coli
atgggcccgtctggcacaatacttatatttcccgggaccatagtgctcgctgtacagacagacatcaaaaaggtaatcatcatccatcgcaccgttggctcgcgcacacgccaggagatgtttcagcgaaatctgcaacggcgtcacaatcggaacgctccattcacgcctcgttttactcccttccagttgcagtgcaatcactgcttcatcctcatggacatctttcagtcgaatatgtttcagttgattaaaacgcattcccgtaaaacgcaaaacatccagtactgtaagccagtaccaggccgggtacatggcattacgcatcctgtcacaaacaacctgacgcttaacctccgcttcagcaaaattctgaacggtaagataaaccttaatcatctgcttctcagtaagcgtttttttctttttggactccccgggaacggaagcatcatccagtggattctccgtttgcggcaaccactttttcctgatacctaa

SEQ ID NO: 36854 - DNA, 879 bp, Escherichia coli
atgctgatgtcaatggggcaccgtaacttcattaatgaggtcaacaacctgaacaaacgtatgggtgacctgcgggacatcaacggcgaggccggtgcatgggcccgtatcatgagcggaaccggctctgccggtggtggcttcagtgacaactacacacacgttcaggtgggtgcggataaaaaacacgaactggacggtctggacctcttcaccggggtgaccatgacatataccgacagcaacgccggcagcgacaccttcagtggtaaaacgaagtcagtgggtgcgggtctgtatgcttcagccctgtttgattccggggcctatatcgacctgattggtaagtatgttcaccatgataatgagtatacggcgacctttgccggactcggcacaaaagactacggctctcattcctggtatgccggtgctgaagtgggttaccgctatcatgtcacagaggatgcctggattgagccacaggcggaacttgtttacggtgctgtctccgggaaacagttcagctggaaggaccaggggatgagcctgtccatgaaggacaaggactacaatccgctgattggccgtaccggtgtggatgtgggtaaatcgttctccggtaaggactggaaagtgacggcacgtgccggtcttggctaccagtttgacctgctggcgaacggagaaacggtactgcgtgatgcatccggagagaagcgtatcaagggcgagaaagacggccgtatgctgatgtctgtgggtctgaacgcagaggtccgtgacaacatccgttttggtctggagtttgagaaatcagcctttggtaagtacaacgttgataatgctgtcaacgccgggttccgttattcattctga

SEQ ID NO: 36855 - DNA, 291 bp, Escherichia coli
atgtcagaaataaaatcgctggtcactgctgaggcagtgaaggaagtcctgcgctctgaagaagtccggagcgcactgaaacagcaacttcggcagaaccttgaggcgcgtcttgatgcagaagtggatgccattctggatgaattgcttggtgtacagccggaaccatccccggaactgcttccggaaccacaggcggaagatgtcaccacggaaaatggtgatattcagccggagccaccggtgacggatatgacagacacacaacccgaaccgggcacaatgctgtaa

SEQ ID NO: 36856 - DNA, 276 bp, Escherichia coli; identical to SEQ ID NO: 36843

SEQ ID NO: 36857 - DNA, 150 bp, Escherichia coli; identical to SEQ ID NO: 36844

SEQ ID NO: 36858 - DNA, 249 bp, Escherichia coli
atgcttccatcggaaacaatgatctggcagcctgagttcacagataaaacactctccaggaaacccggggcggttcatcctgaagttctggccattgttaaagattttcatgtcagaggtaactttgcttccctccccgaatttgctgaacgaactttcgtgtccgcggtacctcttgcccatctggagaaatttgaaaataaagaagttctcttcaggccaggtttcagtgaggtgtactggcaatag

SEQ ID NO: 36859 - DNA, 393 bp, Escherichia coli
gtggtccgccgccgggtgtatgcccgttttctggatgcggtgaatttcgttgcgggcaatccggaagcggacccggagcaggagctgagtgaccgctgggtggtggagcagatgtcgcagctgacagccatgacggcctcgtttgtgctggccacaccgaccgagacggacggggcgctgtttcccggtcgtatcatgctggcgaacacctgtatgtggacctaccgctctgatgagtgtggttacacgggcggggctgtggcggatgagttcgataaacccaccacggatatccgtaaggacagatgcagcaagtgcatgcgcgggtgtgaactgcgcaggaatgtcggcaattttggtggtttcctttccattaataaactttcgcagtaa

SEQ ID NO: 36860 - DNA, 234 bp, Escherichia coli
atgaacttcactaccagtacatacaatatcgggaaaaatactcgtaatctgagcattggcgtacatgcgtactgctcgtggacataccttaatggctcgccttttggtggttttcagcagatatacgccgaccaaaacaaggtttggtatgtgaataattatgcgtggggaaattatgagtccggtggcacaattacagtgacatgcctcaaccttcctggtgccggaatctaa

SEQ ID NO: 36861 - DNA, 351 bp, Escherichia coli; identical to SEQ ID NO: 36850

SEQ ID NO: 36862 - DNA, 276 bp, Escherichia coli; identical to SEQ ID NO: 36734

SEQ ID NO: 36863 - DNA, 546 bp, Escherichia coli
atggtgaaggaggcggtaagccatattcctgttccgcgcgacggtcgtgactacgatccggatgttctgcagaaggcggttctggatgcggtgagtgccctgccggctccgcagggcgggcgtgatgccacggcactggaaatactccccgccattgacgatcaaaaatcctttccccggggcacgtatgccacacaccagggcggactctggcgggcgtatgaaaaaacgcacgggatgcggggatgggaatgcctggttgacggggtggcggatattgacgtcagcatgacgggtgagcggtcgttcactgtggtgatccggcagagcagtggccagtgtacggaaaaaacattttccctgccggtgatgctctaccgcggtgtgttcagagccggtgaaatctaccaccccggcgatacagtgacgtggggcggctcgttgtggcactgcaacagcatgaccggcgataagcccggagacattcattcatccggctggactctggctgcaaaacgtgggcgggatgcaggaggcggaaaatga

SEQ ID NO: 36864 - DNA, 234 bp, Escherichia coli; identical to SEQ ID NO: 36860

SEQ ID NO: 36865 - DNA, 498 bp, Escherichia coli; identical to SEQ ID NO: 4148

SEQ ID NO: 36866 - DNA, 210 bp, Escherichia coli; identical to SEQ ID NO: 36852

SEQ ID NO: 36867 - DNA, 375 bp, Escherichia coli
atgaaccgtcatggcataattctctgtacgacaggcgtgatggctgtacgtcatcagacaggcggcaataccagcagcttccgggcccatttcagcgcggttaccattcatggcattgaacagcacccaggtttctccatcatcttcatccggttcgggcgccataaatgcgccgccgttattcagggtgtacagattccagataccaccgcagtagtcttcacacagacggtccatccagccgaagacacggggctccagggtcacccactgtggaatgaggccaaagtgctgcggccagaagctgatacgttgttcatcagggacgggagtagcaaccagttggggctggttattccctggtgctgtggctga

SEQ ID NO: 36868 - DNA, 123 bp, Escherichia coli
atgaacgatatcatcagtataattattcttctggcagtctatctcatcggcctgatattcattgtcctgattttcaatgacatagacataacatcgaaaaagagaaagtacgaaaaaaactga

SEQ ID NO: 36869 - DNA, 234 bp, Escherichia coli; identical to SEQ ID NO: 36860

SEQ ID NO: 36870 - DNA, 201 bp, Escherichia coli
atgacgatagcagagcaactggaagagaaaggtctggagaaaggtcgtgctgaagagcgctccagattagtgctcatgatgagacaaaagggaaaatctctggaggaaatcaaagattttctggatctgacagatgagcagttgctgcaggctctggattacgtcccggtgcagcgtaatggtgcgctaaaccaggactga

SEQ ID NO: 36871 - DNA, 261 bp, Escherichia coli; identical to SEQ ID NO: 5349

SEQ ID NO: 36872 - DNA, 261 bp, Escherichia coli; identical to SEQ ID NO: 5351

SEQ ID NO: 36873 - DNA, 315 bp, Escherichia coli; identical to SEQ ID NO: 35936

SEQ ID NO: 36874 - DNA, 309 bp, Escherichia coli
atgtccagaatcaataagttcgtacttacagtcagtctgctgatttttatcatgatttcagcagttgcctgcgggatctacactcaaatggtaaaggaacgggtgtatggcctgaaacagtccgttattgatactgcttttgcggtggcaaatattgctgaatatcggcgtagcgtggcaattgatctcatcaacacgctaaaccccacggaggaacagctgttggttggttggtttgcgcacagcttacgccgactcggtttcaccctcttatttgtacgatgtcggtccttatctgatttccagtga

SEQ ID NO: 36875 - DNA, 291 bp, Escherichia coli
atgcgtatcggcatgcggttgctgctgggctattttttactggtggcggtggcggcctggttcgtactggctatttttgtcaaagaagttaaaccgggcgtgcgaagagcaacggaggggacgttgatcgacacggcaacgttactggcggagctgcgcgtcccgatttgctctctggggacccaacgcatgggcaactggcgcaggcgtttaatcagctacaacatcgcccgtttcgcgccaatattggtggcattaacaaagtgtgcaatgaatatcatgtctatatga

SEQ ID NO: 36876 - DNA, 141 bp, Escherichia coli
atgtttgcctctcctgccataaacaaacagagccatttcttccaattgactggaactcaaacgattacgattggctaccttatgaagatgaatactaatgctgaatacttcacagtcataatggatgaaatggcggcataa

SEQ ID NO: 36877 - DNA, 153 bp, Escherichia coli
atgaaaatagaattaacgtatgaagaaatcacagaacaagctacaaaaacaataactgaatttatggagcaggctaaatcagccgatagcaggtattccgctgatttttttatcacgcggcatggggggcaaaaatgttatggctggacttaa

SEQ ID NO: 36878 - DNA, 285 bp, Escherichia coli
atgaatggtgggctaaaaaaatttgatgttgttgagtatctggaagatgaagaagatattcaggcgtatctgaatgcagccattgaagagggaaatactaaatatttctttaaagcacttggaaacatagccagagcaagaaatatcagccagctatctaaagatgcaggaatgtcgagagaagggatatataaggcgctatccggtgaaggtaatccgtcattcaacacggttgccagaataactaaggcacttggcctgaaacttcaattcaaaggggcctga

SEQ ID NO: 36879 - DNA, 297 bp, Escherichia coli
atgatagaaatgaaacagacaccagagtttgaaaaatggttaaagtctctaaaagacaaaatagcaaaagctaaaatattgatgcgcctcgaacgcatggaggaaggaaacttcggtgatgttgaacctgtaggagatggattatcagaattaaggattcatcaggggaaaggctaccggatatattttggaaataaaaataatcagattgttattttactgtgtggtggtgataaaagcacacaacagttggatattaagaaggcaaaaattttagcgaaaaaatggggattttag

SEQ ID NO: 36880 - DNA, 195 bp, Escherichia coli
atggcctgcatcatgcatcacttttccgtctttatcgtcacccgtaatcagcatatcgacctggtagccggcatcactgttattggtatgattaaagacaaaaacgccttcgccaagaccaaactccactttcgtcgcattggtgataaacccggcatctgccgccgcctcaccgtgagcagcaccaatgtttag

SEQ ID NO: 36881 - DNA, 198 bp, Escherichia coli
atgtatggacgcggtagcattggcatgttagccatcgataactcaacggcggataatgcaggcaatattacggtggatacgttatggattgatgacaatgacaccaccagtttgcataccgatcttccgggggcaacggcaaaagattatggcgttggtatggcaaccgggacagacaccgggggggggcgctcgtaa

SEQ ID NO: 36882 - DNA, 354 bp, Escherichia coli
atgccccacacagtgcattacccggaacaaccatcacagggacatgtgacgcctcccccgtcccgggatgcacctgtccgttttgtactatgctgcgtagccaaaaccgataacatccgcatttacctggtattacatgatgagttcacgcagcgactgatagaggaaggaaagatggttagtaaaagcaaggcgcattgccgccgcatgctgcaggcattgcaacagacgagagcaggtatttttgaccagttggaaaactgccagcatactttgcccgagtatatcgccatctcatcggaaaccagtgcaactcttattcatcgggttccaccagagaaaaagaagaaatga

SEQ ID NO: 36883 - DNA, 480 bp, Escherichia coli; identical to SEQ ID NO: 35963

SEQ ID NO: 36884 - DNA, 756 bp, Escherichia coli
atggaacatgacacgcggggcggcattcgtatggacagtcgctatgttagctgggaacgtctggaccatttcgacggtgtgctggtgcgcgtccatacgttaagcgaaggcgtgcgcggcgatttcggcagtatcagcattgcattaaccctgctgtgggcgctctttaccaccatgttactcatctcctggcatgtgattcgccggatggtcagcaacatgtatgttctgcaaagttcgttgcagtggcaggcgtggcacgacaccttaacccgtttatataatcgtggcgcactgttcgaaaaagcccgtccgctcgctaaattgtgtcagacgcaccaacatcctttttctgtcattcaggtcgatcttgaccattttaaagcgattaatgaccgctttggtcatcaggcgggcgaccgtgttctttctcatgctgccggattaattagcagttccttgcgtgcgcaggacgttgccgggcgggtcggtggtgaggagttttgtgtgattctgccaggcgcgagtctgacggaggctgcggaagtcgcagaacgtattcgcctgaagttaaatgaaaaagagatgttgattgctaagagtacgacgatacgcatcagtgcctcgttgggggtaagtagcagcgaggaaaccggtgattatgattttgaacaattccagtcactggccgaccgtcggctttatctcgctaaacaggctgggcgtaatcgggtattcgcgagcgataacgcttaa

SEQ ID NO: 36885 - DNA, 933 bp, Escherichia coli; identical to SEQ ID NO: 36016

SEQ ID NO: 36886 - DNA, 600 bp, Escherichia coli
atgaaatacaaattagaaagtgctgtaaaaataaaaaatggtgaaccccctgaaaagttcgaacaacgagtgaaaaatgctaacttacgttatggtgaagttggtgagctaatatcatattgtatagcaattcattttttaaaagcgtcacaattagtctcaaaaatggctcttaagacatcctctgaaatgcctgtctttggtcttgatggcattcatgcaaccatagacagtaaaggaacattgacggtattttacctagaatctaaaatgaccagggagtttgatagcggttctgaacaattttcaaaatcagttagtgggtttgaaagcgatagaaatagtcgtagaaatgaatacagaatactgcaggacttgagtaatttagagtctcttgaaggagaagaacgaaaaaaggcaatacaatactttgatccttactctaatgaatcatcaaatgtcagagagcgtttcgttagaataattgcctacaatgaagaaagctataaatctaaaatagctattgatgatgagtccccactttccattcatttagaccactttaaaaaaattacgtcagcacttttgaagaaaaaataa

SEQ ID NO: 36887 - DNA, 822 bp, Escherichia coli
atgcgattagccagtcgttttggttatgctgcaaaccagatacgccgtgaccgtccgctgacacatgaagaactgatacgccatgtacccagtatttttggggaagaccggcacacctcccgcagtgaacggtatgcgtacattcccaccattaccgtcctggaaaatctgcagcgggaaggctttcagccgttcttcgcctgccagacccgtgtgcgcgacccgggccgccggggatacacaaaacacatgctgcgtctgcggcgggccggagagataaacggagaacatgtccctgaaattattctgctcaactctcatgacggtacctccagctaccagatgctgccgggttacttcaggttcgtctgccagaacgggtgcgtctgtggccagtctctgggggaagtgcgtgttccacaccggggaaatgtagtggagaaagttatcgaaggggcttacgaggtggtggacgtgtttgaccggatagaggagaagcgtgatgccatgcagtcgctggtcctgccgccaccggcacgccaggcgctggcacaggcggcactgacttaccgttatggtgacgaacatcagcccgtcaccaccgccgacattctgacgccgcgacgccgggaggattacggtaaggacctgtggagcgcatatcagaccatccaggagaatatgctgaaaggcgggatttccggtcgcagtgcaaaaggaaaacgtatccatacccgggccattcacagcattgataccgacattaagctcaatcgcgcattgtgggtgatggcagaaacgatgctggagagcctgcgctga

SEQ ID NO: 36888 - DNA, 189 bp, Escherichia coli
atgatgatctcatatcaggaacttgttcgcaccttccttaacatggtttctctttcctgtggaccgatgcaagattttcggccaggaaaggaaaaactttatgaatatcccgcggagattacgccgagtaattttattcacactctgaatttaaaaagccattatttacataaattactcacaatataa

SEQ ID NO: 36889 - DNA, 129 bp, Escherichia coli
atgactgaaaccacagcctctgattcttccggtcaagggaaaataagcgtaatgttcatcaccagattatgtacgatgagttttccactgtttatagcaattatcttgctaataaccagacaggagtaa

SEQ ID NO: 36890 - DNA, 2244 bp, Escherichia coli
ttgtcgctggaccgaacctggagcattgctccggaaaaggatgtcccgtgggaagggcgtcatcgcgaagatattagcggtttttcactgccgacctggaacatggagcagaatgatgaattactgacaatcacgaccagttcattacgcgtaattattcacaagcctttatggcttgaatggcattataaggataatgctggtcagtggcaggaacttgttaatgatcgccctaccagtgcttatctgataaacgctcatggtgatggtgttgcacactatcaaagtcgacgtaatgacgagcgtttttatggacttggtgataaatccggggatctgcaacgcacaggaaaacgctatgaaatgcggaacctggacgcaatgggatataatgcagtaagtacagaccctctttataaacatattccatttacaattactcaccgtagcgatattagctttggattattttatgataacctcagcaatagttggctggatttaggtaatgaaatagataattatcatacaacttaccgccgttggcaggctgaggcgggagatattgattattatcttttcactggcagatgtgtacttgatatcaccaaagcctttgttcgtttgacggggaaaacactcttcggtccaaaatggagtcttgggtacagcggttccacgatgcactatacagatgcaccggatgctcagaatcaattgatgcagtttattcgtctttgtaaggaacatgctattccatgtgattctttccagctatcttctggttatacttctattaatggtaaacgctacgtattcaactggaattacgacaaagttccacaccctaaaatgatgagtcaggagtttcataatgcagggatacacctggccgctaatataaaaccatgtttattgcaggatcatcctcgctataacgaagtagcagaacaagagctctttattcgtgactctgaatacaacgtcccggaacgctccagcttctgggatgatgagggttctcatctggactttacgaacccacaaacagtcgcatggtggcaggaaggtgtaaccacacaactacttgaaatgggaattgattccacctggaatgataacaatgagtttgaagtatgggatggggaagcgcgctgtcatggttttggcaaagaaatcgccattaaacacattcggccagtaatgcctcttttaatgtgcagagcatctatggaagcacagcaaaaatttgcaccgaacaaacgaccatatttgatttcccgctctggatgcgccggattgcagcgttatgttcagacatggagtggggacaaccgaactaactgggatacccttcgatacaacacccgcatggggctgggaatgagcctctcaggattgtataacattggtcatgatgtcggtggtttttctggtgataagcctgatccagaattatttgttcgttgggttcagaacggtgttatgcacccccgatttacgatccactcgtggaatgatgatcatactgtcaatgaaccatggatgtatccggaagtaacacccgcgattcgtagtgcaattgagttacgttatcgtcttatgccttatttatatacattattgtggcaggcacatgccgatgatgagccaatattacgtccaaccttccttgatcatgagcacgatgttcagacatttgaagaatgtgatgattttatgctgggacgcgatattctggttgcaagtgtcgtggaagcagggcaacgacaacgacgagtatggttacccgacaacaaaacaggatggtacgacttttacaatggcgaatggttctgtggtggtcaatggataacaatcgacgcgccactggaaaaactaccattattagtacgtgcaggtgcaggtattcctcttagtgaacgtataacatacgtgagtgaagcggaagataatcatcgtaaattgaaattattcccaattaaaggaacgggtaaatccaccggacttctgtttgaagatgatggcgaaacttggggatatactgaaggtaatgctctgtggcttgaatgggagctggactgcacagccactacaattgagttaagaataaacactcatggagattatcgccctgcatgggaaacattgaaagtgataattcctcagggagaaagtcgtcaactactgattaacggcattgaggcttatgaatggaatatgaacctatcctgtaatgattaa

SEQ ID NO: 36891 - DNA, 1437 bp, Escherichia coli
ttgcttgataattttgaagaaaaaatagacttggtagttattgacgaagcacaatcaatttctgacgaaattaggggaatgatattacaggactgccttgataaaattagcacacaaaaccctaatgcaaaatatgttttcctcgcgcctggtgctgaaggttttgatgatttagcagatattattggaatcgatgcaatccatattgaaaaaacaaatctatctcctgtagttcaaaacaaaattatcgtcaaagttgatccatcaaaagaaaacaacttacaattatcattattagacaattcagacatattaccgatcggagaaatagaatcgacaaggggtttcgccaatgaaaatacaagattggcggctgtcgcattagaattaggaaaaaatgaggggtctttagtttacggaaccggagctgaaaatgcagaagatgtagctaagcaaatatcttctggattacctcttttagaggatgacagtgaattacaagaactctcaaaatttataaaaaaacatgtccacgaggattactctcttgcaaacctcgtattgagaggggttggataccattatggtaaaatgccaagtttattaagagaaacattagaaaaaaatttcacgaataataaactgaagtttttagtttgcacaacaaccctttttcaaggggttaatctgcctgcaaagaatgtttttattgatacacctacacgaggaaacaggggagaaaaattagatccagcatcgctatggaatttcgcagggcgggcaggtagattaggttatgcattttcgggaaatgtttatcttattgactatgatgattgggtaaccaagcctttagattccaaaatagacttcaaaattacttcatctttaaagaaagtaattaatgaagattttgacacagtaatatcacggttagacaaaaataatcattcaggagtgacgccatatagtaatattgatgcagcggcaggtcttttaatctccagagccgcaaaaggagatttgcataattttcttaaaagatcatttcgaactttatctgataaatcaaaacttgaaactattgataatgccacttatatctcattagaatcacttaaaatacctcatgaggttttaactctgaactggacagttgatccatttggacaggaacgattgtacaatagatttatccagaaaataaaggaaggtaaagttgacgaacttatacctcgccatccttcaggtgatgtttacaaaaattatgttggtgtttttagcagaataaataaatacatccttaaccataacacatctaaattttctaactatctaacttcaattgctttgaattggatgaggggtaaatctctgccggagataatctctctctccataaataagaaaaaagaaaaaaatccactaggcctgtaa

SEQ ID NO: 36892 - DNA, 234 bp, Escherichia coli; identical to SEQ ID NO: 35942

SEQ ID NO: 36893 - DNA, 609 bp, Escherichia coli
gtgaccgccaccgctgacatccagatcgccatcctggataaccttcccgttattaccgttgatttctgtaccggtggaatccttgccgtcaacggtggttttgccgttgttattcgccgtggcatcgtcatcgttaatctgtgtgccggtgccaccattgctgatggtgctgtcgccttcgttgttaacaaccgccttgtcgccgtcgatctgaataccgatggactccggatcggtgacggtcatggtgcccttgttatccaccgtcgcgctgtcgccggtgatatcaatgccgtgaccgccgccgctgacatccagatcgccgtcctggataacttttccgttattaccgttgatttccgtgccggtggagtctttaccgtcaacggtggttttgccattgttgtttactgtggcattatcacccgttataacaagctcaccgttgtgattatatcgccactttgttgtgccatctgcgctcacaccttcaagggcaacagtattattcgcttcatcaatctgccaaagattaatcgttgccttacgaccactgttatcttgcagagaaatagtcccgtcagcattctcggtataagtaaaaactga

SEQ ID NO: 36894 - DNA, 945 bp, Escherichia coli
atgccagaggtacaaacagatcatccagagacggcggagttaagcaagccacagctacgcatggtcgatctcaacttattaaccgttttcgatgccgtgatgcaggagcaaaacattacccgtgccgctcatgttctgggaatgtcgcaacctgcggtcagtaacgctgttgcacgcctgaaggtgatgtttaatgacgagctttttgttcgttatggccgtggtattcaaccgactgctcgcgcatttcaactttttggttcagttcgtcaggcattgcaattagtacaaaatgaattaccaggttcaggctttgagcctgccagtagtgaacgtgtatttcatctttgtgtctgcagcccgttagacagcattctgacctcgcagatttataatcacattgagcagattgcgccaaatatacatgttatgttcaagtcttcattaaatcagaacactgaacatcagctgcgttatcaggaaacggagtttgtgattagttatgaagacttccatcgtcctgaatttaccagtgtgccattatttaaagatgaaatggtgctggtagccagcaaaaatcatccaacaattaaaggcccgttactgaaacatgatgtttataacgaacaacatgcggcggtttcgctcgatcgtttcgcgtcatttagtcaaccgtggtatgacacggtagataagcaagccagtatcgcgtatcagggcatggcaatgatgagcgtacttagcgtggtgtcgcaaacgcatctggtcgctattgcgccgcgttggctggcggaagagttcgctgaatccttagaattacaggtattaccgctgccgttaaaacaaaacagcagaacctgttatctctcctggcatgaagctgccgggcgcgataaaggccatcagtggatggaagagcaattagtctcaatttgcaaacgctaa

SEQ ID NO: 36895 - DNA, 288 bp, Escherichia coli
gtgaaggaaagcgatcacccctgctggctcgatgaagacgacgaaaacctgcccgtggtgctcgatgccatcctgaaccggggcgctcgtttttcgtcggtggaaatgtatctggtcagtgagtgtgtggagcatatcctgtccagtgggctggcctgcgatgtgctgcgtatacctgatgaaccgtcccgtcgctggtttgaccgggatattctgcgggaggtggtcctggaagcccggactgaaatccgcagcatggcggatgcactggcgaaaatccggaaatga

SEQ ID NO: 36896 - DNA, 288 bp, Escherichia coli; identical to SEQ ID NO: 36895

SEQ ID NO: 36897 - DNA, 162 bp, Escherichia coli
atgatcgcaatgaacatgccaatgaccgaaagaataaaagcaggcaagctatttaccgatatgtgcgaaggcttaccggaaaaaagacttcgtgggaaaacgttaatgtatgagtttaatcactcgcatccatcagaagttgaaaaaagagaaagccggtaa

SEQ ID NO: 36898 - DNA, 576 bp, Escherichia coli
atgaaacttacaataaatgaaaagataggttttggtgctggtgatatggctatcgcgatagtaatgatgtctttggccatgatcatcacttatttttacacggatgtatttggtctgaaacccgtcgacttaggtattctgttattttctgtacgtatccttgatgctgtgattgatccagttgtgggaacaatgacagacagaacgaatacacgttggggaaaatatcggccgtggttgctttttatgtcaataccgtttgggataagcatttggttgatgttcaccacacctaataccgattattcagttaagcttttatgggcctgggctacctatgtgttacttaccttgacctatacgttaatcgctattccttatgtttcattaatcagcgttatcacggatgatccacaagagcgattgagcgccaatggttatcgttttgttatgacaaaaattgccatgttcgccgtaacaattattgttcctttatctgcaatgtatcttgggaagaataacgtacaactgggttatcaaatagcaatgggggcaatgggagtttttttagcgtga

SEQ ID NO: 36899 - DNA, 1653 bp, Escherichia coli
atgttttgtgtgcaatgtgaacaaactatccgtactccggcaggaaacggctgctcatacgcgcaggggatgtgtggtaaaacggcggaaacctctgaccttcaggatttactcatcgcgacgctgcaagggctttcggcctgggcagtgaaagcacgtgaatacggcatcatcaaccacgatgtagacagctttgcgccacgtgcctttttctcaaccctgaccaacgttaacttcgattctccgcgtattgtcggctacgctcgtgaagcgattgccctgcgcgaggcgctgaaagcacaatgcctggctgtagatgccaacgcccgcgtcgataacccgatggctgacctgcaactgatgagcgacgatctcggcgagctgcaacgtcaggcagcagaatttacccctaacaaagataaagcggcgattggcgaaaacattctcggcctgcgtctgctgtgcctgtatggcctgaaaggtgcggcggcctatatggaacacgcgcatgttctcggtcaatacgacaacgatatttatgcccagtaccataaaatcatggcgtggctggggacctggcctgccgatatgaacgcgcttcttgagtgttcaatggaaatcggccagatgaacttcaaagtgatgagcattctggacgcaggcgaaaccggtaaatacggtcacccgacgccaactcaggtcaacgtcaaagcgacggcgggtaaatgcattctgatttccggtcacgatctcaaagatctctacaacctgctggaacagaccgaaggcacgggcgttaatgtctacacccacggcgaaatgctgcctgcgcatggttacccggagttgcgtaaattcaagcatctggtcggtaactacggcagcggctggcagaatcagcaagtggagttcgctcgtttcccaggccccatcgtgatgacctcgaactgcatcatcgacccaaccgtaggcgcttatgacgatcgtatctggacccgcagcatcgttggctggccgggtgtgcgtcatctggatggcgaagatttctctgcagtcattgcccaggcgcaacagatggcgggcttcccgtacagcgaaattccgcacctgatcaccgtgggctttggtcgccagacactgcttggcgcagccgatacgctgattgatctggtgagccgtgaaaaactgcgtcatatcttcctgcttggcggctgtgacggcgcacgcggcgagcgtcactacttcaccgatttcgccaccagcgtgccggatgactgcctgatcctgaccctcgcttgcggtaaatatcgctttaataaacttgagtttggcgatatcgaaggtctgccgcgtctggtagatgctggtcagtgtaacgatgcttactcagcaattattctggcggtaacgctggcagagaaactgggctgcggagtcaacgatctgccgctgtcgctggtgctctcctggtttgaacagaaagcgattgtcattctgctgacgctgctttctctgggtgtgaaaaatatcgtcaccggcccgactgcacctggtttcctgacaccagacctgctggcggtgctgaacgagaaattcggcctgcgttctatcaccactgttgaagaagacatgaagcaactgttgagcgcgtaa

SEQ ID NO: 36900 - DNA, 1509 bp, Escherichia coli; identical to SEQ ID NO: 31242

SEQ ID NO: 36901 - DNA, 402 bp, Escherichia coli
gtggtcaatcaaatcggcggtaaagagcgttatttctttggcaatattttgtggcagacacgggcgttgatggaccttgcgatcggtcataagctggcgaaaggccgcccggagcgcgaatatttacagaccggcgatgcggtggatagctggaaagtgattgtcgttgaaccggaaaaacaacttacgttgttatttggcatgaaagcgccggggctgggacgactgtgttttaccctggaagataaaggcgactatcgtactattgatgtccgtgctttctggcatccgcacggtatgccggggctgttttactggttattgatgatccccgcgcatctgtttatttttcgcggaatggcaaaacgaatcgccagactggcagaacaaagcacagattaa

SEQ ID NO: 36902 - DNA, 1044 bp, Escherichia coli; identical to SEQ ID NO: 29075

SEQ ID NO: 36903 - DNA, 195 bp, Escherichia coli; identical to SEQ ID NO: 7798

SEQ ID NO: 36904 - DNA, 321 bp, Escherichia coli; identical to SEQ ID NO: 28314

SEQ ID NO: 36905 - DNA, 198 bp, Escherichia coli
atgaacatgcgtaatattaatgttattacagccctctctttgccgggtaaaaccgtgtcagatgattttatgcatgctgttctcagtaactgcgccacaagaatcgtacttcctgcaccggagaaattcggttctgagtcattgccggacaattttaatatgactgctgtcggtgtgatgaagaattcagaaatataa

SEQ ID NO: 36906 - DNA, 315 bp, Escherichia coli; identical to SEQ ID NO: 35936

SEQ ID NO: 36907 - DNA, 522 bp, Escherichia coli; identical to SEQ ID NO: 35947

SEQ ID NO: 36908 - DNA, 204 bp, Escherichia coli; identical to SEQ ID NO: 35944

SEQ ID NO: 36909 - DNA, 417 bp, Escherichia coli; identical to SEQ ID NO: 35961

SEQ ID NO: 36910 - DNA, 483 bp, Escherichia coli; identical to SEQ ID NO: 6584

SEQ ID NO: 36911 - DNA, 330 bp, Escherichia coli; identical to SEQ ID NO: 35973

SEQ ID NO: 36912 - DNA, 792 bp, Escherichia coli; identical to SEQ ID NO: 35988

SEQ ID NO: 36913 - DNA, 480 bp, Escherichia coli; identical to SEQ ID NO: 35963

SEQ ID NO: 36914 - DNA, 348 bp, Escherichia coli; identical to SEQ ID NO: 35982

SEQ ID NO: 36915 - DNA, 2382 bp, Escherichia coli; identical to SEQ ID NO: 17730

SEQ ID NO: 36916 - DNA, 504 bp, Escherichia coli; identical to SEQ ID NO: 35995

SEQ ID NO: 36917 - DNA, 1419 bp, Escherichia coli
  misc_feature (1286)..(1295): n is a, c, g, or t
ttgattgctcctggggataagttaaatatctggatttggggagcggtcaatttctctaatgtggttacggtagataatcaaggaaatattttcatacctgatgtaggtccaataaatgtaaaaaatgttcctgcaagccaagttaatcagttggtggcaagtaagatcggtgatgtatttaccaataatgtaaatacttacgtaaatcttttgactgcaacccctgtaagtgtattcgttacggggcctgtaattcgtcctgggcagtatgcaggacaatcttctgatagtatattgtattttttaaaacgtgccggtggaatagattctgaccgtggaagttatcgaaaaattaaggtgttacgacaaaatagagtaatacagcaaattgatctttatgatttcatacggtatgggaaactcccgaagctggcattaaaagatcaagatgtgattttagttgagcaacaaggtccaatgatcaatgttgcgggaaaggttcgaaacccattccgatttgagcttacccagcgcaatgcattaggctctgaattggtgaattatgcacttcctctcgcaaaagtcagtcatgtcggtgtgattggcgacagggaaagcggcccgttttccgtctacttgccgtataaagattttacacgtcttcaacttaaagacggtgacaaagtactttttaatgatgacatgcatgcacaagtatatgatatacaagtatcaggcagttatatgggaccgtcatatttcacggttcgtaagcaaactaaattgcatgatttattgaactatatccctattgacccagagcttgcggattatcaatcaatttatctgatacgaaagagtgtggctgcaagacaaaaagagatgctggatgaatctctaaaccgcttggaacgtagtgtatttaccacacccgcgcgatctgatggtgaggcgaatatacgtgctaaagaagcagagttagtgatgcagtttgttgaaaaggctcgtaaagttcaaccgcttggtaaagtagtagttgcagataaaggtgttattgccaatatccaattagaacaaggcgatcaaatagttattccaaataagactgatcttattcaagtgggtggtgaagtgttgatgccacaagcagtagtatataatgccgatgctaatttggatgattatgttgcatgggccggaggttttactgagcgagctaacgacaagcgaattgctattgtacatgcaaatggtcttgtagaatttaaagggcaaggtaaagtacnnnnnnnnnnagtacaaccgggggatcagatattggttctacctcaggttgatagcaaaaccatgcaatcatttaaagatatcacacaaattatttatcaaatcgctgtagctgctaacgttgctattaaatga

SEQ ID NO: 36918 - DNA, 345 bp, Escherichia coli
atgactcaaaactatgaactgattgtgaaagggatccgcaattttgagaataaagttacggtaactttagcgttacgggacaaaaaacgctttgacggtgaaattttagacctggacatctcgctggaccgtgttgaaggtgccgcgctggagttttatgaggcagcagccagaaggagcatcagacaggtcttcctggatgttgctgccgggttatgtgaaggggatgagcagtcaccggaaaagcgccccataattttagaggcgcagaatgtgtggataacctacaaaggaaagctaccgggaagaattactggttctctgaagactccgccgaaatggtaa

SEQ ID NO: 36919 - DNA, 252 bp, Escherichia coli
atgctagcagacatcactggacagcctaatacaacctccacaacaggaagcttcacacaacagaatcgtaatgggatgttgcttccaggagagtcagatgtacgaaaattactgccgcaatctgaagcaggcttacctcctccgtatggtgctaatttatttgccggaggctatgaaacagaaaggagtgacggcttaagcgataattatttgatctgtctcttatacacatctgacgctgccgacgaatag

SEQ ID NO: 36920 - DNA, 522 bp, Escherichia coli; identical to SEQ ID NO: 35947

SEQ ID NO: 36921 - DNA, 204 bp, Escherichia coli; identical to SEQ ID NO: 35944

SEQ ID NO: 36922 - DNA, 480 bp, Escherichia coli; identical to SEQ ID NO: 35963

SEQ ID NO: 36923 - DNA, 348 bp, Escherichia coli; identical to SEQ ID NO: 35982

SEQ ID NO: 36924 - DNA, 1770 bp, Escherichia coli
gtgactggcgcaggtaaaacagaagcggcgcttatcctggcgcacaggttgatggctgcgaggaaagcacagggtttgttttttggcctgccaacaatggcaacggccaatgccatgtacgatcggttggtcaaaacctggcttgctttctattctccagaatctcgccccagcctggtgctggcacacagtgcccgcacattaatggatcgctttaatgaatcactctggtccggtgatttagtcgggtcagaagaaccggatgaacaaacgttcagtcagggatgtgcggcctggtttgccgacagtaacaagaaggcgttgctggctgaaattggcgtcggcactttggatcaggcgatgatggcggtgatgccgttcaaacataataatctgcggcttctggggctgagtaataaaatcctgctggctgatgagatccacgcctgtgacgcttacatgtcatgcattcttgaagggctgatcgagcggcaggcgcgtggcggaaacagcgtcattttgctttctgccacgttatctcaacagcagcgcgacaaactcgttgctgcctttgcgcgtggtacagagggccagcaagaagctccgttcctggaaaaggatgattacccctggctgacgcacgttacgaaatccgatgtgcattcacaccgggtagcgacgcgcaaagacgttgagcgtagcgtgagcgtgggttggcttcatagcgaacaagaatgtattgcgcgtatcgaatcggcagtaagtcaggggaaatgcatcgcctggatccggaattctgtcgatgacgctattaaggtttatcgtcagttgcttgcccgcggcgtcattcctgcttccagcctttctctgtttcatagccgctttgcttttagcgatcgccagcgaattgaaacggaaacgctggcacgcttcggtaaaagttgtagtttacagagatcatcgcaagccattgtttgtacacaagtaattgaacaaagtgtggatattgacctggacgaaatgatatccgacctggcccctgttgatttgctgatccaacgggcggggcgattacagcggcatatccgcgatattaatggtcagttaaagcgtgacggaaaagacgagcgttcccctcctgaattgctgattctggcccccgtctgggacgacgctccaggtgacgaatggttcggcagtgccatgcgtaacagtgcatatgtctatcccgatcatggacgaatctggctgacgcagcgtgtactgcgtgagcaaggcgcgattcaaatgccacacgcagcccgccttcttattgaatcagtctacggtgaggacgtggtaatgccggaaggatttgcccgcagcgagcaggaacaagtgggcaaatattactgcgatcgcgcaatggctaaaaagtttgtgctgaacttcaggcccggctatgccgccaatatcaacgattacctcccggaaaaactgtcgacacgtctggctgaggagtctgtttccctgtggctgtctacctgtattgccggtgtggtgaagccttatgccaacggtgctcacgcatgggaaatgagcgttgtcagagtgcgtcgaagctggtggaaaaaacatcgggatgagttttctttactggaaggggatgcgttcaggcagtggtgcattgaacagcggcaagagccggagatggcaaacgtgattttagtcaccgatgacgaaagttgcgggtattcggctatggaaggattgactggcaaggttggttga

SEQ ID NO: 36925 - DNA, 930 bp, Escherichia coli
atgcgtaaatatcctttaagtttactgaaggataaaaatattgtgactttttttgatttctggggaaaaacccgacgcggcgagaaagacgggggcgacgactatcaccttctttgctggcattcgctggatgtagccgcgatgggctatttaatggttaaaagcaattgcttcgggctggctgactattttcgtcaactaggtttcgctgatacggagcaggcagcacaatttttcgcctggctattgtgctggcacgatactggaaaatttgcccgctcttttcagcaactttacctgcacccacaactcaaggttccggaaggcgcaagaaagaattacgaaaagatctctcattcaacgctgggctactggctgtggcatcattatttaagtgaatacgaagaattgcttccttcatcttcactctctccgcgcaaacttaaacgggtgatggagatgtggatgcccatgactaccgggcatcatggtcggccccctgaccgtattgatgaactggataattttctgcctgaagacaaagctgccgcacgagattttctccttgaaatcaaggtactgtttccgctcatcgagatccccgcattctgggatgatgacgagggcattgaacttttaaaacaactttcctggtatatctctgcaaccgtcgtactcgcagactggacgggatcgtcaacgcggttttttccacgcgttgcacaggcaatggatattaaagattactggcagaaggctttagttcaggctcaaaacgccttaaccgtctttcctccaaaagcacaaaccgcgcctttcgccggaattaatacactgtttccttttattgagcacccgacaccgttacagcaaaaggtgctggatctggatatcagccaggaccgcagttatttattctggaagatgtga

SEQ ID NO: 36926 - DNA, 189 bp, Escherichia coli
atgaatattaattttgattctgcaacttataacgcgttgttaaatcgtgcaaaggcagaagggaaatcaattccaaaacttgttaatgaattactaattacagtccttacaaaggaggaactaaatgatcaaaaatatcaaaacaattgccgaagcgaaagccaaatgtctaaatcagaaagatggtaa

SEQ ID NO: 36927 - DNA, 312 bp, Escherichia coli; identical to SEQ ID NO: 29742

SEQ ID NO: 36928 - DNA, 276 bp, Escherichia coli
gtggcttctgtttctatcagctgtccctcctgttcagctactgacggggtggtgcgtaacggcaaaagcaccgccggacatcagcgctatctctgctctcactgccgtaaaacatggcaactgcagttcacttacaccgcttctcaacccggtacgcaccagaaaatcattgatatggccatgaatggcgttggatgccgggcaacagcccgcattatgggggttggcctcaacacgattttacgtcacttaaaaaactcaggccgcagtcggtaa

SEQ ID NO: 36929 - DNA, 450 bp, Escherichia coli
atgcgctttgtagaccagctgcgccgcgccgacagtagcgctgtcgaacgcggtaagacgatcccagatacgctctacaaccgacattccccattcgttctcggtcatcttctgctgaaatggcagcgtgacgccatcaaagcgaatcaggcgactgtgatgaatgcgccaggcaggaattcccgttgctgtggtcaccacatcgtaaaactcaggtttacccaggtccggccccatatctttaatgcggcgggtcagtaccgggtcaatcatccagcggtcgagcgggagaatccccttaaacttgcccttaccgatggtttcgggtcgcagcggggtcattggtgcctgcccctcaatcatgatgaaacccaccgcgccgccgtagaggcgcgaccatttcagcacgtcattcagcgcatcccagatttgcaactcatccagttgtga

SEQ ID NO: 36930 - DNA, 1752 bp, Escherichia coli; identical to SEQ ID NO: 11847

SEQ ID NO: 36931 - DNA, 294 bp, Escherichia coli; identical to SEQ ID NO: 4783

SEQ ID NO: 36932 - DNA, 336 bp, Escherichia coli
atgaccgtaggccgtgaagagtccagtcctgtcacgctgaacgctcacgaagatacggctatagcggatatcccaactcctgataaatcagagctgcaagcggcggagcagatggttaaggcacttggtggtaaagagaatattaagtcactggataattgcgtaactcgtttacgtttaacaatcgcagatatgggattgattgacgaggctgcaataaaaagagctggcgggattgcggttgttaaacttgatcaaaataccctacaagtcattatcggcactaaagtcatcgccctgcgtcgggatatggataactatatggggatatactga

SEQ ID NO: 36933 - DNA, 717 bp, Escherichia coli
gtgaggaatggatacgagaacggctttccagcccagatcttgaggaggattctgaagaatggcagttacttgaaaaggactatgacgagtatcaggactttctttcaaaaatggttaaaacagcatccacatacagaaatttataaaatagcaataaaccttttagaacaaataaaagaagagggaaaacaatctacaagtgaagttttcataaaaatgaaaatcgcatacattgtgacaataatggaaaactgtcttagcgaaatgattaaaagcgttgtattgtcacataacagatatgtagaaaatgccataagaaacataaatgaactgaaagcaaagaatatctctctatctgagttgataaataaagagtctaatgcaaacaaatatgtacaggagtacctttcagatattctttatcatagaatccaactggtagttgaaatatataaagcagtcctgcaacctaagcaatatccacgttttccactcaaaaatatcaatgaattgatgaaactgaggcatgacatagttcatcgtaacgggaaaacgaaaacaacggatgaaaagatacatacattcaatacagctacgctcaatgatgcgtttaaagttgtagaggagtttcttaataacatgatgaatttgatcagtgatgctgttgagcatcatgagaatgagcagatagccagagatcttgaagacgagttttga

SEQ ID NO: 36934 - DNA, 411 bp, Escherichia coli
atgtatttcgtgcaaccaaattctatagtgttagcttttacattttatattgtggtgacctttctgactgatattcagcttcccatttattgggcatccattgctgagtcagtggattatggtgaaatgaaaacggggcaacgtgtttctggactggcatttggcgggattctcttttttcaaaagtttggtatgggactggcgggagggtttatcggaatcgctttagcgtttatggactatcaacctggcgtagaacaaacaccacaggcgttgtgggggatctgcctgttaatgacgatcattcccgcgatacttaacctgattaccggactcatcatgagattttatctgattaataatgaatattacgaacagattaaggtgtgtttacagcctaaaaatatatga

SEQ ID NO: 36935 - DNA, 138 bp, Escherichia coli
atggactacaccgtcctgccgaaagaaaatgtacttttctattttgtccaattattcggttttcactcaataattttgattttattgcacgcagtgctcgggttttaccactaccatttggcccgaccatcgttgtaa

SEQ ID NO: 36936 - DNA, 483 bp, Escherichia coli
atgattaatgaacaagcccgaacacttaatccagacttaaatatcgacgcccaggaatacgccgacctgttaattgaacgctttagcaaccgtaatgttgcacaccgtaccgggcaaatcgctatggacggttcacaaaagcttccccagcgtgcgctgacgccctggctgaaattgcatcagcaaaaacaaaacaatgctgttctgtcactgctcgttgctggttggttgcattatgtcattgaagctgttgagaaaagccagtctgtcgcggatccaatgaatgaacaatttcaggcgctaataaaggaacaacaagacgcatggcaacaggcgctcgcattactgcaccttagcgccatatttggtgatttaagcaaccatcagccatttataaatgaaataaaaatcgcctttgcaaatataaaaaacaaaggcatcaaggccaccatcagccaattattatcggatgagcagaaatga

SEQ ID NO: 36937 - DNA, 207 bp, Escherichia coli
atgagattaacgacgaaattttcggcctttgtcacgctgctcaccgggttaacaatttttgtgactttgctgggctgttcgctaagtttctacaacgccattcagtataagtttagtcatcgtgttcaggcggtggcgacggcgattgatacccacctagtgctgagagatcccctcataatttccccaaagcgtaaccatgtgtga

SEQ ID NO: 36938 - DNA, 483 bp, Escherichia coli; identical to SEQ ID NO: 14139

SEQ ID NO: 36939 - DNA, 588 bp, Escherichia coli
atgaagtcggattcgctatcatcagaggactgtcataaatatctgacaacagctctccggcagggacacaaggtgaggcatctgtcctgtcagctttttgagctggcacgtcttgagcatggtgctataaaacctcaactggagcaattttctgtctgtgaacttattcaggatgtagctcaaaaatttgagctcagcatagaaacccgtcgattgcaactaagaattatgatgtcacattccctgcctcttatcagggcagatatttcaatgatagagcgtgtgataacaaatttactggataatgctgtacgccacacacctccggaaggctcgatcaggctgaaagtctggcaggaagataatcggttgcacgtcgaagtggctgacagcggccctggactaactgaagatatgcgaactcatcttttccggcgggcatcagtgttatgtcatgaaccgtcagaagagccccggggaggactgggattgctgattgtacgcaggatgctggtactacacggtggtgatatcaggttgactgattcaacgactggagcctgctttcgtttttttcttccattataa

SEQ ID NO: 36940 - DNA, 354 bp, Escherichia coli
  misc_feature (309)..(318): n is a, c, g, or t
atgaataacgtaaaaaaaatactgctgatggaagatgattatgatattgcagctctgttgcggcttaatctgcaggatgaagggtatcagatagttcatgaagcggatggcgccagagctcgtttattactagacaagcagacctgggatgccgtaatacttgatcttatgctgcctaatgttaatgggctggagatttgccgttatatccgtcagatgacccgttatctgcctgtgattatcatcagtgcccgtaccagcgaaacccaccgcgtcctgggactggaaatgggggctgatgactatctnnnnnnnnnnactatctaccgaaacccttttccattcctgagctga

SEQ ID NO: 36941 - DNA, 1083 bp, Escherichia coli
gtggcggcgctggagagtattgaagagtgctggtttgcccgtcatttattggcctgcttctactacaacaagcgtagctacggcaaagccattgccttatggcaacgttgcgtagagatgtcgccggagtttgccgacggctggcgcgggttagcgatccatgcgtggaataagcagcacgattatgagctggccgcgcgttatcttgataatgcttatcagcttgcgccgcaggatgcacgtctgcttttcgaacgggatttgctggataagttaagcggagccacaccggagaaacgactggcgcgtctggaaaataatctggaaattgcgctgaaacgcgacgacatgaccgcagaactgctcaatttgtggcatctcacggggcaggcagacaaagcggcggacattctcgccacgcgcaaattccacccgtgggaaggcggggaagggaagatcaccagtcagtttatcctcaaccagttattacgcgcctggcagcatcttgatgccagagagtcgcagcaggccagcgaactgcttcatgccgcgctgcattatccggagaatttaagcgaaggccgtttaccggggcaaactgataacgacatctggttctggcaggcgatatgcgccaacgcgcagggtgatgaaactgaagcgatgcgttgtttacgtctggcggcgactggcgatcgcaccattaacattcacagttattacaacgatcagccggttgattatctcttctggcaaggaatggcgctgcgactgctgggtgaacagcaaaccgcacagcaactgtttagtgaaatgaaacagtgggcgcaagagatggcgaaaaccagtattgaggcggatttctttgctgtttcacaacctgacctgttgtcgctgtatggcgatttacaacagcagcataaagaaaaatgcctgatggtggcgatgctggcgtccgcgggactcggggaggttgcgcactatgaatctgctcgcgctgaattgacggcgattaatccggcctggccgaaagcagcattattcaccaccgtgatgccttttatttttaaccgcgttcactaa

SEQ ID NO: 36942 - DNA, 177 bp, Escherichia coli; identical to SEQ ID NO: 21779

SEQ ID NO: 36943 - DNA, 246 bp, Escherichia coli; identical to SEQ ID NO: 22343

SEQ ID NO: 36944 - DNA, 432 bp, Escherichia coli
atggaaaagaaaaaccgcccattacaggcggctaattcagatattcgtgtatctgatgttacgccccttacaaaatcccttcaagcaccaaagcgcacaccgaaaaagcatcgtgcccgagtctatatgctgcgtactggtatagagggatggacagaaaatgacattcttcgctactgccgtctgtcttctggtcgtaactatgcaacagagttagaacgccagcttggaatcactctggagcgtatcgacgaaaagaatcctgatggtatcggaacacaccttcgctaccgtttctcctgccgtggtgatgttctgaaagtgatcactcatattaaccatcttgcgaacataaatgatcacaacggactttctcagcaggaaattgccgacattctgaaactctacccggacgcgtttaacgccgcctaa

SEQ ID NO: 36945 - DNA, 834 bp, Escherichia coli
atgaacatcgaaaaaagcagattaatttctgaggccgcccctcatctgaacgcctctctgagcacaattaacggtaatgaatttgccgcaattgtcccggttattcctggtcatatcggtgggcgtgaaaccaatattgttagcgcaaaagcgttacacaaagcgttgggcgtgggaaaagacttctctacatggatcactgatcgcatctctgaatatgacttcaccattgggcacgattactcagtccataaaacaatttccccaaatttggggaaaagcccgaatggcgcggcttacagcaagattaagcactctggcagacccggcaaagactatctgttaagtgtcggaatggcgaaagaactggcaatgatcgaacgcaatgatcagggtcgcgctatccgtcgttatttcatccagtgcgaggaagaattacagcgtagcgtgcctgaaatcgccgcccgctatcgtcgccagctaaaagcccgtatcagtgccgcaaacaactttaagccaatgtgcgatgcgctgaatatggcccgtgccgagatggggaaaacgacgcagcaacaccactacacaaacgagagcaatatgatttctcgtatcgttcttggtgggctaactgctaagcagtgggcgcggataaatggctattctggcgaacctcgcgaccatatgaacgcagaacagcttgagcacctctcatatctcgaaagcaccaatatcacgttaattgatatgggcatggaatatgggcagcgcaaaggagaactcacccgcctgtcgcaacgctggctcgccaagcgtctggaggcgctcaatgtctaa

SEQ ID NO: 36946 - DNA, 183 bp, Escherichia coli
atgtctaagccaacaggaacaccacaaccacaaaaacgctacaaagatgcccacggagcactcgttactgtcgaaagcgtgtctcacaaccgagtgacgttttatcgcgacgggtatcaatcgccatgcgtacaaccgctggcacgtttcatgaaggagttcgcggaggttaacaaatgctaa

SEQ ID NO: 36947 - DNA, 1068 bp, Escherichia coli
atgctaaccgtccagaagaagatattttcactggctggtatgtcgccaaaatccagcaatatgacagcaaagtcaggcattaatacagcagatacaagcaaagtttatcatttgctggtggtcggaacggatgccttaaccataccagaaatctcgggcgatgatattagccttgagaaggtcagcggctgcgccagaaaatttctggtcgtagatgatgtcttccgctcgtgtagtgactccacaaaaacattcgtccacgcgcgtgacgttaacgaaatgagcgcgatgtactgtgcttctggttcttccaatagtgagttttcggagtccataaaaaagagcttgccgttatgcggcaacacggtttatggttataaggcacctcataaaacgggtgccgggattggcgtcctggtaaatcgaatggcgacatatgacgcgccgagcgtctttttttatgtcgtaggtctgactcacccattttttgggcgttggtgtataatccagcgcctttgtcaatcaatggtggctcaggcgggggcttcttcggaagcgccggtatccttcagagccggttacgccaaccctgtctgggctaccaccagcgaaattggcgtttccggtggtagcgtaacccgctatctgaaggaggctgccacatgctggctactacccctacccaaaaaccgcaatttatctggattatcgccgcagttcgccgcgattgcccgacaattaccgccaaaattcatcatattgctgccgagtctgaacgcgatgctcgccgttctctggtgcgcgatcacatctgcttttttgctggtcgtatccgcatggaggtggcacatgattaaaacctacgatgtgcatatggatcccctcgaacgcacaagccagatcatcacactgacagaagtgattaacgacattctggtgagcaactctccctcacgagacgaaagactgaaggcgttactcgcgatattggatctcgccgttcgtgacgttcatttcctgctggaaggtggcgaaatgccaggaaaaacgggggcaaccaatgaataa

SEQ ID NO: 36948 - DNA, 195 bp, Escherichia coli
atgaataactcaattaatacccctcgccttacgtccgcacttcaattaatcgagcaagcagcggctgtcctggttgctgtcagtctttcggctgaagaaatggacgctgctgatgtcgtggatgcgattaaagcgtgctcatctttggttaacgatgcccgtgccgagctggtaattcttgggggtgaaaaatga

SEQ ID NO: 36949 - DNA, 264 bp, Escherichia coli
atgaatatcaacttaatttatcgtcatccgtgtgagctggaaattgaatcattgctggggcgtgaagagccatatccagacacattcactcccgcagattgcgcgactgaacggcttaccagagcgcgcacaggtctggttcatgtgatgaatgagattgttccctcggtgggaggggaacaggcgacagtaatcaatagctggctacaaaaagttacctccctgatagatatcggtttaatcgatgtggagagtgcgaaatga

SEQ ID NO: 36950 - DNA, 222 bp, Escherichia coli
atgaccaacatccagctcattgaagcgcaatgtcgcatcgaacaggttcagactgttttagggttctggcttgaaggggccagccccagcaacagagacaagttaatgattggcgcggttatgtcactgctcaatggcgtaccagaagctattcaggaagcggacgaattgttgggcaaatatgagttacagaatcattcaggcgaggcgaaacatgaataa

SEQ ID NO: 36951 - DNA, 351 bp, Escherichia coli; identical to SEQ ID NO: 26850

SEQ ID NO: 36952 - DNA, 447 bp, Escherichia coli
atgatcgaaaccctgctggatttttcggggctggaggacatcagccgcgatttgcagcttctgagtggtgcggaaaataaccgggtgctgcgtgaggcaacccgtgcgggtgcgaatgtgctgaaagaagaagtggtgtcacgggcaccggtacgcaggggaaaactgcgccgcaatgtggtgatcctttcccggcgctcccgcgatggcgggatggaatccggtgtccatatccgtggtgttaatccggacaccggtaacagcgataacactatgaaggcggataacccgcgcaatgctttctactggcggtttgtggaaatggggactgtgaatatgccaccgcacccgtttgtgcgcccggcgtttgatgtgcgcagtgaacaggcagctcaggtggcgattgcgcggatgaaccgggccattgatgaggtactgagacgatga

SEQ ID NO: 36953 - DNA, 1206 bp, Escherichia coli
gtggatgcgcacctgaagcgtctgcgtgaactggaaaccagtaaggccgccacggcacagccggtgaaacaggccggtaacgggaatgtggccacggtggcttcagcgccggtgatccgtgttgagcagaaactggagaaggggattggtttcgcccgctttgccaaatcactggccgcggctaaaggtgtccgctctgaagccctggaagtggcccgtcgtcagtatccggatgacagccgtctgcatcatgtcctgaagtcggcggtgggggcagggaccaccacggacccacagtgggcaggcagcctgtctgaatatcaggaatatgcgcaggactttattgattatctgcgtccgcagaccattatcgggcgatttggtcatggcgggatcccggcacttcgtcaggtgccgttcaatattcgcgtgcatgcccaggtgtccggtggtgctgccggctgggtggggcagggtaaggccagacccctgacgaagtttgattttgaatccatcaccttcagtcatgcgaaggtggcggctattgcggtactgacggaagagctgatccgtttttccagtcctgccgccgatgcgctggtccgtaatgcactggcggaagcggtggtggcgcgtctggacacagactttgtggacccgaaaaaagcgacggtggccgatgtttcccctgcgtccatcacccatgatgtgaagggcacggcatcaaccggtaacccggatacggatgcggaagccgcgtttggtcagtttgtggcagcaaacctgcagcccaccggtgcggtctggctgatgtccagcacaaatgccctggcgctgtccatgcgtaaaaatgcgctgggtcagaaggaatatccggacatgaccctgcttggcggcaccttccagggcctgccggtgattgtctcccagtacgtgggtgaccagctggtgctggtgaatgcgccggatatttatctggctgatgacggcggtgtggcggtggatatgtcccgtgaagcgtcactggagatgcagtctgaaccgaccagcgacagcagcacaccgtcaccggtggagctggtctccatgttccagaccggcagcgtggccatccgtgcggagcgctggatcaactggcgtcgtcgccgtaccgcggcagtggcggtgatcaccggtgtgaactacggaactgcgtccggcggctga

SEQ ID NO: 36954 - DNA, 222 bp, Escherichia coli
atggcaaaaatccagtatctgcagggcacgcatgatgcccgggccggggatatccgtgatgtggcacagccgtgtgcggaggtgctggttcgcctggggaaggcggagtacatcacagtgcgacgtccggcaggtcagaaaaagaaacgtgatgcggagcatggcgaatgtggaaccttttgtggcgaacccgaaaaaaccagaaatcaggacgtgatgtaa

SEQ ID NO: 36955 - DNA, 192 bp, Escherichia coli
atgtcatcgaaaaaccggacccgcagaaccacaacccgcaatatccgtttccccaatcacatgattgaacagatcaacatcgcccttgagcataaaggatccggtaacttttcagcgtgggttattgaagcctgcaggagaaggctggcaacagatgcaacgcatctgttgcccggccagcatgacaaataa

SEQ ID NO: 36956 - DNA, 369 bp, Escherichia coli
gtgtcagacacactttccgggacaacgcatcccgatgacaatgacgaccatccctggtggggactaccctgcacagtgacgccctgtttcggcgcccgtctggtgcaggagggtaaccggttgcattaccttgccgaccgtgccggtatcagaggccggttcagagatgcggatgcgtaccctctggaccaggcctttccgctgctgatgaaacaactggaattaatgctcaccagtggtgaactgaatccccgccatcagcataccgtgacactgtatgcgaaggggctgacctgtgaagccgacaccctcggctcctgtggttacgtttatctggctgtttatccgacacctgaaacgaaaaagtaa

SEQ ID NO: 36957 - DNA, 219 bp, Escherichia coli
atgatgaaactggccctgacactggaagccgacagtgttaacgtacaggcactgaatatggggcgaattgtcgttgacattgatggtgttaatctcgctgaactgattaacatggtctgcgataacggctactggatttgcccctatatttccagacacctgttatcacttaacccattactggcttgctgccgtagatattcccgtggcgagcgataa

SEQ ID NO: 36958 - DNA, 198 bp, Escherichia coli
atggtgatacgcaaaaagaagtgcagggattgtggtaagaccatcactcataatacggtgtgttgtccgtattgtggctctgtcgatcccttcggttattaccgaaataccgatcgtttgctctgtttattggcgttactgctggtgctgattctggttaccgtttcaggcgtcagtgtatttgtactgttgccgtag

SEQ ID NO: 36959 - DNA, 303 bp, Escherichia coli; identical to SEQ ID NO: 21878

SEQ ID NO: 36960 - DNA, 807 bp, Escherichia coli; identical to SEQ ID NO: 21879

SEQ ID NO: 36961 - DNA, 138 bp, Escherichia coli
atgaagaaaatctggatgaatctcaggaaaaagatccggaggaaatggaaggccctgaacatccgcacaatgagaatgctggcagcgatccgcatcgcgattgcagtgatgaaactggcgaagtcgcagatcccgtaa

SEQ ID NO: 36962 - DNA, 375 bp, Escherichia coli; identical to SEQ ID NO: 26863

SEQ ID NO: 36963 - DNA, 336 bp, Escherichia coli; identical to SEQ ID NO: 33100

SEQ ID NO: 36964 - DNA, 570 bp, Escherichia coli
gtgtgtggcatacgtgccccggggaaaggatttttgctcatcaatcgccgggaatatttccagtgccgtggcatcacgcccgtcctgtggagccggcagggcactcaccgcatccagaaccgccttctgcagaacttccggatcgtagtcacgaccgtcgcgcggaacatgaatatggcttaccgcctccttcaccatctgctcgagcatcggacgcacatcatccggggtgagacttttaccgtctgccggctgcggaatatttgcgaccgcatcattcaccgccttctgcagaacatcgggatcatagtcacgaccgtcgcgcggaacagggatatggcttacagcctccttcaccatctgttcaagcatcggacgcacatcatccggggtgagacttttaccgtccgccggctgcggaatatttgcgaccgcatcattcaccgcctgctgcagtacatccggatcataatcacgaccatcacgcggtaccggaatggcccccacagcgtcatccaccatcgcctgcagaaccggacgcacctcatccaccgtcacatgcttctgtaa

SEQ ID NO: 36965 - DNA, 174 bp, Escherichia coli
atggtcgacatggcatttatcactcaactgaccggcctgacagataagtggttttacaggctcatcagggatggggcctttccggctcccatcaagctgggccgcagctcccgctggctgaaaagtgaagtggaagcctggctacaggcgcgtattgcacagccccgcccgtaa

SEQ ID NO: 36966 - DNA, 174 bp, Escherichia coli; identical to SEQ ID NO: 17110

SEQ ID NO: 36967 - DNA, 303 bp, Escherichia coli
atgtcctgttctcattcagttgtattactgaacaatgccttaaaaatcgccgttatgaaaaatggcgatttgtctcttattcaacttggtcttgataaagaaaaacgcgaaataactgaatctgttatcgcgatttatcagaacgaattaaacctcctgtctgatgtggtcaatttacttgttaaacgcgctgtatttcataagcaaatctcctccgtggatgaactgacgaaattaacgacagaaatcgccagctattgcgctgatgaatttaagaagctgaacgacaaaaggagctggtaa

SEQ ID NO: 36968 - DNA, 684 bp, Escherichia coli; identical to SEQ ID NO: 30419

SEQ ID NO: 36969 - DNA, 150 bp, Escherichia coli
atgaatattgaaaacttaaaaacaaaaataacaaaaaaaattattgaacttaagaaaaagaccgggaaagaagttaccagtattcagtttaccgcacgggaaaaaatgacgggtcttgaaagctatgatgtcaagattaatttaatctga

SEQ ID NO: 36970 - DNA, 618 bp, Escherichia coli
atgcccgtattccctgccagctttaacatgtccttcctgtgctgcatcatcgcctctttcaccccttcccggtgttttttcagcgactcctctgtcgaggcggtgaacagggccatagcgtctttgattttcgtctcgtttgatgtcacagcctcgcttacagattcgccgagcctcctgaactcgttgttcagcattttctctgtagattcggctctctctttcagctttttctcgaactccgcgcccgtccgtaaaagattgctcataaaacgctcctttcagtctgatattcctcccgccgttcgggtctgcaatgctgatactgcttcgcgtcaccctgacaacctcaactcccacatctgtgagtgcctgaatcacatcctgacggtcttttatctctccggcacggtaaagcacatcaagcccccgtgtaacgctctcagcaagcgcctgtttcgtttccggcaggttatcagagagagtcagcgtccggcggttctccggggcgttggggtcatgcagcccataatggtgattcaccagcgtctgccaggcatcaattctcggcctgtctgcccggtcgtagtacggctggaggcgttttccggtctgtag

SEQ ID NO: 36971 - DNA, 438 bp, Escherichia coli
atgccaaagagaggcaaaagcattcgaagctcttcgaggaatgaggaaacaaaaccttcaaagagcacagcgaaaacgactgatagatttatatctattagttttaagcattttcataacgtcgatgatgttgggcagtccataaatacatggaaagatgatggtagcctacctgatctcattgaaaaattggtttatctaacggcgaatggaatcactaaagtgatttctgacggtgtgtttactaactacactcgatttcctgagtcagctgtaaacgattttagatgcccagatgagatatcctctgatgaggattggggggttataaaaaacattggcgggcagaaaagaagagtcgccggatttctgagagataatgtgttctatatcgtgttttttgatagagatcatcgcttctggaagagtcaaaaatag

SEQ ID NO: 36972 - DNA, 1299 bp, Escherichia coli
atgatggttaactttagtctttcaaacgcattttccttcatggaagctcaaaatatgagcatgttggcggtgtcgtcatcgaaagacgatataaacttggctaatgtagtgtcagtaagggatgagcggatactgaagtctgctttgattttcggagctaacgctagcggaaaatctaatctcatgaagacaatatctttaatgaaagatattgtcctgcattctgtgcaagctatcgaaagtagcattacgaagaatgtagtcccttttttacttgatgaggcggggcctactaaaccatctgaaatggaaatgacttttattgcggatgggattaaatacagatacggattatctttatttcaagggaagataaaagaagagtggttgtactacacgccaaaaacaagggagactattctctttgagcgagatggtcaacttattgaaataaataaagcagcatttagcgagtcaaatctttttataaaggatggggtcattcagaagacaagagaagatgttccctttgtttctgttgttgctggatttaatggggagcactcaaagcgtgttgtgaattggtttagtaatgtggtatttctttctggttctaacgaaggaatgtttactggaattaccatgaagcttataaatgaatctgaagattttaaagcttggctaaaaaaaatattaccagcctttcagattaatgatatttatcttgatgaagttgcgcctgaatttccgtttggcaacataaaaacagatgatgataatttaaaaaatttattcagctcgattcagaattttgcaaaaaatcaaaaagtattttctcttagagtcgtgaaaaaaactgctaatggggagatttcggttcccattgattttgaatcagaggggaccaaaaagatagtctatctccttgggcctatttataacgccatgattaacaataacttattattggttgatgagttcgattcaaagttccatacccttttatctaagtttttatttaggatatttcatgcgcaaagtgaagggtttagccaagtaatcgctgcagttcaggatgttaatttaatgaatactgattgctttagacgagaccaaatttggtttgttgacaaggatgtaaagtcagggagtagccatctttattctttggttgagtacaaagagaaacaaagatcattgaagccatcatatgggaatgattatttatcaggtgcttttgatgcaatcccgttatttgataatcttaatgaatttgaaaagctaatgcctgagggatga

SEQ ID NO: 36973 - DNA, 159 bp, Escherichia coli
atgaagttttttctataccaaatggtcccatttgcctcagtgattagctcagcagtgctggcttttcactcggtatctgggtggggatggttcctttttgtcgcgtttatgctcagtggcgctgacactgtaaaaaaatacgtagggagtgaaacatga

SEQ ID NO: 36974 - DNA, 126 bp, Escherichia coli
atgcagacggacgagcctcaggcatacatttttcgcccttacataacggtaaagggcaaacggataacccgtcctaacgggggaatgtttaagatcccaattaatcgggaaaagaaaaaacaataa

SEQ ID NO: 36975 - DNA, 243 bp, Escherichia coli
atgcgcattttgcctagcacagcgaaatttttaacaaaaacaaccgagcctgaagggagtgtatggcggtattactataagccgggaaatacttgtccggcttccggcatttaccgctgcacgaactgtggtgatgaagtgacgtgcaataaagatgatcctttgccaccgcaaaatcacaggcagcataatgtcccaggtgacatccgatgggaattggtagtgatgacaaagacgaagtaa

SEQ ID NO: 36976 - DNA, 261 bp, Escherichia coli; identical to SEQ ID NO: 30420

SEQ ID NO: 36977 - DNA, 198 bp, Escherichia coli
atgaaaaatattatttctgtaactgtactatccgcgctgttcatgttcaatgctcaggctgcagacacaatggataaaacacatgaagtaaaaggcagcatgtccagcgcgcatgataaaatgtgcaaggatggtatgtgcaaaaatgcaatggataaaaatgaccacatgggtaaaaaagacaatatgtctcaataa

SEQ ID NO: 36978 - DNA, 228 bp, Escherichia coli
atggcatttgctacaccaaacgaagtgataacccaggtgccttcgtctgttgatgctcccagaaagccagatattgtcggtattgcgacgttagaaatagtggaatccaacatttgcataaacgtcgctaatgacaatgcaatagtgacgcaccataacgtcccaccggttaatggtgccggagttgatttagtgattgccattaaagttgtccattatgcgaaataa

SEQ ID NO: 36979 - DNA, 246 bp, Escherichia coli
atgtttaaggatggtgccgtgattaagcggatttatacggcagacgaacagcaacaacaggccgaatcacaaaaggccgcgttactttccgaagctgaatcagttatccagccgctggaacgcgccgtcaggctgaatatggcgacggatgaggagcgcgcacgactggagtcatgggaacgctacagcgttctggtcagccgtgtggatcctgcaaatcctgaatggccggaaataccgcaataa

SEQ ID NO: 36980 - DNA, 1494 bp, Escherichia coli
ttgaaaggaaatattgacctttctgacagcaaatcttctacgttattgaaatttgttacgccattgttaactcccggtgaggaaattcgtgaaaggaggcagtccggaaaatatgaatatattaccgagttattagtcaagggtgttgataaatggacggtgaagggggttcaggacaaggggtctgtatatgattactctaacctgattcagcatgcatcagtcggtaataaccagtatcgggaaattcgtattgagtcacacctgggagacggggatgataaggtctttttatctgccggctcagccaatatctacgcaggtaaaggacatgatgttgtttattatgataaaacagacaccggttatctgaccattgatggcacaaaagcaaccgaagcgggtaattacacggtaacacgtgtacttggtggtgatgttaagattttacaggaagttgtgaaggagcaggaggtttcagttggaaaaagaactgaaaaaacgcaatatcggagttatgaattcactcatatcaatggtaaaaatttaacagagactgataacttatattccgtggaagaacttattgggaccacgcgtgccgacaagttttttggcagtaaatttactgatatcttccatggcgcggatggtgatgaccatatagaaggaaatgatgggaatgaccgcttatatggtgataaaggtaatgatacgctgaggggcggaaacggggatgaccagctctatggcggtgatggcaatgataagttaattggggggacaggtaataattaccttaacggcggtgacggagatgatgagcttcaggttcaggggaattctcttgctaaaaatgtattatccggtggaaaaggtaatgacaagttgtacggcagtgagggagcagatctgcttgatggcggagaagggaatgatcttctgaaaggtggatatggtaatgatatttatcgttatctttcaggatatggccatcatattattgacgatgatggggggaaagacgataaactcagtttggctgatattgatttccgggatgtggccttcaggcgagaagataatgacctcatcatgtataaagctgaaggtaatgttctttccattggtcataaaaatggtattacattcaggaactggtttgaaaaagagtcaggtgatatctctaatcaccagatagagcagatttttgataaagacggcagggtaatcacaccagattcccttaaaaaggcacttgagtatcaacagagtaataataaggcaagttatgtgtatgggaatgatgcattagcctatggaagtcaggataatcttaatccattaattaatgaaatcagcaaaatcatttcagctgcaggtaattttgatgttaaagaggaaagagctgcagcttctttattgcagttgtccggtaatgccagtgatttttcatatggacggaactcaataactttgacagcatcagcataa

SEQ ID NO: 36981 - DNA, 1074 bp, Escherichia coli
atgagtacttactttttctcgtcagaaacaatgaaagaattgttcaaagattatctggtctttttgaacacgctgactcccagcacaaactttgaatcaaacagaaacaaaataattgctcaagcaataaacttcatttccgaaaaccctgaagattgggacaaaaaatcccagtacaacattgctatgattggcgacacctttaaaagtttcttaagagaaaagggggaagataacaacagcatcaaccttatattcacttgcttttttagatttatcattgaaccaagcattctctctccggaaatagagtctcacttttcaccactaagaaccatcaaggattttgctctgtataactataatgaattcgatgagcggagcagagcacagatagacttttctcttagagaactgccattagcaatggttaaagaagttttaagctccagcaatgttgacacatataaaaaatacattgatagtttaaacgaagggcgtcaatttttcgaaaagtgcgactccttcttaaaggagcaacatgccaaaatagagtcaattaaagagtcattaaaagggtatgaggtcgcatttaattttgttggattgtttgatggctttaattcacttggcaaaaagaaagaaagtgaaatcatgctatcaagaataattcttatcatcttggctataatcattccctccccgctgatatactatggaatgcataaattaccaactctcgaaacgacaaatgctgccacatattttatgtcagcactaccttttgcatcagttacattgattttcatgtattactttagagttgtactgataaatcatatatcgttacgaactcagattatgcaaatagaactcagaaagagcctttgtcagttcattcagagttatagcgactattcctcagagataaggaaaaacaatccggaagcgctttcaaaattcgaagacgtagtattttcaaacatcatgctatccgatgataagataccatctacatttgatggcattgagcaaatagcatcgttaatcaattcattaaaaaatggaaagtaa

SEQ ID NO: 36982 - DNA, 246 bp, Escherichia coli
atgtttaaggatggtgctgtggttaaacggatttatacggcagatgaacagcaacaacaggcagaatcacaaaaggccgcattactttccgaagcggaaagcgttattcagccactggaacgcgctgtcaggctgaatatggcgacggatgaggaacgtgcacgactggagtcatgggaacgctacagcgttctggtcagccgtgtggatcctgtaaatcctgaatggccggaaatgccgcaataa

SEQ ID NO: 36983 - DNA, 1251 bp, Escherichia coli
atgccaacaataaccactgcacaaattaaaagcacactacagtctgcaaagcaatcctctgcaaataaattgcactcagcaggacaaagcacgaaagatgcattaaaaaaagcagcagagcaaacccgcaatgcgggaaacagactcattttacttatccctaaagattataaaggacagggttcaagccttaatgaccttgtcaggacggcagatgaactgggaattgaagtccagtatgatgaaaagaatggcacggcgattactaaacaggtattcggcacagcagagaaactcattggcctcaccgaacggggagtgactatctttgcaccacaattagacaaattactgcaaaagtatcaaaaagcgggtaataaattaggcggcagtgctgaaaatataggtgataacttaggaaaggcaggcagtgtactgtcaacgtttcaaaattttctgggtactgcactttcctcaatgaaaatagacgaactgataaagagacaaaaatctggtagcaatgtcagttcttctgaactggcaaaagcgagtattgagctaatcaaccaactcgtggacacagctgccagcattaataataatgttaactcattttctcaacaactcaataagctgggaagtgtattatccaatacaaagcacctgaacggtgttggtaataagttacagaatttacctaaccttgataatatcggtgcagggttagatactgtatcgggtattttatctgcgatttcagcaagcttcattctgagcaatgcagatgcagataccggaactaaagctgcagcaggtgttgaattaacaacgaaagtactgggtaatgttggaaaaggtatttctcaatatattatcgcacagcgcgctgcacagggattatctacatctgctgctgctgccggtttaattgcttctgtagtgacattagcaattagtcccctctcattcctgtccattgccgataagtttaaacgtgccaataaaatagaggagtattcacaacgattcaaaaaacttggatacgatggtgacagtttacttgctgcttttcacaaagaaacaggagctattgatgcatcgttaacaacgataagcactgttctggcttcagtatcttcaggtattagtgctgctgcaacgacatctctggttggtgcaccggtaagcgcgctggtaggggctgttacggggataattgaaatctgtcttgttttttacttcagttattaa

SEQ ID NO: 36984 - DNA, 1065 bp, Escherichia coli
atggatagcgtccaccatatttggtgtccactattctttcaggaatttcaggatctgccagacggtgctgagacgacgcttacgaatcagcacggggctgacaactggaaaatcctgccgggtgtaccgttgtatgacacgattgttatcgtcactggtgagagtgtgcgcagggattatatgtcggtatatggctatcccgtgccaaccacaccgtggctgaatactgctcccggtttatttattgacggctatacatcggcagcagccagtactgtgccttccctgagccggacactgatttatgactatgagcagaaccctgattccggcaacaacgtggtggcgctggcagcaaaagcaggatacagcacatggtggatatccaatcagggaaaactgggagagcatgacacacgcatctctgttattgcttctgatgcggagcataccgttttcctcaagaaaggcagcttcgcttcccgtaaaacggatgacatgttgttgttacaggaaacagaacgtgcactggcggataaatcctctccgaaggtgattttcctgcacatgattggctctcatccgaatccgtgtgaccggcttaactcctggccgaatcattacctggggcagtatccccgaaaaattgcctgttacctcgccagcatcagtaaactggataactttctcggtcagcttgatggtatccttcgccggcattcccgtcatttcgccatgctttacttttctgactatgggatgtcggtcagcgatagtgctaatcctgttcatcatgatggccatatacaaggaggctacagcgttcccctgattattaccgccagtgacatcacgtctcatcagtccgtcagcagaaaaatcagtgcccgtcatttcgcaggtatttttcagtggctgaccggcattcgtactgaaaatataccgccattcaatctgctgacagacgaagataatgaacccgttatggtttttaacggagagaggaatgtactggcagacagtctgaaaccacagcctctgattcttccggtcaggggaaaataa

SEQ ID NO: 36985 - DNA, 213 bp, Escherichia coli
atgcttaccaattatccggcgcatagctgctggctgtttttcgacgagattaagcgtcatcactgtcatttccagaccctccggcttttcagaaaggtcagagccttttttaacggactctgttttttggtacggataatgattcccttgcgccccttcccgtgcgtgatggtgaagtcaatcgccctggggctttcgttacgcaataactga

SEQ ID NO: 36986 - DNA, 303 bp, Escherichia coli
atgtcctgttctcgttcagttgtattactgaataacgccttaaaaatcgccgttatgaaaaatggcgatttatctcttattcaacttggtcttgataaagaaaaacgcgaaataactgagtctgttatcgcgatttatcagaacgaattaaatctcctgtctgatgtggtcaatttacttgttaaacgcgctgtatttcacaagcaaatctcctccgtggatgaactgacgaaattaacgacagaaattgccagctattgcgctgatgaatttaaaaaacttaacgacaaaaggagctggtaa

SEQ ID NO: 36987 - DNA, 210 bp, Escherichia coli
atggaaacggaagcttttggtgacagtaatgccacgcgaaccacagaagcatttctggaaacggagtgcgtggaaaatgtcgccacaaccgaaatcattaaagcaactgaagaaagtaacggccatcgtgtcagtctgccgttatcggttttcgatccccaggactaccatccactgctgattaccgtttccggaaaaaacgttaactga

SEQ ID NO: 36988 - DNA, 210 bp, Escherichia coli
atgctgctaccattgcatcgcacatttgtcttaactgggataacatttgcattatcggcagtgtattcattgagctatgcacgagatgaatttaaccttcgtatcctggagctggatagcccacttgaaaatacacaagtgctggaggattttgttaataataataacttaactccgggagtatatcttacctctgttatgtgggggtaa

SEQ ID NO: 36989 - DNA, 537 bp, Escherichia coli
atggacacggctttgcgccgtcgctttgactttgtcgaaatgatgcccgatctctctttactgagtggagctaaggtgaaaggcatagagctcgagtcgttgttagagaaactcaatagccgcatcgaggctctttacgatcgtgaacatacgctggggcatgcgttctttatgccggtaaaaaatgcactcgatgccggtgatgaagaagctgcgtttaaacaattgaagatcgcattccagaaaaagatcattccgcttttacaggaatactttttcgatgactggaacaagatccggttggtgctggcagacaatcaaaagcaagacgacaacctgcaattcgtgattgagaaaaccgacgatctcgatacgctttttggtaacaaccatggtttacgacaccatgatcagcaatcaacagcttacgaactcaaagatttcgatcaagagatctggaatattccacaggcttatcgttcaatttatcagccccagcagactccccttgatgagcaggctgtaaatcatgggtga

SEQ ID NO: 36990 - DNA, 927 bp, Escherichia coli; identical to SEQ ID NO: 8397

SEQ ID NO: 36991 - DNA, 264 bp, Escherichia coli
atgctcaggacaaatcaaaaaatactgaaggatgcgtattttgatagggggcaggatctcgcaaagctttgtgccgcgctagaagagatacatcagtatttcgctgatattgaagatgatatagctaacaaaggtaccagtatttcatcagcgaacagagcacattttatgggctttaatatttttacagcaataagaacattaaaagaacaaaaagaagaaatagaaaagctcaaacacggacataaagctaagagagtgtaa

SEQ ID NO: 36992 - DNA, 2373 bp, Escherichia coli; identical to SEQ ID NO: 5168

SEQ ID NO: 36993 - DNA, 174 bp, Escherichia coli
atgaaagcgtattgggactctttaaccaaagaacagcagggcgagttggccggaaaagttggctcaacaccaggctacttacggctggttttcaatggttataaaaagccagttttgtgctggctaaaaaacttgagcaatgcacgtcaggtgcaattacgaaatctgacttaa

SEQ ID NO: 36994 - DNA, 213 bp, Escherichia coli
atgaaagatatcagattaatcaaaagtacaagctctgtgtttcctattcctagcttagattggttttttaatagttcattggggacggatgtccagccagagtttaaaatgctgcgcccccatatggctaagatcctttctgggatctctactgatgagtgttctgtttttttgagttcgatttctgatttcaatttctgtcaccaatcataa

SEQ ID NO: 36995 - DNA, 189 bp, Escherichia coli
atgttggcaaacgtacgatttgataatcacagctgcgatacagaacgtcgtcagcagtacaaatctcgtgctgacgaagtgctgctctcgcgttcatacaagaatcaggcacatgaagcgttaaaatgcgattctccgcagtctgatgaatcgatctttgatatgctatctacttactcagtaaggtaa

SEQ ID NO: 36996 - DNA, 456 bp, Escherichia coli
atgacaaccaaattcaataagtttgagcttcattcggctttccgagacgggaagctgaatgaaaagtatttcgtagatttaccctacctcaaagaagagcaacgccgggcattagcctctttcttgggtgcgataactcgtgaagagcctcttccagggaaaaacaagccttcatggcttgatgataattccattaaaatttccggtactgatgcgtacgaagacgggaactactggcattatcattgcggtccatatccagaaggggtcaaacttagatcgatgacttttaacttgggtatgaacgttgcggggctaacctccgctgaagtgatccactatcaaaaactcaacgatggcacggtgtttgtcgtaggcttctcccctacacatgagcccttccctaagtctgatgcgccgcattacaacccactcttcactgaatcagatgattaa

SEQ ID NO: 36997 - DNA, 174 bp, Escherichia coli; identical to SEQ ID NO: 36993

SEQ ID NO: 36998 - DNA, 303 bp, Escherichia coli
atgagagttagtagcttttttggcgaaaaaacagcagtactctcggtattgggtctctgctattcggcagtacaggcatcaattggctttgataaattaagtcaaacatttattggagacttttctaatgcggattctactaatactattatcatgtttggattagcacttttgctgggtatgtcattgggggcattaatgttgaaaaaagttgccagccaccagttatatctgaaagaaattgttgagttggcaataagaatcaagaaagatgtcgaaaacaaaggagaaatatcggaataa

SEQ ID NO: 36999 - DNA, 369 bp, Escherichia coli
atgttaagaatcaatcaaatagtaaagatccttggtgaaatgaaggcatatgccccttatacatacaaaagtaaaacagataaagtggttgataaaatacatggtagattagtcaggctcggggtttttatcatcgctttacttgctttatgcattgctttgtataaattcaatagttgttttagaaccgagacagttgtagatgttatttttgggttgtattttacaggggtgctaataggattagtaataatggcattgccacctatcttaggaataaaacatttgattgattggaagaaagaagcttttaatgactttatttgcgaaatatcacatgatggatacaacttaagattaatagaataa

SEQ ID NO: 37000 - DNA, 228 bp, Escherichia coli
atgctatcgggcgacccacaccggggtaactttatcgttagtaaagatggtgtcaggataattgacctatccggtaaaagctgtacggcagagcggaaagcccgtgatcgtctggccatggaacgtcacctgggtattgccaacgaaataaaagattatggctactattcagtaatctacagaaccaaactacgcaaatttattaaaaaattaaaaggcaaagcgtaa

SEQ ID NO: 37001 - DNA, 318 bp, Escherichia coli
ttgattgatacgaaatatggtcgctatgtttttaaagtctttgccccgaaaacgaaaaggaatgaacgttttttaaaatcttttgtaaaaggtgactactatcagaatttgatcgttgaaaccgatcgtgtcagaagtgcaggtcttacttttcctaatgatttttattttctggctgagcgtaaaattttcaactatgccagtgtttttatcatgcttatcgagtatgtcgagggcgtagagctcaatgatatgccgattattccagaagatgttaaagcagaaattaaggcttcaatggaaaattgcatgccttaa

SEQ ID NO: 37002 - DNA, 882 bp, Escherichia coli
atgggtttagctgagtggttttgcggattttgctccaatcttactgtaaaagatggtggaacaatttcaactagatataggaatataacgaagcgtttaaatacggatttttgggatagcagttctgatacttctcatagtctctacgttggatcatatggtcggaacacagctacgcaaggcttgagcgatctggatatgatttttcagctaccatattccgagtatcaaaaatacaatagctacttaggaaatgggcagtcagcattgcttcaagcggttaagagatctattgaaaaaacctatgctaccactagtattagaggtgacggtcaagtgatccttgtaccgttcaatgatggaattacatttgaagtcgttccagctttcctcaatgttagtgatagttacacatttcctgatgcgaacggtggtggccgttggaggattacaaatccaaagccagaaatttctgcaatgaggttaagaaataacattaccaataacaatttggtgcaactttgtagaatggcaagagcttggaagcgtaaatgggatgtacctataagtggtttactcattgatacgcttgcgtatcaattcattgaaaattgggcgcatagagataagtcgtatctttactacgatttcatgagtcgtgatttcttcaaatggatggctgatcaagatacgagtaaggagtattggaaagcgccaggaagtggtcagtatgtctatggtaaagggcttttccaatataaagcaaaacggtgctataacatttcactcgaagctatagagcatgaaatggcgaccccaaaacgtgaatggtcggctaagcaaaaatggcgggagatttatggatcaacatttccagactaa

SEQ ID NO: 37003 - DNA, 582 bp, Escherichia coli
atggatcaacatttccagactaaggatacacctgaatctagaagggttttagaagggcagatcagagagtgttatggtcgggtcgtttactcacataagacgcatgaaaaatgctcagacattctcctatctcgactatcttctataaagttttggcaaataattctctccgccttaactactggaggctttctagcaacttttttcggcgcgggtgaagtaggcacgggggttgggattgttgtttcaacactgcttctcattcttaacgcttataccaaagattatgaccttggtgagttggcgcaaaaacataagcaggctgcaaatgagatctggttaatccgagaaaagtatttatcattgcttacagacttagcaatgggtgaaaaaccaatcgagcaattgcagtcagagcgggattcgttactcgagagtttacattcagtgtattcaggctctcctagtacaacatttgaagcttataaaaaagcacaggacgcattaaaaaacaaagaagatttaacattttctgaagaagaaatagatgcttttcttcccaaggaactgaaaagaagataa

SEQ ID NO: 37004 - DNA, 135 bp, Escherichia coli
atgacaaagtcaatagcggataaatctgtaactgatttaactaaagaaatcgataaattaaagaaagttgccaaagatcttgaagatgtattaccagaaaaaacaccacaaattaattcagcaaaaaaacattga

SEQ ID NO: 37005 - DNA, 219 bp, Escherichia coli
atgaacacgtcaccgtggaacaaagaccaaatggtccgtttaaacgggatacttacaatccaacttctgttgggttataagaaacaggaaagcacagtccgttatctgggcattgaattcgattacgcgttagagaactctaagtttgtcagggctgcaacagcaaccctgtgccagaaactgacgttgataacgccgctagcatgcgcggctttgtag

SEQ ID NO: 37006 - DNA, 843 bp, Escherichia coli
atggaacgattgagagaacaataccaagaaagaataaacagtgtcctccttgacggctttgagaaggaattattggactctgcctttattaatcttttgacaccgaccccacttaggttgaacaattttgcatatgctctacgtgaactaacaaggcatgttttacaccggttagcaccagatgatgagcttcagcaatgccaatggttttcgcctgatcagacatcatcaacaggaattactcgaaaacatcgcattaaatttgcgattcaaggagggctttctgatttctatgtaacgaaaaaactttgcattgatgagatagataaggtgtcaagcgaattgattgctatcatcaatcgtctaagtggatttacacatatagaagaagcaacattcaaaagctcaatcgaaaatactgaaagaaccgcagatgaatgtctttcagcaactcttgactttgttaacaagattgatgaactgagagccgaagttgcagataagctcttcgatgatatcaatggagttctgatcgacagaataaacagcgaatcggttgttgagttaatggaaatatcgccacatcagtacattgatgaaataacagcagaaaacatttctgttgttaaaattggcgtaagctctatggagatgcatgtcgatgggagaataggagcgaccttaatgtacggctcagcatccgatcggcgtaaaggagatggagctgaaattccggcctcgtttcccgtatacagtgaaatggaagttctatttaaacaaccattgggcagtgccattaacctaaatcagtttagcgtagatatttcgagctggtatgagtaa

SEQ ID NO: 37007 - DNA, 234 bp, Escherichia coli
atgctgggggggggggaagtcgtgaaagaaaagcagacatctgcgtcgtttgacatcactgctatcttcttactggttatgcaggtcgtagtgggggcaagcaaagctttgcactggattgcgaggcgttgcgcttctctggagtacaacaggtttgatgacaaaaaattagcgcaagaagacaaaaaatcaccttgcgctaatgctctgttacaggtcactaataccatctaa

SEQ ID NO: 37008 - DNA, 1956 bp, Escherichia coli
atgatcgcgcatcgcatcaaccgtgaacgcaaggcctcaagccccgcccggttaatcaagtatatggtggcggccaagggcggcattgacccgacgagctgggagcgcacggccgactacattctggattccgccaatggcacgaccgagggcgagaaggtcgccagctaccgcgttaccaattgcggcacggatgatccggcagatgccgcaatcttaatccaagccacgcaagcagctaacaccaggtcgaaggcggaaaagacctaccactttgtctattccttcccgcccggcgagcagccagaccttgagacgctgcacgccatcgaagacgaactatgcgctgccatcggcctcgatgagcaccagcgtgtatcagcggttcatatcgacaccgataacctgcatgtgcatgtcgccatcaacaaggttcacccgaccgggttacagaacattgagccctattacgatcagttccgcctgatgggggcctgtgagcgtcttgaggtagagcacggcttgcaaagaacgtttcatggtctggaggcaaagcagcggcatcagaatcgcgacattgacctgttgccagcgaaagccccagagcaccgcgatagcctattccgtaaacaccttagaaatgcttacgacttcagcatatcggagcctcccgaagccaaaaccctgaacgggttgcgcaagctgtccgatacccgtctacagaagaagcagtcagcagataaagcggagccagtccgcatcggcgcgaaggtggccagcgtggaggcgcagtccggcatcgagacactgaccgggtacgcggcccgcgagctggccccggcgatgcgacaggcgacgagctggcaggagctgcacgacgcagcggccgagcacggcctagaggttcgcaagcgcggcgcgggccttgtcatcggagagccggatttaggcatttgggcgaaggccagcaacgtcggctgcgacctttccatgaaggccctaaccgaccgtcttggcccgttccagccctccgaagggcaggccgaggcgaaggcgaaccgcaagcggtacgagccacgaccccggcggccggacaacccgacgacagcgggcctgttcaaccagtaccagcgcgagcgacaggcggccattttggcccgccgtcagggcctcgaccagatcaagcgcgagagtgcggctttcaatgcgcaggtgaggcagtggagccagacagagcgaatgcttttgaaggtcgcgggcaaggggccgaccaaacgcctgatgtacggcactatcaaacagcaggccgacgcctcgcgccagaagaaccggcagagcgcagacgctcgccgtcaggcgctgttcaagcagacgacgatgcccacttgggccgactggctgacgcagcaggccgagcgcggcaacgccgaggcgttggccgtgctgcgcgaccgggaggaacggacacgccgctggaacggggagctactgaccgccgaccgggccgacaaggccaaggctgtcgttctcgaaaagctcaagcccaaggcccggaaagacgggacgatggcctacagcaccatcgacggcggcatggtgatcgaccggaagacgcacgttcaggcgcagaaagccacgaccggcgcggcactggttgcgcttgaactggcctccaaacggttcgagggccaagccctcatcgtggaaggcacagatgaattccggcttgaagtcgcccagctcgccggcatgcacggcctcaaggtcacattcaccgatccgacgatggaacagatgcgccgcgagacggccgagcacaaggaaatggagaaggcctttcaggccgaggtgcacggccagacgggcacccaagtgcgtgagggaagcaagtcggcggcggcaacgcctcagcgtgccaagaaacgaccagaaggcaggtctaacggcctgatataa

SEQ ID NO: 37009 - DNA, 183 bp, Escherichia coli
atgctttatcgaccgataggcgaaggcttgtcggaaatgcggatcgaccacggccccggctatcgcgtctatttcatgcggcgcggccccttggtggtgctgctgctttgtggaggcgacaagagcagtcaggaacgggacattgccctagccaagaccattgcagcgcagtggaaggagtga

SEQ ID NO: 37010 - DNA, 201 bp, Escherichia coli
atggaagtcaaattcagccgctacgatacggcggactatctcaagaccgaggatgatattgcggcctatctcgatgccgtgatggaggacggcgaccccgtactgatcgcggcggcccttggagacgtggcccgcgcccgcaaccttagccagcttgcccgcgacgtgggatcactggagaaaggaagacgacaccaatga

SEQ ID NO: 37011 - DNA, 198 bp, Escherichia coli
atgaaagacagatcgcatgacacggcgatggccgagcacttccgctccgatccgacctatgcagcggagttgcttgccgaagtccgccgcgacggcaccccggccgagctggccattctgttgcggcagatggctacggcctcggcaggtgatgcaaggtcggaggacgccgataaagggcgcactctacctctctga

SEQ ID NO: 37012 - DNA, 471 bp, Escherichia coli
atgattatcggtaatctcaaccatttgtcgctggcggggcttcctgcctgggtgagaaatattctgctgcgcccggagtgttcgttatcggcgttatccaccagagaggacggtcgctggcaacctgaaggatgtcggtggttctgcacgctgggaacttcagacacgcaacccgccgaactccgccatacggagtatcaccatctatgggccgatatacaggtggtgattactggttgtgagggcattaatgcgggaacgcggcccatcgctcgcgaaaacgatgaagaacgtaagcccgatctgtttatcgccccatcccctgaaaacagtgtcgccatcaccctacacgccggtgatttcgccgtctttatgcctgaggaacctcaccagacgctgtgcgcaattggcacggctacttcaatacgcaaagcggtctttaaagtaccgcgcgacatgctggaagcctaa

SEQ ID NO: 37013 - DNA, 822 bp, Escherichia coli
ttgggccgacgtagaaagttagaggcactggctgattttcagcgagcattaaagaataaatacggtcttggcgaaggcgacagctacaagccatggcttcgggtacaagatgttcgctctcggggtaatagcgggaagattcagggcatcaaggtcaaccgagagcatcacatgctttctgaacacgaaagttgctttttctacattgccgagttttgcgattccgtcatagatatcagggagcagttccctctcttacctctagacctatcggtaaaaattgccaaaacctttggggtggatcatcccattgtacctggatccaagtcgcctaatgtcatgaccacggactttgtcctgactcgctctgacggggtgaacacctggtatgaagccgtgagtgtcaaacctgcagagaagctgaccgataaaaggattgcggagaaactggatatcgagcgtaactggtggcagttgcagggagttccgttccatctgttcgtgatgaccaaacaaaaccaaatccagtcaaaaaacattcaatgggtaacggctcctgtccggcaaggccgaaaatttccaactgacttagtcgaaagcgctttagcactgatttttcccggaaccatgttgacagaggagatatgcgatgagtttgttcgagaatttaaaattgagcatgatgatgctttggtcctgttaaaaaccttgattgcgaccaagatggttgatgttgatctcgataagcccatagctgatacaggtattttgaatatcgtcaaagttacagactttaaagtggtacggcatcatgcaagttga

SEQ ID NO: 37014 - DNA, 2154 bp, Escherichia coli
atgcaagttgagcgtaacagtgtttggcaggtcactagaattgacggcattaaggacggtatgtacagagtccttgagcactatgcaaatgatgacctcttgattctttttcggctgcatgatggaaaagctctggaaaagccagttccagtagagcttcccctatttttagagtctgccaagtgtggaaatagcaaaatatccagttatccgatacctttttaccaactaatatctgaagaagagatctcccctgctcacagggataagcggaatcagcgcttcgaattgatacatgatttgatcagtaatccggaatttttgcttgatgtagcgttaaatcagcgtagcaaaaccgtagctagtcatgccaaggaacgaaaggtctatgtccaaaaaatctatcgctcgctaaatcaatactggcgatacggtcaagaaatcaatgctctactgccagcatacaaacattgtggtggctcaggtaaaccccggttgtccggtaaggcgaaaagaggggcaccgatccaactgtcgacacccagtatggtggccccttcgggagtgaacacaacggaagaagataaggccaaatttcttctaggcatgaaaaagtatggactaaagggaaagaaggtttctctaagtcgtgtatatgaacaaatgcttaaagagtactatgctgatgaactccgatcagccgaaaaagaaaatcgagagcctgagatccctagccttaggtcatttcgttactggattaaaaagctgattcctgaagccgagttgatccgtaagcaaacgacggctggggacttcgaacgaaacaggagaggtctgcgaggagcggccacggatcatacggaagtgcctggtagctgttttgagctggacgcgacagttctggatgtccatatagtttcagagttcaaccgaaaccatgtgcttgggcgtcctacagtttactgtgtggtggataaagagagccgaatgatggtcggccttcatgtatccatggagtatgcttcctggcgagcaggaaggcaggcactggtgaatagctttacctcgaagaaagcttattgtgcccgttttggcatcgaaattgaagaatcggaatggccctgtcatcacattccccagcgcctcctgtgtgaccgaggggaattcatctgtaataagccggaagagcttgcggtcccattgatagggcatctgagcattgctcctccctaccgtgcagagttgaaaggtatcgtcgagcaccgattccaaattctgaacgaaaagcttgtccatgagctgatggggacgacgaaggggcgccattatatccgtggagaccgcgatcctaggttggacgccactttgactctttctgaggtaaccaagcttctcattgatcaggttttagagcacaacagctctatttttgatggactggctggtcaaacacctctgctagtggagtcagggcttccccctacgccactaaactactggaatacacatctgaaaagacaccgccatgcattaaataaagcggatgaagcagatatcagagcccggctgcttcccgttgagcaggtttctatgaccagcaaaggaatccgcctcaatgatgatatgtattacgaatgtgaccgagcagagtttgaagactggaaggtgatagctcgctcgaatggacgttggaagctggaagccaggattgaccaagataacgcctcctttatctatgtgcgccttcgtccaagcgaaggttttactcggtgtacgctgatgacgcgctcgtctagctttgaggagcgccatagagcagatgtactgtactttgaggattggaaaaaggtttcgaaaaaacgttctaaaccgaccagtaaatccattgaaaggcacaatcgaagaaaaaccatcacggcgaatgctagggaagaacttaaaaaagaacctgctctcaaaacaaaggcagaaaaaaccctcggcataaaagagcggcgacgagaagccataatggaagccaggatttccagtgatgatagtaactatacggagccttcagaaaatcagtcatcagttgataaattagctgctgatagagccagcaaggtcgtgtcgttgctgaagagggagcggggttctaatagtgaaacttga

SEQ ID NO: 37015 - DNA, 1449 bp, Escherichia coli
gtgaaacttgagaaagcaaaataccggcctgcgattctccccgagcatcgaggtaacccattaattgaggcgctaccagcgaagcatactgatgaggagcttgtagacaagctcagtttttacccaccgcactcatttgaggaaactcaactcgcccccttcgaacgagttgagtatctgaccagactgaaagatctacggcaaccattacccatctatctggactgttttagagcggtggaaatggcaataaaggaggggtactcggtcaagaatccgctttcaccgacgacgatgaattacctacactatccaacagatcgtcgtccaaatattgaaccaagaactggatatttcaagccaaaaggatgcggaatcacggtaataggtgaaagcggtgttggaaaaacttgcatgctcgaacagatattaggatgtttccccgacacaattgagcactcgcaatataaaaatcattcgataccattacgccaagtagtatggatcaaagtagattgcccggatgactccagcgttagagctctgtgccacaagattctgtccgaattggatagcaagcttggctttgagccgactaagcgagccggaactatccctcttctgctagaccaaatcgaagctcgtatcaaatccagctttttagggatcttggtcatcgatgagatgcagaatctgaatctggcaaaaaccggtggtgctgaccgcctgctgggtttcatccacaatctggttaacaatctcggtattcctatcctgttctgtgccaacccgccgttcaatcagttgctcagtagaacgcttaaagcggcacgacgggcagaaagcaatggttacttcgatgttgtgctgatggaaaacgacggtgtatgggaactgtttatagaggagttgtgggagcttcaatggaccaacgtaaggactccattgactgtagagttgaacgacaagctttatgagctatctgttggcaacatggatctggccgttcgaatcttccgtgaagcacagcgttatatcataggttgtggcgatgaacgcatcacaggagagttgcttgaacatgccgcaagtattgctatcaaggcatccaaggcggtcaccgatgaaatcaggcgagaacgctcaattactgcgttgaaaagaaaacggaacattacttcacttccggccagcgcagatatggctcgtacacagaagacggaattggtggcaattgagggagtgcctcaatcaatacccggtgacctgagtcgacctcaccatcctgagtttgccgatgcgcttaccatattgcaaactgcggatgacctttttgagcgaatcggcaatcccgatctaatgcagcatgcggcggctgaggagaagccactggagctgttgcggcaagaaggcgttttctgtgaacatccgctgaaggtcttcgcgtaa

SEQ ID NO: 37016 - DNA, 1419 bp, Escherichia coli
atgaaattgcccgtaagcctacccgatgaattactactaagtcgcctgatccgctatgttacggtttcaggcgataaaggggataactttgctagcaaggtttttgggtcaagaaaggtatccatccatccctttctgacagcgaggcttgagcagctggccggatggggccttgagagtgctgaagtaatgttgtttcagcaaacgctggcaccgttgtttcttttttttctcccgacttatgctgataggcttaagcgatcaatgctggcaggtgatggcgcagaggcacatcgagcaagccagctgtctttatttggttgcggtaattcgctttgcttaaaatggtgcccggtgtgtgctcaacaagatttgcgcctgtacggtgttgcctattggcaccggacacaccagatacctggcgtaacggcttgtgcatttcatcccgtactcctggagaagctggaactggttaggcgacagcggatcattgcggaattactccccactctcatcgaccagccacgagttgcttttgatgctgaggttcaggtagccaggtttggcttcaagcttcttcaattggtcacgggcggtatcccccgtgttgacactgtattaacctaccgctcgaagctgtctgagttggggtttattacagctcatcatcgagtaaggcgtaaaagtttaatggaggacttctgtgctgatataaagcactaccgtccaggccctgataccccatttcctcgccatccccatgactatcgatacctatcccagcttttggatcctcacaccagtcaccacccatttcggcacctcttgtttgcctattggctatttagagagccggaaaaaatgctttctactaagcatctttgtgcagcatcgctacaaccaatatctttgaaaagtctcgaaggggaaattagtacagagcagcaatgtttacagctacttcgaaagcaatactcattgagtgagatttatcgccttaccggtaaaagccgctgctacctcaggcgacttgccctactaaatgatattccactcaagcttaaacccaagaaactgaccggggaatgccaaaaaaggatcattgggttggcctacgccgggatgcacagaaaggcgatatcggagcggtgcggtatcggtattggctcagtggagcaggttatttccagccagccgggacttgtcgaacaccgtaagcggtgtcattgggagtccaagcgtcggcgttgtcggcttgagattgccaaatatctaaaatcgcatcctggagcgcttcgcagggattgcaaagctcagtgtaatgcggctttcttttggttatatctcaacgatcctatctggctggattccgctttaccggagccgatcaaaccagctgggcgatatccaaattgttga

SEQ ID NO: 37017 - DNA, 288 bp, Escherichia coli
atgcacttcaacaaaatagatgataaaatcaaaacgattttagacgactttcgcatatcaaaaaagagtcttaccgatatgagcacagaacagtgggttactgccgagcacgttgccgagcatttgggaatcgctaaggacactgtgtatcgatggagagaacataaaggactgcctgcacatcgtgtggggcggttgtggaagtttcagttgtccgaagtagacgagtgggtgcgtgcaggcggcgctggtgaagactctggtgaacaaggagggcaccgagcatga

SEQ ID NO: 37018 - DNA, 2970 bp, Escherichia coli
atgacgaccacagaacaacaaatcgaactcgatctgatcgccaagcttggtgacctcaagtacacctatcgctccgatattcgcgatcgaaccacgctcgaagccaacttccgggccaaattcgaggcgcttaaccgcgtgcacctgacagacagcgagtttcaacgcttgctcgacggcatcatcacgcccgatgtctacggcgctgctcagcggcttcgcaatatcaacagcttcgagcgcgacgatggcacgccgctgaactacaccctggtcaacatccgagactggtgcaaaaacgacttcgaggtcgtcaaccagttgcgtatgaacactgaaaatagccatcaccgttacgacgtgatgctgctcatcaacggtgtgcctgtggtgcaaatcgagctgaagaccttggcagtcagcccacgccgggccatgcagcagatcgttgattacaaggccgatcccggcaatggctacagcaaaacgctgctgtgcttcctgcagctcttcatcgtcagcaaccgcaccgatacctggtacttcgccaacaacaacgcacggcacttcagctttaacgcggatgagcgcttcttgccggtttaccagttcgccagcgaagacaacaagaaaatcactctgctcgatagttttgccgagaagttcctggccaagtgtaccttggggcaaatgatcagccgctacatggtgttggtggccagcgagcagaggctcttgatgatgcggccctaccaaatctatgccgtcaaagctatcgtagattgcatccatcagaattgcggaaacggctacatctggcacaccacgggttcaggcaagacgctgacctccttcaaggcatccaccctgcttaaggacaacccggacatcgacaagtgtctgtttgtggtggaccgcaaagacctggaccgccagacccgcgaggaattcaaccgttttcaggaaggctgcgtcgaagagaacaccaacaccgagaccctggtgcgccgcctactgtcggatgactacgccgataaagtcatcgtcaccaccattcagaagctgggcctggctctggatggggccaacaagcgcaactacaaggaacggctggagccattacgcaaccagcgcatggtgtttatctttgatgaatgccaccgttcacaattcggtgacaaccacaaagctatcaaggaattcttccccaacgcccagctttttggctttaccggtacacccatcttcgagaaaaacgccagctaccagcaaatcgaaggtcagcaggccagctaccgaacaaccgacgacctcttccagcgttgcctgcatcaatacaccattactcacgccatcgaggatcgcaacgtcctgcgctttcacgtggattacttcaagcccgaaggcaagaatcctcccaaacctggtgaaggcgtggccaagcccaaggtcattgaaaccattctcgccaaacacgatgcggcgaccaatggccgcaagttcaacacggtgttggcaacggccagcatcaacgatgccatcgagtacttcgaactgttcgcggagattcaaaaacaaaagaccgagcaagactcggagttccgcccactgaacgttgcctgcgtattctctccacctgccgagggcaacaaggatgtacaacagattcaggaagacttgccgcaagagaaagaagataaccagcaagaccccgatggcaagaaggcagcgctcacgcgcatcgtgaccgattacaacacgcgctttggcaccaaccatcgcattagcgagttcgacctgtactaccaggatgtgcaaaagcgcatcaaggatcagcagtatcccaacagcgatctccccgccgcgcaaaaggtcgacatcaccatcgtggtggacatgctgctaaccggtttcgactccaagtaccttaataccttgtacgtggataagaacctcaagcatcacggcttgatccaggcgttttcgcgcaccaatcgcgtgctgaacgacagcaagccctatggcaacatcctcgacttccgtcagcagcaaaagccggtcgaagaggcgattgcactgttctccggggagaaaatcgacaaccctcgtgaaatctggctggtagaccccgcgcccaaggtcatcgacaacctgcaaaccgccacccagaagctggctgacttcatgcagtcgcaaggcgtgggcaatgcgccggaagaagtagccaacctgaaaggtgatgctgcacgggcgcagttcgtcaatctgttcaaggaagtgcagcgtctcaatacccagctcgatcaatacaccgatctttcggatgagcagaaggcgcagatcacccagattgcgccacccgataagatgcaaggcttcaagggtatgtacctggaagcggccaagcgtctgaaggaacagcaggatcgcgaccagaccccgcctgaagtgcagcagcttgatttcgaattcgtactcttcgcctcaagtgtgatcgactacgactacatcatgggcctcattgccaagctgactcagcagaagcccggcaagctcaccatgaaccgtgagcagctcatcggcctgatccagtccgacgccaagtttatcgacgagcgtgaggacattgccgagtacatccgagggctgccggtcaacgtagcactggacgaaaagcaaatccgcagcggattcgagcgtttcaaagcagagaaaaaagcgcgggaactggccactatggctgaaaagcacgggctggatgtggtagcgctgcaagcatttgtcgatgatattctgcgccgccacattttcgatggcgaacgcctctcggagctgatggccccgctggaacttggctggaaagcccgcacacagaaggagctggccctgatggaagatctgacgccactgctgcacaagctccaaggtcgagagatcgccggtctggctgcctatgaggaggagagataa

SEQ ID NO: 37019 - DNA, 2640 bp, Escherichia coli
atgggcaccgtctttgcacaaggggcgcagtgggttcgtgcggacttccatctgcacacccgcgcggatcgagagttcaagtacacaggcgatgacaacttctacaacagcaattatgtggacgcgctggagaaagcaggtatccatctggctgtcatcaccaatcacaacaagttcgatttcgaggagttcaaagcgctgcgcaagacagcgcagaagaaggatattgcgctgttgcccggcgtcgagctgtcggtcaatgacggggccaatggcatccacaccctggttgttttttccgacgactggttggccgatggccatgaccatattaaccccttcctgggcgttgcgtttgaaggaaaagttcctgcccagtacgagcaggaaaacgggcgttcctctctgtcgctattggaaaccatcaagaagctggaaagctatcatcgcgactttttccttgtctttgcccatgtcgaagcaccgagcgggctgtgggccgaactggacgggggacgtcttgccgagctgggccagaacgaattcttccgccgccgcacgctgggcttccagaaggtacgcacgtacaacaagcagcaagagaagagcaaaccctgccggaccaaaacgcagcagcatctaggggactggtaccccgccgaactggaaggctgcgacgccaaatgcatagaggacatcggtcagggcaaagcctgttacctcaaattgggcgagctgtcctttgaagctgtcaagtttgccttgagcgatcctgcttcacgcgtcgccatggagccccccaagcatcaggggtcgtttatccgcggtattcacttcgacggtggcatcctcgacggaaaaacgctgcatttctcgcccgaactgaacacgctgatcggcatccggggtagcggcaagtcatccattctggaagcagtgcgctacgccctcgatattcctcgcggggagaaggcgcaggataccaagtacaaggatgaactgatccgccataccctgggcagcggcggcaaggtgacgctgacggcctgcgacgtatacggacaggaattcaccatctcccgcatcttccgcgaagcgccgaacgtctacctagacggcaagttgcagcccggtgtgtcgatccgggagaccgtgctgcgccgcccgatctacttcgggcagaaagacctttccagcacaggtgaaggtttcgagaccgatctggtggaaaagctggtgggtgaaaagctgcgcatgctgcgagacgaaatcgaaacccaacgccaacatgtgcgtgatgcagcaagccgctggctcaagctcagcaataccgccgaactcaggcgtgatcacgagtcccagctcacggatgccaacttccggctgaagaagtttgaggagtatggggttgccgacaaactacaaaagcgccttggctatcagcaagatgccactgcgctgacccgcatgaaggatcgggcagacagcttcgtaatcgccctcgggcaattgatttccgagcatgaggacgatctgcgtaacgccacgagctacgtctccaagcagaatcccggcttcttcacagcttattacgccgaatttgccaacctcgttgccaaggtcgatcagctcaagaaaattgagcaggaggctcgcgccattaccgcacggcttcaagccaaacaaggcgagttcgacgacgcgcgccagagtcttcaggaagagtttgcccaagtcgaacgtcaactggctcaggaactcaagcagaccggcatgacggcaatccagccggatgacttcctgactcaacagcagcgcaaaaccaaggcggaacaaatgctggaggcgctggccaagcaagaaacccagcaaagcagcatccgcgatgtgctgtttgccgagatcgacaagctcaacgggctgtggctgcgcgagttcagcgccatcaaggccgaactggatcgcgtgaacgccggccacaccgccctgcagatcgaagccgacttcaagggcgacaaggaagccgccatcggcttcatgcagcagctcttcaagggcagcaacatccgcgaaaccaccctgcgcgccgtgatggaggattacgccgatttcggtggcctgctgcgtgatttgccaaacgccttgaaaaaagcgggcagcacgccggaggtcttcgaaaagaccttcatgcagaacctagtggagttcgtcacctgtcaggtgcccaaccgcttcgtcatccgctatcgcggcaaggagctcaagcaccactcgctcgggcagcgtgcttccgcgctgctgctgtacgtactcagccagcgccagaacgacgtgatcatcatcgaccagccggaagacgatctggacaaccagaccatctacgacgatgtgatcaaactgctgcgcgagatgaaaccgcacgcccaattcatcttcgctacccacaacgccaactttccggtgctgggtgatgcggagcaagtgcatgcctgccgctatcaggacgagcaagtcgccgtacaaagcggcagtatcgacgctcgcccggtgcaggacgctatcatcaacatcatggaaggaggccaggaagccttcaaccgacgcaaagaggtttataacttatggaaaccacagagctga

SEQ ID NO: 37020 - DNA, 1164 bp, Escherichia coli
atggaaaccacagagctgatcgaggcgttaagccgtggcgaagacagccgccatcagttcaaagagagcttcactaatgcagacgcactggcggcggagatcgtcgccttcagcaataccgctggcgggcagattttcattggcgcgcaaaacgacggcacggtgttgggcttgtctcacgcggacatcgaccgcctgaatcagctcatctcgaacagcgcttcacaaaacgtgcggcctgcggtgaacccgctcaccgaaaacgtgccgcaccccaatggcaccgtgatggtggtcactgttgcggaaggcgtcagcaaaccctacatggacaagaacggtgtcatctgggtaaagaacggctcggacaagcgccgcgccacctcgcgtgaagaaatccagcgcctgttccagcaggcgggtctcgtgcatgcggatgagacgcccgtggcgggcttgggcgcgggcgatgtggacctgccctattttgaaacctttttcgaacagcaattcggtgaggcgctggcccagcacaagcaaccgctgccgcagctcctgaccaacatgaacctgatgaaccaggggctgctcaacgtggcgggcagtctcttgtttgccaaagcaccgcagtatgcgctacctgccttcatcgtcaaggcggtggcctttgtcggcatcgacatcgaggatcagcgctatattgacagccgcgatatcaccggcaagctggctgatgtgttccagcagacactgggctttatcgttgccaacacccgcgccactcagggtgaacagggctttaactcacaggggcaggccgagattccgcgcattgtctgggaggagttggtcgccaacgctctcatccaccgcgactacttcatcagctcgccggtgcgcgtgatggtgtttgccgatcgcgtcgagatcatcagtcctggccatctgcctaacaacctgaccatcgaaaacatcaaggcgggcaactccaatatgcgcaacccgattctggcgtcctttgccgccaagctgctgccgtatcgcggactaggcagcggattgctacgcgctcttcgggcttggccgcagattgaactcatcgacgaccgggctgggaacttgtttaaggccatcgtgacacgaccacaggtgcaagcggcatga

SEQ ID NO: 37021 - DNA, 1278 bp, Escherichia coli
atgagtggtaatgaaaaacaacagctggtgccacggttgcggtttccggagttcaagaatacagccgagtggcaaagtcctacattgggcgaagtatctgaaccggttgaagaacgggtgggcgagcgaaaactcacgccggtgagtatctctgccggaattggttttgtaccacaggcagagaaatttggacgggatatttccgggagccaatacaagctatataccgtagtgcgtgatggtgactttgtttataacaaggggaactctctcaagttcccacaaggttgcgtatacgatcttcaaggttggggtgaagttgcagcacctaatgtttttatctgctttcgcttgaaaaatggatacgagaatggcttttatcgccaatgctttgagcggaatacgcacggcatccagctgagaaagcacatcacaagcggagcaaggagcaatggactgctcaatatcagtaaggaagctttttatagcgtggcgattccagtaccaagccatgcagaacaacaaaaaatcgccgactgcttgtcttcgcttgatgctctgatcgcagcagaaatccaaaagctcggcacccttaagacccacaaaaagggcttgatgcagcagttgttcccccgcgaaggcgaaactgttccacgactacgttttccagagtttcgagatgatgatgggtgggaatctgacttacttggaaatattttcgatacaacctcaggcggcacaccaagtcgttcaacaaaggaatactgggatggttatattccttggatcacaacttcgttggttaattttggcatcattacccatgcggatgagtttatcagtgaggcgggattaaagaattccgcagcaaaacttttccctcgaggcacggttctcattgcgatgtatgggcaaggaaagacccgaggtcaagtggcattactcggtattgaagcagcaaccaatcaggcatgtgctgctatactgcctcgaaaagaaatcgatcctaactttgtgtttttaaatttggcaagtcgatatgatgagattcggcaactgagtaatagcggtgggcaggaaaatctgagccaaggtctgattcgtgagctttctttctcctatccgttaaaccctgcagagcagcagaagattaccgcctgcctaacctccgtcgacaatgtcataaatgcacaagtccagaaaatagagacattaatatccaataaaaatggcctaacgcagcaacttttccccttccttggtgaggtttcatcatga

SEQ ID NO: 37022 - DNA, 1116 bp, Escherichia coli
atgaagcctggtcagaccttcgctgaccttctaaggctggctgctcatctgcgtggtgatctggagaacaagaaagccatcctactctatgcctacaacggtacgggcaagacgcggctatccatgacctttaaggacatgggcaagcaggccgaggcccgcgataccctgtatttcaacgccttcaccgaagacctattccactggaacaatgatctggtaggcgatgaggaccggcgtttgctgctcaatagggactcgcgtttttttcaggggctgttcgatctggagatggacaaccgtatccgcccattgttgcggcgttacgcggattttgacttccgtatcgatacagagggcccagagtgggcggtacgcttttcgcgcttagtggatggtcagcccgtcgacaacatcaaggtgtcacgcggcgaggaaaacatcttcatctggtgtttctttttggccgtggtagaactagcgatggacgccgatatcgaggcttaccagtgggtgaagtacttgtatatcgacgatccgatttcgtcgctggatgaacacaacgccattgctgtcgccaatcacttggcgcagttgctcaagcggcaggacaaccggctcaagacagtgatttccacgcaccacaccttgtttttcaatgtgctctgcaatgaactgggtaaggcgcgccgctatgtggtcaacaagcactcggccaacggcggctatctgctgcgacccgaagagggcgatacgcccttctttcaccatgttgccgctttggctgaactgtatcaggccgcgcaggaagatcgtttgttcacgcaccatttcaatatgctgcgcacgattcttgagaagacggcgagtttccacggccacaaaaacttttcggtttgcatcaagcaagacgatgacgacccggacggcattttgcatgcgcgcctgatcaacatcctaagtcacggcaactattcgttgtatgagccgcagcagatgctcgatgagaacaaggcttacttcaagaagatcctgaacgagttcctgaatcgctatcccttcaatcccgatttgttccctcaagttcctgaggccgcaacagcaggtacaccatga

SEQ ID NO: 37023 - DNA, 1635 bp, Escherichia coli
atgactgaattcgaaaaacaaaaactgggcaaaatcctctgggccatcgccgataaactgcgtggcgctatgaacgcggacgatttccgcgattacatgctggccttcctcttccttcgctatctgtcggacaactacgaggcggcggctcagaaggagttggggtcagactacccgcgacagattgacggttcggtctccacgccactgcagctttggtacgaaagcaactacgaagatgtgccagaattcgagaagcagatgcgccgcaaggtgcattacgtgatcgaaccccagtatctgtggggtaatatcgccgaaatggcgcgcaaacaggatgacgagctgctgcgtaccttacaaaaggggttcaagtacattgaggaagagtccttcgccagcaccttccggggcctgttctcggagatcaatctggcgtctgacaagctgggcaagacctacatcgagcgcaacgcccgcctgtgcaagatcatcgcagagatcgccaaggggctggtgcagttctctaccgatagcgacactcttggcgatgcctatgagtacctgatcggccagtttgcagcaggttcgggcaaaaaggccggcgagttctacacgccgcagcgtatttcagacatcttgtcggccatcgtcacgctggacagtcaggagcctgccacgggcaagcgctcgcatctggatagtgttttcgactttgcctgcggctcaggctccttgctgctaaacgtgcgccgcctgatggggccgcacggcatcggcaagattcacgggcaagagaagaacatcaccacctacaacctggcgcgcatgaacatgctgctgcacggtgtgaaggactcggagttcgatatcttccacggcgacactctattcaacgagtgggacatgttgcgcgagaccaatccggctaagatgccgaggttcgacgctgtggtggctaacccgccgtttagctatcgctgggagccgagtgaggcgcttggcgaagacgtgcgcttcaagaattacggcctggcaccaaagtccgccgctgactttgccttcctgctacatggcttccatttcctgaagcaagacggtgtgatggcgatcatcctgccccacggtgtgctgttccgaggaggtaccgaagcgcgtatccgtaccaagttgctgaaagacggacacatcgatacggtgattggcctgcccgcgaacctgttcttctccacaggcatcccggtgtgcatcttggtgcttaagaagtgcaagaagccagacgatgtgttgttcatcaacgccgccgagcattatgagaagggtaaacgccagagccagttgctcaggacggacgagatgacggatggtggaatcgggcatattgaaaagatcatcgatacctatcggtatcgaaaggaagagcctcgctactcgcgccgggttagcatggatgagatcgaaaagaacgatttcaacctgaacatctcgcgctatgtgagcacggtgcaagccgaggaagagatcgacctggcagctgtacacactgacttgctcgttgtggagaagcaaattggtgcggcaaaagaacggtacaaccaatacttagcagaattgggtcttcctttactaccttaa

SEQ ID NO: 37024 - DNA, 1203 bp, Escherichia coli
atgaatcaggctagtggtatatgtccccaatcggatgagtcgcttcagagctttattcataggatgatgcttcgtgttggctggagcgattttacaacccttataactcatggaggatgggggagtaatccgtctgttccatacgaggtgaaacaggaattcgatgcatttgatgcttccatactcttggatctctttgaaaaccagtattatgcaaataaaaattacagcttatttgatggaagattttcacatataagcctattccaggaaacctttttccctcataagaagaaaaccttttgcggaagcagagtaccattacgtttctgtagagcctgcatagaaaaacaacttcacgaaagggggttctcgtattttaagttggattggttgtacgaagccttctgtgaaattcatgcgacacctctactcaaagttaaggaaagcttatctctttcaaaaattaaaaacacattgaagtttgtttttctggctgattggcatgaaattttagatgtggtttcagaagaggtgttgctggaggatgaacatcataaaatcgaggagtcagatttaacaagatataaccgaatgctaagcttctctccttgcgccaaaagggggctggtcgaatactttatgagtagttctgattattacccaacaggttgctcttcaattgctgattatggttttctctccaaaatccagagagacctcctgtttaaaaaaaggaaaagggattcgttacaaagtcaccttgaggaagcttatgaatatgaattgagtaataattatcactcattaattgagcattgcattaaagatcttgagatcatggctattcaccattttggtaaaggacactgggtaattaaatctactagtagaaaatgtgtagactgcttaagacacaacgtcgacgatttcaggtcttgcccagcggctggtattatcagttgcacaggtggatatttatcatcggcagagaatcaatgcgataaatcactggatagtctggaatcagatgttgaattacatcaaaggcgattgaaagtaaccgatggtgagcggtttgtgcgagacagtattgagaaaagtagggctattactgccgcaggaggaccgcaagcttatcgcagagaacgtgaagcgcgcctaaaggcggctgcgaaagcgttggaccccctgatttcgtag

SEQ ID NO: 37025 - DNA, 168 bp, Escherichia coli
atggccagaacattggaagaacttctccagcaggagaaacctgaggtggttgaagcagcaaaagataaagctgaaaaaattctcagggagcttgagggtgtagatcaggacactccccaagacgagcttgatgaaccggctgataaccactcctccggatcaagttag

SEQ ID NO: 37026 - DNA, 201 bp, Escherichia coli
atgaatttacatgagtatcaggccaaatcgttactggctggcatggggatgccgtgtccaaaagagatagccatccaacagatttcgcaactggcagatgcctggcaacatattgcttgcccgagtaaaggcgcggtacttaaagcgcaggtacatgctggtgggcgcggtaaagctggcggcgtaaaagtgcttaagtag

SEQ ID NO: 37027 - DNA, 159 bp, Escherichia coli
atggggctgattcattttttaatgacgtggaaagcgggggattttgctgatgcgaagaatcataaggtgaaaaacaggaatattacaggtggagtagatggtggaaacacccgactgacaaggggagttgataacgctgagttcttcccccttgcctga

SEQ ID NO: 37028 - DNA, 1419 bp, Escherichia coli
atgaagtttttctccactggtttctatgtttcgaatgatgttttatttgacgatgtattcaatgagtgcttttcttggattcatgaatcaccacacacaaactttatacctgcacaattggcgtgtgactatcttagtgaagatttttatgtagagtcaagtaatgaaaggattgatgtaattactcatggcaaccaagatgttcagttaggttgcttcagatattctaaaatttccgaaccacacaaatggataactgatatatctataaataagaacttaataaataatacggtatggatccaagttgaatcaagtgtggttagtcaggaggctgcgtatttagcacctcaacctaaaaaaactttgatagtaattaggttgatagataaattttctggtggtttggatgatgccttcaaaacatcaatagaacctgattacctttcgaattctgaagagcatttaaagttggcggcaaaagttatcaatggagaaactgaaaacaggctgccaataatctatgtcagttcgaaatatttttacaatgaacatcctcataacattattcctgagcgattagcaagaaaggtgtgtggcatagctcatgttctaattgaacctcgtgagaaaatgttttcaataaaactaaaaaatgagacaaattctaaaaatgcttacgcaggtgcagtcggaatttactggccgcgaggacaaaatatctccttttaccgtcggggtgagaaaacagcgaaggagtttgaagatgaattatttgatgatgtcgtaaaagccacatctacaatggctcccgtctctgaggggggatggagtgaaatacaaaaaagaagaactaaggattctattaatacacttaagattagaggtgaatacacaagtgaattgatgggtttgtatgaggccgataatgttgcaaaagatgaaacaatagaagaactcaaaagtaatatattatctttagaatatcgtgttcgaatgcttcaatcacaagcttcagctcaaggaagtatagtaatgaatgcaggggaagaaactgactttttcaatggtgagatcaaagatgtaataatagaagcactgaaggttgctattgtgaatacgaaagagggtagtcgaagtaatcatatattatcttctttaatttccaataaccctcaaactatggaagcaaattcgcgtcaaactcatttgaaaagagcacttaatggctacaggagtatggataaggcaacgtcaaggcagcttaaggaacttgggtttgagttgtctgaggaaggtaagcattggaagttagtatataatggtgattccagatactcttacattcttcctaaaacagggagcgactatagaggagctttgaatgctatttctgatataagtaatattattttctaa

SEQ ID NO: 37029 - DNA, 1311 bp, Escherichia coli
atgaaacccgatagttctttaaaccaaataacgcagacaatgaaacggaatgatgttgattctgtggatagtcgcttttgtaagtcagcgcaaaacatgaaaaccagcgttgacgttgaagattgctgcgttgaagtgatggttcgacatcacagcccaaagaatcaaagagaggcattcactaaagctttttttgatgagtgtaaaatccgtgcaatacaaactggccggactatcgaagccagcgatacaaaatgtaccgggcttaaggctatattccactcatccggacgcattaagtttattgtccgcaaaagtattcgcggaaagaatgtttacgtttccgtaggaagttaccctgaattttccattaataacgcaagggagcatgcctttaaaataattcaggagcttaaggcttccattgagacttatggtgagcgttttcttactcacagtaaaatgacgtttaatgagcttgtggatgagtatgagaaaagcgtactcagcacgggcgttaagcgttcagctaacaccgatctttctaagatccgtaaatacctgcgccctcttctcggtgccaaaaagctggcaggtatgacggaggcagatattctgagctatctgcataatctcgatctcaagccagccacccgcaatcgccatctggcgctcattaaagcggtgtttaccagggcaatacgcatgggatacatcagccgctctccggcgctttatatcaaagcgctgcctgaagtaacgtcagatcgccgcgccatggatgactcccagcttcagcgctggatggaagtctgtgagtgctggcgtaatggtaaacccgatcatgaaggccttgctctgctcatgttccttgccctgacggggctgcgtctgggggaaacccgtcatcttcgtcttgaggatgtggactggagtcgcaaggttatcaccctgcgccatactaaaaacggcaaactccgccgtgtaccggtatgtgataaggctttcgttcttctgacagaacagcgtcagcatctgggggatgaaggctgggtatttccgggcaaggggaccgacaatccggttgctgagccgcgtcgcctgcaaaaacggctttgtgaggctgcgggtattcctccgttcaccatccatgagatgcgtcatacctttgcgacaaagctcattgagagcggggcagacattcataccgtcaaagacttactgggtcacagcacaatcaaagtaacagaactttacttgcacgcctccccggcacgttatcacgaagttgttaaccgggcgatgggctaa

SEQ ID NO: 37030 - DNA, 885 bp, Escherichia coli
atgcgttactcacttgaagcgttaagtacatttgttgaagcggtttcctgtggctccttttctgctgcggcacgaagattacgcaaaagtcagtccgcagtcagtacgtcaattgccaatcttgaggtcgatcttggtatatcattattcgatcgctcttcgcgagaacctgtgctgacagaggaaggaaagaaagtattgagttacgttcatgcgattttgtcagccagtgaacgtcttgaggaggtggcggtttcgcttgccggagagactgaagctcgtctgacgtttgtgctttccgataccctacaccctgacttattagaagacatcatggtgcagtttgatagtcagtttccacatactgagttagaggttttaattggtgaggatgtcgatgtcatcgatcttttgcaaaaagaacgagcgcagatcggcttaattgagtctcgggaacactaccccaccgatattggctcaacccgtttaccgatgcaagcgtggatgggcatttatgtttcggcgtcacatccactgtctgcagaaaaaacaatccagcgggaacaacttcattcatggcgagaacttcgtcttaatacttatatcgataaccgggagatgattgcccgtggaccggtttggtctgcacctaactatttgttgttactcagtatggccgtacagggatttggctggtgctctctgccctgtgctctggttgaggagtttgcaacagaaaaaccgctggttcagctcgacgtacctggctggccaaaggcaatttctatcgatctgctttggaataaaaaatctccatcaggcgcggctggaaattggcttaagcatcatttacagcatatcaatgccccaaatagtcgaacttag

SEQ ID NO: 37031 - DNA, 459 bp, Escherichia coli
atgcaacataatgcgattcaacgcagatcgttacttgagcgtatttttcacgctatttgctttgaaggaattgccactgcgattctggcccccaccacagcatggttaatgcagcgaactatactcgaaatgggcgggatgactatcttgttggcttcaactgcaatgatctggaatatcatctataacatgctatttgatcgctactggcctgctcatcaggtaaaacgaactgcaaaagttcgtgcattccatgctttgggctttgaaagtggatttatcgcgatcggcgtcattatggtgtcctggattctgagcgtcagtctgttacaggcttttacactagagataggattcttccttttctttctaccatataccatgttctacaattgggcctatgacagcttacgtttacgtgttgtgaaacagcatcaacaacgtatgcttgccagataa

SEQ ID NO: 37032 - DNA, 198 bp, Escherichia coli; identical to SEQ ID NO: 15028

SEQ ID NO: 37033 - DNA, 216 bp, Escherichia coli
atgaaatcaatggacaaaatctctactggcattgcctacggaacatccgctggtagtgcgggatactggtttttgcagtggttggatcaggtcagtccgtcacagtgggctgcaattggtgtgctgggaagtctagttctgggctttttgacttatctgacaaatctgtatttcaaaatcagagaagacagaagaaaggctgcgagaggtgaataa

SEQ ID NO: 37034 - DNA, 600 bp, Escherichia coli
atgttcgctgacgtgatggtgcgcgtcaccggctttgccttcgtcacctccacgcccagtgcggtttccgccccggaggactcaaagccttccggcggtgtctgctcctgctccccggcacgccagacggcggtcacaccgtgtatcacgggattaccgtccgtgtccgtcagcggggttttgttcaccagaatactctgcagtcccttcaccgggccttccaccggtccctcaccgatggcatcaatcacgctcatcatctgcgtggatttgagattatccttcgcctcacgcggtgtgtgcgccttgccgccgcctttgcccacggaatcccccttcatcgtccgctgccggacactgttgatgtataaaaacaacaggcaccccggagagtgcctgcatcatgacggaataaaaattctgaatatcttcacattttcacaaactgactgtggcgctgataatttcgctgcgttagtgtttttttgccgtgacataaaaaaacaactccttaacactaatcttcatttgtctgaatctcccgcagctccgcgatcactgcgggatttttttattctttttacccctgccgtccgataa

SEQ ID NO: 37035 - DNA, 240 bp, Escherichia coli; identical to SEQ ID NO: 28165

SEQ ID NO: 37036 - DNA, 327 bp, Escherichia coli
atgacgacattaactcaatgccagcagcaggtgctggatatgctgatttcttatcagaaagaacgtggcttcccgccaaccaatcaggaggtggcaaccatgctgggataccgttcagtgaatgcagcggtggagcatcttcgcgcactggagaaaaaaggcgtcatcacgataaagcgtggcgtggcccgggggataacgcttcataccgcggtgaaggacgacgacagcgaggcggtcgggattatccgctcactgcttgccggtgaggaaaacgcaaggctgcgtgcaacccactggttacatgagaggggcctgaaagcatga

SEQ ID NO: 37037 - DNA, 240 bp, Escherichia coli; identical to SEQ ID NO: 11875

SEQ ID NO: 37038 - DNA, 240 bp, Escherichia coli; identical to SEQ ID NO: 34733

SEQ ID NO: 37039 - DNA, 321 bp, Escherichia coli
atgttccgggctttcgatgtcctgccagaaatggtaatgaaacctcagcaggctttccaggcagaacttcgtggtgaaacggaggaatgtttcattgaagacttggtagggaaaattaatgctaatatgattcttccgtatccaccaggagtacctttagttcttcccggagaaatgattacagagagcaatcgtccggttctggagtttttgttaatgctttgtgaaattggtaaccactatcctggttttgaaaccgatattcatggtctgtatcgaaaggcggataacaggtatactgcaaaagtcattaaaaaataa

SEQ ID NO: 37040 - DNA, 279 bp, Escherichia coli
atgacaggcctcataccttcagctacttctcagggctcgatgaccgccctgccagtgactatcgactatcctactgcactggccttgcggcagatggcgctcgttcaggacgagctaccgaaatacctgctcgcccctgaagtgagctccctgctccattacgttccggatctgcgccgcaagatgctgctggccacactgtggaacaccggtgcgcgcatttatgaagctatgaagcgctggcgcctccgtatctgtttgtgcagcttgcgaccctga

SEQ ID NO: 37041 - DNA, 351 bp, Escherichia coli
atgtttaccgatcagaacgacaaaaataattgccgttaccagtttgagaagatccgtaatgctatcgctgtacctagcgaaaaaaatattgatgctgcaaccagttgcggtcttgaagtaattgcccagaagtatgatgcctttcgccaggagctgaatgcggccggcgaactgggtgaccgggcatacgatctcgatacctacagtcactgtattacggtgctgcagcgttacttctccggcaatccatctgggctgacagaacgtgatgcccgcatttactgccattatctgcagactgagcacaaaaggtttgtgaggctggctgaagaactgactgccgaccgttga

SEQ ID NO: 37042 - DNA, 186 bp, Escherichia coli; identical to SEQ ID NO: 21099

SEQ ID NO: 37043 - DNA, 741 bp, Escherichia coli
atgaacaacgtcattcccctgcagaattcaccagaacgcgtttccctgttacccattgcgccggggggggattttgcgaccgcggtggcactccggcggatggccacctcaacaggtgtcacgccggcttacctcctggcgccggaagtgagtgcccttcttttctatatgccggatcagcgtcaccatatgttgttcgccaccctctggaataccggaatgcgtattggcgaagcccggatgctgacaccggaatcatttgatctggatggtgcaagaccgtttgttagggtgctgtcggagaaagtgcgcgcgcggcgcgggcggccaccaaaagatgaagtgcgactggtgccgctgacggatgccagttttgtgcgtcagatggaaagctggatggtgaccacccgcccccgccggcgggagccgttatggccggtcacggatgagacaatgcgcaactggctgaaacaggcggtgaagcgggctgaagctgacggcgtgcatttttcgatccccgtgacgccgcatactttccggcacagctatatcatgcacatgctttatcaccgccagcccaggaaggtcatccaggcactggctggtcacagggatccacgttctatggaggtttataccagagtttttgcgctggatatggctgccacgctggcagtgcctttcacaggtgacgggcgggatgctgcggagatcctgcgtacactgcctcccctgaggtga

SEQ ID NO: 37044 - DNA, 1416 bp, Escherichia coli
atgaccgtactcagcaacgacggacaatcatggttaacgaaacttgagcgcataggtgagaaatcagcctgtgacaggtcgatcgtgttcagcaatcttggacacctcatcgatcaggacatgctgaaggagcaattccggcatctggatgggaacaaggctgtcggtattgaccgtgtgacaaaagccagctggggtgaacaactggatgagaatatcagcggtttactccggcgcttacgccggggcacgtattgccccagaccgaccagaatcacagaaatcccaaaggaagacggtagcagcagaccgctggccatatcctgcgtggaagacaaggtggtacagcttgctgtcagcaccatcctcagcaggatatacgagccgctgtttctgccctgttcttacgggttcagaccggggttaaactgtcacatggcattacaggctctgcaacagcagacgttccgcaactggaacggcgcagttgtggagatcgacatccggaaatacttcaaccaaataccgcacggtatgttgatggggttactccggaggaaaatatcagatcgccgttttctcagactgattgaagtgctgataaccgcaccagtcctggaagaggggcaatcacacagtaatgatatcggctgtcctcagggctccatattgtccccgatacttgcaaatatctaccttcaccatgtgatagacgaatggtttgctgaaatcagccgttcgcacatcagagggaaggcaggcatggtcagatacgcagacgatatggtatttaccttcgagtaccagcacgaggcgaaacgcttctacagcgtgctgccgaaaaggctgggccggtttggcctcgaacttcacgaagacaaatcgcagctccttgcagcgggtcacgtggcggcgacgagggcaaatcagagaggagaacgtctccctacgttcaactttctggggtttacctgctactggggtagaacgcgcaaagggtactggcggctgaagtttaccagccggaaggaccgctttgcggccaagctgaaaggcctgagagccttcctgtggaagaacctcaatgccaacagaaggcaaaccctgaacacggttatccgggtagtgcgtggatggattaattaccatggcatctcagataacaaaagacgtgtggggcagttcatctaccagagcagacggatcatctacaggtggttcaaccgtaaaggtggccgacacccaatgacatgggaaaaaactggatctgatcctcaaaatgctgggatacccatcgcgatggagaactcagtcaatgttccattctcgctgaatatgtgtgggggcactgatctgtcgggagccggatgcggtagttccgcaagtccggttctgaggaggggcccgtccgggtaa

SEQ ID NO: 37045 - DNA, 231 bp, Escherichia coli
atgcccgttgactttctgaccactgagcagactgaaagctatggcagattcaccggtgaaccggatgagcttcagctggcacgatattttcaccttgatgaagcagacaaggaatttatcggaaaaagcagaggtgatcacaaccgtctgggcattgccctgcaaattggatgtgtccgttttctgggcaccttcctcaccgatatgaatcataggcactgttgcaaatag

SEQ ID NO: 37046 - DNA, 615 bp, Escherichia coli
atgagaaatgaagcattacgcattgcgctcattgattatgaaaactgttgcaatctgagaaatatatcgcttgctgattataccgatttgattttatttgctggtcctcttcagcaaacagtggtcttacctgctgatacctggccagataatatcagagtgagtatcagacagatagataacatttcgaagaataatgttgactttcaccttgttatggagctcggcaggatgacgtgctgcagtgccggaaacaacacctggcatattatttcaaacgataaaggctatgatggaataattcatactctgcaaaaacggggttttcgttgcgaacgtattgcgccagagcacgctgagagtcatttgtcggtatctcacctgattgtccctgagggggatgttattatccggtgggctaacagaatgcagcaggcatccggaagtgatgtgcggaatttaccggtgtcagtggaggggttcaataattatttaaaatcgcatatgcgaggagaatggcataaagaacgggctgttagtatacgtagtgagttggttcgtcgtggggtaattaaaatccaggctgataaaattgtctggttaacgaggcggtga

SEQ ID NO: 37047 - DNA, 1896 bp, Escherichia coli
atgagcaaagtaaaaatcggtgaattaataaactcacttgttagcgatgttgagtcaatagataactctgaccgtcctcaaggggaaaaaacaaaaaaaataaaggctgttgcattaaaatttaaaaatgcattatttaatgataagcgaaagtttagggggaaaggattagaaaaaagaattacagccaacacattcaatgcctatatgagcagggccagaaaacggtttgatgataaacttcatcatagctttgaaaaaaatatacatcgcctatctgaaaagtatcctttatataatgaggagctattgtcatggctttctctacctgctgccgatattcgccagagaatgtcagctttacaggcaaaattaaaattaattctccctttatcagaagatttatctaatatcagaattggtgataacaaaagtcataataagttattaaaattatcaaataaatataaagagtggcaattcgccatatctgatttaactagcgataactggaaagataagcgcgattatttatataaattactacagcaaggatctgccttacttgaggagttgaatcagctaaaagttaaccatgagattctctatcatcttcaactaagccctgccgaacgcgcatctatccagcaacgatgggcggacgttctgcacaataagaaacgtaacgtggtggtcattgattaccctaaatatatgcaagctatttacgatattataaatagccctgctacattaaataatctaaacactcgttcaggtatggctcctttggcatttgcacttgctgcattgtcaggaagacgaatgattgagattatgtatcaaggtacatttactgtttctggtaagtataccgttgattttttaggccaagcaaaaaaaagaacttctgatgatataaccagaaaaatatatacattatgcgaagcaaaaacatttgtttatttaataaatgtacttcgctcatgcccagcagcatctgattttgatgatgtcgttaaaggttatggagataacgacacacgctctgaaaacggacggattaatgccatattagcaaaggcttttaacccgtgggttaaatcatttttcaaagatgaccgccgtgtttataaagatagtcgtgctatttatgcccgtattgcgtatgaaatgtttttccgcgtagatcctcgttggaaaaacgtagatgaggatgttttctttatggaaattttaggccatgacgatgaaaacactcaattacactataagcaattcaagctggccaacttctcaaagacatggaggccaaatactggaaacgaaaataccaggctggaagcattgcagcagcttgatgacgaaatgccaggattcgccagaggagatgccggggttcgtctgcataacacagttaagcagctggtagagcatgacccctctataaaaatcacgaacagcactctaagagcattcaaatttagccctacaatgattagtcgatacctggaatttgctgctgatgctctggggcaatttgttggcgaaaatggacaatggcagctgaaaatagattctccagaaatcgttatgcctgacgaagaagagctggaagcaatacctgaacagacggatgaattatcagaggatgacgatctggatgacgacgaaattgagatagaggaagaggaagaggaagagagcgtagaagaacagcaaccgcccgcgccttcttcacctgtatctaagccggtatttaagcctgtgagaaatattggtgatggctcatacgttgttgagtttcattataatggccagaattatgcgtggtcaggcagtgcaaacagccccatgtcagcaatgcagttagcatggctgacatattttggctaa

SEQ ID NO: 37048 - DNA, 783 bp, Escherichia coli; identical to SEQ ID NO: 27551

SEQ ID NO: 37049 - DNA, 204 bp, Escherichia coli; identical to SEQ ID NO: 21458

SEQ ID NO: 37050 - DNA, 288 bp, Escherichia coli
atgaaagcgaaaggcatcccgtttaacgaagtaaaagaaaaacttctcaacactccagaagccatcaaaggatatgaagaggccgataaagagctggagatggtcgaaatgttatacgaaatgagggaaagagcaggtttaacgaaatcagctctggctgaacgaatggggttgcgaccgtcagccatcagccgcctggaaagcaatcctttaggggcaagtatgaaaactttggctaaatatgctcatgcctgcggcgcaaccatcgatattcgcgctgtttattaa

SEQ ID NO: 37051 - DNA, 312 bp, Escherichia coli
atgtttaacgtgataacccaccctgcagcactggatgaactgcttgaactaccagatgatttgcgaggtcgcatgaccagattaattgagcgactggagaaggaaggcaacaaactgaagatgccccatagccgtgtaataggtggagggctttttgaactacgagtaggggataaaaacatcgcaagaacgctgtacgcctacgcgactggtaacgaaatttatctattgcatgcatttgtaaaaaagacacagaaaacaccggtgaaggctatcgaaatcgccagaactcgcctgaaggagatgaactga

SEQ ID NO: 37052 - DNA, 222 bp, Escherichia coli; identical to SEQ ID NO: 27565

SEQ ID NO: 37053 - DNA, 228 bp, Escherichia coli; identical to SEQ ID NO: 27566

SEQ ID NO: 37054 - DNA, 273 bp, Escherichia coli; identical to SEQ ID NO: 27568

SEQ ID NO: 37055 - DNA, 498 bp, Escherichia coli; identical to SEQ ID NO: 21460

SEQ ID NO: 37056 - DNA, 468 bp, Escherichia coli; identical to SEQ ID NO: 20547

SEQ ID NO: 37057 - DNA, 312 bp, Escherichia coli; identical to SEQ ID NO: 21462

SEQ ID NO: 37058 - DNA, 597 bp, Escherichia coli; identical to SEQ ID NO: 21463

SEQ ID NO: 37059 - DNA, 540 bp, Escherichia coli
atgccggttatccagctcaggaaaacgtcgctgcaccgacagaggaataccgtcgagaatactggatatttcccttgctatacgcgacagcacgaaagtacagaatgcggtttccaccacttcagccgattctttggcatttttcagttcctgcgccgtcgcctgagcacgagtcaggcgatggcgctcaaattcaagtgttccggggtgaagatctgcctcgctggccagccgcagttcttcaacctcccggcgcagcttttcgttctcaatttcagcatccctttcggcataccattttatgacggcggcagaatcataaagcacctcattacccttgccaccaccccgcagaacgggcattccctgctcctgccagttctgaatggtacggatactcgcaccgaaaatatcagccagctgctttttgttgacttccattgttcattccacggacaaaaacagagaaaggaaacgacagaggccaaaaagctcgttttcagcacctgtcgtttcctttcttttcagagggtgttttaa

SEQ ID NO: 37060 - DNA, 348 bp, Escherichia coli
atggattattcacagttaagtgattttgaaattaacaagcgagtatttaaagcgatagtaggggcaaaaccattaggttatccgcacaacgcagatggacgctctgttggcaatgaagcaaatggtaattatcgatggtacgactactgcaataacccagcagacgcatggcctgtaatcgcaaaacatcagatcagcatatgtgcatacgaaagaaataatcctggaatgaagaatgaatattggtgggaggcggatagattttgtgaatttattaccatagacaataacccactccgcgccgccatgatcgtatttctcatgatgcaggacgccaataatgcttag

SEQ ID NO: 37061 - DNA, 969 bp, Escherichia coli
atgactgaaaagaaaagtggcgaagggaaagctaagggcgggatcgctcgcgcaaagtcgctgactaaagagcagcgttctgaaatagcaaagaaagcagctgctgcaagatggaaaagtaagattctcagggcaactcatcgtggtaactttttagatgattttggcattgatgctgaatgttatgtactggatgacgagtcgaaaactgtcgttgttacgaaaactggattatctcagttgctagggattggtgaacatgccagggatttagatcaactgcttggcgctcagtatatgagcaaataccgagatctagaattgcagcgaaaaatggaaaatccctataaatttcaacttacttcgaagtctaaaaccgttcatcaagcgttaggttatgacattacagcaattgttgatattggtagggcactaatagaagccaaagataatgacgatctaccacaatcacggttaaaggcagccgccgcagcacagagacttattaatgcctccgctaaggcgggaattaagggggttgcgtatgcgcttgctggttatcgtccagaagttcaggctgtcattgacgagttcaaagcgtttgttcgtgaagaggctcgtcaatatgaaaaggaatttccagatgagctatacgaggagtggtatcgactgtacggcctgaataggccagagaaaggacggcctattcgttttgggcagctaaccaacatgcagatatacaccccgctagcaaagagtaaaggtaaaatccttgaacaaattagagccagccgagacgagaacggaaaacaatctgataagttgcatctgttcctttctgaaattggggtcaaggctttgcgtcagcatatcggtaagcttcttggtgtcgcagcgatgagtgagacaagagaagaatacgaaaaaggaatagaaaaggttttcggaagaatgaaaccagaaatctaa

SEQ ID NO: 37062 - DNA, 213 bp, Escherichia coli
atgacaatgatgaaagttattcgtgataaaaccggagcagtaataaacatcggcgaatgggattacgtttatgcagaacctgagccgggcaagggggtagtcgccaccaacccgctaccagatggatcaacggaaagcgaagaagaggtggtcaatggctgggatggcggactttatgttaaaggtgatccgagagcaaatggggctcaatag

SEQ ID NO: 37063 - DNA, 240 bp, Escherichia coli
atgccccgcgattccgacatacccatagctttcaaccgcgcaatcaatcgagatgcctctggctgcctgatggtgaccagttcagcgtttcgcgcctgtcttgctgccgcaaaccattactggacgcttgagctgtgcaatgagtggatagcccgtcaccagactggctttaaagatgttaccgacgatgatgcagacgagcgcacctactatctgcgcaacatggcgagggtgctgtaa

SEQ ID NO: 37064 - DNA, 366 bp, Escherichia coli; identical to SEQ ID NO: 29545

SEQ ID NO: 37065 - DNA, 249 bp, Escherichia coli; identical to SEQ ID NO: 33321

SEQ ID NO: 37066 - DNA, 732 bp, Escherichia coli
atgattttccttacattttatgacgacaaaaatcataacattgccttattaatcagtcaaacagttaacaaaagcaaacaaacaagtaagcacattgttgataatttgtttatttttatgtttttgttatctataccatttttttcatttgcttctgatacaaacaaaacgccaccatatcgcatgagggagtcgatgtttgagttattaaaggagcaaagggatattgttatgcttggcgatagcataaccgcgcgaggagagtggaatgagcttcttcctagtttatctgtagcaaataggggcattgggggagatgaagttaaatttatgaaaagaaggattgattctatatttttattaaagcccaaatatgtattcattatgggcggaacaaatgatttcagaagaaaaagaagtgttgatgatgtggttcgtgactataagcatataataaaaaaactacacaaacacagaattaatgtattcattcagtccaccctttacgtgtcaagagaaagcaggttaaatgacaacataaaaatattaaaattaaacaatgcaataaataactattgctctgtatctaattattgtcgtttcgtagatcttaacgtgcacatggcaaaagatagaaaaatactagctaagtatagcgatgatggagtccatctaaatggtaatgggtatttaatgtgggcgtcaatcatataccctttaattaaaaaataa

SEQ ID NO: 37067 - DNA, 657 bp, Escherichia coli
atgaataaaggcctttttcttccttgtggagagtatgattttatagcaagccttggtaaaaaatgtcaaccagcaggaaggttaaagcgatttgggttgaggacatttagtggaccatttgattggtttgcctctcaaaaactacctcaagttacaaaaataattaataaggggtgcgaccaccttttcttgcctgaaaatataaaaattaatggcagatttaaaaattgtattgatatcacagatacagcgactggatttcgaagtattcacgatattcttattgatgactatgaaaaacaaggtattgaagtctgcttgtttaatatgatgaaaaaaataaaggcgagaagaaaaagatttatagagaaaatcaatgagtcggaacgtgttttactcgttagattgaatgcagaacgagatgctgtgtataaactgagaagtgttttggataaaaaattcccaacaacaaaaatagatcttcttatttttaaggagcgcaaaggagaagacctttgcaatatagactttgatatgccagatacttatgtagtatctggtgataatgaaccaaccaacgatgagtggttgggtagcgatcaagcttggaagattatgctttcatctgtaaagattaggacttattatagttcataa

SEQ ID NO: 37068 - DNA, 654 bp, Escherichia coli
atggcaagagttgatattaatgttccttataatgaaaaagatgaagcaaaaaaactcggcgcccgctgggatgccagtagaaaaacctggtatatccccgatggcgtgtccaccaataattttacacgatggctgccattcggaaatgtattgtcgtcttactggttcattgctcaggctccaggacggtgctggaaatgtggtcgggaaactgtaatgacatctttcctgttacctgccggtcacaaaacgcttgagcaggatgaatatgggcaaacttactggaaaatgcaggagttacctgcattcatcttttacgtagatgatatccccgagagaaatctgaaaaaaatggagcagatacgtcattacctagcaaaagaccacagtaaaacagtaaatgcccgttactggatgaatcattgccaacactgccatatgaagcagggagacttccagttacactgtgaagttgacagcgtattctcaccaaattcgagtgaagcagcgtctcgtatagttctttacaggatggaacaggaattcagtgcatcatgcagcggaacatcgctatcccatattcactttcgttgtggctctgaagcgagtttttccactgccggtgaatggcttccgttcatgaaaataatctga

SEQ ID NO: 37069 - DNA, 357 bp, Escherichia coli
gtgaataaaatgtttcctgcttgtgtgattgctgttggatttttgctttccggatgtgggcaaacagagccaacagaggctgatatcaataatacgctgaaaacatcattcgaagaggcaaactcccagatatcaaaatcagcaggtgctgtcggttcgggattactggaatcaatgaagataaagttcatctcggcacgtaaaatatcatgcgaaccaactgacacagaaaataaatacaactgcactgttgaaattcagagtgaagtgccaatggcgggtatccagaaagccacaacatccttaccctttataaaagacggcaataaatggatcgtcgttatgcctgtaaattag

SEQ ID NO: 37070 - DNA, 453 bp, Escherichia coli
gtggaggccgcctgtcagtccgtgcgcccccccctggcatgctggcgcctgccggaagggaagcgggccacgctggcgcgtcgcccgttacccttcctgatgttatgcttctgtggttactgtgcttattactgttactgttgttcttcttcctgttccttcctttcttctcctgtttatagctttcccgggcgttcccctggcggggcgggctgtcgtgaacggagccagcgaagctgtctccgccctggcgggcttccatccctgacgcgaagccccgggcttgcagcgaccggaacggtcgcgccgcctctgtcgcgccgtagcctgcgctcctggcatcccggcaaaaggccgccgggatgtaaggggcaacgccgtttcgcgcacgcgctcttcgtcgttgtggcgggcccctgctcattgcctgccgggtgccacacacccatatga

SEQ ID NO: 37071 - DNA, 165 bp, Escherichia coli
atgactccgggcaggcgggaggataaatgcccgtctgcccgcgccgggaaaaaacgcgcgcctgtggcgctgaaaggggccgcgctgacgcgccgccccttacattacgcggatattctgctgtgggcttctgtctcttcagacctgttatttgtctgttactga

SEQ ID NO: 37072 - DNA, 516 bp, Escherichia coli
ttgcccgttggtgtacccgttccgtggccctcagctacaccgccaacgggctggctgaaatgtaacggcgcagcattttcttctgaagattaccccaaactggcacaggcttaccccgcgaataaattaccggatctacggggtgaatttatccgtggctgggatgatggacgtggcttggatgctgggcgtgccttgctaagtcttcaggatgactcctttgaagcgcacaggcatgagtcctttttttatgcgggtatttcacgtaatgaaacaccattaaaaaatcttccaagttcagacgagatgctgactttaagttccacaactaatgccttgtccccggacagtattgatgccaccaactcgttaattggtaatgacgattacaactgtcttatcgaagggaataaaaataacaaacgaacagcgacaggactgagtaccagtattgtcggcacagcagaaacacgcccccgcaacgttgcattcaattacatcgtaagagccgcatga

SEQ ID NO: 37073 - DNA, 516 bp, Escherichia coli; identical to SEQ ID NO: 37072

SEQ ID NO: 37074 - DNA, 195 bp, Escherichia coli
atggaaaaaataggtaatgacattccgcatcttatagatcaagctatagattttatggcatcaacccaggcgttccgagagtatttgaaaaaactccccccccgtaacacaattccgtccgatattcctgaggaaaaagtgccgttatatctacaacgtctggaatattatcgccagctttacaggccaaagtag

SEQ ID NO: 37075 - DNA, 213 bp, Escherichia coli; identical to SEQ ID NO: 33323

SEQ ID NO: 37076 - DNA, 657 bp, Escherichia coli
atgctggtagtgatcaaggctgtattcgtgatctttgcggcgaggcagaaaaacaaacggctcggcatcggccatttccgcgtccagcaggcgaacttcactggtggtggagctggccagatgaatgaccacataatgcttcgaggtcgttttatgcaggctgacgtaataggtatcgtctttttcttcgtaaatcagtttatcttgcgatgctggcgtaccgatggcgtgacgccagacctgataaggcagcagcgtcactggatgcttgcgaacatagtagaaagtccaggagtcatttgcccagacaaagctgggttcaacgttatccagcagttccgggtaccagttacctgtttccagattacgaaaacgaatgccgtactgccgtcgggaaagaaaatcttctgccagtgccataatggtgttatctggcgtaatcgccattccgcccatcgaataaaactcactatgagccgcgcgcttgttggcatcgagcaatgtttcccactcgtcccactcttcactgaacgccgattgacgctggtagatagcatattcacagcctggttcataaatatgccgatagcggtagccatttttgatgtagggcgcagaaacttctcgttgtggaatgcggtcgatgatttcctttaa

SEQ ID NO: 37077 - DNA, 291 bp, Escherichia coli; identical to SEQ ID NO: 9089

SEQ ID NO: 37078 - DNA, 2217 bp, Escherichia coli
gtgctggcggtgaacagccagacccggacgctgacgctcgaccgtgaaatcatgctgtcatcctccggcaccacgctgataagcctggttgacggacaggggaatccggtcagcgtggaggtccagtccgtcaccgacggcgtgaaggtgaaagtgagccgtattcctgacggcgttgccgaatacagcgtgtgggggctgaagctgccgacgctgcgccagcgcctgttccgctgtgtgagtatccgggagaacgatgacggtgcgtatgccatcaccgccgtgcagcatgtaccggaaaaagaggccatcgtggataacggagcgcactttgacggcgaccagagcggcacggtgaatggtgtcacgccgccagcggtgcagcacctgaccgccgaagtcaccgcagacagcggggaatatcaggtgctggcgcgctgggacacgccgaaggtggtgaagggcgtgagcttcctgctccgtctgaccgtaacagcggatgacggcagtgagcggctggtcagcacggcccggacggcggaaaccacttaccgcttcaggcagctggcgctggggcgttacacgctgacggtccgggcggtaaatgcccggggacagcagggcgatccggcgtcggtatcgttccggattaacgcacctgcaaaacccgccaccattgagctgacgccggggtattttcagataacggcggtcccgcgtcttgcggtgtatgacccgacggtacagtttgaattctggttctcagaaaaacgcatcacgaacacagcacaggtggaaaaatctgcccgttatctggggaccggcagtcagtggactgtccaggggagccggattaagccggggacggatttctggttttacgtgcgaagcgtcaacctggtgggaaaatctgcttttgtggaagccagcgggcagcccagcaatgatggtgaagggtatctggaaattttccgggggctgatagatgagacgcttctgggccaggcactgaaagagcgcattgatgcttcagcgctgcgtacggaggtcacgcaactggaagaagacatccgtcagcggatggacacggatatcgcagaagtgacccggaaaatcggggaggcggaaaacagcctcacgcagctggttgcgaaaaagaatgaggaccagacactggccatcgcgcaggtgagccagaaagtggaccgggtgagcagtgaaatctcacagactgtcagccaggggcagtcagaaaacgcccgacagatagcacaggtccgccagtacgtggataaaaaagggagtgaaattacctcgaccacggataaaaaactgggtgaccaggccgtgaccatacagcaaatccagcgggttcagtcagacacgcgcaatgagctgaatgccatgtatatgctgaaggtgcagaaaacaaaaaacggtattccctatgtggccgggattggcgcggggattgaggatgttgatggtcagaccctgagtaacattctgctgcaggccgatcgcattgcgatgattaccccggagaacggcaacaccacgccgctgtttgtggcgcaggggaatcagctgttcatgaacgacgtgttcctgaagcgactgtttgcggtgagcatcacgtcatccggcaatcctccgacgttttccctgacgccggatggcaggctgacagcccgcaatgcggatatcagtggagccatcacggcgaataccggcacgctcaataatgtcaccattaacgagaactgtgtcatcagagggaaactgtctgcaaaccagattgaaggcgatctcgttaaaacagtgggtaaggctttccctcgtgactcccgtgcaccgaagcgttggccatcaggaaccattaccgtcagggtttatgacgatcagccgtttaaccggcagattgttattccggcggtggctttcagcggtgccagacatgagcgggagaacagcgatacttattcgtcatgccgcctgatagtgaagaaaaacggtgctgaaatttataaccgtaccgcgctggataatacgctggtttacagtggtgttattgatatgcctgctggtcgcggtcacatgacgctggagttttctgtatcagcatggtgggtaaatggctggtatcccacagcaagtatcagcgatttgctggttgttgtgatgaagaaagccactgcaggcatcacgattagctga

SEQ ID NO: 37079 - DNA, 177 bp, Escherichia coli; identical to SEQ ID NO: 20495

SEQ ID NO: 37080 - DNA, 222 bp, Escherichia coli; identical to SEQ ID NO: 9129

SEQ ID NO: 37081 - DNA, 972 bp, Escherichia coli; identical to SEQ ID NO: 22989

SEQ ID NO: 37082 - DNA, 759 bp, Escherichia coli; identical to SEQ ID NO: 6176

SEQ ID NO: 37083 - DNA, 210 bp, Escherichia coli; identical to SEQ ID NO: 9340

SEQ ID NO: 37084 - DNA, 294 bp, Escherichia coli; identical to SEQ ID NO: 32087

SEQ ID NO: 37085 - DNA, 231 bp, Escherichia coli
atgggtagaagtatgtccgaaaaacctttaacaaaaaccgattatttaatgcgtttacgtcgttgccagacaattgacacgctggagcgtgttatcgagaaaaataaatacgaattatcagataatgaactggcggtattttactcagccgcagatcaccgcctcgccgaattgaccatgaataaactgtacgacaagatcccttcctcagtatggaaatttattcgctaa

SEQ ID NO: 37086 - DNA, 228 bp, Escherichia coli
atggatgaatactcacccaaaagacatgatatcgcacagcttaagtttctctgtgaaaccctgtatcatgactgtcttgcaaaccttgaagaaagcaatcatggctgggttaacgacccaacctcggcgatcaacctccagttgaatgaactgattgagcatattgcgaccttcgcacttaattacaaaattaagtataatgaagacaataagggaaggtgcgaataa

SEQ ID NO: 37087 - DNA, 453 bp, Escherichia coli
atggcgagagttttatttgcgtcaaatgtcgaatacgccaaagaccacaatatgaaaaacatattgcggtcttttataaaagatagtcagattgttttggtttgtttgctccacaagggtagagctaccctgcatttcggcaggatcacgctattaggcgtgacatccagtagttttaaagaacgccctttttcaaggcatggtgggcaggcaagagagcaattgcgctttgtcagcgccgtagattcatatttgaatcgttgtatgtttcccgatcgaaatctatcggtcactgcgggacgaaccatcccgcccacatcaatgttaaagagcaattgcgctttgtcagcgccaaagcctgttaaagaacattccgcttttcagcagcgtagaaggctcaatacaccttcgtttataaaagagcgattacccttctccagggctaactgttaa

SEQ ID NO: 37088 - DNA, 372 bp, Escherichia coli
atggcaatcatcatatatccaagacatggcatttggtacatagcttgggtcgggatttcaaatccgatccccgttgatggggccgttacagtacgcgcatatccgctttatgtgaaacaggaagatttttctgatatcactgccacagcaaaacaccaatttcgagacaagtacgcgcgcgaggggtatcagttgcaaaaaattttgcaactacgtccgaccagtatgcacacgatggcggggggataccataaaactgttctctacatgagacagagtggtggtgatgtgttgattatcggcgtatatgcgcacaggacgcgctatgacgatgttttatgcgggtacaccaatcacatgtatctggtgtga

SEQ ID NO: 37089 - DNA, 465 bp, Escherichia coli
atgagcatcagaacctacgcagtgaattgcaatgacgcatggctaaacaccgaaggtgatgacatctccggctcatacgttaagtacaaagaccatcaggaagtggttgccgctcttgaggccaagtgcgcggcgctggcagtggagaatgagctggctcgtaaggcagttcaggcattctgcgatgttgttggcgacaacactgaggttatcgctgaggtggttgggcgagatggcgttctggttattttgaaggccatgaaggcaacaggaaatatgtcagccaccgacgctttcctgtctgaagtacgggcgcagggtgtggagatgtttgcacagtggtgtagaggtgagcgcgattttactctcattgatgaggatgttgctgatgcagcggcttatgaagaatgcgtaaaaagagctgaatatttcgccgcccagcttcgcaaaggaggcaaacagtga

SEQ ID NO: 37090 - DNA, 294 bp, Escherichia coli
atgtggcgcggtaataatcatggcggaagccagatgatacttaccgaatatcagctcgaccacaaaaccaataaatcacgttcagtatatttgcttcggcacaatagccgcgtaaggaataccgtgctggagcaaaatctgaccgttgaaatggataattttgggaacttcaagccaacaattgcgcttgatgatttcccgcgtggtttaagcgaaagagaggccatgctgaaattagcagaatggttacaaagattaagcattgctattgaagataactggattcaaccataa

SEQ ID NO: 37091 - DNA, 126 bp, Escherichia coli
atgttattgcacattgattgtagggggaataatgaaaaacgcattgcagtttttgtttgttgcgttctggttgttcgcatcatgtatgcccatcatcttcacagcaaggtatatggaaaaaattga

SEQ ID NO: 37092 - DNA, 624 bp, Escherichia coli
atggatatcatcttttatcacccaacgttcgatacccaatggtggattgaggcactgcacaaagctattcctcagacaagagtcagagcatggaaaagcggagacaatgaatcagccgattatgctttagtctggcatcctcctgttgaaatgctggcagggcgcgatcttaaagcggtgtttgcacttggggcaggtgttgattctattttgagcaagctacaggctcaccctgaaatgctgaagccttctgttccactttttcgcctggaagataccggtatgggcgagcaaatgcaggaatatgctgtcagtcaggtgctgcattggtttcgacgttttgacgattatcgcatccagcaaaatagttcgcattggcaaccgcttcctgaatatcatcgggaagattttaccatcggcattttgggcgcaggcgtactgggcagtaaagttgcacagagtctgcaaacctggcgcttcccgctgcgttgctggagtcgaacccgtaaatcgtggcctggcgtgcaaagctttgccggacgggaagaactctctgcatttctgagccaatgtcgggtactgagagatcccctcataatttccccaaaacgtaaccatgtgtga

SEQ ID NO: 37093 - DNA, 345 bp, Escherichia coli
atgtatgcgcagcgtaccatccggcggacgctgaacattctggaacgccagttacgcgaacccggtgcggtcttcacctccagcagttcggtaagcgactggcttcatctgcagctgacgcaggagcaacgtaaggaattcttcgtgctgtggcccgacaaccagcaccggcttattgcttacgacacgctgtttctgggggctatcaacactaccacagtgcatccgcatgaaatcgttaagacgggtctgaagcacaatactacggcggccgtacttgcacataatcactcgtcagggcttgcggaatccagccatgctgaccggcagatgactgacggctaa

SEQ ID NO: 37094 - DNA, 234 bp, Escherichia coli
atgaagattattagcaaacgcaaggcgatgatgatttaccgccagcatcctcagtttcggttgtttcgcttctgtaccggaaagaacaaatggagcggcagcatctgccactacgccgggcgtgaagtaccggatatcagaggtgtgctggccgtcttttctgaacgcagcaagaactgtaacagccccctatgtcctcctgtgcagcgttaccctgaattaactcaaatttaa

SEQ ID NO: 37095 - DNA, 438 bp, Escherichia coli
atgatatcgctgcccctttggtggagattgcgatgcaatatcacgtcctgttttgccgctcgtctagtgccggagggcaaccgaccgcactacatgactgatcgggccagtatcaccgatatatttggtggcactgaatatctgaagctggaagaagcatttccgcattttatccgccagattgaattgttgctgagcactggtgaactaaaagctagtcatgcccactgcgtcactttgtaccacaatgctttcacctgtgaagccgatactctcggcagttgtgggtatgtctacatcgttattatcccactcaacgttaaacttttttcactcgcgagaaaaaatgtaacaactcagcgggcggctaagccgtgcccgtctcccgtgacagtctggcagatgctgcttacaacattatggccttaccctgaatga

SEQ ID NO: 37096 - DNA, 183 bp, Escherichia coli
atgagcataggtaacagcggtcgtattgttatagaagtaaagccagaggtaaagcgcagactttactctgcattggcaagcgaaggtatatcacttaaagaatggttcatgagaaatgctgagcagtatctggaaggcaattataaaccccccacatttttggagaaaattgataaaatttaa

SEQ ID NO: 37097 - DNA, 1173 bp, Escherichia coli
atgggttccattttagaacgttcaacacgtgttgtagcacaagagtttgagaccggaagaaatgctattcagcaaaaacttgctgaggtggattgggggttccagaatcgaggaaaaactcccacaatcgaaacgattcacccatatcccgcaaaatttattggtgacattccccgcgcactcatgaacgctctccctcttccagcgggtaccggcgtacttgacccattttcaggctcaggaacaacactagttgaagctcaacaggcaggtatcccttctgttggtatcgatctcaatccaattgcgtgcctgatatctcgggtcaaaaccagtcctttatcggatggctttattgatgctgttgaagacgttatcagacgttcaggcaatattacatcgctggcaacgcccgacataccaaacgtggaccactggtttaaagcagatatccagttagctgtcggagctctcgctacaacaattgcggacgaggtttatcttccttggctggatcagcttcgtttggcgctttcaggaatactggttcgtgtttcaaatcaagatagcgatacccgatacgctgctatcgataaaaatatttcttatgaggatgtttttaaattattccgtgcctcagcagcaaaaattatgaaggcattgacgacgcgaaaagaagatttacccacagcacaaattatagaagcaaatacacttgaggttcagccagaagatatcaatatccctattgggttggttgttacttctcctccttatcctaatgcctatgaatactggctttatcataaatatcggatgtggtggcttggctttgatcccctttcagtgaaggaaaaggagatcggagcgcgcgcgcactttttcaaaaaaaatcatcacacggcagagctatttattgatcaaatgcgaggggtattttctctcattgataatgtattagtcgaaaagggttttgtctgcttcgtggtggggcggtcaaagattcacggaaagattatcaataatggggacatcatcgatctggttgcttctgaaatagggttggagcgtgtatctcgttttgatcgcgttataaacgcaaacagaaaatctttcaatctctcacatgcaaacataaagacggaaaccgtacttgtgtttcagaaaagataa

SEQ ID NO: 37098 - DNA, 1527 bp, Escherichia coli
ttgtgtttcagaaaagataatttagatatgcaattaacatggcacaactataaatactacccatatgaaaaagatctcgcactgcgtgagatacaaagtcttctaatacctgatttaatcgaggttagtgaaaaaggagtgaatgtaaagcatcctgcagcgcctgaaatggctcaacgactagtttattttgcaggttatactaatgaacttgggttaccacgagtaaatacgatgcaacgtattctggaacaagtgaatggcagcaatacgaatcgacaggctacccgctactcagcacatggattgcacgagtacaaaggcaagtttaatcctcaagttgcaaaagcaatattgaacatctttgcagcaaaacccggacaaactgtacttgatcctttttgtggaagtggaacttctttagtagaatgtgcccatctgggtattgatgctatcgggacggatattaatccattggcagtatttattgctaatgccaaattacgttccctgcaaatccctgctgagaggcttcttagggatggaatatcatccctcattgatgcagaaaaatattctagcatccattttgttggtgatgaacgagatatttacttgcaatcgtggttccctatggattatttacagcaaattgaaaagctgagaatagccattgaacagtcaggtagtgccagtactaatatcatgctggtaattgcatcaaacctactgcgtgattattcattacaggaacctcatgatttgcgcatcagacgtagaaagtccccttttcctgaaaagagtttttttcaagcttacagggaggctctagaggcgttttgcaaaaaactgtcagattttcaacgtaatgtgggtattgttgaaataaagcaaagggcaatcaatatcgactgcaaaaatgcaatggggaatgatggctttggtgtcaatacttttgacttagctctaaccagtccgccatatgcaacagctttaccttatattgatactcaaaggcttagtcttgtatggcttggattattaacgccttcagaggtgaagttattagaagccgagcttgttggtagtcgtgagattcgcggagcgggaaaaaagaacctgctggcacatctggaaaagaatgaagatggactgccggaaacggaagcccatttttgccttcaattacagcaagccttatctgaaactgatggttttagaagacaagcggttcctcgtctgctttatcgatacttttcagccatgtcggatgtatttgcctctgtcagaggtgttgtaaaagaagatgcaccttttggtcttatcgttggtggtaatcatacagtgcttggtggtacacgttttgacattaataccccacaacatctggcaaatcttgcagtatcacgtggatggcaacatgtggaaaccataccacttcagacctacaagcgttacggtttacatcaaaacaatgcaaccacaacagaagcacttatagtccttaaagcagcagctagtaactag

SEQ ID NO: 37099 - DNA, 1386 bp, Escherichia coli
atgaggtattatgattctggactgcgccagcgcgagaatactcttgcttattggctggaaacagcgataagtgggcctgtagctgagcttcgttttcagacaggttttttttcactggacggtctaggattacttcttcctgccctcactcattgcaaagttaacaatcttccaacaaatattctccttggttcgaatgattcaagcacccttaaaagtgatgttgaaagattaattgaaatcatgggcataccacgaggtggggctcagttgggaattgttagtttcaaagggggctactttcaccctaaaacttatcatattcgccgagaggatggttcacaggccgcctttgtgggatcagcaaaccttactgcatcaggtcttgctctgcatgttgaggcagggatttctcttgatacaaacgaaggagatgatcccaaaattctagaagaaattgctaccgcgattgatcgctggtttattcaagaaacagatggccttactatagtatcagatgtttcggttctaaacagtttagttgaaaatgatgtccttgcacttgcagtgccacctcgcccccttgcccaaggaagtgctgatatacaccaatccagtgttaagaaacgcctacgtcccataattgagatcccgaaagttgctggttcagtaacaacaggcgaggataaagtaaccaattctggtacgtcgtcaattattactcagtcccgtcaggatgcaacgttatcgacagagccatcatttagccagcgtgaaggatttcctccatatattctctttgcaacagacgctactcaggctactactgattatggagccataaccggaataccactaccaaagggggccgcagggcttattattcaattaaatcgcgacagcgcgcgtcattttgctggcgggagaggaacagcaaatataagtatacccgttgtatctgtccagactttgaaatttggcccttttggtaaacataatagacctcgtgctcaatttaaccttaggttacgttatttaagcgacaatattactattgatggtggaactgttagtacgaacgttatggggtatgggtttacaccaagcgaaacaggtcatagtgatattcgtatgcttgtgcctgcttcagtaaatactttaagtaatttgataattgctgaggggctgaatgtacctgtggatggcgatatggcacttctagaatggccgacctcgacagagccttcttttcgtctcagtttccttgataacaattcagggattgcacaacaggcagccgccttgttcagagacgcggcggaacagggcgagcttgccgggaatggtgcctgctggctacctccagactactcgccagcatggtaa

SEQ ID NO: 37100 - DNA, 126 bp, Escherichia coli
atgaatttggtgccggactcggaatcgaatatggttattatcatgttgatattaatctcgtttatttggtttgatgaaaaatgtaccctctcttgtaccctcggtcccttctggtggtttttatga

SEQ ID NO: 37101 - DNA, 273 bp, Escherichia coli
ttgctgggggtaattattcagcaggcaaccaaggtcggtgaacgcaagaagaggaaatgcgacagagtatcaccatggattgaaagagtttgtgattatgagcttcgacctaatgtcgaaaccccagccaccgatgctttcctggctgaagtgagggcgcagggcgtggagatgttctcagaaaaattcggaggtggcactccgctttccaatatggtcaaagaggttgcggctgattttgccgcgaaacttcgcaaaggaggcaaccagtga

SEQ ID NO: 37102 - DNA, 159 bp, Escherichia coli
atgcaaggtgcaagaaaaatgccgcagtttaatttgcggatgcctaaagaagtattggatttggtgcgcaaggtagccaaagagaatgagcgatctgttaactctgagatttacaagcgagtattggacagcctgaagagagaggggataacggtatga

SEQ ID NO: 37103 - DNA, 174 bp, Escherichia coli
atgaatggtcggtctatcaattctgaactagttcagatcgtacaaaaggcgttatctgaaccatcaccgattgcaggctatcgagacgaagctgaacgcttggctgatcagcaagcagaaattgttaagaagatggtgtttgaaaccctgaaaaaaatgtacgagaccagatag

SEQ ID NO: 37104 - DNA, 597 bp, Escherichia coli
atgctggtcgccgaatatggcgtgacaggtaaatacatttttctgaataatcataaaacgggcatcatccgccgccacaaatgtagcggtgtaaacaggatcgtcatgatgttttctttcgtgacagaagagaacggcacataccgcccgcaatcattatcagcaggaataacatccccaggacaacgattactcttaatgccggatgaacccgatcggcgaggaaaagtaactccatcccgaaaccaagaacaagccaggccagcaaccacgtgggctgacagagaatcagactctgaatcagcccggagtcattcccggatcagtacttcatcagatgccaccagtccccgtgtcagtacttcacgacctgacgcaattacccgactcagtacttcagagcccgcctccggtacctgcccggtgatcgcccctatgcaacaaaataaatcaaccatcgtcagaccacgatcgttcgtatgcgccgccgatgacgcgcgtccaaaaaaacgcgtcaagatgagatgcccggaagcacacgcagagacaagcaaaataagtccgccaactgaggacgggattaaatttatgctttag

SEQ ID NO: 37105 - DNA, 411 bp, Escherichia coli
atggatatcgttaacacttcgctgcaacatcttctggtccaactccagaaacagatggacgatgaaaatcggagcaattcgcctgaaggtattgggattatggatcttggcagcaatgttgattgctggcactgtgtggcgcttgaggatggagtgccactcggtgccgccaccgtacaactaggaaatgaactatacaaactttatgttgcaccgcagcacaggggcagacatgttgctgaaaagctggtcagccatgtaatggattttttaaaggaggagggtgaaacggaaatatccatcgaaatgaccaagaactctcttcctttctggggaagagttgttgagaaacattcgttagagtacgaactgatttacggacagcttaaaatgctcataaagctgaaatga

SEQ ID NO: 37106 - DNA, 531 bp, Escherichia coli
atggagaatatcaagcggatagtaagtaatcttttcattctttctctggtaactataatgtctgggtgtgctacttattggggaaaagtcccctataatccaccatcagatacggagaagaatatagctcatgttagattaatcggtaatccgccaggttttacgataagccagtatggaaataagcctggtgccgttgatccttctaatatggtaattttaagaccaacgcatgacttgggttttcccaaagtaagtaacgatcctaatcgttataaagaaacgtactatgatacaaatgtttatgctgatactccaacacggatcggtttcaagtatctctatggttgtgaggatgtaggttatacttttttaccgaaaaaaggtgaaacttatgaatttcgattgtctgtcacagataaaacagggtattgcgtgctctatgcatctcatctgaaatatgattcagaaaatcaattgtatataaccgaaaatattgaagagtataaaggttatgtctatcagaaataa

SEQ ID NO: 37107 - DNA, 360 bp, Escherichia coli
atgtctatcagaaataagatatgtgtttattcgagcggaggatttcttttatgtatattagtcggttgtctcgggcatattgatcggactaatgaaacaacgttgggaaaatactcaaagcaagaaatattcaataaatttagagagaagaaaacgactaaaagagatgttttatctcttttgggacgccctaattacccacatgattacaacgcccaaaatacatggctttatttatcaaaaacagaagggaaagtattgtacgggattattcccattgatttcaatcagtctgaaatgttaaaattagagttcgggaaagacaataccattgagagcatggaatataaacaaaagtaa

SEQ ID NO: 37108 - DNA, 258 bp, Escherichia coli
atgaaacaactatatagttatgtgatattgttcctttatagctgtttatcatctatagtcatgttactatttctgggaggggtggtttcaatcttttatttttttaaaggtgatgggttttattttcctgtgaatcagtttaaaagagctatcgtttttggttgtatagcaggaacagcaataacattagctacaatagtatttaatttaatagataagtttaactcccgtaagaaaacgccattagatcctaagtga

SEQ ID NO: 37109 - DNA, 144 bp, Escherichia coli
atgcgacataattacctgatcatgacagccatgcttctgccggatccgtacgtggtccggcgtttttttcgccgggggattcactggctgcgtctgctgatgatcctctttaatgcggcattcagacaggggagacatcgataa

SEQ ID NO: 37110 - DNA, 414 bp, Escherichia coli
atgaacggtctgaaaacggggctggggatcacgcctggtgagcacattatcagtgcggcctcagcccttagcagaaatatcaggcattgtttctgtctttcctgtcgtggccggttgattttacggacagatgctcagggggcgtggtttgagcacgatttacatgccctgactgcgcaacagaaggcggcctgcgtggtgctgaatccggaaaagtcccacccttacattgaggatatggcgatgtttttatcgccattaccaaccgtgctggagtggcattgtgtgatgtgcgagaggctttttcatgggaagaagttctgtgaggcctgtggtacggggatctattccagagcggtatgtacaaagtatgtttacaggtaccagccagatttgctccgggacccggagtga

SEQ ID NO: 37111 - DNA, 1053 bp, Escherichia coli; identical to SEQ ID NO: 11597

SEQ ID NO: 37112 - DNA, 171 bp, Escherichia coli; identical to SEQ ID NO: 12692

SEQ ID NO: 37113 - DNA, 306 bp, Escherichia coli
atggaccgtctgtgcgaaaactactgcgggggtatctggaatctgtacaccctgaacaacggtggcgcatttatagcacctgaaccggatgaagatgatggagaaacctggatactgttcaatgccatgaacggtaaccgcgctgaaatgagcccggaagctgccggcattgccgcctgtctgatgacgtacagccatcatgcctgtcgtacggagaattatgccatgacggtccattattaccggttgcgggattacgccctgcagcatccggaatgcagcgccattatgcgcatcattgactga

SEQ ID NO: 37114 - DNA, 213 bp, Escherichia coli
atgctcgtggcgaatctgttcgcgttccagcgatgccagtgcgatttcataagccaggcgctcaatattgtctcgcacgtccaggctgccgattcgctctctgatttctttaatcagttctttgtcggtaaaagtagtcatgtgttagtcctcatccacttcaacgccatctttcagcgtgatgccgtgccaatcatcagcccaactggttag

SEQ ID NO: 37115 - DNA, 246 bp, Escherichia coli
atgacagatgcaatatctttgaattacagtcgcgttaaaaaattagcaagtaaaaaaagtttgcgtgcaattatttattctctggaacaaaaaagattagaatcatatgaacgttctgtggcgaatctttttgatttgaccacttttatttcatccgtagaccgtgactatctctaccctaatccgggcagtaatatccctgtctcttatacacatctgacgctgccgacgaatagagaggtgtag

SEQ ID NO: 37116 - DNA, 315 bp, Escherichia coli
atggaaacgtttaatagcctgtttatggtttccccgctgctgctgggagttctcttttttgtcgccatgctggcgggatttatcgactcgattgccggtggcggtgggttactcaccattccggcattgatggcggcggggatgtctcccgctaacgcgctggcaaccaataaactgcaagcctgcggtggctctatttccgccactatctactttattcgccgtaaagtggttagtttaagcgatcaaaaactcaatatcgccatgacctttgtcggctcaatgagcggcgcgctactggtgcagtatgtttag

SEQ ID NO: 37117 - DNA, 432 bp, Escherichia coli
atgccaaagctgggtgaagaagatcgccagcgtcggatgtatggactgccatttgcgctggtggcggggggctgcgtcggtttttacgatggattctttggcccggctgccggatcgttttacgcgctggccttcgttacgctgtgcggattcaacctcgccaaagccactgctcacgccaaattacttaacgcaacgtcaaacattggcggtctgctgctgtttattctcggcggcaaagtgatttgggcgacgggctttgtgatgctggtggggcagttcctcggcgcgcgcatgggttcaagactggtgttgagcaaaggacaaaagctgatccgcccgatgatcgttatcgtctcggcggtgatgagtgccaaattactttacgatagccatggacaggagatcctccactggttggggatgaactaa

SEQ ID NO: 37118 - DNA, 297 bp, Escherichia coli
atgtctaaagagaagataggtgttaataaatcaaccgaactgttctatgaccttgcatgtagatcgttttccgcaagctggagtatgttcatggaagttaatggcgatagggatgctaatgattatttgaatgatccggattttatgagtccatttattatccatgtgattgaccatatccagaacaaatttgaaagattcactgtccaagagggtaataacattgatattcatcaggttaactttgaaatggttgctgccatgttagttgaatattcagacacctttagaaagtaa

SEQ ID NO: 37119 - DNA, 237 bp, Escherichia coli
atgacaaataaaatatctgtagttgtaagtatgctgtgcgaaggaaccccgaaagtaaagaatactattcaagaaagcctagatgtgtttcttgctctgagcgggtattcagtagaagaaatgataggagataagaacttagtagatgcattaaatcgacatatcaataacgatttagttgatgagttagatctggaatacggttctgtcatcatcaatgtcgtttataacaactaa

SEQ ID NO: 37120 - DNA, 357 bp, Escherichia coli
atgaaagagattatattaaataaaaatgaaaaagaactaaacgaacttattgccaatatcttgcaaggatactgtgatgaaatatatgccatttatgaaaaacatcctgaaacagcaatcgatattttgaatgatgggtttctttcgagtatcacatatgatgttttgataactcgtgagatgaaaaaatactctatcaaaaatgatgtatctgatatcaataaaagagatttaaaaaccacaatcttgtattggcaccaagaacacatcattgaactggtttcgaaaaatataaatcaggataacattgatggtcctatttattggaagctgaaaatgacagtgaaccgtcattga

SEQ ID NO: 37121 - DNA, 240 bp, Escherichia coli
atgattgatgaattccatgttatgtttatgtacagaaaaatccaagctgaagcggcaacaactgatttgaaaacactgaaccaactgttgaagaagttccgcagagtggtagaagagcggcgtgaggagtattatcatgagattggtgagaaaaaggcgcgtaagctgaggatgaaaaggcttctcaagctgatggcgaaggaacgggtatcaccagaggatctcattgatcggcactag

SEQ ID NO: 37122 - DNA, 399 bp, Escherichia coli
atgggctgggagcttcatataacaagaactgagcattgctttgatagcagcgataaccctataaccagtgtggaatggctccagcttgttcatgatgatgaagagctgtccatcgataataaaaatggtgagtttttcgctatttggagcggtcatagtgaatatgacgaaccttggctagaatgggatgatggaagaatctcaaccaaacatcccgacgaggccctctattgtaagatgttgcaaatagctaaaaagttaaatgcaacagttattgatgaagatgatcataaatatgccctaccaagtgatcttctaaatccatcatgggcgaattcatcgcctgctggtaaaaatctttctttatgggataggttaatttcaaaattaaaaaattaa

SEQ ID NO: 37123 - DNA, 480 bp, Escherichia coli
atgagaaatgtaaaattagataacagcgatttattagagtattttgatactattgaaaaactagaacaacaaccatcaatggatgaatatttagaaggctaccgtaaagttcgtgaaaataatccttttggaatcgaagtggataaatatagatctgctcacaatgaactacgcagactggatagaaagagaaaatctcttatagataattttattattgaacttaaccctataagcagctcaactgcaagaacagcagcaaaatcgtcaggtaatcttgatattatgcatgagcgcatgatctaccaaaaagcaatttcacaaaaaagtgatgaagaaattgttgctctagtaataaaacaacgcacagaagcagcacttgattttcaacgttctgttgagcagagtcttgaacagctttccagcatttcatcagatttgggagcatcgaataaaaaacgtaggaaaatggctgtttaa

SEQ ID NO: 37124 - DNA, 207 bp, Escherichia coli
atgaatacaatattaaatatcgattgtcaaatatattccctgtatttggaaaatattatccatagctaccaatcacaaataaatttaatactccataaaaagtctggaggttcaaaaaaactcctgatgccttatctcttttatatcttatgttatatttctgaatatgaggacaaggtatataacaaccacagagaatttttatag

SEQ ID NO: 37125 - DNA, 861 bp, Escherichia coli
atgaatgatattgaagttaaatatggaacatgtgctctctgtgataccgagaatactatattgagagaatctcatagtatacctaagttcgcatatgactggataaaaaacacatcaaaaaccccatattttagagatattaacgatgtaaacaaaagacatcaggatggccctaaagagtatctgttatgcccagattgcgaggaagatttatctgtccttgaaaaaaaattatcaaatgaagtttttaagaaaattgccaattatagagagcaaaagaaagatatagtgattagtgaagaaataaggctggccgtactctctattttttggagagcgctattaactacccaagaaatccctaacgatagaacacctgaagatacttcattattagttgagtttttacactcagctaaagcacaactactttctggtgaatgcaaaacgaaaattttcatcacaccctttcatggcgactcaccttattataatttaccatcctatttaacttatggtcttgagcgttctatcggcgcacaggatgtaagattctatgacgaaccccataggtttttcgccgtatttaaacttccattcatatattttcatatattctcgggcaactgggccgctgaggagataagtaaatcagcagaactaaaaaaagggatgatagatctgtcatcgataaaacaaatccccgacacactccgatcttacatactccacatgaatgagcaatttgaaaaatcagctgctgaaatggatcaggataatctcattaagataatgaacgacgcagcaaaaaacacaaaaataactggttcagataaatcaatgaaacgcacaaaaaagtag

SEQ ID NO: 37126 - DNA, 201 bp, Escherichia coli
atggcaactgttttatatagaacctaccccggctggtatgctttcgttgttatattattgaccttcggcctgtctatactgatcggaatgtctacaggcatggctggggctactatcagtttgccaattatcgccattgtgggttttgtggctggtaaggcgattttgtctgataatgttgtgttcaggcgaaagatttag

SEQ ID NO: 37127 - DNA, 603 bp, Escherichia coli
atgttcaatctgacagcagaatatgcagaaaggattttcaattttcctttatctaccctagatgaaaaactacaaataaatagcttatgtgatctcttggaaatgtgcattgaaaatggcatggaagagtttacttttacattagatgagcgctttgataatgaagttcgggataatgataattatattttagatgctttcactttcttctaccgacatagagcaaccgagttttctgaaagtaaacacagatttgatgtggaagagattgttaaagaggagtttgataagcaaaaagaacacgataaagagttagcaaaagtagatataagctttattgtttctgatgataattattttgttcaagtcagcgatgttgtagcagggctcttccaaagatattttcattacataaatataagtaagattgttgacgttaaaactgtcagagcatccctcaacccattacagctaaagaatctggagttattcaaatcactaattactaagtctgataatgagaatgatagtttccttttctacgtaatgtctaagagtgagcacgagaaacacatagcttttacttttcctgaaaatgcataa

SEQ ID NO: 37128 - DNA, 429 bp, Escherichia coli
atgaatactccatatgacgaaccaaaaactcaagaagtcaacacatctaacctcaaggaacaagatactctaccctcagactcgaagagcaaaaagaaaccaaagtttaagatactggcattgatcatttttgtattaatcctgttaattgttgccatatatgaatacttcactataggaaaacaattaaataacgcatcaatcacctttcttattgtaatggttttttcattggctataacaataaagaaaacaaggcaaatagaggaatataatgacgactcatttttcataaaaaccctaagagcaaaaaaactattatcaaaagctaaaaaattagtgcgatggttgaataccattccattatggcagcgctatatgatattcttcaccatatttattatcggatttctgatgatggttatataa

SEQ ID NO: 37129 - DNA, 477 bp, Escherichia coli
atgtctagcaaaaatcctttttggaattatgattataatgcagcacaacgtaacagagaaattgttgactcttaccaacaggccaatgaagcaagactggattcccagcaggctcagtttgaagcatctatggctaatgacagggttagtagaatacagatgcagttgaataacacaatcaacagccataagagggttgtggctgattatgagcaacgtctacataatactaaaacggtagcatttaaattggctattcgttctaatattttcaaaagaaccttagttaaactgacagaagaatggcctgagaaaaaagaccatatccttgatgaaatccagcgccaaaaaaatctttgcacaacacaagagtatagagacaactggtggggttgggtaagtcagaacgatccttcttcagataatagttatcttgattttccatttcccgacagggagctaaaacataagccataa

SEQ ID NO: 37130 - DNA, 450 bp, Escherichia coli
atggaaaacaacaacgagcgaagctctatggaaatcttcgaaaaagatcaaaaaatcgcttttattgactcgttcagcgatgctgctttgtcttacgaatacgaacaggcgggcttcaccattaatttaatgcaacgctcggttcttctctttaaccataatataaagaaaaacgtaacagccaagcagttgcgtaaaaataatataaagaaaaacgtaatgtcttcgacattgcgtaaaaatatgaacagcacatttatatatccatatagcaacatcagggaaatcaactactcgctgcctgattgcagatccgatgatgccgagatctgtattatgactgatgatgtattaaatccagtctggacgttcagggttccatcccacgcacattatatttgcgagcaatgggtggaagtatttaacaaccatattttatttggtcaataa

SEQ ID NO: 37131 - DNA, 561 bp, Escherichia coli
atgcataaaatatcgttagtagccgtgggggctattttgcttgtcggttgtggagataagggagattttgagaaaacgataaataaagaaatcagtaaggagcctgtttgttattcttttaatacaaaagaaaataacagtgatgcttatgaacgcttcagcgaacccggagttttcgtcagagttaatgttcgaggaaatgatgtgagtcctatcttggaaggacttaaaaaatcgggcttaatcgatattgaattcgaacaacaagggtttacccgtgttgcagccttatcagcaacagataaaggtgctaaagcgaaattttgggataaggagcatggggcttgcgtaggtactagaacagtggatgaaataaaagagtggactgaacccagcgatgctggtggtcaaaaagtaacacgggtatcatatacatggaaactctcagatattccaagctgggttgataaagatgctttctccagcgtgaaaggagtgtcagaatcagaagaagcaaaaattattctggtgaaaaccaataacggctgggccacaaggtaa

SEQ ID NO: 37132 - DNA, 657 bp, Escherichia coli
atgaactctatctattgggtgattttcatgggactgctgttaaacataccatcactggttcctgttttgtttctccataagactcaaaagaacgtgaagatatctattgcgatcagactgtttctacttaacgctttcttggtgctgtcccttgtgacgctatcgcaaaatatcacgcaaaaatacgggctgtttccagtatggatggtgttagctgcaatagtgctgtttgcggtcacgctagtaccaacggtaaaattcgtgcgtaagcatttgactgttgggaaaagtcgggctgttatactctcatcattcctgattgtctatgccgtcaggtttaatggcgtgttttcagatgtgaatggcagtggctacacagttaatggatacaatacggtgtggacgttgttctttctgtttgcctgtctgttagcttatcttggttgtgctgggagtaaaacatattctggttattctgtgtcgtcgtctgcatcgcaaccagattattttaagccaaccaaagaatatgagacgcaatcacagattgattacgatattgctgtgaaggggcggagtgttctatctgatcccagtctgagtattgttgagcagcagcgttatcgtgatgcgcttgagaaaaaagaaaaagaggattga

SEQ ID NO: 37133 - DNA, 171 bp, Escherichia coli; identical to SEQ ID NO: 12692

SEQ ID NO: 37134 - DNA, 228 bp, Escherichia coli
atgctgggataccgttcagtgaatgcagcggtggagcatcttcgcgcactggagaaaaaaggcgtcatcacgataaagcgtggcgtggcccgggggataacgcttcataccacggtgaaggacgacgacagcgaggcggtcgggattatccgctcactgcttgccggtgaggaaaacgcaaggctgcgtgcaacccactggttacatgagaggggcctgaaagtatga

SEQ ID NO: 37135 - DNA, 354 bp, Escherichia coli
gtgcattcctcgaccctgcattacgcctgggcccgggagttcggggagcttaaaggcaaaaaacactatcacctgctgctgctggtcaaccgggatacctggtgtcgtgccggcgattaccgcgctccggggtcactggccggaatgattaaacaggcgtggtgcagtgccctgggagtggatgtcgggtgccatgccacgctggtgcattttccggcctggccggcggtgtggctggaacgcgatgatgatgctggtttacgggatatgctgaagcgtgctgactatctcgcgaaagagtacaccaaagtcaacggtaccggtgagcgcaattttggctgtagccggagttga

SEQ ID NO: 37136 - DNA, 270 bp, Escherichia coli; identical to SEQ ID NO: 8342

SEQ ID NO: 37137 - DNA, 231 bp, Escherichia coli
atgcgccatgcggtccatcaggagttaatcgatacgaaccctgcagcaaaccttggcggcgtgaccacacctcctgtcagacggcactatcctgccctgccgctggagcggctgcctgaactgcttgaacgtattggggcatatcatcagggccgtgaactgacccggcatgccgttctgctgatgctgcatgtgttcattcgctccagtgaactgcgtttcgcccgctga

SEQ ID NO: 37138 - DNA, 654 bp, Escherichia coli
atgacgaagaaaaccccttttgcaataggcgcaatgttccaccgcttccgtggtgatattcatccttttgaagtaaccacgttttcaagttattacgattttgggacggagtattacgccggatctaaggtaggcggtgaatcttatacgctgatggctaatacgtggcgctttatacgttactctgaaacggatgatgacggcatgaataaagaaagcgaaatcattgatgaattaatcgaagacgagcggcatgattgcgatgcgccggaagttactgaatggaagccaggagaaaagcctccgtgcggcgtgtggcttgattgttattatcctgatggctatcacattgggattttaatgtttaaatttatcggtgataaatacggggtatacacagaaaaaggcagtatacagaaagaaaatgctattgaatggggcttttataattattatttatacgttgatccgaaagaaaaagcgctggcgcaaattgcgtttgcgctggctacgaaggttattggtgaggatgcggcgaaagagattgactttaaccgtgataatgattattcgcgtgattatcgcaatatggcgcaagctattattgatggatgtatcgggcacgttgaatacaccggggcaaataatggataa

SEQ ID NO: 37139 - DNA, 198 bp, Escherichia coli
atgaacaaggatttggagttaaccgtggaggatttaagcactattgctgaatacatgcgcggcgatgatcctgataaacctgtcacggttgacatgaaatatttaaaaggcgctttcatgacaagctcgcggctaatttctttgcaggcgattatgtacgcacgggcacaatggaaaaatagcaacggtgtattatga

SEQ ID NO: 37140 - DNA, 720 bp, Escherichia coli
atgtctgaattgatggcgcttaatggcgcgaatgaagtgttaacaatgtcatcgcgtgagattgcagatttaactggtaagaaacatcttaatgtatgccgtgatattcgcgttatgctttctgcattgttaggcggtaaacctgatgattatattcgtaaatcagatttgagttacgttacaaatcaatcagttatatgcaatcaatatgataaaaacaatccgaatagctgggaatatcttctcgatagaagatacactgagattttaataactggctacgacatcaagcgccggacggctgttattgatcgatggtttgaacttgaaaaacgggtacagcaaaacactcctgcaattcctcaaacattaagcgaagcgttgcgccttgctgccgatcttgctgaggaaaaggaacggcttgcactggttaataaacagcttgcgccaaaagcggctgtctgtgatgccattgttaaaaacgacatgcaccgcacggcttcagaagtcggaaaagcgcttggaatgtctgcgattaaattaaacagaaagctcgaagctgttggagtttatgatcttcgttgtcgtcgtcgtgtatttagtcaatggtttattgataaaggatacggcgagatgaaattaactttcgatggatatgagcaagcgttattcactgctaagggccaagcatggataactaaattattcgtttgtggttaa

SEQ ID NO: 37141 - DNA, 255 bp, Escherichia coli
atgagcatgaacatgattagcaaagcatggaacgtaaaacttaacagcccgattcaaaaactagttttgatcgcccttgctgagacggctgatagccaggggcggacaagcgtatcacgcgaagaagtagcaaaaatgtgtgaacttcctgttcatacggtacatgatgccttcgccgcattaattagcaaagggtttgtttgccgtattgatgcgtttagtggtgtctatgtagttatgttgccggaggaatga

SEQ ID NO: 37142 - DNA, 531 bp, Escherichia coli
atgtcttattcaaaacatggaatgacgcacacaaaactttatgaagtttttaaaggaatgaaaacgaggtgcaggaaaagcgataagaatccacgaaataaacactataaggataagaatataactatatgtgatgaatggttgaatgattcatcaaagtttattgagtgggctttaaataacggttatcaggaagggttagagatagacagaattgataacgacaaaggttattcacctgataattgccgatgggttacacatgctgaaaacatgcgcaatacatgtagaactacgatgttaacagtgagcggggaaactaacacaatacattatttttccgaaaaatacggtatatgtgaacgcaccatatatacaagattacgtcgcggctggagtcatgaggccgctgtacttcttcctttaagaaaggggaaacgatgtgaagaaagatttatacaaaaaattgtggctaattcagcaacaattaaaagcgccaaaatctcagcgcaattcatacggtggatataa

SEQ ID NO: 37143 - DNA, 504 bp, Escherichia coli
ttggaaggcattacgttaacgcttaacgatgaagtggtgttaattggtgatcgttattacattaaagcaacagcgatattgagcgatggtgaagatgaaataacggctactgctttcgcccgcgaggaaaaagaacaaaaaggcatgtcgtctggtcagttaactggcgcgacttcttcttatgctcgcaaatattgtttaaacggcttgttctgtatcgacgacgcaaaagatctggatagcgacgcttacgcgaagcagacaggccagcagccgcgacagcagaaaaacccgccaaaacaacagcagcagaaagcgcagccaaatcctgatgaagtattagcacgtttctgtgatgcagcagcaaaagcgcctgacgctaacaagttacgcgagatcttcggcaagtgctggaagctattgcctaaggattcagaacaacaacagaaagcgaaagacgtttatgacattcgcttaaaagagcttaacggggagatcaattaa

SEQ ID NO: 37144 - DNA, 414 bp, Escherichia coli
atgagtttaaattcaatcacgctgggcgggaatatcggtaatgatatggaagtgcgctacacgcaaaacggaaaggcgattggtagcttcccgttagctgtgacgaatggctacggcgataataaacggacaatgtggatcacttgcctggtatttggcgagcgtgcggaaaaattagcgccacatattcgtaagggtggaaaaatagtggtaagcggtcgcctggatgttcggcaatatgaccggaacgacggcacaaaggggactgcggttgaagtggcggtcaatgagttcgaattttgcagcaggaacgatcagcaaccacagcaaccacagcaacagcagcaacagcagaatcatggcggtggatataaagagccaccaatggattttgatgacgacatcccgttttaa

SEQ ID NO: 37145 - DNA, 252 bp, Escherichia coli
atgacagctacaacattaagcgaaaataacggcagaggttttcagagaactgcggaaagtcttgatgatagtgacgtgtttattgatttcggcggcggtagctatgaattcgaaacatcggctggatgggtcgataaatggcctttcccaacgcgccaggaattaagcgaacgtaaatcatttggcgaagatgccgaacgcctggcgaataataaatggcttgataaattcattgcggagggcgggaaatga

SEQ ID NO: 37146 - DNA, 273 bp, Escherichia coli
atgactccgtggaatgcaaaagctggtgatctcgttgttttgcccgcatatcgtagtgaccctgggctggtcgtgctgaataaagcatgtatagaaattgagcgcccgatccttgttaaatacctggacggaacaattatagagccgatcttcttcgacaagattgaactgaaggcccgcaatgttcgcgttaagccgttccgggcttatgttgaagaccactggcggaaattattcgctggactgaatgggatgttcgggctatggctataa

SEQ ID NO: 37147 - DNA, 318 bp, Escherichia coli
atgaacgacatcaaaacagcttactctctcggtaatgaaggcatgttgatcactcgctatacagatgatgcaaactttcacgaagtggaaattaaagattatcacgaagtattgaaagatatggaagctggcgcgtatgacgctgatttgaatctggcgctacaggttgttgatattgtgatggcggcgtcaatccgcgattacgtgtctttaagcctggaagaaaaaaacagcggtggcgcgttatgtattctctcttacttttgtgaagcgcatggaggaagaattcggacgcgtaccagtgccggaagagattga

SEQ ID NO: 37148 - DNA, 192 bp, Escherichia coli
atgaaaaaggttggcgaatacatgataccggataacgctaaattagccgggatcggtcaatttggctgttattactataacagtgtcggtgatatttatcaggttagtcttattggtggtgtgcagcattttcgtctgatgcactttgaattaagcgcacttaaaaaggcggtgttaatgtatgaagtttaa

SEQ ID NO: 37149 - DNA, 237 bp, Escherichia coli
atggttaagagctttttaaactggttgggagcgtggcttttagctacgctttttgttttcctggcgttcatggctgttatcgttgttattatgctgggggcaatgtttattacgtggtcactgcctgaatttaacgaaataggcgagatccttgccgcagggcgcgctttattaacggttagtgcatttatcgggttttgctggactgccgcgccagattgggatgatcctttttaa

SEQ ID NO: 37150 - DNA, 492 bp, Escherichia coli
atgagtaaagcggctgaattgctaagacttgcggctgaaactattgaggcaagaggggaacaaaacggatacgatcgaaaagaagaaaaatcagcgccaaaaatagccactatttacaacgctaagaaggggacaaatctaaccccgcttgatgtatgggatctactaatttgtctcaaggaggcgcgattagaggccattttaagcaatggtagcgacccgctcgacactcttatagaccttattgcttataacgcgctaaaagcggagcaaatattaacggagcgggaggaagaacaaagaaagaaacaggctgtttttgatatgccgttaaattgcggctgtaagaaagcctcaatacctggcgacctgatcgccagtggtgaagtaacgctaaatggtagcttccgacttgataacggctggcggtttaataaagaggctttattgtatacaccgaaggatcataaagatgaaaagggtgatgattga

SEQ ID NO: 37151 - DNA, 177 bp, Escherichia coli
atgccttttgataattaccaatggcatgacgactatgaacgagaaagcgttatgcgtgcgatgtgcaacatgtgcgacacgaagaaaggagcatgtaacgagtgcaacgagtgtttagatcattggctaaaggccggacgcgacgaaaggctgagcgaaacagaaaatcaaaaataa

SEQ ID NO: 37152 - DNA, 285 bp, Escherichia coli
atggaaagctattttgaccggatgttttgccgcacaacgtgtaacgagtacaaattcactactggccaggcttacacgattcacaggctgcgcaatgcgactactgatccgatggtctttgttatggatgataacgaagggacaatgtaccaggtattctactgcggcgatcttgattatgcactggtgaaaaacattaccggacaatggctggcgcaattttccaggtatccggcagatattgacacgaaaaattatttaaaggtggctgacaatgcaagttaa

SEQ ID NO: 37153 - DNA, 213 bp, Escherichia coli
atgcaagttaaatgctcatattcaagcaatgacaatgttttcactcctggacgtgtttatgacgttcatatcgtttatggcaatgggattagcgatgttggcgtggcgcttgtattgattgatgatcatgatgatgtgtggggatttatgccaacttatcggggcggtgaaataacggggattgatttttccgccagttttgagcgttattaa

SEQ ID NO: 37154 - DNA, 324 bp, Escherichia coli
atgtataaatttatcagcgttaaagttttccgtggcactttaccgagcaaggaaacattagggcaattcgccggacaacctggcgcatgtttccgtgtagccactgaagacgaagctggcgtcaaatgctaccacgtatctgaacctccttttgatgttaaagaccttgataatgctgaccacgttaaatcttttatcttagtatcattgaaacttaatcctttcactgatgctgaagtagaattgcttggcgctgaactggttgcggaatacaaaatgactgaaggtgtaacagggggaattgacattgagcgcatcaagtaa

SEQ ID NO: 37155 - DNA, 225 bp, Escherichia coli
atgggaaatagcgaccataaatatgacggtgtttatcagtcattggcgtcaagcgcttattatcgccttgaaggtgaacacgtaatgatgcgattaagccagtttgagccgtggcatgaaccgtttttacctatgacatctgccgagatcatcacgatgtttaatcacggatattggcgcaagattagcgatactaaatctaagctattcaaagaggatagttaa

SEQ ID NO: 37156 - DNA, 177 bp, Escherichia coli
atgaacgagatcgaagatggtgtttattcacatgctttgttcggtatagcctacatgctaaaaggcgacaaagtgatgattatgactattgatgacccatactggaaagattcactaatgagccgcgagcaaatgcaattattacttgataatggtctgttaatcaggaaactgtag

SEQ ID NO: 37157 - DNA, 144 bp, Escherichia coli
atgtttgaatttatcgatctattgatgttcttgctttgctctggcgtgcttattatcgcgttaatgctatgcgcatatgtgatcgtaatgattaccgcgcttatttacaaagaagcaaagcagagatttaagggtaaacaatga

SEQ ID NO: 37158 - DNA, 303 bp, Escherichia coli
atggaactagtaattctctttattggatttgtggcaactatggttgtagctgagaaaaaacatcttaatatgttccttgcatttattggcgctctgatttgttggcctgccgtattgatttacgctctatgcgtcaacaagaagatgtttaaacactacgtagatgctttaactttcgtcaacatggagttttctgacgcaactgacgtacagaaagcacagatcgcgacttatctttacgataacgtgtacacaatccatgatttagaagaggcaagatggcgctttgcagcatacaaataa

SEQ ID NO: 37159 - DNA, 177 bp, Escherichia coli
atgaaaaacccggcaaataaaagcaatgtaaaacgtatggcctggatcgtaaaatggatggatacgaaaggcgacacatacacagaaccgtttttcagatacactgacgcagtattcgccaaaagcgtaagaggtgggaaaattgagaggggatatacaagttttgagaacaactaa

SEQ ID NO: 37160 - DNA, 351 bp, Escherichia coli
atgcaaaaatacagcttagaaatttggactgataaatgtgaatgggaacgcatgggcctatttgacacatatgctgcggcgcgtgatgaaggtcgtgaattacttcgctgttggtctaacgctcgcgatttcgatattactcctgtgcaagtgccggataaggtggaagagatgaacccgaaagatattaactttaacgtcaatgttggatttgcagactctatggatcagtcttgccctggtgaaatacacgcaaaaggtttcccggcagacgatccagaagcaaaacgcgaatacgaaaaagcggcaaaagatttctgtatagataatctatcggctttcgataaataa

SEQ ID NO: 37161 - DNA, 4674 bp, Escherichia coli
atgagtagcggcggcggcaaagccaaaacaccaacattattaaacgataacctgtttcacaaacaattttatcgagtattggacattctcagcgaaggcccaatctacggccctgtaaaccagaaagcgccattaaacagcgtaatgcttaatgacactcctatcactgacgcaaacggaaacacgtcagttcccggtgttagcgtggcgtggcgcaatggtacggctgaacagtcaccaatcaacggcttcaacgccattgaatcgaccgttattgttaacgcaaaagtgactcacgatacgccaataatcaggaccgtttcagatccaaacgttaaccgcgtaaggctgaatcttggcgttgatgctttggttcagtcagatgacgaggggaatcaatacaatacatccgttacgttgatggttgacgttaagccttcatcatcaacaacgtggtcactggttaaagatatttacattggccccggtaagcaaagcggcgagtacatggaagcgcacatcatcaaagcgccggatgaaaaaccgtttgatattcgcgttcgtcgcgtaacgccagacagcaaaagcgatctacttcgcaatgacaccaggtggagcagttacagcgagataatcgacgataacttatcttatcctcataccgctgtcgctggcgcggtaattgaccacgaccagtacaccgacacacctacacgcacttatcacctgcgcgggctgattgttgatgttcctgataactacgacccggaaaagcgcacttattccggcttgtggcttggcggcttcaaacaggcgtacaccaataacccggcatggatcttccgttaccttgttaaaaacgagcgtttcggccttgcgcgtcatgctggctatattgacgttgatgacggcgcactgtatacgctttctcaatactgcgaccagttggttgatgatggctacggtggccttgagcctcgcatgacgcttaacgcttacatcacagagcaaatgagcgcacgcgacttactggacaatatcgccgggatgttcaggggtatcgcgttatgggacgggcaacgtcttaccgtgatgattgatgcgccacaagacccgatcgccaccattacaaatgcaaatgtcgttgatggcgcgtttactcgttcaagtatcgcccgcgcagaatgctacaacgccgtgatcgtatcatggactgacccggaaaacggctgggagcaatcaaaagagtatgtagcagatgatgaactgatcgcccgtgatggttacaacgaaaccacgttagaggcgttcgggtgcacatcacgcgggcaagcataccgcgcgggcaagtggctgatagaaacagcaaaacgcgagccgtcaaaattcacgtttaaaatggcgcgtgacgcgattcactttacgccaggggatattatcgagatactcgacaataaccgcgcaggcgctcgtttaggcggtcgcatcgttgcgaacaacggcaaagtaataacggtagataaggttgacgccaattatatcgccgctggggatacaatcagccttcttgatagcgatggcaagtttaaaaagcatcagatcaccggggtgagcggaaacaaaatcacactggcggcggccccgtcatggattcgaaacggcactgtttttgctgtatccactgaatcagcaaaacccgttttgtgccggatcaccagtgtagccgaaacagaaaataacagcgtgtacaccatcgaggccgcacagcacgacccgaacaagcaagcagtggtcgatgaaggcgcaatatttgaagtcaacaatgacacgcttaaccatttccgcgtgccgaacattgaaaatctgaaggtggtaaacattggatctgaaacggttcaatgccgcgcaacatgggaaacacagacgacaacgcaccgcctgacctttgagatccgcgtatataacgccgaaggccgcgtggtggcgagctatgaaaccacgaattaccgctatgaattttatggcctcgacgctggcagctacacgcttggtattcgcggaagaaatgatactggcatgaagggtgcagaaagtatcgttgaccttgtcatcggtgcgcccgccgcgccaattggcgtaaattgggtgccaggtgtatttcaggcgacagtatacccgataagtaagacaacgctaacaactgatacagcgtacgaattctactatgcaggggaaaaccagatcacagatccggcaaaaataaccacggcggcacagtttaccgggcgcgggtatcagtggacgttcggcggaatgaacactggccatacttattacgtttatgtgcgtacacgtaatgcttttggcgtgtcagacttcgttgaagcatcaggtaagccgacagaaaattttgatgaaattagcgattacgtcaccaaagacgtgatgaattcagagcaatttaaggaaatggtaagcgacattaaggatcttggggaccgcactgacattatcgaaagtgcaactgaagaccttaaagcagctaccgatgaccttaaaacagcaactgatagcctaagcggaataactgaaggcttaagaaatgatactgattcccttaaaaaagacactgaagacctttacaagaaagtcgaagaaaacgccgatgaaataggcaaacatgaggtaagaatcgactcattagaggtatcaagcgaaaacgtagataatgaactggcacagacaaaagcaagcctacaaaacgcatcgcttgctcttattaataattcgcttgctcaaactaacacgcgcgtaactcttaccgctcaatataaaaaaggtcgcagcgaaacgaaagcgcaaatcgaccgtatagacaatgtcattgctgacgaaaaacaagcaacagcggaagcgcttgaaactatcaccgcagagatgaacacgatggactccaatatcaaaggtgagatagcgcgagtagacaaagcaattgcagacgaaacgcaggcaaggactgaagccattagcaatgttaacgccagcatcagtacgctggaaagcagcacaacagccagcgttaaccgcctggatcaagccatcgcagacgaggccagcgcccgtgcacaggctatcagcggtgtgaacgcaagcattagtacgctggactctaaagttacgagcaatatcacgcgtatagacaaagcaattgcagatgagaaaagcgcaagaactgaagctatcagcggtgtaaatgccagtgtcagtacactcgacagcaaggtgacaagcaatgttacgaggatcgataaggcaatagcagatgaaacaaaagcacgcaccgatgctattagcggagtgaacgccagcattagtacgcttgagagcaatactgaatcagaagtaaaccgcttggatcaggcaattgcagatgagacaagcgcaaggactcaggctatcagcggcgtgaatgcgtcaatttcaacgcttgatagcaaggtgacaagcaacgtcaccaggattgataaagccattgcagacgaaacgaaggcccgcactgacgcgataagcagccttaactcatcgcttaccagtacgattaattctaaagtatctgaagtgtccacagcactttctacgcatgaagcatcaagcgcggaaaaattcagccagatctcagcatctttcgaagcggtaaactcaagcatcacggaatggtcacagaccatgacaacggcagacgaggcattgtcaaccaaaattgaccagttgacagtaaccgttaacgggaacacaacagccattgagacgacatcgaaagcgttaaccgactttaagggaaatgttgatgcgtcatggtcaatcaagattgccaccgacaacaacggcatgaaatacgcaacaggtatgtcgcttggcctgactggtagcggaactaacgttcaatcacagtgtattttccttgttgaccgcttcgtgttaatgacagccgcaaacggcacatatcagacgcctttctatgttactaatggtgcaatgtatgtgcgcgaagcgtttattaaagacgcatcaataggaacggctaaaattgcagatgcagccattactacagctaagatcgcgcagcaaatacagtcaactaactacgcttcaggatctgccgggtggatgattaataaaaacggcggcgcggagtttaataacgtaacggtaaggggggcggtgtatgctaatagcggtaaatttaaaggggcgttagaggcaacaagttttgttggcgatgttgcgtcaactaactttatacctcaagcatcattccctaaccaatcgggcagcgcttcgcgatctgttactaaaacctatacagactcatcatcgagttcgctttctaaaaccgtttttgtgatgattccttatcacctgacttactatcaatattctcaatcaacaaccataaaagtaacaattaatattaatggcaatagcaagacatattcagtcgtaagggctgcatcaacgcctcaatttggatttacggtatctcattgcgttacagggattacggcgcaaaccgtgaccataaaaataacggaagaatacactaacaccagcacgggtgcagaaagaagggcgggacttgcgcttgttacaaggagttctggttcttggtcataa

SEQ ID NO: 37162 - DNA, 249 bp, Escherichia coli
atgaaaaacatgttcaaagtggtattattcgctgcggctgttgctcttactggttgcgctgttgacaaagaagctgcattgcacaacctgccaaatagcggagtgattccgcaagaaattgtctatgatgctaatggtcatcttgtatatgacactgaaaaacttccgtatactggacaatggtgtcatgaactcgatcacaacatgcgccgcatcggtagcccgtcgaattgcgtagctaactactaa

SEQ ID NO: 37163 - DNA, 3480 bp, Escherichia coli
atgatttatacaacgggaacaattgccattagcggcaatactgttacaggtacgggaacaaacttttccgcgccgctttctctcatccgtgtagggtgcacgctcattgccattggaaatccggtacagatctttaccatcaccgaaattaagagcggtactgaattatcagtaacgcctgcggctaatcctgccattcctgcggggacaaaatttagcattctgctttctgactcgatctcagttgatgggcttgctcaggacgtagctgaaacactgcgttactaccagggcaaggaaacagagatcgccgcagccgtcgagtggtggaaagatttcggcggtgatggtcagatggatcatcttcttgccaacattcgcgcagaaacagcgcaatcaaccgccaatgctcaaaaaactgaagctgacaagaaaacaaccgaaggttacaaaaatgcggcggcaacgtctgctactgcggcaaaatcatctcaggatgcagcaaaagccagcgaaacatcagccagcaacagcaaaacagcggcggctaccagtgcaaccaatgcggcgaaatcagcagcagacgcgctcaactatcgcaaccagtctcagggtattgttggcaacaatatcgggcttggcacagcgccgcgtgattgtcctgatatttccggcaatccatccggctatatcggatttatgcgtattcgtgaagcagccactggttttccgtccattgcttcaggtgaagcgtacttaacaggctttattagcggttgcgatggttctcctacatatacgggtatattccagggatggaatacaagatccctgtatacctatcgttggtcgagcagtataggcccgcagtggacacgtcacgcaagaaaagatgaagttagccgattaatacagggtagcggtgagactgctttgtgggccgcaggaggaaaacaaaaatttgttctgtgggatggtggaacaggggatactattaattggggtgtgtatgatgattccgcaggcgcttttgttccgttaaaagtagcacatggtggtacaggcgggcttaattcaggacaagctcgcactaaccttgaggctatgtatgagaaaaaatcagatctaggttccacagatattaatacgcttacaggcgagtattccggtttttattaccaggggttaaacgcaaatgccacgactgcgcgcggttatcctgtatcaagtgcgggagcattgcttgttattagaaataatgcgaacggtaacgcaggatgcacgcagctttatttcccttacaatgccacgactggtacattttatatgcgccagcacatcattcagacttcctcttctggttgggaatggaccgcatggaagaaatttcagtctcttgattttactgatacaccgcaatttacaaaccttaatcttgtgagagcttcggatgtagcaactacagcgggcggtattttacaaagcatccttaatgatgcatcaggcgcacaaagagcgcgagcgcgtttttattcggaattccgtggcgatggtaaatcatgggccacaattcacctacataatggagataaaaaccaatacgcaggattaagcgaagacggcgactttactttaaatagcggtgattttataggtaggcgtgtaagattaacagctaattttaattatcccgtagaaatatcaagcgctcatcctaccatcagattcaacgaaacggatcggccatcaaatacaccttactatagccttatctttgatggtggtaactggcgtattcagaaagacggatatgacggtacgaatacaagctattcaatgagctacaactatgcaagggatgaaatagaagtacctaacctgaaagtcaatgcaattgcagtacctacaaaccttgaacaaactaaaaccaatatgcaaatcccgtttgcaggtattgcgcattgggttgattacaaggcacctactggtgcggaagctggtaaatattaccctgtaattgtcagccatccttcatactataacggcgatttccttgttgaagtcgcaatgagaactaagtcaatatctggcagtaaagagcctaactgtaacgcaattcatttatggttgcgtgatggtggctggtcagatatgggtgcggctgtatttggtcattatttctgttacgcaaaaaatgaaaacgcgatactttgcgtgcgcggtaccgataaaggtcagtgtccacataacgcaatctatgttcgcggtgatgctttccctattcgtcttgcagtcacggttggatgtactgtaacaatacctacagcagactggaagccagctaacacagcagatagcccgacttataaatggggtatcactaattcctctgatggtattgatttagacacttacggcattagtaataacctacttgattttacatcgagtgcaacagggttttattgcactgatacataccgcaataagtatgggaatccttacttggttgtgcaacaaaatggggctatacaacccgctaacggatttgaaatatattcaaatatagattggaatacacaacaatcagataatgtaagtaaatttaagcctattgctggtaatgctaatacgcctgaaagcgatctaacttatggtggttttcatgttggatttaacggcacccatgctacacaattcgccgggcgcaattcaaaattcttcgccagaagttttgaggccggagtagataaaggctggtgtcaacttgcaacgcttaacgcatcttcgcaaaggtggactggataccagcaatttaaatcgacggagtttttcgctgatacttacacaagaaaagtaagtttagccgtcgcaaattcagcggcaagaaatggcgagctttatttgtggggtgcagcaagccgtccgactgtacttgagtacaagataaaagatccagacacaaacgcgtcgctttcatgggttttttacgcacagcaaaacacggatgattcatgccaacttcaggttaatggtgctgtaaactgcgtaacagtaaaccagcaatcagaccgcgacctgaaggacaacattcaggttataggcgatgctactgaagcaatccgtaaaatgaacgggtacacctacacgcttaaggaaaacggcctgccttacgctggcgttatcgctcaggaggtcatggaggcgcttccggaggctgtgggatcgtttactcattacggtgaagcattacaaggcccgaccattgacggcaacgagctacgcgaagaaacgcgttacctaaacgttgattatgcggcagtgactggtttacttgtccaggtggcacgcgaaacagataaccgcgtcaccgaactggaggaagaaaacgccagcttacgagctaacattgccgtcatggatgagcggatcactaaacttgaagcgcttgtccggcagttgaccggaagcgaaaaataa

SEQ ID NO: 37164 - DNA, 459 bp, Escherichia coli
atgatcggtgaaagtcccgctgatataccaagcaatttagttccttatatattacaagttgctatgggtaaactagaaaaacttatggtgtttgggggggattaccctacaaaggatggaaccggtgttcgtgattatatacacgtaatggatttagcggaagggcatgtggctgctttatcttaccttttccgtgataataacactaattatcatgtttttaatttaggtactggtaaaggatattctgttttagagctggtttctacctttgaaaaaatatctggggttagaattccatatgaaattgtttcgagaagagatggggatattgctgaaagttggtcatcaccagaaaaagcaaataagtatctcaattggaaagctaaaagggaattggaaacaatgcttgaggatgcctggcgctggcaaatgaaaaacccaaatggttatatttaa

SEQ ID NO: 37165 - DNA, 996 bp, Escherichia coli
atgaatgaatttataaaagaacggttttcgtatttagcagataataaaaaagaaaacgccccagagctaaatgtttcctacggtatcgataagaattttttgtatggtgctggcgtttcaatttcttccgttttgattaataattcagatattaattttgtctttcatgttttcactgattatgtggatgatgattatttaaagtcatttaatgaaacagcaaaacaatttaatacctcaattattgtatatttaattgaccccaaatactttgctgatctgccgacgtcacagttttggtcgtacgcgacatacttcagggtattgtcttttgaatatctgagtgaaagtatttccacactgctgtatctggatgccgatgttgtttgtaaaggaagcctgaaacctctcacagaaattatatttaaagatgagtttgctgcggtcattcctgacaatgatagtactcaggcggcatgtgcaaaacgcctcaacattcccgaaatgaatggacgttatttcaatgcaggcgttatctatgtcaatcttaaaaaatggcatgaagcaaatttgacaccgtatttactcaaacttttacgaggggaaactaaatatggctctcttaaatatttagatcaggatgcgttgaatatcgcatttaatatgaataatatctaccttgcgaaggattttgatactatttataccctgaaaaacgaactttatgatcgtagtcatcgaaagtatcagcaaaccattaccgataaaacagtgttgattcactatacagggataactaaaccatggcatagctgggctggatatccgtctgcatcatactttaatatcgcgcgtgaacaatctccctggaagaaatatcctcttaaagaggcgcggactgttgcagaaatgcagaaacaatataagcatctgtttgcccatggtgagtatataaaaggcataacttcattaattaagtacaagcttaagaaataa

SEQ ID NO: 37166 - DNA, 183 bp, Escherichia coli
atgggcttttcacaacatgccgggatggtgattgtgtgcgatggcactgaagatgccgatgcccgactggcgcgtgtgctgtggaacgaccctgccaccggggtgatgcgccatgcggatgctggctatgaacaggcaaaagcctgtgctgaacgtcatcatttgaatttgccgatgatctga

SEQ ID NO: 37167 - DNA, 1167 bp, Escherichia coli
atggcttctgatatagcagtttccagttcacttgttgattcacaacagcagatactgaaaaacctcgccaggcccacagcgcggtcattaagcctgtataacgccgggttgtcggcggaagcggtacgacagcaatatgggttgagccatatcgccaaactggccagtaatgaaaatccgctgggcgccagcccgcaggtcatcgcggcactgcaggcggatgccggtttcagcgcagtctattcggatgctgccagtacagcgctgcgcgatgcgctggcaacgtataccggtgtgcaggccgggaatattgttatcgggaatggctcagaagatatcctgcatatgctggcactggcctttctcaaccccggggaccgcgtggtcacattgcgaccttcatttggtctgcatgagattttcccgcgcatgatgggcgcggacgtcaccctggttgacgtgaataagcagcatcagttcgatatcgccgcctggactcaggcactttcgatgcccgccaaaatggtgattttcagcaacccgtcgaatcccgtgggctgcatgctcgacaatgcaggttttgagcgcatcatcgccgcggcacctcaggactgtgtgctggtgattgatgaggcctatttcgaatattgccggaacaacccggattatccggacagccagcgtgtgctggccgcgcagtcgcgcccctggattgtgctgcgtactttttcgaaagcctacggcctggcgggattgcgggtgggctatggcttagccagtcaccctgaactggtcaatctgctcaatcgcgttcgcacaccgtttaatattaaccgttcggcacaagcggcggccgtggtagctctgggggatcagcaacatgttaatgacagcattgcgctggtcagtgcgcagcgcgacatgatgtcggcgcagctcacggcgctgggtttccgcgttgcgccatcctgcgccaacttcctgttttttgactgcgggcagcctgcggcagaactggcgcagcgtctgctgtgcgatggcgtcattatcaagccatggcgggagaaggggtatgaacactggatccgggtgtctgtggggaatgaacaggataaccagcagtttattcggagcctgaaacgtatcctggcggaggatgccgcgtga

SEQ ID NO: 37168 - DNA, 1158 bp, Escherichia coli
gtgacagtgttgaacattgatgatttacgtcggcaggcaaagcgcacgcttccccgttttgctttcagttatctggagggtggggccgatgatgaacaaacgttacaggataatcgccgtgttttcggccgctggcgctttattccccctgtgctgacagatgctacgcaacgggatttatccgtcacgctgtgtggacagaagctggctgcgcccttgtttatcgccccgacaggctacaacggcatgctgcggtttggcgcagatgtgatgctggcgcgggccgccagagaggcgggcatcggctatatacagagtacggtttcgacggcctccattgaagagatcgccgcagaaaacattccccgacactggttccagctctatgtgctgaaagaccgcgccgtcacgacagggttactgacccgggcccgggcggcgggttgtacgaccctggtggtttctgtggatgcggtgcactttggcaaccgtgaaaaggacaaacggaattaccgacggcccatggaactatctctgccgagcatgctggacattgcgatgcatcccggctgggtgtggcgagccatcaggcccgcaggcatccctggctttggcaacctgaaatcttatgttccggctgacaaacaacgaggcgcaggtggcgcgagctattttgccgaacagatggatacccacctggactgggccacactgcactggatccgcacacagtggtcaggtcccctgttaattaaaggtatcctggcgcctgaagatgcccggcgcgcttttgccgcgggcgtggatggcattgtgttatcaaaccatggcgggcgacaactggacggttcagtcagccccatggaagtactgcaggagattcgtcagtgctgcggtcctgatgctgtcatccttatcgacagtggatttcgccgtggcaccgatgtggtgaaagcactggcgctgggcgcgaatggcgtgctgattggccgacctgtgctctatggcgtcgctgcctttggtgaggcgggtgcgaaacaagcgctgaacattattttgcaggagatggatcgcacgctggcgcaactgggatgcacttccattgcccagttagggccgcatttgctgcgttttcagcctgctatggcggggttttaa

SEQ ID NO: 37169 - DNA, 1086 bp, Escherichia coli
atgcaggcacaaaatattatcttcccggcgcagatcctgcgtggcgcaggtgcggtttcgcgtatcggtgaggtctgcggattattgggttcacgggcgctgattatcggcggccatagtggcctggcggcggtggaagcgcatatccgctatcaactggcggcatcatcggtgacggtggttggccgggagtggtttggcggcgtgtgcagcgaaagccatattcatcgtctggcgcaagtggtgcaggccaccggcgcagacctggtcattggcgtgggtgggggaaaagccctggataccagtaaagccgtgggcgtggagacccgtgtcccggtggtcaccgtgccaaccattgcggcaacctgcgcggcggtgacgccactcactgtccgttatcacgatgacggccattttcgggatctctttccactgaatcaggcgcctgctgtggtgattattgacacagaaatcatagccgccgcgccgctgcgctggttggcggcaggccttggcgatacactggcgaaatggtacgagtttcgcgctatcagcgccgggctggacaatcacagcggtatcgcccgggcgtccattgccaacagccgtatctgctatgacctgatcaatacccacggccccgccgcctgcgatgcagttcgcaaaggggtgcccgatgctgcgctggagcaagtactggatgcgatatttatgtttgccggactgacctcattaatgagcagtggggcacatgctgctgccgctcatgcaatttatgaggggtttaccgtatgcgataaaacccgcgaatttggtcatggcttattggtgggatttggcaacctttgcctgctggcgctggagaaccgcagcgatgaggaattgctggaggccattggcctggcccgcgcgtgcgctatcccgctcagcctgcgggaaattgctgaactggacagcacggaactggcggggattattgatatggcattgcatgcgccggatatggcgaacatgccggctccggtcacagcgggcgcactgtatagcgccattgcgcgtgtggaacatcaggccgggttgttgtag

SEQ ID NO: 37170 - DNA, 300 bp, Escherichia coli
atggacgctcaggactatgggaaacaggtcaacttcgcggacggcccggactatgggaaacaggtcaacttcacggacggcccggactatgggaaacaggtcaacttcacggatggccgggagtgtgggaaacaagtcaactccgcggacggcccggactgtgggaaacaggtcaactttgcagacggcccggactgtgggaaacaggtcaactttgcagacgtccgggactgtgggaaacaggtcaactttgcagacgtccgggactgtgggaaacaggtcaactccgcggacggctag

SEQ ID NO: 37171 - DNA, 756 bp, Escherichia coli; identical to SEQ ID NO: 36288

SEQ ID NO: 37172 - DNA, 714 bp, Escherichia coli
atgggggaggcgatgctctatcagttgcatagtctgctggctgctacagcgctcggtttttgccgattggcaccaactttctatttgttaccatttttcgccagtgggaatataccaacagtagtccgtcatccaataataatagtggtatcatgtgcattagttcagcattaccactatgaattatctaccctaaatgaaatagatatcgctttgtttgctgccagagaaattatcatagggttgtttattgcttgcttattagcatccccattttggattttccttgctataggtagctttatcgataaccaacgtggtgcaacgttaagtagtactttggatccggctacaggtgtcgatacatcggaattagcaagattatttaaccttttctctgcagcagtttatcttactaacggtggattgaactttattctggagactctatggcaaagttataacttatggccttcaggaaattttaattttcctaaattagagcctttattctcatatattaataatataatgactcatactatcgtttacgcaagccccgtgattgcggttatgctgggcggtgaagctgtcctgggattgctggcacgttatgcttcacaactaaatgcttttgccatctcactgactgtcaaaagtgcgctggcatttttaatattaattatttattttggcccaatactggctgaatga

SEQ ID NO: 37173 - DNA, 318 bp, Escherichia coli
atgactaaagcaaaagagaaaatagataatagaatggcttaccatcttcaacagcttgcacaactaagagcaaagaaaaaagaagaagatagcaaagaaaaagtagctgaaagaaaaaaaagagcgagtaaaaatattttgcttggttcttctatctgtaaagttttaaatattgattacactgaaatagatgaatatttgccgtctatcattggatatttagatttaaaaaaacagaacttaaaaaatagtgtgtatggcgatagaggtaatgaacttttagagagctggaaaaatgccggcgacagaaacgagtaa

SEQ ID NO: 37174 - DNA, 969 bp, Escherichia coli; identical to SEQ ID NO: 8348

SEQ ID NO: 37175 - DNA, 438 bp, Escherichia coli
gtggatgttgcttcattcacagttcaaccgctgcagaaaaaagagcattcaaaaaataatgatttttcagttaaaaaatcttggtggcgttctactgttaattttataaaaaatattaaagctaagttctcaactaaaaaagacattaaaaacgatatccatgcatcagacgatttaatgactgatccggtgactggtttaccgattaccaagcaaaaatggcaagagatgagtgacagggcaaaagtgaggactccacaggctgcgatctcataccaagttaagcaatcacacgctgacagtgagaaaacgcctcagaatgcgttacaggacgttttagacgtatcagagggtaaaacgttaaaggtgaagtctgtgcatgttccgggttctcgtaggcgtcgagtgatagaccaagacagcagtgacaagggttag

SEQ ID NO: 37176 - DNA, 438 bp, Escherichia coli
atgaataaagaattaggatatccttccaaatatctatttaaaaaattgatagatacctcagaaagcatttgtagcccatcatgcgatgagagaagcgctgataaaaaaacaaaaataaagaatcgcataatcaaatgcgtattatgtccaataatactatgggattttataacacaaaaactatgttattctcaatctctaccatttcatttagctaatacaacatggttaatgatcaaagaaggttatgagaaaaagttcataacaaatcgccaattattacaagataaaaacggacttgatgatgatctcttcagattggcatatcattatgtttatgagttttcaaaacaacatcaaacaaaaattcaaaactatgttgcattatatggtttttgcagaaacatatgtttaatcctgtctcttatacacatctga

SEQ ID NO: 37177 - DNA, 165 bp, Escherichia coli; identical to SEQ ID NO: 14507

SEQ ID NO: 37178 - DNA, 327 bp, Escherichia coli; identical to SEQ ID NO: 14494

SEQ ID NO: 37179 - DNA, 243 bp, Escherichia coli; identical to SEQ ID NO: 14493

SEQ ID NO: 37180 - DNA, 312 bp, Escherichia coli; identical to SEQ ID NO: 14490

SEQ ID NO: 37181 - DNA, 222 bp, Escherichia coli; identical to SEQ ID NO: 14489

SEQ ID NO: 37182 - DNA, 228 bp, Escherichia coli; identical to SEQ ID NO: 14488

SEQ ID NO: 37183 - DNA, 1122 bp, Escherichia coli; identical to SEQ ID NO: 14487

SEQ ID NO: 37184 - DNA, 273 bp, Escherichia coli
atgaagatggatgaactatacagaagtgcaccttatggtagcgctggtcttgctgcgttctttgccagcctgtcattgcaggattggagcttcattatcggtgtcgcgttcagcattatcctcggtgtgcttacataccggctcaataaacgcgagcagatgaagcgcacgaagatattgcaggacatattggataaaactaataccaataatctttctgctacagcgatggttattggagagctggggaagagagcaccgaaggaaatatga

SEQ ID NO: 37185 - DNA, 498 bp, Escherichia coli
atgcagtcatcattacgcaaagctgtcacagctgctattggtggcggggctattgccatagcgtctatgctcatcactggcccaagtggtaacgatggtctggaaggtgtcagttacataccatacaaagatattgttggcgtatggactgtatgttacggacacactggaaaagacatcatgctaggtaaaacgtataccgaagcagaatgcaaagctctcctgaataaagaccttgccactgtcgccagacaaattaacccgtacatcaaagtcgatataccggaaacaacgcgcggcgctctttactcgttcgtttacaacgtgggcgctggtaatttcagaacatcgacgcttcttcgcaaaataaaccagggcgatatcaaaggcgcatgtgatcagctacgtcgctggatatctgctggcggtaagcaatggaaaggcctgatgactcgtcgtgagattgagcgtgaagtctgtttgtgggggcagcaatga

SEQ ID NO: 37186 - DNA, 312 bp, Escherichia coli
atgaaaatttatattgccgggccaatgacgggatatgagaactttaatcgtgacgcctttaataaagaggcagatcgtttgtcacgacatggtcactctgtcttgaatccagccactttgcctaatggtttgacacaacgtgaatacatggatatttgctttgcaatgcttcgttgtgctgatgctattttgatgcttcctggctggaaagcgtctgctggagcaactgctgagtatcattacgcatacaagatggagatgccggtattcactacgctgaattacccgccagcttgttcctctgtagcataa

SEQ ID NO: 37187 - DNA, 861 bp, Escherichia coli
atgaaagagttgcaaaaaattaattcaataatggaaaggttaagtgctcttgagcgtaagctggacgattgtggaaagctgtgtgttgaaaagcaaaatgagctttaccgggaattttttacaatcgtaagtgagctgatgccaattgttaataactgcctgattacatccagattttttaatgtcgatgctactacatccagaaaattttctgtgaaaatgcaaggaagagtttctggtagtgtgacaagagagatggctgaacagttggtggcaatgagcaataaaacaaaaagaaaaaaggcattgcttgtaacagcaaatcagctttccgggcgcgttgactttcaggtcagacagggtgggcgtgtactggtaaatgatgcgttcgttggacgtagctttagtccttactcgatgaaatatgatgttgatgcagatgatcaggatatcagcatttcctggaaatctgagacagcagggattgtattaacagcagagttgttgagtgatgataaaaatgatgtccagcatcatttggacgaaaagaatcatatttctgaaatttgtatgaagccacgcagcggaatgactttattgtcacgcactcttgctgctggcttttctgcaccggaaaaacgtgtgcttctggtagtgcctgaagatgcagatattcgaccactgaatggctgtgatgttattagtgcaaaaacattgcatacccgcgtcattcctgtaccggatgtggtcattattgatgatgttgagaaatgcaagtctgtttcctcaactgccacaatcaaacgaattttacgttgtagctcgtcggctgttgtattccggaagcagttacataactaa

SEQ ID NO: 37188 - DNA, 450 bp, Escherichia coli
atgcaagaagaagcaaataaaattcttgttgatttattgaagaaggccagcgatggaattgattccgccattgcattcagtcaggctcagattccggatgttgttcatcagttgctggtatggaatatggttgatagcctgattaaaacattaatagccatttcaacaatcccgctggttatttggtttatgaagaaacagtaccaaaaagttgaaattggtaagttcgataatgaaggatggtcatgggaaaaagggaagcctaaatacaaaccgactatgatttgggaaagtaacggtgagattagttttcttatcttaccattagcagcagtttttgttctgtgggtaagttttattattgctgtagtaaccaatatgacatggttaaaaatctggttggcacctaagttatatctaatcgaatacgcagcatcactaattaaatag

SEQ ID NO: 37189 - DNA, 414 bp, Escherichia coli
atgaagcaggataaaagacgcggtctgacccggatcgcattagcgctggcactggcaggttattgtgtggcacctgtggcgctggctgaagacagcgcctgggtcgacagcggtgaaaccaatattttccaggggaccattccgtggctctattcggaagggggaagtgctacgacagatgccgaccgtgtaacgttgacttctgatctaaaaggcgctcgcccgcaaggcagtgaaacggacaagcgtctttactcgggtgataaattaaccgtaagttgggaaattggtgataccgaaggcgacgtggatcttggtggattgggcgataacgcgaaaactatcgatactatccgctggatgagctacaaggatgcgcagggggggatccaaaagagctggcaacgaaggtga

SEQ ID NO: 37190 - DNA, 1167 bp, Escherichia coli
atgtctttgaaaaagttattgcaagattgtgttacgagaggtcaagaaatgacccaagcaattgctatcgctcaattcggtgatgatagtcctgaagctcggcgtatcacccgccgatggggtataactgaagtagcagatttaattggtgtaactcctcaagcaattagagatgctgagaagagcgggcgtttacctgcacctgactttgaaatgagaggaagaattgaacgtcgtgctggttataccatagatcaaatcaacagtatgcgagcagtttttggcaacccaaaccaacgaccacaagataaaaaccctgttgtgcttgccgttatgtcacacaaaggcggcgtttataaaacatcgtctgcggtacatcaagctcaatggttagcattacaaggtcatcgtgttcttttggttgaaggtaacgatcctcaaggcacggcctctatgtatcacggttatgttcctgatttacatatccatgccgaggatactttactgccattttacttaggagaacgcgataacgctgaatatgctataaagccaacatgttggcctgggctagacattatccctagctgcctagctttacatcgtatagaaacagatctcatgcaatatcatgctcagggtaaattgcctcatcctccacaccttatgctgcgcgcagctattgaatccgtttgggataactacgatgttatcgttatagatagtgctccgaacctcggtacaggaaccattaacgttgtttgtgccgctgacgttattgttgttgctacacctgcagaattatttgattacgcttctgttctacagtttttcacaatgcttctcgatctattggaaagcgttgacctaggtggatttgagccaaccgttcgcttacttctgactaaatatagtctcactacagggaatcaatcacgatggatggaagaacaaataagaaatacatggggatcaatggtattacgtcaggttgtacgcgttaccgatgaagtaggtaaaggccagataaaaatgagaacagtatttgaacaagcagcaaaccaacgttcaacattgaatgcatggagaaatgctgtttctatatgggaccctgtttgccgagaaatttttgatgatctaataaaacctcgctgggagaacgaataa

SEQ ID NO: 37191 - DNA, 966 bp, Escherichia coli; identical to SEQ ID NO: 27174

SEQ ID NO: 37192 - DNA, 600 bp, Escherichia coli
atgcgtaaattatgtgcagccattttgtccgcagccatctgtctgtccgtatccggtgcgcctgcatgggcgtctgaacatcagtccacactgagcgcggggtatcttcatgcccgtacgaacgctcccggcagcgataatctgaacgggattaacgtgaaataccgttatgagtttacggacgcgctggggctgattacgtccttcagttatgccaatgctgaggatgagcaaaaaacgcactacagcgatacccgctggcatgaagattccgtgcgtaaccgctggttcagcgtgatggcggggccgtctgtacgcgtgaatgaatggttcagcgcgtatgcgatggtgggtgtggcttacagccgtgtgtcgactttctccggggattatctccgcgtaactgacaacaaggggaaaacgcacgatgtgctgaccggaagtgatgacggtcgccacagcaacacgtctctggcgtggggggctggcgtgcagtttaacccgaccgaatccgtggccattgatattgcttatgaaggctccggtagtggtgactggcgcactgacggtttcatcgtgggtgtcggttataagttctga

SEQ ID NO: 37193 - DNA, 465 bp, Escherichia coli
atgctccacgtactcggccccttccggcgtgaaggcggcatcgagcgggatttccttgcagcacacgcagcaactggtgctcggttcattggcgttcatggtggtgttcctccattggttgacgaagccgacgaaggccgccgccggcatcggcctggcgaacaggaaaccctgcaccgtgtcgcaacccgcctgccgcaaccacgcaaggcagtcgggtgtttccacaccctcggctaccacctccattgtcgttttcagaagacggctgcactgaacgtcagaagccgactgcactatagcagcggaggggttggatccatcaggcaacgacgggctgctgccggccatcagcggacgcagggaggactttccgcaaccggccgttcgatgcggcaccgatggccttcgcgcaggggtagtgaatccgccaggattgacttgcgctgccctacctctcactag

SEQ ID NO: 37194 - DNA, 6315 bp, Escherichia coli
atggacgttcagcaactgcattatgcgccacttctaaatcagcttcatcagcgtgcggtgaggtcggtggtaagtcagttggcattgcggagcaagtcgttgactcattatctggaatcacaatattttcagcctcccggtcaggaggggtcactgcttgcagacccggtattcgaaagtacattcggctggatgcctgcggatgaaacaatggaggatttgcgggacaagctgatctccagcccgctggttgatgcattgagcaaagcgccagtgccatttcgtcatcaacttactgcgtggcgaacgattctggaagacaaaaaatccttgttagtgagcagcggtacgggatccgggaaaacagaatgctttatggtaccggttctggaagatcttattcgtcagcaaaaatcgacccgccagtcactaacagggacacaagctattttcttgtatccgttaaatgcattaattaacagccaacaggagcggcttcgcgaatggacgcgcggatttaaggggaaaatacgcttcgcgctatataatggcgaaacccggcataccaaatacgaaattcaggaagatcagttgaaagtacctgaacaagctttgagtcgggaagccatttatgaagcaccaccttccatcatggtgacgaataccaccatgctggaatatatgctgattcgtcgtaaagatgccccaatcatcgaaaagtctcaggggatgttaaagtatatcgtcctggatgaagcccatagttatattggttctcaggctgctgagttagcgctgcttttacgtcgtgttatgcaggctttcaatgttggacccggcacagataaacctgtgcagattatcgcgacctctgccactattggtgaagactctcctgaaggtaataaggagcttgctaaatttgtcgctgatctcgcgggcgttacagaacgtgatgtcaaagtggttcgcggttatcgacaaataccgcgggtatcggagtcgctgattcgtcatgaataccccacatctttaacttctcttaaatccctgagccctcaggatctttaccaacagctttgtcattaccgtgtggcccagcaattgcgtcaggcgttaactcatcccggacggcaggcagtacgtttgagtgagttgctcaatgttgccagaagaacctggccagatattaatcaccgtgagctactgcaactcctcgatctaatggcaagatcgcgagaaggtgaactggcttttacgccattacgtatgcatgggtttatcagaacactggcgggtctatgggcatgttcaaacaaacaatgctcacataaagcacatgaattaaatcagagtgactggccatttggtcaggtatggtttgagcagcgccaatattgtgactgtggagcgccggtatttgaagttttacgttgctccgggtgtggttcagcttatttgtctgccaaagaggagatgcgcggtgatggaacgaactggttggtagcgcaaccagccgctgccgaagtggatgagtttgctcttgatgtagatgtttattctgaagatgaagacaacgacgaattagacaataactctcaatttgatcgtctgattgcgagcgatggtgaaaaatatatcatttcactggaagaaacgacggcggggaaaattgatagtgaagcgcaaaagcactatgaaataaacctgttaagaccggaatctcgaggtgagggacgcaataactcctttgcttgtgtttgctgtggtgacactcaacggaaaaataatcctttattccgtccgcttcggctcggcgcgcccttttttttaaatgaaattattcctactctgctggagttttctccattaccgcaaacaagagaagagcagttaggaccgtttaatggtcgacgcttgctcacctttacggattcgcgtcagggtaccgctcgcatttcagcccgcttacagcaggatgccgataaagcgacgttgcgagctctttgttaccaggagctggcaaatattacagagccttcagcaaaactcagcccggcacactgtgcactgttagagaaagttattagccagttttctgtcctccctttaaaaaattccatcgacgcgctgaaaaaagcgatggctgcgaatgaggagcttagcccgacggacattcaggcacttaaaattattgagccgatggtgagttccttaagcacggagcatgctgaagcgatgcaaatacttcaggctaactctggcaatcagcagaagaaaaccatgtcatggcaaacgctgtctgaacagctggttggcagtgtggaccttgccgatagaatgagaggcagttttaaagaattgtctgggcttgatcttactaaacaacagtttgcagatttttgtttatacagcgagtttggtcgccgccctaaaaatgcctggaccctcgaaagtctgggtctggtagccattcactatccattcattgataaagttacaacctgcccgcaggactggaagacattattacccgatcccgataagcaattagcggaatggcgtaatttattgaagattactcttgatttctttatccgtgaaaacagtgccgttttttacgaaaacgagcaataccctcgctggatgggggcacgtttcccggtaaaaatgctccaggggccagataaaaaaaacaaagggcagaaacgtgatcaactttggccacaaatacgcgatcgccattataaccgggtcattaagctattaatcgcagtctttccggcaatacaacctgagcaggctcactggaaatcgttagttaaccacttaatgattgaggtctgggatgcaattcgaccctgcttacgtcagtttgagtcgggttatcagctggatattaaacaacaagctgaattttacagtccaaagcaagtgtggcgttgcccctatactcgacgtgcgttagacgtcacgttgctgggatactctccgtatttgccgggtagcaaagaaattgcacctgaaaaagcagtgttgattgaaatgcctgagcttcctgtacgtcactggcgtttgtctggtggtggagaaatcgcccgagaagaacgtctggagtggctggaaagtaatgcgctgattcaacatgcccgcgaggaaggattatggtctactcgcagcgaccgactggccctgaaagatagctggtatcgtctggaggaacactctgcgcagagaacgcctgagcagaaccagtttaatgaaaaacaatttaagtcaggcaaagttaatgtgctgaactgttccacgaccatggagatgggggtggatattggtggtatgagtttggtggcaatgaacaacgttcctccagcgccggcaaattatttgcaacgtgcaggtcgcgcggggcgtcgtggagagagtgcatctgctgccattacgttatgtaaaaacacggcgcatggaatggaggtattcaaagaccccctctgggcgttcaacactactgccagtgcgccacgggttcgttttgggagcagtagtattgttcaacgacatgttaatgccctggttttaggtctgtttttacgagctgaagttcctgatgcgacaaaactgagttgcaaatggttctttgaaggtgatgagagccagtgtcttcgttttctccattggttaaatcaccaggccgatcagctggcggataaacttaaacgccttactcagggaaccgtactgatgtcattgacggcaacccagctcttgacccgcacacaagcaatgatgcagcaggttgatatccgctggagaagccaacttgcgatactgttggaaaatatcgaagcgttgaaggcggataacagcgcgtgggaagaaacaccagcaggtaaagccatcgcttatcagcttcgtgattatcgcggtgcatatctgttttctaaactcattagtgaagcgttcctgccggggcatggtttcccggttggcgtagtcaatttcaattatctgacggcagatgagctggaaaaacgtcgcgcaataaaagccactcaggctgaccctaatgaagggggagaaagcttttctcgtcgtattgaaaaattgcccagccgtgatttgcctacagcattacgcgagtatgcgcctggtgcagatgtggtattgggcggaaaagtatatcgttcctcgggcattatgcttggcaaggtgcttgccagcgggcaggagctgtcaggcgatcatcatattccgtggttctggcattgccgtaaatgtggtgcgggggcaaccagtactacccatcctgtcgaatgtagtcactgcaaagcggatatacagcaacttgatgtgaagcgttatttacagcctgttggttttgcgacagatattcgttatcaggcacataatgatgtatccatgcctgcacaacttccctggaaagatccacgtgttcttgtaccgtcttcggtgtgggtttctttacccgatgctgggctaggacgttaccgttttagccatagtggggaattgttccacttcagtgaaggggaatttgggcacggctacgcaatttgcctctcatgtggtcgggcagaatctcaaactcaaccccagcgtacccctgaaaatctaaagaacccagagagggaaaatacgcattacctgttgcgagggggcagtaacgatcgtcaggggagcaataaattgtgccacggtcatgtgcataaagatctgtggttgggatatagcagtcgtacagatatggttgagctgcaactcaatgatgataatggcctgttgatccgtgatgaggttgccgcgcgttcccttgcggtcgctttgcgtgaagggttagcgcataaattgggtatcgaaaatactgagctgggcgtgacgacgcagcaagcgcgcgatatcaatggctataccggatattccatcttcatttacgacaataatgcgggtggtgcaggttatgcagtgcaattgatcgaccattgggctgatgtctttaattacgccagaaaattgctcgattgcagttgcgataaattctgtcaccactgcttgctcagctacgacagtcagcattatgtcaacagattagatcgtcaccatgcattaaccctgcttaccaatgtacggttgcagcgacttaacctcgcgccagaatatcagtacttcggcgatggtagccgggttgaaactaaccctctgagtttacgtattgcgcaatgcctgaacagcgagatttatgactcctgctcgctggttcttgcggggccgcaggaacagtgggactttgcccaatggccattatttaaagagttgctccagtttgcctcctccggtgggaatgttgagttgctggtggccacgccgctggcaaacttaactgatagctccagacatcagctttccgcgttggcggcgatgccgggaggtcgcttacaagtgaaatccattgccactgcgcagctcatgcaaggaaaggggcgctggcttgcgcaggtgactcgcgaagggcaaagccaacagtgggccgcagacgacagcgctaccgttgcacctggtgaattatggggacaaagtgcgtcttcaccagtagtgacacttaaaggaacgtccggaaaaaccttctcgggtcagaccttaagtgcagaagatttactgcccgccttacccaccggggcggtgcgcatcaatctctgtgaacaactggacgggccgctggaaggttttggttcgcgtttctggtcgttagtcacgcaacagcacgctggctggaagcaggcatttacccgccacaaagagataacgcatgttgagtacagcgatcgttatcttaatagcccattcacggcgcgtttgttaggtgaaatcttaaccgagctggttgaacagggaatggcggaacgcgccagcctcactgtttgcgtcaaaaaattggattacaactctcgccaacacgacgctctctataacgcgtggcttaatgaggaagatcgtcagcaggttgtgaccactttacttgaagaaggatatctggggcctgcgtggccgggagcaattagctggttaacgggggataaccagagtacggagcatggacgagaactgacagtcaccttcagcgatggcagtcagcattatgtcctgctcgacatggggcttagctactggcgctgtattgaagataccttctttgattttgccctgcgagtaccgcagcaagttgaacggctggcaaacacgcgagcgcgagctgttgccccgggtaatgaccttaggagttatattatcgctggataa

SEQ ID NO: 37195 - DNA, 306 bp, Escherichia coli
atgccgctgatggccggttacatgatgggtcgtctgatgggcggcggtgcgggatttgcacagcagccgctgttctcctcgaaaaacccagccagcccggcttacggtaaatataccgacgcgacgggtaaaaactatggcgcagcccagccaggccgcaccatgaccgtaccgaagacagccatggcaccaaaaccggcgaccaccactaccgttacccgtggcggttttggtgaatctgttgccaaacaaagcactatgcagcgtagcgcaaccggtacctcttctcgttcaatgggtggctga

SEQ ID NO: 37196 - DNA, 1095 bp, Escherichia coli; identical to SEQ ID NO: 23540

SEQ ID NO: 37197 - DNA, 414 bp, Escherichia coli
atggaatctaaaaataaaaatggcgactatgtaattcctgactcagtaaagaattacgatggtgaacctctgtatatcttggtttctctttggtgtaaattgcaggagaaatggatttctcgcaatgatattgccgaagcattcggtataaacctgaggagagcatcatttattataacttatatatcgagaagaaaagaaaaaatttcatttcgtgtcagatatgttagttatggtaatttgcattataagcgccttgagattttcatttatgatgttaaccttgaggcggttccgatagaaagtcctggaacaaccggaccaaaaagaaaaacctaccgagttggtaatggtattgtgggacagtctaatatctggaacgaaatgatcatgaggcggaaaaaggagagttag

SEQ ID NO: 37198 - DNA, 372 bp, Escherichia coli
atgattatgaaggatggcatctatagcattatatttattagcaatgaagactcctgtggggaaggtatactgattaaaaatggaaatatgatcactggcggcgatattgcttctgtgtatcagggggtcctctctgaagatgaggacatcatacttcatgtccatcgatataattacgaaattccctcggtgctaaacattgaacaagattatcaattagttatccctaaaaaagtactgagtaatgataataatctcacattacattgccatgtaagaggaaatgaaaaattgtttgttgatgtttatgccaaatttatagaaccattagttattaaaaacacaggaatgccacaagtttatttaaaataa

SEQ ID NO: 37199 - DNA, 459 bp, Escherichia coli
atgaaaaaaataatactgagcatcattctcatttcaaattactgttatgcttccgattgttttgaaattacaggaaaagcatataacatagatccattaatattaaaagcaattgcatggaatgaatcaaaatgcaaaagcggaataaaaagcaaaacaaacaaaaacggaacgtatgatataggtataatgcaaattaattcatctcatttagatttattaagcaaatttaatatatctgaagatgatttattgaatgatgcctgtataaacatatctgttgctggttatatcttagcctctaacataaaatccagagggaatacatgggatgcagttggtgcgtataatgcaggttactttaatacaccaaatgcagtagaactcagaaggcaatacgcaatgaaaatatataaaacatataataaattaaagaataatgagcaaattatcgattaa

SEQ ID NO: 37200 - DNA, 1038 bp, Escherichia coli
atgagtgaaaaaacagaaaagcccacacccaaaaaactaagggatctaaaaaagaagggcgatgtaacaaaaagtgaagaggtaatggctgcagtgcagtcattaatcttattttcatttttttctttatatggcatgagtttttttgttgatatagttggattagttaatacgacaatagactcgctaaatagaccgtttttgtatgccattcgagaaatattaggtgcggtattaaatatatttttattatatattttgccaatttctttgattgtctttgttggaactgttacgactggtgtatcacaaataggattcatctttgcggttgaaaaaataaaaccatcggctcagaagattagtgtaaaaaataacctgaaaaatattttttctgtaaagagcatttttgagctacttaaatcagtatttaagttagtgataattgttctcattttttattttatggggcattcatatgcaaatgagtttgctaatttcacaggactgaacgcatatcaagctcttgtcgttgttgccttttttgtttttcttttatggaaaggcgtgctattcggatatctactcttttcagtatttgatttctggttccagaagcatgagggactgaagaaaatgaaaatgagtaaagatgaggtgaaacgagaagccaaggatactgatggtaaccctgaaattaaaggggagcgccgtcgccttcattccgagatacaaagtggaagtttggctaataacatcaaaaaatcaaccgttattgttaaaaacccgactcacattgcgatttgcctatactataaacttggggagactccattacctttagttattgaaacaggaaaagatgccaaagctctacagatcattaaactggctgaactctatgatattccagtgattgaagatattcctttagcaagaactctctataagaatatacataaaggacaatatataacagaagacttttttgaacctgtggcacaattgattcgtattgcgatagaccttgattattaa

SEQ ID NO: 37201 - DNA, 1086 bp, Escherichia coli
gtgtatgaagattctcaacccggtacgctgaatgattttctcggtgccatgtcggaggatgacgtccggccggaggcactgcgtcgttttgaactgatggtggaagaagcggcgcgtcacgctgaggaggcgaagaagaatgccggagaggcggagacgtccgcgaggaatgccggcatatcagccagtcaggcagaagagagcgcggcaaatgctgacacttcagcaggggatgcatcggagtcagcccggcaggcggcagaaagtgcagccgctgcaaagcagtcagaggatgcgtcctcgtcctcggcttctgcggccgctcaaaaagccagtgagtcatcacaaagtgcagcagaagctgaattgtcaagaaagacggcagaaagtgcagccggtaatgcagccagggatgcaacgaccgcaacagaaaaagcccgggagtcagcagaaagcgcacagtcagcggaacaaagcaggatagcggcggaagaggccgtaaaccgaatccccaccgtggtgggacctcccgggccaaagggggaacaggggcccgcgggtcctcaggggccgaagggtgataagggagagcgcggtgacaccggccctgtcggggcaaccggcgaacggggaccggcaggtgatgctggtccggcaggcccgcaggggccgaaaggtgacaggggagagcggggagagaccggtctgacgggaaatgcaggtccacagggtccaaagggagataccggtgcggcaggcccggcaggcccacagggaccgaaaggagaaacaggtgcggcaggcccggtgggggcaaccggacctcaggggccgaagggcgacccgggggagacgcaaatccggtttcgtctggggccgggaaacattattgagacaaacagccatggctggttcccggatacagatggcgcactcatcaccggactgacctttcttgaccccaaagatgccacacgggttcagggtttttttcagcatttgcaggtcaggtttggtgacgggccgtggcaggatgtcaaggggctggatgaagtgggcagtgatacaggcagaacaggagaatga

SEQ ID NO: 37202 - DNA, 735 bp, Escherichia coli
atgaagagtatagcaacactggttgtgtgtgcaatctccgggattgcctgtgtaaatttatctgcacatgcagcagaaggagagcatacaatttctctggggtatgcgcactttcagtttccgggactgaaggattttgtaaaggatgcgactgctcataacagggagactttcagtcatttcgtcaacagaaactacttttcttcattgggcgaatatacagatggtcgggtcagtggatatgaaggcaaggataaaaatccacagggcattaatatcaggtatcgctacgagataacggatgattttggcgttatcacctcttttacatggacgcgttctctcactaactcacagacatttattgatgtgcagtcagccgatcataccaggaagattaagaatccggcagcttctgccagaacggatatcagggcgaattactggagtctgttagcggggccttcatggcgggttaatcagtacatgagtttatatgcgatggcagggatgggcgttgctaaagttagcgctgacctgaaaattaaggacaatattaacagtagtggcggattttctgaaagcaacagcacgaaaaaaacctcccttgcgtgggctgcaggtgcacagtttaacctgaatgagagtgttacactggatgtggcttacgaaggttccggctctggcgactggcgcacgagtggcgttactgctggcattggcctgaaattctga

SEQ ID NO: 37203 - DNA, 828 bp, Escherichia coli; identical to SEQ ID NO: 29807

SEQ ID NO: 37204 - DNA, 294 bp, Escherichia coli
atgaaaaaaatgctactcgctactgcgctggccctgcttattacaggatgtgctcaacagacgtttactgttcaaaacaaacagacagcagtagcaccaaaggaaaccatcacccatcatttcttcgtttctggaattgggcagaagaaaactgtcgatgcagccaaaatttgtggcggcacagaaaatgttgttaaaacagaaacccagcaaacattcgtaaatggattgctcggttttattactttaggcatttatactccgctggaagcgcgggtgtattgctcacaataa

SEQ ID NO: 37205 - DNA, 369 bp, Escherichia coli
atggaaaacaaatgtattgaaagtgagcaaatcttttttgctaagatgaacaggtatagtttcaaactgtcagataagaaatggcaactggataaagaaaactgcgtataccctcataaagttgtagatagaatgcctacaaaaatgaaacttagctacttaaaaacattggcttactatgcgtctgaatatagttctttttatattcaaagtattaacaatctattttatgagtggtttggtgcgatgactatcgatactattgatgacaaagcaatatatcaattgaatgtttatttaggttcagaaagaaactacaaactaaacttaattaaggctttcatcattaaatggaaaaatctcaattag

SEQ ID NO: 37206 - DNA, 918 bp, Escherichia coli
atgctggagaaaataaaaatcattccaaaccaaacaggagatgcagttaaaagacgagatccaaataaaggacctttaactgaagcggaattcaataacatcattaacgccgttggaaaattttatcatgagaagaaaattcaatgctttttgtattgttatatccttttgctggcaataacaggaagaaggccattacaattaatatctctaaaagctaaagatctcattaaaaatgagagagggtgctttttgaatgtaccaaaagtaaaacaaagaaaatgtttcagaaaagaatttaacatggttatgatagagccgttcttatatgacagcttatcaatgctaattaatcaaaatcaggcgtttgttgaagataaattcagtgttgggattagtaactatagaggcgaattaccaatcttcatgaatttagataagattacggaaacaaaaaggattgaggattttttatatgatttaacaacagattttttccatatgaaaaattcagttatgtcaaaactattaaaacactttccgtcaaaattcgatgttaggtcagaaaggactaacagctatatagaacttaatgctagaagattcagatatacgttaggaagtcgactggctaatgaaggagcctcaattgaggtgattgctaaagcgttagatcataaatcagtaaactcttctataatatatataaaaaataatcctgacaacgtttatgacatcgataagagactaagtgcgttttttaaccccttatctaatatacttatgggcatagagattgaagaaaacaagaacttttttatcaagtttgtttcagatgcatttttcttattggaagatacgaaagaggatttgaaatgtttaacgtgtaaaaaattcaatccctggagagcattatga

SEQ ID NO: 37207 - DNA, 738 bp, Escherichia coli
atgctctatagcaatatattggcgcacgcccggcgatgtgcaccagcggagtcgtgcggcttcgtggtgagaacgccggaaggggaaagatattttccctgcgtgaatatctccggtgagccggaagattatttccggatgtcgccggaggactggctgcgggcagaaatgcagggggagattgtggcactggtccacagccaccccggtggtctgccctggctgagcgaggccgaccggcggctgcagataaaaagtgcactgtcctggtggctggtctgccggggggaaattcataaattccgctgtgtgccacatctgacaggacggcgctttgagcacggggtgacggactgttacacgctgttccgggatgcctaccatctggcgggaattgatatgccggattttgagcgtgaggatgactggtggcgcaacggtcagaacctttacctggacaatatggcggtcaccggcttttaccgggtgcccctgtcctctgcacaggcgggcgatatcctgctgtgctgctttggcgcatcggtggccaatcatgccgccatatactgcggcaacggtgaactgcttcaccatctgcctgaacaactgagtaaacgggagaggtattccgaaaaatggcaacgacgaacgcattcagcctggcgtcaccgccactggcacgtatctgccttcacggggatttacaacgatttggccgccgcctcagcctgtacgtga

SEQ ID NO: 37208 - DNA, 186 bp, Escherichia coli
gtgaacacggcagcggaagccatccgtgccctgtcgctgcagatgccgggattccgccgtcagatgaacgaaggctggtaccagacacgtattccgacagcttcacaaaaccggagtccggctccggtttttgttgtcatgtccggggaatatttgttagataaaaaagaggagataattcaatag

SEQ ID NO: 37209 - DNA, 1119 bp, Escherichia coli
atgactaaagtcgctcttattacaggtgtaactggacaagatggatcttatctagctgagtttttgcttgataaagggtatgaagttcatggtatcaaacgccgagcctcatcttttaatacagaacgcatagaccatatttatcaagatccacatggttctaacccaaattttcacttgcactatggagatctgactgattcatctaacctcactagaattctaaaggaggtacagccagatgaagtatataatttagctgctatgagtcacgtagcagtttcttttgagtctccagaatatacagccgatgtcgatgcaattggtacattacgtttactggaagcaattcgctttttaggattggaaaacaaaacgcgtttctatcaagcttcaacctcagaattatatggacttgttcaggaaatccctcaaaaagaatccacccctttttatcctcgttccccttatgcagttgcaaaactttacgcatattggatcacggtaaattatcgagagtcatatggtatttatgcatgtaatggtatattgttcaatcatgaatctccacgccgtggagaaacgtttgtaacaaggaaaattactcgaggacttgcaaatattgcacaaggcttggaatcatgtttgtatttagggaatatggattcgttacgagattggggacatgcaaaagattatgttagaatgcaatggttgatgttacaacaggagcaacccgaagattttgtgattgcaacaggagtccaatactcagtccgtcagtttgtcgaaatggcagcagcacaacttggtattaagatgagctttgttggtaaaggaatcgaagaaaaaggcattgtagattcggttgaaggacaggatgctccaggtgtgaaaccaggtgatgtcattgttgctgttgatcctcgttatttccgaccagctgaagttgatactttgcttggagatccgagcaaagctaatctcaaacttggttggagaccagaaattactcttgctgaaatgatttctgaaatggttgccaaagatcttgaagccgctaaaaaacattctcttttaaaatcgcatggtttttctgtaagcttagctctggaatga

SEQ ID NO: 37210 - DNA, 483 bp, Escherichia coli
ttgtcaacggtgttcttatggttcatcgcggatggggtaaagatactgatgcgtgatatccggcaggttcttgagtgctggggggcatgggcggcaaataaccatgaggatgtgacctggtcacccattgccgccggatttaagggactgatccccgaaaaagtaaaatcacgcccgcagtgctgtgacgatgatgcgatggtgatatgcgggtgtatagcccgcctttaccggaacaatcgcgatctgcatgacttgctggttgattattacgtgctgggggggacgttcatggcgctggcacggaaacatgggtgctctgacacctgtataggtaaacgccttcacaaagcggaggggattgttgaaggcatgctgatgatgctgggagtgaggcttgagatggatcggtatgttgagcgtgaattgccgggagggagaacctctgtattttatcagcgaaaaaatagtttacgatcgtaa

SEQ ID NO: 37211 - DNA, 426 bp, Escherichia coli
atgaaatattcgacatttcatgatattaaccttgatatgtgtgagataaagaattgcaattttaacaattcagagatgaatttcatttcgtgcgtcgggacaaattttagcggttctacatttaacaatgtaaaaacaacaacagcgcaactaattaagacaccaacaaagtggacgaataatactctaaaatattggttctccagttgtaataaacgtaatatcatcttcacttttaatacaatatctgatagaaatatgaaattaaaaggtatcaaggatatattactgtcgttggttgaccaaaaagtcaatatttatagtgtaaggcaagagcttctgaattttcttaataatgatttatataaaaatgatggagagattctctcttataaagaatcaataatgttgttttgtgctgaatag

SEQ ID NO: 37212 - DNA, 792 bp, Escherichia coli
atggcctgcgggagtgtatgtgctggtcagttcgtatgcgttattgccgaagctgcgcaccgtctcgcggtgcagcctgtcgcgcgtgaactccaccagcggcgtcccgcccagcttcatccccgcaagataaccgctgccgtaggtcagccactccacccgcggcaggctgtccggcgtgacgcggtttgccagaccctgttcgttgtatgcgtgctctgtctcatgctgccacagcagttcccccgtctccgggttatgcaccgtctggcgctccccggccaggcggcccttatcatcataaccgtaatgcaccgccacctgatggccttcgctcaggtggctgatttctgtcagccagccgtgctcgtcgtactgccactgctctgccggttcgccgttcaccgtgcggtgagtgaggcggtccgattcgtcgtagtgccagagggtgacaagcccctcatcttcactctgcgtgagttttccggtcaggtcatagtggtaacgttgcgtccgcccgtcaaagccgcgctgctgtaccagccggtcaagcgcatcgtaggtaaactcactccggctgccgttctcgttggtcagcgtggtgatgcgtccggcaaggtcgtattccatactgcgcgtcagcccgccctgcgtggtgctgaccgcctttccccacgcatcgtactgtgtctcgctccggttgccgtccggggtgataacggcagtcaggtcgcctgcggcgttgtactcataccgcgtttcatggccctgtgcgtctttcaccgagattaa

SEQ ID NO: 37213 - DNA, 1392 bp, Escherichia coli
atgataatgaataaaatcaaaaaaatacttaaattttgcactttaaaaaaatatgatacatcaagtgctttaggtagagaacaggaaaggtacaggattatatccttgtctgttatttcaagtttgattagtaaaatactctcactactttctcttatattaactgtaagtttaactttaccttatttaggacaagagagatttggtgtatggatgactattaccagtcttggtgctgctctgacatttttggacttaggtataggaaatgcattaacaaacaggatcgcacattcatttgcgtgtggcaaaaatttaaagatgagtcggcaaattagtggtgggctcactttgctggctggattatcgtttgtcataactgcaatatgctatattacttctggcatgattgattggcaactagtaataaaaggtataaacgagaatgtgtatgcagagttacaacactcaattaaagtctttgtaatcatatttggacttggaatttattcaaatggtgtgcaaaaagtttatatgggaatacaaaaagcctatataagtaatattgttaatgccatatttatattgttatctattattactctagtaatatcgtcgaaactacatgcgggactaccagttttaattgtcagcactcttggtattcaatacatatcgggaatctatttaacaattaatcttattataaagcgattaataaagtttacaaaagttaacatacatgctaaaagagaagctccatatttgatattaaacggttttttcttttttattttacagttaggcactctggcaacatggagtggtgataactttataatatctataacattgggtgttacttatgttgctgtttttagcattacacagagattatttcaaatatctacggtccctcttacgatttataacatcccgttatgggctgcttatgcagatgctcatgcacgcaatgatactcaatttataaaaaagacgctcagaacatcattgaaaatagtgggtatttcatcattcttattggccttcatattagtagtgttcggtagtgaagtcgttaatatttggacagaaggaaagattcaggtacctcgaacattcataatagcttatgctttatggtctgttattgatgctttttcgaatacatttgcaagctttttaaatggtttgaacatagttaaacaacaaatgcttgctgttgtaacattgatattgatcgcaattccagcaaaatacatcatagttagccattttgggttaactgttatgttgtactgcttcatttttatatatattgtaaattactttatatggtataaatgtagttttaaaaaacatatcgatagacagttaaatataagaggatga

SEQ ID NO: 37214 - DNA, 744 bp, Escherichia coli; identical to SEQ ID NO: 23980

SEQ ID NO: 37215 - DNA, 1938 bp, Escherichia coli
gtgactcttaaacgggcctgttccctgctgacggtgaaatccttcagtgaggatgaacgggtgatcaccgggattgcgtcaacgccttctccggatcgggatggtgacatcctggagccggagggcgcggagtttggcagtgcgatcccgtttctctggcagcatgaccattcccgcccggtggggcagtgtacggtacgccgggtcagcgaagggctggaaatcacggcaacactggtgaagcccgtaccggatatgccgtcgcaactggctgcccggctggatgaggtctgggcggccattaagaccgggctggtcagggggctgtccgtgggcttccgtccccatgaatacacctttctggacggaggcggactgcattttctgcgctgggaactgatggaggtgtctgccgtcaccgtgcccgcgaatgcggaatgcaccatccggaccattaaatcttacgaccgcccgttttctgccgcgtccggcaaccggaaaccggtggtgaaaatcgcatcttctgccggcgctgcggcacagtcaacaaccgtttttcataaggaaaagaccataatgaatattggcgaacagattaaaagttttgaaaacaagcgtgcagcgctggcagcctcccttgaggaggtcatgaccaaagccgcagaggaagggcgcacgctggatgtggaggaggaagagcattacgacaacaccgcagcggaaatccgtcaggtggatgcgcacctgaagcgcctgcgtgaactggaagccggtaaggccgccacggcgcagccggtgaaacaggccggtaacgggaatgtggccgcggtggcttctgcgccggtgatccgtgtggagcagaaactggataaggggattggcttcgcccgctttgccaaatcgctggctgcggctaaaggcgtccgatctgaagccctggaagtggcccgtcgtcagtatccggatgacagtcgtctgcatcatgtcctgaaatcggcagtgggcgcggggaccaccacggatccgcagtgggcaggcagcctgtctgaatatcaggaatacgcacaggactttattgattacctgcgtccgcagaccattatcgggcgatttggtcagggcgggatccctgcacttcgtcaggtgccattcaatatccgtgtgcacgcccaggtgtccggcggtgctgccggctgggtgggtgagggtaaggcaaaacccctgacgaagtttgattttgaatccatcaccttcagtcatgcgaaggtgtcggccattgcggtactgacggaagaattgatccgtttttccagtccggctgctgatgcactggtccgtaatgcgctggcggaagcggtggtggcgcgtctggatacagactttgtggacccgaaaaaagccgcagtggcagatgtctccccggcgtccatcacccatgatgtgaagggcacggcatcaaccggtaacccggatgcggatgccgaggctgcgtttggacagtttgtggcagcaaacctgcagcccaccggtgcggtctggctgatgtccagcaccaatgccctggcactgtccatgcgtaaaaatgcgctgggtcagaaggaatacccggacatgaccctgctgggtggctccttccaggggctgccggtgattgtctcccagtacgtgggtgaccagctggtgctggtgaatgccccggatatttatctggcggatgacggcggcgtggcagtggatatgtcccgcgaggcatcactggaaatgcagtctgagccgggcggcgacagtaccacgccgtccccggtggagctggtttccatgttccagacaggcagcgtggccatccgtgcggagcgctggatcaactggcgtcgtcgccgtactgcggcggtggcggtgatcaccggagtgaactacggcagtgcgtccggcggctga

SEQ ID NO: 37216 - DNA, 693 bp, Escherichia coli; identical to SEQ ID NO: 23889

SEQ ID NO: 37217 - DNA, 1512 bp, Escherichia coli
atgagccgtcttaaccatccgaaagcggacctgtcaaaggggcagtacggaaccgtggggcaggggctgcatatcgccaaaaaattgctgccgtttataccggcgaatgcgggcattctgctggttccgtgctgtcgtggtggttcagcgttcaccaccggagccgatggcacatacagtgacgcgagtggtgcctcggagaattcaacccgctggggtgtggacaagccgctgtataaggaccttatcggtcgaacaaaagcagcactgaagaagaatccgaaaaatgtgctgtttgccgtggtgtggatgcagggggaatttgattttggcggtacgccggcaaatcacgcagcacagtttggtgcgctggttgataaattccgtgcagacctggcggatatggcaggtcagtgcgtcggtggctctgctgacggtgttccctggatatgcggggacacgacgtatttctggaagcagaagaacgaatccacgtaccagacggtgtatggcagctataaaaacaaaacggaaaagaatatccatttcgtaccgttcatgacggatgagaatggggtgaatgtgccgacgaacaaaccggaagaagacccggacattccgggtatcggatattacggttcgaaatggcgtgacagctcagccacctggacgtcacaggacagggcgagccatttcagttcatgggctcgccgcgggattatttccgaccgtctggcaacggcgattttgcgccatgcgggaagagtggcgctaaacgcgggggcatcatcgacagtatcagaggtgcgcccgtcatcgccttccggtgcagaagccacaggcgtcacaacactgctctcttaccttgccagcgagtcagagggaagcctgaaagtacagggatggtcagccagtggcggcagggcagaagtggtcagcgatgcggagggaaccggaggtaaggcagtgaagctgaccaaggaagccggtaaaagcagctgggtgctggagtacgccgcgggcaacggtgcggctctgttacagaaaggggggcagattcgctgccgctttaaggtttcgggagcgctggctgcgaaccagtatgttatggcgttttactggccggtatcttcactgccacagggcgttgccctgaccggagacggggggaataacctgctggcagcgttctacatccagacagatgcaaaagacctgaatgtgatgtaccacaatgcgaaagtggcgacaaacaacctgaaactgggaacctttggcgcatttgataacgaatggcatacgctggccttccgctttgccgggaataacagccttcaggtgacgccggttattgatggtcaggatggcacaccgttcacgctgacgcagtcaccggtcagtgcctttgcggcggataaactgcatgtgacagacattaccagaggtgcgacttacccggtactgatagacagcattgcggtggaagtgaacagcacagacactgcggcatga

SEQ ID NO: 37218 - DNA, 147 bp, Escherichia coli; identical to SEQ ID NO: 23916

SEQ ID NO: 37219 - DNA, 318 bp, Escherichia coli
atgacgttcccggaactgtacgacgacagccatccggaagccctggctcgtaatacccagaaaattttccgttggctggataaagacacccctgatgctgttgaaaaaatgcaggctctgttaccggcgatcgaaaaggcaatgccgcctctgctggtggcccgtatgcgcagtcacagctctgaatattaccgtgagatcgtcgaacggagggatcggctggtgaaagatgtggatgattttgtcgcagcggcgatcgcctggggcaccctgactaacagtgggggtcagcctggtaatgctgttgtcgtgcattga

SEQ ID NO: 37220 - DNA, 600 bp, Escherichia coli; identical to SEQ ID NO: 24018

SEQ ID NO: 37221 - DNA, 330 bp, Escherichia coli
atgaaaacatttcgctggaaagtgaagccggatatggaggtgaactcgcagccatcggtgcgtgaagtgcgttttggtgacgggtattcgcagcgtatggcggcggggctgaatgctgacctgaaaacataccgtgtgacgctttccgtgacccgggaggaggcccgacatctggaggcattcctggcagagcacggaggctggaaggcatttttgtggaagccaccctatgcataccggcagataaaggtgacctgtgccgggtggtctgcgcgggtcgggatgttgcgcgttgagttcagcgcggagtttaagcaggtggtgaactga

SEQ ID NO: 37222 - DNA, 519 bp, Escherichia coli
atgtttgcatgcacattctttttcttgcatggtgccgggtgcctcccggtgaattcagtatcagcacctgaatccgcgattatcccatatacctggttgctgatcgcccctccgcacagggggattcaccatgcagaagtgtttttaataaacagcaaacaaaaaaatcaagcattatgcaggctgtttctttttatcaccggccacagcaataccacaatgccgcagaccagcaccccatccgccagcaccgacatgattctgctggtgaaatccaccatcaccaccagaaacagcaggagtgcagccacagccaggcgcagttttaccgtcacaggtgattctccagacgaagacccagaacaccggcaatctcttccagcaccttgcgctcttccggctcaatttcgccgtctgcctccgcaatggccaccgccacatccagcacatcttccgcttcacgcgtatcgtgtttcacatcctcaatctcgcgtaacgcggcacgacgaccaattttaa

SEQ ID NO: 37223 - DNA, 432 bp, Escherichia coli; identical to SEQ ID NO: 24030

SEQ ID NO: 37224 - DNA, 342 bp, Escherichia coli
atgtcaggcatcataatctcccgtccggaagtggacaccgggcatacggacgttatctgctccaccagtatccgacacgttgtgacggtacggaatgcagcactgcaacaaaccgaaacgcttatccggcaactggcagaaatctcagtcctgacagcagcagacattggcggcaaaaccgccctggaccgggcgatgaaacaggattttcactgcggctgctggctgatggagaaacctgaaaccgcaatgaaagccatcacccgcaacctcgactgcgaaatctggcgtgacctgatgcaacgctccgggatgctgagtctgatggatgcacagggctag

SEQ ID NO: 37225 - DNA, 168 bp, Escherichia coli; identical to SEQ ID NO: 29864

SEQ ID NO: 37226 - DNA, 648 bp, Escherichia coli
atgtgttttcccgatttctcctttgaaaaaatccaggtaaccttccgcatcatcgctcgcccgaccgacagcctccacgaatgccgatttgccaacagtattcacactgcggatataaaaataataatcatggcccggtttgatattgatactggcagctatccagtacagcgccgagccaagatagcgggctgcggtttcaacctgcctgatatccgcaatccgcttttccgagaaccagaactcaaactgtaccgtcgggtcataaacggcaagatgcggcgtggcggttatctgaaaatagcccggcgtcagctcaatccgcgacggtgctgccggtgcggcaatccggaaggtggtggtggcaggttcaccctgctggccatagctgtttatcgcccgcaccgtcagggtgtattccccgagcggcaggccgctgaaacggtgctccgtgtctgcggtgatggcggtggtcaccagtctggcatccgttcccttaccactggtcaggcgcagactgaagcgcacgcccttcaccacccgcggcgtgtcccatttagcctgcgccagatactggccgtcagctgcactcacctccaccgtcaggtgctgtactgccggtgggatgacgctgttcagggaacctga

SEQ ID NO: 37227 - DNA, 147 bp, Escherichia coli; identical to SEQ ID NO: 29828

SEQ ID NO: 37228 - DNA, 570 bp, Escherichia coli
atgaatatgatggccgtgccgtttcacggcaactctctttatgtagttaaccataatggcgaaccatacgttcccatgaaacctgtcgttgcggggatggggctggcctggcaatcacagttggctaagttaagacagcgttttgcgtcaactataacggaaatcgttatggttgctgaggatgggaaacaacgcaatatggtgtccatgccacttcgaaaacttgccggctggctacaaaccattaatcccaacaaagtaaaacccgaaatccgcgataaggtcatccggtatcaggaagagtgcgacgatgttctttacgagtactggacgaagggttttgtcgttaatccccgtaaaatgagcgtgatggaagaactcaaccaggcttgtgctgacatgaaacgggataaaaacattgccagtgtgtttgctaccgggctgaatgagtggaaacaggttaaagccgcgcatgtatcaaaaatccgtacgctggtaaatgaagcgaatatgctgattgattttgtcctggctgatacaggcaaagggaaaataacaaaggcggattga

SEQ ID NO: 37229 - DNA, 315 bp, Escherichia coli; identical to SEQ ID NO: 24011

SEQ ID NO: 37230 - DNA, 270 bp, Escherichia coli; identical to SEQ ID NO: 24012

SEQ ID NO: 37231 - DNA, 270 bp, Escherichia coli; identical to SEQ ID NO: 23881

SEQ ID NO: 37232 - DNA, 513 bp, Escherichia coli
atgcagatcccggcgtttcgtcagaagctgagcgacggctggtatctggtacggattgccgggcgtgatacaggtgaaaatgaattatctgcccgtcttaatgagccgctggcaaatggtgccgtgatccacatcgtgccgcgcctggcgggtgctaaaagtggcggtgtgtttcaggcagtgctgggtgcggcgctgattgcggtggcatggtggaaccctgtgggctggctgggggccgcggctgtatcgggtatgtatgcagcaggggccagtatgatcctgggtggtgtggcgcagatgctggcaccgaaagccagaactccccgtacacagacaacggataacggcaaacaaaacacctatttctcctcactggataacatggttgcccagggcaatgttctgcccgttctgtacggtgaaatgcgcgtgggatcacgtgtggtttctcaggagatcagcacggcagacgaaggggacggtggtcaggttgtggtgattggtcgctga

SEQ ID NO: 37233 - DNA, 345 bp, Escherichia coli
atgaagaaaaaatacgaactggttgttaaagggataaataattacccggataagattactgttactgtggcaccggaaattggtgggtatccgtcactgttgttgccagatgtggcgattagtcttgaccgtactgaaggtgccacgctggagttttacgaagctgaggcgaaaaagcaggcgaagcagtttttcatggatgttgctgccgggttatgtgaaggggatggtccgttgccggaaaagcgccccgtaattttagaggcgcaggatgtgttgataacctacagaggaaaactaccgggaataattacgggttctctgaagactccaccgctggcctga

SEQ ID NO: 37234 - DNA, 216 bp, Escherichia coli; identical to SEQ ID NO: 29884

SEQ ID NO: 37235 - DNA, 444 bp, Escherichia coli
atggctgtttgtctcaataatgctcgccggccccagacgaaaacggatttgtgtctcccccgggtcgcccttcggtccctgaggtccggttgcccccaccgggccagccgcacctgtttctcctttcggtccctgtgggcctgccgggcctgctgccccggtgtctccctttggaccctgtggacctgcatttcccgtcagaccggtctctccccgctctcccctgtcacctttcggcccctgcgggcctgccggaccagcatcacctgccggtccccgttcgccggttgcccctgccgggccggtgtcgccacgctctcctttatctcccttcggcccctgaggacccgcgggacccggttccccctttggcccgggaggtcccaccacggtggggattcggtttacggcttcttccgccgctatcctgctttgttccgctga

SEQ ID NO: 37236 - DNA, 342 bp, Escherichia coli
gtggctgagataaaaacgctgcatctggtcccgcgtgaagggatgcaggtgagtgagaagccgtcggtggtgagggtgcggtttggtgacggttatgaacagcgccgccccacagggctgaatcctcaactgaagacgtttcaggcggtgttccgggtgacggatgagtcaacccggcgctggctggatgaatttttatcctggcatggtggttaccgtgcctttttgtggcgaccgccgaaacataaccggacggtgagggttgtgtgccgggagtggagcgtcacggataacgcccggtacagtgatttcagttgcacgatagagcaggtggtgaactga

SEQ ID NO: 37237 - DNA, 213 bp, Escherichia coli; identical to SEQ ID NO: 29883

SEQ ID NO: 37238 - DNA, 309 bp, Escherichia coli; identical to SEQ ID NO: 24051

SEQ ID NO: 37239 - DNA, 234 bp, Escherichia coli
gtggcgattagtcttgaccgtactgaaggtgccacgctggagttttacgaagctgaggcgaaaaagcaggcgaagcagtttttcatggatgttgctgccgggttatgtgaaggggatggtccgttaccggaaaagcgtcccgtaattttagaggcgcaggatgtgttgataacctacagaggaaaactaccgggaataattacgggttctctgaagactccaccgctggcctga

SEQ ID NO: 37240 - DNA, 192 bp, Escherichia coli; identical to SEQ ID NO: 24041

SEQ ID NO: 37241 - DNA, 183 bp, Escherichia coli
atgaagcatcctcacgataatatccgggtaggcacgatcactttcgtctactccgttacaaagcgaggctgggtatttcccggcctttctgttatccgaaatccactgaaagcacagcggctggctgaagagataaataataaacgaggggctgtatgcacaaagcatctcctgttgaattaa

SEQ ID NO: 37242 - DNA, 1686 bp, Escherichia coli
gtggatgcaggaaacattgacggtaccatccatcgctgggcgacaaatgaggttatcgacaaggatcgcgaagactggaagcgtatctcagcatcaatgcgcaaacagcccgaagcacttggctatgaccgtcagactatttttggccttgttcgcgaacgtccgatcgatattcacaaagatcccgttgcactgaacaaatatatcagtgaatacctgacgacaaagggcgtgtttgaacatgaagaaacagaccagagctctactgatgctctccagccgtcagcagcacaaactgctccagtggagacggcagaatccgatactcaaaaaaatgaaatcctggtggaagctgaaccatctgtagagcgtgaaggaccattttatttcgtctttaccgataagggcggggaaaaatacggcagggcaaacaaactttctggtctggacaaggcgctggctgccggcggtaccgaaatctcaaaagaagaatattttgcccgaaaaaatggcacatacacgggcttaccgcaaaatgtggataccgctgaagattccgaacaatcagagccggtaaaagttaccgctgacgaagtaaacaaaattatgcaggcagccaatatcagccagcctgacgccgataaattgcttgctgcatcacgtggtgaatttgttgaagggattagcgacccgaatgatccgaaatgggtgaaagggatccagagtcgcgacgctgaggaccagaatcagcccaacgtgaaacaaaatgagccagaagcggaacaaaacagcccggatacgcaacaaaacgggccagaagaacaacaaccagaaccagcagtgcaacaggaactggaaaaagtttgcaccgcatgcggtcagaccggtggcggcaactgtcctgactgtggtgcggtgatggggaacgcaacctacctggaaacattcgatgaagagaatcaggctgaagctcagaaaaatgatccggaggaaatggaaggcactgaacatctgcacaaggagaacactggcagcgatcagtatcacgccagcgataataaaactggcgaaacagcaaatcccttaattaaagtgaacggtcatcatgaaatctcatccaccagcaggttgtggcaccatctgatgattgaccttgaaacaatgggaaaaaatcctgatgcgccaataaactctatagccggtaagttttttgatccggcaaccggagagatggggccagaattcagcaaaactatcgatctggaaaccgcaggtggggtcatcgatcgggacaccattaagtggtggctgaaacagtcacgcgaagcacaatcctccattctgaccgatgaaatcacgttggatgatgcactgctgcaattccgggaatttatcgacgaaaactccggtgaattttttgttcaggtctggggtaacggtgcaactttcgacaacgtgattttacgccgttcatatgaacggcaggggatcccctgcccgtggcgttacaccaatgatcgcgatgtaagaacgatggttgctctgggactggtgatggatttcgacgcaagaacgactattccattcgaaggtgaacgccataacgccctgcacgatgcacgttaccaggcgaaatacgtttcagccatctggcaaaaactgctcccgagtcaggctgatttttga

SEQ ID NO: 37243 - DNA, 1140 bp, Escherichia coli
atgtttccattaaatgatctgtcgttaaaaactcagtcggttcaattaaataaaatcacatcgaatactgagtctacgataaaacaacacgagttagtatctgatgatgcaatcataaatgaattatcaagtgagttagtcagttgtcttggaaatgataagtttacaccagttagtgaagacagcaacttactgaatatgctgtctgaatttaagttattgagagagcaatgtttcaggtggggtaattatactctattgtttgaaaattatggggcttatgataagacgggatctatcacgatagaaaaaagtcagggggaggggactttacccattcggcataaattagagtttatatcgaccaatattgcagagttgctggacaagttaaccaaaattacagatgccaggctttgcaaaggtttcagtgactgggctagttcagtcaaagaaggcgcatcgaatgacttgaaagaaaatgtggatagagcattggtgagaatgtttaaatgtgttaagcttcacagtaatgaacttaacttatcaagcctttctttgggttctgtgccgcctcttcctgagtggattgaaatgcttagccttgtttataatgaacttgattcaatacaggttcccgaatcatgcaaagaattagaactcgatttcaataaccttacagaatttccacaagtacctgatggaattaccctgatctccgtaaataataacctgatatcgcatattgactcatttccgccaaaggctaagaaaatttttatttgtcacaataagctatcggaaataccagcactaccagacaccgctaaggtttttgattgtggctataataagatacaagaaattcgatacttccccaaaaatctgaaagaagcgcgtattggatataataatattgaggttgttcctgcgatacctggcaatttaaaaatactttttatggaatgtaatcctattaaagaggcatttttaatgccatggacccttacagggattcgctatgaaatatcgcagcgaaaatatattgttatgaatcccgccgattatgataaatattccgatatggttaaaaagcatgtaatagatggtgaggaattcataattaaatattatatgtaa

SEQ ID NO: 37244 - DNA, 561 bp, Escherichia coli
atgattgaagagaatggaaatttttcttttgatgcaccaggaaaagaaagttttaaagcccgcttactaagcctgatcgggacgcggagtgtaagggcagcagcaaaggattggggggttcctgtatcaaccttaaataactacatacacaaaggcacagaaccctcttttaaaatggcttgccttatatcaaataaagagcatgtgagtttaaattggttagcttttggttctgatgaaaataccccaagcactccatgttgttcaactgtcgatgcaggtaatttagataatgcaaatcaaacaattacggcaattctgtcctctctcagcaccgatgagcaactagaattagcccgattgcttggcagaaagggggctgattttctaacgatcttattggatgataatattcaggaattacatgcacttagcggttttcgccgagagcttgctttaaggttaaaggatatgtcagattctgaagcaagagagatttatgaagaatgtgaagctaaggttaatcatttaaatgtaacccagaaaaaggctagtgcgtaa

SEQ ID NO: 37245 - DNA, 231 bp, Escherichia coli
atggcgagaaatgaagttaagcctgattggcatcctcaaagaatcttgggggaagtcagagccagagaaggaagtatgagggctctggcccgtaaagctggtgtaggtcagaacaacctgtacaacgcggtataccgtcatgttcccaagtatgaggggattattgcggaatgcctgggtgtgccacccgaggagatttggcccagccgctacattcgtaaggtcgcgtaa

SEQ ID NO: 37246 - DNA, 282 bp, Escherichia coli
gtgaaaaaaaatctcattgcatgggcgtggtcgagtggtcttattgagtttggttacgtcctgccggaaggtgcattgccgatagttgccggaaagcctgccacggtacggcatgtgattgaggttatggcgcgtcatggacgtgatgaacaggagcagttactggttccggggataccggaagcggtgacggaggaagaagcctttaatgccatgattcggttctgccgtgaggtcagacgccgggtcagttatccaaacagaacgaggaccagagggtga

SEQ ID NO: 37247 - DNA, 543 bp, Escherichia coli
atggcatatttttatttcaaattagaccgtgtgcagacaaataaatatttcaccaaatatcaacagactgttttaccgctacgcaacagtattcttcgggcattactgaaaaatacaggcgctgccggattgcgcttaaagccgtttgccatggacgtaatcagtgagttttatttttctggtgctctgcctgcgggctggcgtaagcgcgatgatgtggcttttatcggggacggaccgtgctttattgccagacctgatgagtcatgccctgaaggtccggcgattgccgcaatgattgaaaccgctgaacgtgagttaagaaagcgtcctgatttccttgtctggctctgtgaaaagctgggggtaatgagaatcccctccatgtttaacacggactcctggtggaccccgtcgctctcccgtgatgccctgtgcgtggtgtttaaagtaggcgcttatggcagggaaataaaagggtgtattcctgaagaatgccaggaaattaaacattctgaatatgtggcgctgacggaggaataa

SEQ ID NO: 37248 - DNA, 186 bp, Escherichia coli
atgataaggagacttgtttttttcgcaattatcgttcctgtgtggggggttggttttatatttgcggttacaggaaatctgtccatgatgccggatatatggttctttatcaggatgtcgctcttcctgtttattatgaatcttcttatcgacatatatatccgtattactggaaaacataaatga

SEQ ID NO: 37249 - DNA, 333 bp, Escherichia coli
atgagtattgaattaagatcgtcttatgaatatcgtaaaattctcatcgccggaggcatgaaaccggaagatgcagaaaaaatcgtttcttttatggataaagaatgtgacaaacgggatatgccagaaattattatggatgacatgattctggattcagccgtggcgttaagtccgttatggattgtgcattctcttgctgaaattgccaaaggcaccgataaacaggcagctgttgctgcccttcagacgcttaatgaaatgcgtatatctccacgcccgacattaatacatatgattctgtccagcatggaggataaagcaaatgaatag

SEQ ID NO: 37250 - DNA, 198 bp, Escherichia coli
atgaatagtctacccgctggatgggcgcggccactaatggccaggaagcatcatttttttaaaacaggcgaaaatatcagtatatgtggacggtggttatatctggctcataatcgcgagccggatacatttgaaagccctgatgactgtgccgaatgccgcagaagagtgaataaggagaaagataatggacaatag

SEQ ID NO: 37251 - DNA, 297 bp, Escherichia coli
atggacaatagttctctgttgttctggtgcttatatatcacatcctttttcggcgcatttgttattacccggtggttatgtcgaaaaatcatctgcttttttgataaaagacatccggttgaacgggcggctgatgcgctcattcagcaggccattgtgttatatagcggtgagtttttctgccggataacaaccagagatggctggcacataatgattattccaccaacacaccatgcccggtgggatgaggcagaaaaggctttccatgtccgtaaaaaggtaaatacggtatga

SEQ ID NO: 37252 - DNA, 1503 bp, Escherichia coli
atgattaattttgacgggatcggtaatgaccgccgtataccgctgattgaggttgagtttaataactccatggctgtcaccggcactccggcacagcgtcagtgtgtgctgctgtttggtcaggcgagaatgaaagagaatgccgtggacggtgccggtgttctggatgttccggtcaggatcacccgtgcgtctcaggcaacagaactctgggggcgcggctccatgattgccctgatggtggcggaatttatcgccatcaatcctgatgctgaactgtatgccattgctcaggggaacggcaccggacaggcaacggctgcggccatgaatctgaccggaacggtcacccgtgacgggattgtttatgcctgcgtgggggggcggcgttatacactcccggcaccaaaaggtaagaaaggcaaagaactgaccgacgagctggccgcgctgatcaatgccgatcctgacgcgcccttcacggcctcctctggtgcaggaagtggtgataatggcgcaggtctgaaagggtctctggggatcaccgcccgctttaccggtgaatgctccgttcatgatgtgcgcctgaactatcacgacggggaagcaaccccggaaggaatacaggtcgctatagcctatccgaaacaaaaagcggctaacccggatatcacccgaagcgtggcgggtatgggcgatcgccagtacaactatgtcgtcatgccctataaggatgatgcaaacctgaaaatcatcagtgatgagcttctgaaacgctggggaccggccaaaatgtctgacggcgtgctgtggctggcacataccggcacgtttggtgaggtgcaggcattcggggcaaaacgcaatgattttctggcgacctgcacatccattcccaaagcccctgaaccggattacctctgggcagcggcggtctgtgccacctgtgcaccctctctgggagcagatcctgcgcgtccgcttcagacgctggcgcttccgtcacgcatggccccggctccggccgatcgtctgacgcgtgaagagcgtaacagtctgctgtggggagggattgccacggtcagtgtggctgccggtgatgtggttcagatcgaacgtcaggtgaccatgtatcgccagaacgtgtacggcgaaagtgatcccagctatctggatgtggaaaccatctacaccctctcctggctgcgttattccctgcgtacttttatcacacaacgttttccgcgccataaactggctgatgacgggacgcccgttcgtgccggtcagaatatcgtgacgccggagatcatgaagcttcagttaatttcgctgggtgaagagtgggtggaactcgggctggtcgaaaatctggacacctttaaaaagaatctgcttgtggagcgtaatgcgtcagatcgaaaccgtcttgacgtgttatgcacgccggatctggttaaccagttccgcttcctggcagcacagatccgtttcattttgtga

SEQ ID NO: 37253 - DNA, 477 bp, Escherichia coli
atgaccacacgtaagaaaaaaacggcagtttccgaggcagccgtgatggaggcaatccgggaagcacttgagggggctgatccacgcactgccgggctgacagagcaactggcaaagggatatgtggatctgcttgatggtctgccgtttggtgagacccgtgaatatcgtgtcacgttccgggaactgacagcgaaagacagtattgacgcagaagcagaagccgagcgcgtggtggagacaaacaatggcccgatgctgatagcgtctccgtcgttacgcggtgttgcactgctgcgccgtcagattgccgcagtgggagacattgaaggtccgttgtcaccccgtcagattggacagttaagcgagcgcgatctctcccgcctgatggcagcggtcagcctgctggataccgcgcttgccggaaagctggcagctgaccgggggcgatcaggcgcagtgtcgggatcagattga

SEQ ID NO: 37254 - DNA, 2076 bp, Escherichia coli
atggcccgaaatctcagagcatctctgatagttgatttgctcggcaatatctcagccaaatcccgccagtggtcacaggagctgggggcattctcacgctccggccaggcggggctgggtggcctgggaaatgctgcccgccgtgccgggcaggaaacagatgtactcggaagcaggatgcagcgcacgctggccggggtgcggggcagtatccgccatgtcacttctgattttgaccgtcttcagggcagtattaccggcaccatcgggcggatcagcaatctttacggaatgctggccggtggtgctgctgtatatggctttaaccggggatttattcgcccggcagcggagatggaaacctatatgattcgcctgaactccctttacaaaggggatcgggcgaaaactgatgatgtccgcaggtgggcaatacagaatgcgaaggaaaccacctgggggctggctggcgtcatgcaggaatatacgtccagtctgggctttggtatgagtgacagggaggcccgaaattttgtcaccatgcttcaggatcagggtgccgtgggcggctggtcactgtccgatgcacagggggcatccctgcaactgaaacagatgtatgcaagaggcagtattcaggcggcggatgcaaatattcttgccacctacggcattaatgcctaccgcgtgctggctgatcgtctgggtgtggaccagaaagtggtcagaaaacttggtgaaaaagggctgcttgggccggacagtattcgcctgttatttcagacgctggcggaacaggccaggggagcacaaaaggacgcaatgaattcctggagtggcctgacggccatgatgggtgacgtctgggaccagtttgcccgggatgtgatggacagtgggccatttgaaaaactgaagggtaatctcaggggatttctttcatgggttgacagtgccaaatctgatggcagttaccattccctggcggaaagcacggcatcagccatgaaccagggctttgagtatgcccgtgatgcagtgactgggttttatcaggcgatcagaaaggtacgcgacacgcttcaggctctgcgggatgcgggctatggtgatgcgctggatcgcattggtcagggggcacagaccgccgcgaaatacctgctgtacatgtatctcgccacccgtgccctgaaaatggcgcgggctgtcggaacggggattatacgtccgggtgctgcattgctgggatacggattatcagcggcggccttcctgacctcacctttccggcgctctcctccggccggaacaccaccaggcacatctcagggacgagggcaacgttttataaactttcttaccggggtaaatccggcagccgttcagccagtacttgtaacaaactggcccacaggaggactgtccggcaccggcgcgaccgatacatcctcaggcggacgtcaggggcggggccgcaggaaacgcggaccggggcgcggaagaccggtcacgcctcccctgccaccgtccccagtgccaccgtctccctcttctggtggggcagggttctgggggcgcatgatggggcgcgccggtgggttactttcgtctgtcggtagccgcatggggctggggcgtttctccggctttttccgcagtgccggtggactggccggccggctgggtggaggtgccctgtgggctggcgcgatggcagccccggttctgctggatggcagcgccagtgccacagacaagggagaagcggtcggctctcttgcaggcagtattgccggtggtgcgctgggggcggcagccggacctgtggggattgccattggttctacggtgggcagctatctcggtaactatctggggggatggctgactgaagcctggcagaaattacggggcagtgatgatgaaagcagtggacaggcggtacaaaaagcctctgcccgtgtggagctggttgccccggaagggtggcaggctcgcagtattgatattgatgacacgtccggtcacggactggatgtgaatgtctggaacggagggaattatggcctctggtga

SEQ ID NO: 37255 - DNA, 1125 bp, Escherichia coli
gtgagcagcagggttgaactgtatctgggcggtgagattttttccggctggctgacggtgagtgttcgtcgctctcttgaacatctggcgggctcctttgaactgggggtaatgatgcccggtgtacgccttccgtcatccgtccgtgccggtcagtctctggaattgcgcattgacggtcagcctgtgatcactggctggctggatcaggtccggcagcgcatcagcgccacgcgttttcagatcacgctcagcggacgggataaaaccggtgacctggtggactgttcagccattcatccgggcagccagtggaggaaccgcacgctggagcacattgcttcagatttgtgtgctccgttcggggtcacggtgcgctggcaggtaaatgatgcaacggcagcccggcccttttccaccttcacactggaaaactcagaaaccgtggcagatgcgctgacacgggccgcgagacacagaggcgtcctggtaaccagtaatgccgccggtgaactggttttcactcaggccggcagtcagcgtggcgacacgctgacgctgggcgaaaatctgctggatttggatcacaacgtggatcaccgtctgcgccacagtgaataccgtgtacgggggcacgggcgtggtggtggtcatgccggggatgcactgacagccggaacgctggccgcacccgttggtacggtgacagacagtgccatccaccgttacagaccgaaaattgtgctggcggatcatgctgttgatgcagacggtgcacgccagagggctgtccgggaaatgcgccgggcggttgcccgctctgtgcgcctgacagccaccgtgcggcactggtttcgggagaacggccagttgtgggatatcaacctgctgacggctgtcacggctccccgcaccggagtggaagagcgtgatcttcttgtctgtcaggtggagttttcgctggatgcaaatcacggcgaaaccacccgtctgattctggcaccccgtgacggctttattgttccggcagagccgggaaacagcggaagcggaaatgcgggtgacgtggacgccttcgtgcgggcacagatgaaaaaacaggggattaaattcaatgatgaatga

SEQ ID NO: 37256 - DNA, 615 bp, Escherichia coli
atgatgaatgacgaagtcatcagccgccttctggcccccgtgatgcggggtgttcgtctgctgttcgggcgtggtgtactgaccggcacaacggacacgctgaaaatccagaatgtgcaaatcaccggtatggatggtgaaacctttgatgacgttgaacgcccccagcagtacgggcaaatcagcgtccccctgcctggtgcggaagtttttctggcctgtgctggcggacaacgggatcaggccgtggtgcttgtggtggaagaccgccgcagtcgcccgaccggacttaccgccggagataccggcgtgtatcaccatgaggggcaccgtatacgtctgacaaagaacggccggatcattgtgacctgtaagacgctggagatttacgccgatgaaggtgttcaggtggatacaccggaggctcactttaccggtaatgtcacagtggataagaacctgcatgtcaaaggcaatgtgtccattgacggcaccggaagatcacaggggacgttcacgatgtccgaagcggttattgccgggatcacctattcaggtcatgtgcatcacgataacggtgaaggcagcaaaacgggaggaccagagaatggctga

SEQ ID NO: 37257 - DNA, 438 bp, Escherichia coli
atggctgatattgctgtcgtctgggatcagggttgcggttccctgcaactgaacggcgcagatcttctgacggataacagcctgctgactgcggtcattatttcactgtttacggacaggcgggcgctggattccgatgaaatccctgacggcacccgtgaccgtcggggatggtggggagacagtttccgggagcgccccgttggctcccgtctctggctgttaagccgtgaaaagacgctgtcctccgtggtcagccgtgcacaggcctatgctgatgaagcgctggcgtggctgcataaaagcggtgctgccacatccgtggtatgtcatgccatgcgtgtggggcatgctcgcctttcgctttccgtgaaaatcaccctgccggacggaagcagacatccgatgattttttatgctgatatgaagggggaatga

SEQ ID NO: 37258 - DNA, 522 bp, Escherichia coli
atggagcttattaacgtaaaacgatattacccggaacacaaaccctatggtgaggatgttcagtatttccagagtgaggacggaagggatttttatgaatctatcccgcttttcacaaagaaatacaaactctgtatttcgcctgtaacgggtattatctgctctgttgctgaagatgtctctgctttatatccggcaggttttactgttgttgaagtggacgaactgccggaaggtgtgaatattgacggtaactggcagttttctgatggcctgatatcaaaggtgccggtaaactggaagacggttgctgaaaagcgccgctcatcgctgctccaggaagccaacgaaactgtggatgactggaaaacggaattaaaactggacatgattagcgatgaaaataaattacagctgacgcgctggatggcgtatatccgacagcttaaagaaatgcactttaatgatattgccagtgaggggcattaccaggcgattccctggccggaaaaaccggaataa

SEQ ID NO: 37259 - DNA, 465 bp, Escherichia coli
atgattcagggaggtgattatttacttaaagaaaacgaagagttaggtggtgaaaacgatcataaaatgatcattttattgactttttatacagtgaaggtaggatcacgcgtatatgtagtatgtttcaaatcaacaggatactacataaaagtgaaacccagcatagctggaactatgctgggtcaatctgtaaaaacttgcatcaatgctttacttcgagctcgtggcgtatcctatgatattccccggtctcctgtaaagcagagatgcataaaaaggagatctttatcatggatgaaagagcctgtttgccctgcctgtaagactcccttacagctcatctatcgccgttctcgatctcaaaatggcaagacatacaaacccaaaaatgcttcctgtttcaggatgctgatatgtcctgcctgttctcccaggagggaaaatacacaaaacgtgcattaa

SEQ ID NO: 37260 - DNA, 555 bp, Escherichia coli
atgacaaatacagcaaaaatactcaacttcggcagaggtaactttgccggacaggagcgtaatgtggcagatctcgatgatggttacgccagactatcaaatatgctgcttgaggcttattcgggcgcagatctgaccaagcgacagtttaaagtgctgcttgccattctgcgtaaaacctatgggtggaataaaccaatggacagaatcaccgattctcaacttagcgagattacaaagttacctgtcaaacggtgcaatgaagccaagttagaactcgtcagaatgaatattatcaagcagcaaggcggcatgtttggaccaaataaaaacatctcagaatggtgtatccctcaaaacgagggaaaatcccctaaaacgagggataaaacatccctcaaattgggggattgctatccctcaaattgggggattgctatccctcaaaacagggggacacaaaagacactattacaaaagaaaaaagaaaagattattcgtccgagaattctggcgaatcctctgaccagccagaaaacgatctttctgtggtga

SEQ ID NO: 37261 - DNA, 297 bp, Escherichia coli; identical to SEQ ID NO: 23762

SEQ ID NO: 37262 - DNA, 1065 bp, Escherichia coli
gtgccggaactgaacgacagtatcagcgcgacaccgaaagccagcatgaagaataaatcctggttcaggatgcaagctggggggccgggtgacgcggatatttatatttatgacgagattggtttctggggagttaccgcgaagcagtttgtcagcgaactgaatgcactgggtgatatcacccacattaatctccatatcaattcaccgggtggcgatgtctttgaaggcatcgccatttttaatgccctgaaaaatcagggggcgaccattaccgtgtatgtggatggcgttgccgcctcgatggcatctgtgattgcgatggccggtgatacggtcattatgccggaaaatgccttcatgatgatccataagccatggggattcagtggcggggatgctgaggatatgcgcagttatgccgatttgctggataaagtcgaatcggtactgttgccagcctatgcgcagaaaaccggaaaaaccaccgatgaaattgccgccatgctggcggatgaaacctggatgtccggtgccgaatgtctggcacacggatttgctgaccaggtgacacccgctgttgaggcaatggcatgtattcagtcaaaacgtacagaggaatttaaaaagatgccggaatccatccgaaacatgattactccgccacgcaacagtgccccgcgtgataccacagtgacaatccctgcaccggcggtaacagaaccatcaccggtaccggcagtgtctgatgaggcgaccattcgcgcccgcgttatggctgagcagaaagcccgcatgtcaggcattaacgatctgtttgccatgttcggcggtcgctatcagacgcttcaggcacagtgcgtggctgatcctgactgttcgctggaaatggcccgtgaacgtcagctgaatgaatgggcaaggagtcctcgccgaccaacaaaaatacaccggcccatatttatgccggaaacggcaattttgtgggggacgggatccgccaggcgatgctggcccgtgccggatttgaaaatgtcgagaaggataacgcctataacgggatga

SEQ ID NO: 37263 - DNA, 1890 bp, Escherichia coli
atgaaaacatggttttccattaaggctatggcagatgttgtacatgtgcgcatttatgacgagatcggcgggtacggtgtaaaggcatcggcacttactgacgagatcaacgcgtgcggtaatgtgtctgaaatccatcttcgcatccattcacctggtggcgacatctttgaagggctggctatctataacgccctgaaaaatcatccggcaaagaaaattgtacacattgaaggcatggcggcttctatggcctcgtttattgccatgtgtggcgatcacatcgttatgcctgaaaacgcgatgatgatgatacatgccccccgtggtgttactgccggagtgtcgggcgacgttcgccgctttgctgacctgatggacaagctgggcgacacgatggcggaaacctacgccggaagaacgggcaggagcaaacaggaaatcaccgccatgatggaggcggaaacctggatggatggcaatgagtgtaaggctaacggcttcgcagatgaggttatacccgcgattacagcaatggcccgaattgaatcaaaacgaatcggagatttttcaaatatgccggaaaaaattaaaagcatgatcagccagaaaactggcagtggcgaacaggaacgacttaacggaatccgtgaattgtttggcaccttcaacggaagatataacgacctggctataagttgtcttgcggattcagaatgtagcgttgagaatgcacgcgaacgccttttactcgctatgggtaaagaatcaacgccaacaaacaaaaccacccccgcaaatctttactacgcgtacacggataacggcaacataaccggcgatgcaatgcgccaggggcttaatgcgcgtcttggtcacgaacgggccgaacgcggtaatccttacgccatgatgagccttttcgatatggcacaggcatcattaacccatcgtggtataagcacgggcagctacggcacacgctcgcagatagtaaacgcggcattcacccacagcagcagcgattttaccgatattcttgctggtggcgctgaaaaatcagtgcttgcaggctgggagcacagcggcgaaacattccgccagtggacgaaaaaaggttccctttcaaacttccgggaagcccgccgcgttggtatgaatggcttctcaacgttaaacaaagtgccggaaggggcagaatataaatacatcaccaccagcgatcgcggtgaacccatcgcgctggctacttacgggaatattttcagcattacccgccaggcgataatcaatgatgaccttgatcagttatcaacggtgccaatggctatgggccgtgctgcatcaagaacggtgggaaatctggttaatctggtgcttacaggcaacgtaaaactttctgacggaatagcgctgtttgacaaaaaacacagcaacctgattgaagcaggactgacaacaccgggacttagtgcagcacgtcacctgatgcgcacacagaaggacaaaaatggcgaagtgctgaatattgcgcctaaattccttttagttccggcagcactggaagatcgcgcgttgcagatgattaactcaaccgcacctttcggggctgataaaaacagcgggatctttaacccgtatcacaagctacttgatatcatcgtcgatccccgccttgatgatatcagcgaaaaacaatggtacatgctttccgcacagggaacggacacaatcgaggtggcttatcttgatggcagtgacgagccttaccttgaacagcaggaaggttttatcgttgacggcgtggcctggaaagtccgtattgatgcaggtgtggcagctctggattatcgcggtatggtcaaatcaggcgggacagattcactatga

SEQ ID NO: 37264 - DNA, 195 bp, Escherichia coli
atgccagagaacaacaccagaaagccggataaaagtgccacggtacacatagacgccggaactatggagaagatcgaacgctatcagcagttcatcaaagataatcacccgggtatgccagtgcccacgaaaggacaaatcacacgcagcgcggttgaatactggtacagggcaacgttaggagcctggctatga

SEQ ID NO: 37265 - DNA, 1008 bp, Escherichia coli
gtgaatcaggtgaacgagagccatagccgcgcatccgatatctggcgcgaagtggcctcgctgtttcgcccacccagccggttaccagtagcggaagccatcaggcgttatatgcgggttccacggggagccaatacttccggtccgtgggagtcatcgctgacgccctatatgattgaccccattaatacattatcagcccgtgaatatgacgcggtggtgtttgtgggacctgcgcgaaccgggaaaaccgaagggctgattgatggctggattgtgtacggcatcatctgtgatccggcggatatgctggtggtgcagatgactgagacgaaggcgcgtgagcattccagaacgcgtctttccaggacgtttcgccacagtccggaggtcagcaagcgcctcagtccttcccgtaatgacaacaacgtccacgataaaatgtttcttgacggctccttcctgaagattggctggccgtcgatcaccgtcttttcctcttcggattaccgtcgtgtggcgctgacggattatgaccgtttccctgaaaatgtggacggggaaggggatgccttcacgctggcctcaaagcgtaccaccacctttatgtcctcggggatgaccctggtcgagagttcaccggggcgggatatcaccgataccaaatggcgttgtggtggcgcacatgaggcaccgccaacaacggggatcctgtcactgtataaccggggagaccgccgccggtggtactggccgtgtccgcactgcggggaatattttcagccggtgatggataacatgaccggataccggaataacccggattttgtggctgccggtcaggctgcccgtctgatgtgtccgcattgtcgcgggctgattgcccctgagcagaaacgcgaactgaataaccaggggatctggcttcgtgaaggtgaacgggcggcggcggacggcagtatcaccggaacgccacgaaactcccggattgcgtcattttggatgtag

SEQ ID NO: 37266 - DNA, 294 bp, Escherichia coli
atgcaggaatacggtgacgatacggcgcatcagcaaaacttagttcaggcactgagtgcggatatagtcctgtgccccttccagctgcttctgcattgtcatcaaccgttctctgaggatgaaataatcccgttcagcggtgtctgccagtcgggggccggttgcattatccacgccggaggtgccggtggcttcacgcacggtaccggagcaggtggcgttgatccgcaggcgcttacgaccagcggcaacatcagcacgcagagtttcattttcagctctcgcatcggctaa

SEQ ID NO: 37267 - DNA, 372 bp, Escherichia coli; identical to SEQ ID NO: 37198

SEQ ID NO: 37268 - DNA, 1083 bp, Escherichia coli; identical to SEQ ID NO: 23686

SEQ ID NO: 37269 - DNA, 522 bp, Escherichia coli
atggcaaagtcaaacgttagcgtgcaggcattcaaggacttccttgaagagcttatgtcgctgaacataatgaaggaggccaccgctcgaaatttaaaaaactcatccgctcgcctcttaacggtagtccaagaagaggaaatgggtgatgttactcagcttgatgtgaatgagcttgccgagcgatacatcaacgcaactgagccgaagcctagcgacagcagcattactgcatataaaagccgcatggaaagtgcaatcaaaaagtttgtagctttccagtctggtgaagaaatcccatacactccgattgacaaagaatccagtgaggaaaaagatttgactggcgaaccaacaaaagtcgaaggcaaggctaatgcacttcatacctatgatcttccagtagttcttcgacctgaatcaggggttacagtaacgattaaaggcattcctaacgatatcacaaacgaagaagccgaacgcatctcttcaattctgaaggtttacgttcggcctcaataa

SEQ ID NO: 37270 - DNA, 966 bp, Escherichia coli; identical to SEQ ID NO: 23801

SEQ ID NO: 37271 - DNA, 879 bp, Escherichia coli; identical to SEQ ID NO: 23939

SEQ ID NO: 37272 - DNA, 699 bp, Escherichia coli
atgcagaatattcatgaagaaagcctgaacgagtcggttaagtcagagcagtcaccgcgggtggtgctctgggaaatcgacctgacggtgcagggcggtgagcggtattttttctgtaatgagctgaatgaaaaaggggaggcggtcacctggcaggggcggcaatatcaggtatacccgattgacggcagtggctttgagatgaacgggaagggcagcagtgcccgcccgtcgctgacggtgtcgaatctgttcggtctggtcaccggaatggcggaggacctgcagagcctggtgggggccacggtggtccgccgccgggtgtatgcccgttttctggatgcggtgaattttgtggcgggcaatccggaagcggacccggagcaggagctgagagaccgctgggtggtggagcagatgtcagagctgacggccatgacagcctcgtttgtgctggcaacaccgacggagacggacggagcgctgtttcccggtcgcatcatgctggcgaacacctgtatgtgggattaccggggagatgaatgcggttatcacggtcctgcggtggcggatgagttcgacaaccccaccacggatatccgtaaggacagatgcagcaagtgcatgcgcgggtgtgagatgcgcggcatggtggctaattttggcggtttcctttccattaataaactttcgcagtaa

SEQ ID NO: 37273 - DNA, 663 bp, Escherichia coli
atgcagcaccaggtggcaccgcatcacgggcagttcaggaaattcgggcagcacgtgaacagtgggaacgtgaaaacggatttatcagcaacggaaacggcctggaagctgtgggaacttatgggggaggtgtattcgaaccgctggacccagaagaacggggctgcgccgtcgaagctctggattgctcagattggcgcgatgactgaacagcaaatccggcaggtctgccgtcagtgcatggaccgctgccgggcgggtgaaacgtggcctccggatctggctgagtttgtggcgttgatttcggagagcggggcaaatccatttggcctgacggtggatgccgtgatggaggagtaccgtcgctggaggaatgaatcctggcggtacgacgggagtgataaatacccgtggccacagccggtgctgtaccacatttgcctcgagatgcgttcaaaggggattgagcgccagatgaccgaaggggagttaaaacggcttgtggaaaggcagctgacgaaatgggcaaagcatgttggtaatggcctcagtgttccgccagtccggcgacaactggcagcacccaaacgcccgccagggccaacgccaattgaattgctgaaacaggaatatgagcgccggaaggcggccggttttgtctga

SEQ ID NO: 37274 - DNA, 696 bp, Escherichia coli; identical to SEQ ID NO: 23938

SEQ ID NO: 37275 - DNA, 735 bp, Escherichia coli
atgacaactcaaatttctgttgaaactctctccccgatcacccataaccagattcctgttattaccaccgaacttttggcgcagctttacggcactgagccggtgcgtattcgccagaatcatcatgagaacaaagtacgcttcgttgaagggaaacactttttcaaagttgttggtaatgaccttaaagaattgcgggtagctttaaactactcacaaaatttgcgggttactttaagtaactcacaaaatttgcaaccatctttaagagggttacaaatttccccgaaagcccgctccctcatactctggacagaacgaggcgcagcccgtcacgcaaaaatgctcgaaactgatcaggcgtgggatgtgttcgaaaaactggaagactgctatttcagccagtgcgagaaaaatactggcaaacaagagaagaagctcaacgggctttccgcaaaagaaacagacagccttgtatggctgtgggattatgccaaccgctcacaggcattgttccgtgagttgtatcccgcattaaaactgattcagtctggctattccggcatatgccacgactacggctatgagttctcgtatatcatcgggagggcgaggggcgttttaattaatcacacgcgggatatagatatttatgagcctgacgggccgacgaaccttctggcatgggaaaggcttaagaacaaagagttgccgccttcactgcatcgctactga

SEQ ID NO: 37276 - DNA, 180 bp, Escherichia coli; identical to SEQ ID NO: 23969

SEQ ID NO: 37277 - DNA, 546 bp, Escherichia coli
gtgaagctgaccaaggaagccggtaaaagcagctgggtgctggagtacgccgcgggcaacggtgcggctctgttacagaaaggggggcagattcgctgccgctttaaggtttcgggagtgctggctgcgaaccagtatgttatggcgttttactggccggtatcttcactgccacagggcgttgccctgaccggagacggggggaataacctgctggcagcgttctacatccagacagatgcaaaagacctgaatgtgatgtaccacaatgcgaaagtggcgacaaacaacctgaaactgggaacctttggcgcatttgataacgaatggcatacgctggccttccgctttgccgggaataacagccttcaggtgacgccggttattgatggtcaggatggcacaccgttcacgctgacgcagtcaccggtcagtgcatttgcggcggataaactgcatgtgacagacattaccaaaggtgcgacttacccggtgctgattgacagcattgcggtggaagtgaacaacacagacactgcggcatga

SEQ ID NO: 37278 - DNA, 279 bp, Escherichia coli; identical to SEQ ID NO: 29839

SEQ ID NO: 37279 - DNA, 270 bp, Escherichia coli
atgaatattttgagaaagcttatgcagcgtctgtgtggttgcggaaagcatgatgactgtgaacacgggcagtcgcttacagtacaactgcgactggggccggcagacatcctggagtcagatgagaatggcattattccggagcaggacagggtaatcacgcaggtggtgatactggatgcggataaaaagcagatacagtgcatggtaagaccgctgcaaatcctacgtgctgacgggaggtgggaaaatattggcgggatgaaatag

SEQ ID NO: 37280 - DNA, 576 bp, Escherichia coli; identical to SEQ ID NO: 23633

SEQ ID NO: 37281 - DNA, 429 bp, Escherichia coli
ttggtatttttggtaaaaaaagcccgcagagcggcaacggaaattaaaaagtttgaaaaacgcgatctggcacaggtggtgattaacgccgcatacctggtggcctgtgcagatggtgaatgtgaggcatccgagaaagcgaagatcgaacaggtactgcgtaatcagcctgcgctgtccgcgtttacgtcagaaattaatgcgattagcgcaaccattatcggtcagctggatacgaactttaaaactggtcgtcgtgcggcgttacgtgagatcgaggatgtgaaacacgatacgcgtgaagcggaagatgtgctggatgtggcggtggccattgcggaggcagacggcgaaattgagccggaagagcgcaaggtgctggaagagattgccggtgttctgggtcttcgtctggagaattacctgtga

SEQ ID NO: 37282 - DNA, 168 bp, Escherichia coli; identical to SEQ ID NO: 29864

SEQ ID NO: 37283 - DNA, 699 bp, Escherichia coli
atgcaggacattcatgaagaaagtctgaacgagtcggttaaatcagagcagtcaccgcgggtggtactctgggaaatcgacctgacggtgcagggtggtgagcggtattttttctgtaatgagctgaatgaaaaaggggaggcggtcacctggcaggggcggcaatatcaggcatacccgattgacggcagcggttttgagatgaacgggaagggcagcagtgcccgcccgtcactgacggtgtccaatctgtttggccttgtcaccgggatggcggaggacctgcagagtctggtgggggccacggtggtccgccgccgggtgtatgcccgttttctggatgcggtgaatttcgttgcgggcaatccggaggcggactcggagcaggagctgagtgaccgctgggtggtggagcagatgtcgcagctgacagccatgacggcctcgtttgtgctggctacaccgaccgagacggatggggcgctgtttcccggtcgcatcatgctggcgaatacctgtatgtggacctaccgctctgatgagtgtggttacacgggcggggctgtggcggatgagttcgacaaccccaccacggatatccgtaaggacagatgcagcaagtgcatgcgcgggtgtgagatgcgcggcatggcggttaattttggcggtttcctttccatcaataaactttcgcagtaa

SEQ ID NO: 37284 - DNA, 342 bp, Escherichia coli; identical to SEQ ID NO: 24027

SEQ ID NO: 37285 - DNA, 366 bp, Escherichia coli; identical to SEQ ID NO: 23997

SEQ ID NO: 37286 - DNA, 450 bp, Escherichia coli
atgatgcccctgcatggcggccagtcctgcggcatacaccggcggcagccccacaagcggatgaaaaaaacagttaaaacggtcgtggatcacctcccgggcaggcaccgtcaccgactctgtgatcccacagttccggtccggcgtgatgcggtagaacacctcgccgtcatccgccaccagaggttcaacccggttccagtccagaatacgcagttctttgatctgcccccggggggtgcggattttcagcaccaccgtattgccgtgacgcaatttggaattcagccacagttcaaaaaactggatgcgattctgctgcgcattaggacgacgacagagacgggcagtatctccctgccgcttttcccggcgtattccctgtacatcagtctgcatcaggcgaagccgcattttggcaatatcctgggatatcagcgaaatgcatga

SEQ ID NO: 37287 - DNA, 558 bp, Escherichia coli
atggcttaccgcctccttcaccatctgttcaagcatcggatgcacatcatccggagtgatacttttaccgtctgccggtaccggtattttcgcgaccgcatcattcaccgccttctgcagaacatccggatcgtagtcacgaccatcacgcggaacaggaatatggcttaccgcctccttcaccatctgttcaagcatcggatgcacatcatccggagtgatacttttaccgtctgccggtaccggtattttcgcgaccgcatcattcaccgccttctgcagaacatccggatcgtagtcacgaccgtcgcgcggaacaggaatatggctcactgcctctttcaccatctgctcaagcatcggacgcacatcatccggggtgatacttttgccgtctgccggtaccggaatattcgcaaccgcatcattcaccgccttctgcagaacatccggatcgtagtcacgaccgtcgcgcggaacaggaatatggctcactgcctctttcaccatctgctcaagcatcggacgcacatcatcacccgtcacgcacttctgtaa

SEQ ID NO: 37288 - DNA, 429 bp, Escherichia coli
ttggtatttttggtaaaaaaagcccgcagagcggcaacggaaattaaaaagtttgaaaaacgcgatctggcacaggtggtgattaacgccgcatacctggtggcctgtgcagatggtgaatgtgaggcatccgagaaagcgaagatcgaacaggtactgcgtaatcagcctgcgctgtacgcgtttacgtcagaaattaatgcgattagcgcaaccattatcggtcagctggatacgaactttaaaactggtcgtcgtgcggcgttacgtgagatcgaggatgtgaaacacgatacgcgtgaagcggaagatgtgctggatgtggcggtggccattgcggaggcagacggcgaaattgagccggaagagcgcaaggtgctggaagagattgccggtgttctgggtcttcgtctggagaattacctgtga

SEQ ID NO: 37289 - DNA, 519 bp, Escherichia coli
atgtttgcatgcacattctttttcttgcatggtgccgggtgcctcccggtgaattcagtatcagcacctgaatccgcgattatcccatatacctggttgctgattgccccaccgcacagggggattcaccatgcagaagtgtttttaataaacagcaaacaaaaaaatcaagcattatgcaggctgtttctttttatcaccggccacagcaataccataatgccgcagaccagcaccccatccgccagcaccgacatgattctgctggtgaaatccaccatcaccaccagaaacagcaggagtgcagccacagtcaggcgcagttttaccgtcacaggtaattctccagacgaagacccagaacaccggcaatctcttccagcaccttgcgctcttccggctcaatttcgccgtctgcctccgcaatggccaccgccacatccagcacatcttccgcttcacgcgtatcgtgtttcacatcctcgatctcacgtaacgccgcacgacgaccagttttaa

SEQ ID NO: 37290 - DNA, 357 bp, Escherichia coli
atgcgactgccacggccccgtgatttctctgccttcgcgggttttgaatggttcgcggcggcattcatccatccattcggtaacgcagatcggatgattacggtccttgcggtaaatccggcatgtacaggattcattgtcctgctcaaagtccatgccatcaaactgctggttttcattgatgatgcgggaccagccatcaacgcccaccaccggaacgatgccgttctgcttatcagggaaggcgtaaatttctttcgtccacggattaaggccgtactggttggcgacgatcaacaatgcgatgaactgcgcatcgctggcatgaaagcgcgatggggagacagggcggcatga

SEQ ID NO: 37291 - DNA, 639 bp, Escherichia coli
gtggtgctcagggaaattgacctgacggtgcagggcggtgagcggtattttttctgtaatgagctgaatgaaaaaggggaggcggtcacctggcaggggcggcaatatcaggtatacccgattgacggcagcggttttgagatgaacgggaagggcagcagtgccagaccgtcgctgacggtgtccaatctgtttggtctggtcaccgggatggcggaggacctgcagagcctggtgggggccacggtggtccgccgccgggtgtatgcccgttttctggatgcggtgaattttgtggcgggcaatccggaagcggacccggagcaggagctgagcgaccgctgggtggtggagcagatgtcagagctgacggccatgacagcctcgtttgtgctggccacaccgacggagacggacggagcgctgtttcccggtcgcattatgctggcgaatacctgtatgtggacctaccgctctgatgagtgtggttacacgggcggggctgtggcggatgagttcgataaacccaccaccgatatccgtaaggacagatgcagcaagtgcatgcgcgggtgtgagatgcgcggcatggtggctaattttggcggtttcctttccattaataaactttcgcagtaa

SEQ ID NO: 37292 - DNA, 342 bp, Escherichia coli
gtggctgagataaaaacgctgcatctggtcccgcgtgaagggatgcaggtgagtgagaagccgtcggtggtgagggtgcggtttggtgacggttatgaacagcgccgccccacagggctgaatcctcaactgaagacgtttcaggcggtgttccgggtgacggatgagtcaacccggcgctggctggatgaatttttatcctggcatggtggttaccgtgcctttttgtggcgaccgccgaaacataaccggacggtgagggttgtgtgccgggagtggagcgtcacggataacgcccggtacagtgatttcagctgtacgattgagcaggtggtgaactga

SEQ ID NO: 37293 - DNA, 432 bp, Escherichia coli; identical to SEQ ID NO: 24030

SEQ ID NO: 37294 - DNA, 519 bp, Escherichia coli; identical to SEQ ID NO: 37222

SEQ ID NO: 37295 - DNA, 213 bp, Escherichia coli; identical to SEQ ID NO: 29883

SEQ ID NO: 37296 - DNA, 213 bp, Escherichia coli
atgctggcaccgaaagccagaactccccgtacacagacaacggataacggcaaacagaacacctatttctcctcactggataacatggttgcccagggcaatgttctgccggttctgtacggtgaaatgcgcgtggggtcacgcgtggtttctcaagagatcagcacggcagacgaaggggacggtggtcaggttgtggtgattggtcgctga

SEQ ID NO: 37297 - DNA, 477 bp, Escherichia coli
atgcgactgccacggccccgtgatttctctgccttcgcgggttttgaatggttcgcggcggcattcatccatccactcggtaacgcagatcggatgattacggtctttgcggtaaatccggcatgtacaggattcattgtcctgctcaaagtccatgccatcaaactgctggttttcattgatgatgcgggaccagccatcaacgcccaccaccggaacgatgccgttctgcttatcagggaaggcgtaaatttctttcgtccacggattaaggccgtactggttggcgacgatcaacaatgcgatgaactgcgcatcgctggcatcacctttaaatgccgtctggcgaagagtggtgatcagttcctgtgggtcgacagaatccatgccgacacgttcagccagcttccctgccagcgttgcgagtgctgtactcatccgctttatacctctgaatcaatatcaacctggtggtga

SEQ ID NO: 37298 - DNA, 348 bp, Escherichia coli
atgatcccgttaccttccgggaccaaaatttggctggttgccggtatcaccgatatgagaaatggcttcaacggcctggctgcgaaagtacaaacggcgctgaaagacgatcccatgtccggccatgttttcattttccggggccgcagcggcagtcaggttaaactgctgtggtccaccggtgacggactgtgcctcctgaccaaacggctggagcgtgggcgcttcgcctggccgtcagcccgtgatggcaaagtgttccttacgcaggcgcagctggcgatgctgctggaaggtatcgactggcgacagcctaagcggctgctgacctccctgaccatgctgtaa

SEQ ID NO: 37299 - DNA, 513 bp, Escherichia coli; identical to SEQ ID NO: 37232

SEQ ID NO: 37300 - DNA, 429 bp, Escherichia coli
atggcggaggacctgcagagcctggtgggggccacggtggtccgccgccgggtgtatgcccgttttctggatgcggtgaattttgtggcaggcaatccggaagcggacccggagcaggagctgagcgaccgctgggtggtggagcagatgtcagagctgacggccatgacagcctcgtttgtgctggcaacaccgacggagacggacggagcgctgtttcccggtcgcattatgctggcgaatacctgtatgtgggattaccggggagatgaatgcgggtataacggtcctgcggtggcggatgagttcgacaaccccaccacggatatccgtaaggacagatgcagcaagtgcatgcgcgggtgtgagatgcgcggcatggtggctaattttggcggtttcctttccatcaataaactttcgcagtaa

SEQ ID NO: 37301 - DNA, 477 bp, Escherichia coli
atgcgactgccacggccccgtgatttctctgccttcgcgggttttgaatggttcgcggcggcattcatccatccactcggtaacgcagatcggatgattacggtccttgcggtaaatccggcatgtacaggattcattgtcctgctcaaagtccatgccatcaaactgctggttttcattgatgatgcgggaccagccatcaacgcccaccaccggaacgatgccgttctgcttatcagggaaggcgtaaatttctttcgtccacggattaaggccgtactggttggcgacgatcaacaatgcgatgaactgcgcatcgctggcatcacctttaaatgccgtctggcgaagagtggtgatcagttcctgtgggtcgacagaatccatgccgacacgttcagccagcttccctgccagcgttgcgagtgctgtactcatccgttttatacctctgaatcaatatcaacctggtggtga

SEQ ID NO: 37302 - DNA, 270 bp, Escherichia coli; identical to SEQ ID NO: 23985

SEQ ID NO: 37303 - DNA, 270 bp, Escherichia coli
atgaatatactaaaaaaacttatgcagcgtctgtgcggttgcggaaagcatgatgaccgtgaacacggggagttacttacagcacagctgcgactggggccggcagacatcctggagtccgatgagaatggcattattccggagcaggccagggtaatcacgcaggtggtgatactggatgcggataaaaagcagatacagtgtgtggtaagaccgctgcaaatcctgcgtgctgacgggacgtgggaaaatattggcgggatgaagtaa

SEQ ID NO: 37304 - DNA, 378 bp, Escherichia coli
gtggtactctgggaaatcgacctgacggtgcagggtggtgagcggtattttttctgcaatgagctgaatgaaaaaggggaggcggttacctggcaggggcggcaatatcaggcatacccgattgacggcagtggctttgagatgaacgggaagggcagcagtgccagaccgtcgctgacggtgtcgaatctgttcggtctggtcaccggaatggcggaggacctgcagagcctggtgggggccacggtggtccgccgccgggtgtatgcccgttttctggatgcggtgaattttgtggcgggcggtcgtggttatcgggcggcagaggtaaaaagaataaaaaaatcccgcagagttgcggggacagacaaagattaa

SEQ ID NO: 37305 - DNA, 309 bp, Escherichia coli; identical to SEQ ID NO: 24051

SEQ ID NO: 37306 - DNA, 249 bp, Escherichia coli
atgcagcgtctgtgcggttgcggaaagcatgatgaccgtgaaaacggggagttacttacagcacagctgcgactgggaccggcagacattctggagtccgatgagaatggtattatcccggagcaggacagggtaatcacgcaggtggtgatactggatgcggataaaaagcagatacagtgtgtggtaagaccgctgcaaatcctgcgtgctgacgggacgtgggaaaatattggcgggatgaagtaa

SEQ ID NO: 37307 - DNA, 333 bp, Escherichia coli
atgaaaaccctggcgacaatcggcgataactgcgtcgatatctacccgcaactgaataaagcgttttctggcggtaatgcggtgaacgtggcggtgtactgcactcgctacggtataaagccgggatgcattacctgggttggtgacgatgactacggcacaaagcttaagcaggatctcgccagcatgggcgtcgatatcagccatgtccatacgaaacacggcgttaccgcacaaactcaggtggaactgcacgacaatgatcgcgtttttggcgactacaccgaaggcgtgatggccgactttgccctgagtgaagaggattacgcctag

SEQ ID NO: 37308 - DNA, 372 bp, Escherichia coli
atgcggcgtgaacgccttatccggcctacgaatggcacgagaattgtaggcctgataagcgtagcgcatcaggcatttgtcaccattgccggatgcggcgtgaacgccttatccggcctacaagtggcgcaagaatttgtaggcctgataagcgtagcgcatcaggcatttatcaccattgccggatgcggcgtgaacgccttatccggcctacgaatggcgcaagaatctgtaggcctgataagcgtagcgcatcaggcatttgtcaccattgccggatgcggcgtgaacgccttatccggcctacgaatggcacgagaatttgtaggcctgataagcgtagcgcatcaggcagtctggcgttggtcataa

SEQ ID NO: 37309 - DNA, 261 bp, Escherichia coli; identical to SEQ ID NO: 23543

SEQ ID NO: 37310 - DNA, 825 bp, Escherichia coli
atgctgagaaatgcagtattgaatttatcaatttttcaccagcttctggtctttctggctgtcatgcgcaaaacatatggctttaataaaaaactggattgggttagcaacgagcaactttccgaattaaccgggatattgccgcacaagtgttctgctgcaaaaagtgttctggtaaagcgtgggatttttattcagagcgggcggaataccggcattaataatgtggtcagtgaatggtcaacattacccgaatcaggtaagaaaaataaagtttacctgaaagaggtaaatttacctgaatcaggtaaaaaaagtttacccaaatcaggtaaaggcgtttacccgaatcaggtaaacacaaaagacaaactaacaaaagacaatataaaacctttttcgtccgagaattctggcgaatcctctgaccaaccagaaaacgatcttcctgtggtgaaaccggatgctgcaattcagagcggcagcaagtgggggacagcagaagacctgaccgccgcagagtggatgtttgacatggtgaagaccatcgcgccatcagccagaaaaccgaattttgcagggtgggctaacgatatccgcctgatgcgtgaacgtgacggacgtaaccaccgcgacatgtgcgtgctgttccgctgggcatgccaggacaacttctggtccggtaacgtgctaagtccggccaaactccgcgacaagtggacccagctcgaaatcaaccgtaacaagcaacaggcaggcatgatagccagcaaaccaaaactcgacctgacaaacactgactggatttacggggtggatttatga

SEQ ID NO: 37311 - DNA, 408 bp, Escherichia coli; identical to SEQ ID NO: 23991

SEQ ID NO: 37312 - DNA, 1095 bp, Escherichia coli; identical to SEQ ID NO: 23540

SEQ ID NO: 37313 - DNA, 270 bp, Escherichia coli; identical to SEQ ID NO: 23951

SEQ ID NO: 37314 - DNA, 1539 bp, Escherichia coli; identical to SEQ ID NO: 29797

SEQ ID NO: 37315 - DNA, 366 bp, Escherichia coli; identical to SEQ ID NO: 23997

SEQ ID NO: 37316 - DNA, 483 bp, Escherichia coli; identical to SEQ ID NO: 37210

SEQ ID NO: 37317 - DNA, 195 bp, Escherichia coli
atgacgttcacagtaaaaaccattcctgacatgctcgttgaggcatatgaaaatcagaccgaggtagccagaatactgaactgtagtcgcaacacggtcagaaaatacactggcgataaagaaggaaaaagacacgctattgtcaacggtgttcttatggttcatcgcggatggggtaaagatactgatgcgtga

SEQ ID NO: 37318 - DNA, 2517 bp, Escherichia coli
atgccacaacgacaccaccagggacataaacgcacaccgaaacagttggcgctcattatcaaacgctgtttgccgatggtgctcactggcagcggcatgctttgcactaccgctaacgccgaagagtattatttcgaccccattatgctggaaaccacaaaaagtggtatgcaaacaaccgatctgtcacgtttttcaaaaaaatacgcacaactaccaggaacttatcaggttgatatctggctgaataaaaagaaggtttcacagaaaaaaattacatttaccgccaatgcagagcaacttctgcagccacagtttacggtagaacaactacgtgagctgggtattaaggtggatgaaatcccggcgctggctgaaaaagatgacgatagcgtgatcaactcgcttgaacaaatcattcccggtacagctgctgaatttgatttcaatcatcagcgacttaatttgagcattccccaaattgcactgtaccgtgatgcaagaggttacgtctccccttctcgttgggacgatggtataccaacgctgtttaccaactactcgtttacaggttctgataaccgttaccgccagggcaatcgtagccaacgacagtacctaaatatgcaaaatggtgccaattttggcccctggcgattacgtaactattctacgtggacacgcaacgatcaggcgtcaagctggaacactatcagtagttatttacaacgtgatatcaaggcgttgaagtctcagttgcttctgggagaaagcgccaccagcggcagtattttttccagctacaactttactggcgtgcaactcgcttccgacgataatatgttgccaaacagccagcgcggatttgccccaacggtacgcggtatcgcaaacagtagtgcaatcgtgactatcaggcaaaatggttatgtgatctatcaaagcaacgtgccagcgggtgcctttgaaattaacgatctctacccctcttccaacagcggcgatttagaagtcacgattgaagaaagtgacggtacgcaacgtcgctttatccagccttattcttcattacccatgatgcagcgacctgggcatctaaaatatagcgcgaccgctggacgctatcgcgctgatgcaaacagtgatagcaaggaacccgaatttgctgaagccacggcaatatatggtttgaataatacttttacgctgtatggcggcctgctcggttctgaagattattatgcgctggggatcggtatcggcggcacacttggcgcactgggcgcgttgtcgatggatatcaacagagctgacacccaattcgataaccagcactcttttcatggctatcaatggcgtacgcagtacatcaaagatatcccggaaaccaacaccaatatcgctgtcagctactatcgctataccaacgatggctattttagttttgatgaagccaatacccgcaattgggactataacagtcgccaaaaaagtgaaattcaattcaacatcagccagacaatatttgatggggtaagtctgtatgcctccggttcacagcaagactattggggcaataacgagaaaaacaggaatatctctgttggggtttccggccagcaatggggaattggttacagcctgaattatcaatacagccgctacactgatcaaaataatgaccgcgcactctctttgaatctcagtattccgttagaacgctggttaccgcgtagccgggtttcctatcagatgaccagccagaaagatcgcccaacccaacatgaaatgcgtcttgatggctcactgctggatgatggtcgcctgagctatagtctggaacaaagtctggatgacgataacaaccataacagtagcgtgaacgccagttaccgttcaccttatggaaccttcagtgccggatacagttacggtaatgacagtagccaatacaattacggcgttaccggcggcgtggttatccatcctcatggtgtgacgctctcgcaatatctgggcaacgcttttgcgcttattgatgctaacggggcatctggcgtgaggatacaaaactatccggggattgctactgatccctttggctatgcagtggttccttatctcacaacttatcaggaaaaccgtctctcggtagatactacgcagctgcccgataacgtcgatcttgaacaaacaacacagtttgtggtgcccaacagaggtgcaatggtagcggcgcgtttcaacgccaatatcggttatcgcgtacttgttacagtcagcgatcgcaacggtaaaccgttgccctttggcgctcttgccagcaacgatgatacggggcaacaaagtatcgtcgatgagggcggcatactatatctctctgggatatcgagtaaatcacaaagctggactgtacgctggggaaatcaggcagatcaacaatgtcagtttgcttttagtacaccggattcagaaccaacaacctctgtattacaaggcacagcgcagtgccattaa

SEQ ID NO: 37319 - DNA, 996 bp, Escherichia coli
atgactgttgcttcagtggttaaaccatatgactttagcaatcttggtgccataaatagtatagataaatccgtttctgatgtgcctgcattgcatacaattgttgaacaagcaaaatataatttactttcatggaatgatttttataacactcatgcgtcaatatgggatacaatagcaagacagcataaaagtacaaatatcgaatttcacccacaaagtcttctttttgatagagattcgaaaggaaagtgccttggtttatctcttctgtatcttgatacaggggggtacggaggcggatatcaaaaactgaggcacaatattgacactgccagcacattatatcaaacaaaatacaatgacaatctaaaattatctaaccgtgatgatttctttttaagaaaaacacagcgtatcattacaatgtccaatgagttaggtaataacaggttaaaaaatgcacagttagaggttctggaattgaaagaccctatactaactgaaggcatattataccagcgtcgtatatcatctcttttaataacaacagaatatcattcacttgcattacaacaaatatcttctttttggagagtaactgatcctaattttggtcattgtgactttcattccttagcacaggctttaacgtttataaaaaatataacgagcaatcgtaacttttcatctttatatggaagtggcattgttaaaatttacttcagtgaatctcttaataattggaagtatattaagctcccccttgttcagactggttctttgttaagagacatatatttaacaaccccagaaaaattatccacaagcgggggttcattaaatattatggggcatctcgtgcctgtcagttttatttatgatatcggaggggttattaatggtaacagaataagtgaaagtacagatgtgaaaaataaaattaggagcttaaaaataaatggagatattttacaacataggataacacaataa

SEQ ID NO: 37320 - DNA, 2139 bp, Escherichia coli
gtggaggttacagtaacagatctgcaaggaagactttatcgtgttgatatagatacaagagttattggcttaacttttaaagaggggataaatagtttatccgaagcactcgaacacatgaatatcgatgcgattatgtctgttattggcttggttcaatatgcacgaatgataaaaatgaatgacaatattagtgcaatagatcatgcaggagcagtatcagatataaaaaatattgtagacaaatttttaggcggaattttgactcttactaataatcgcgtatataatcctggcggtgtatctggtgcctcgcttgaaggatttatatcttctgggttggaggtgtgtgcttcaagaatgggtggcaccgcagggcgttatcttagcaatgtggcaaaagtaattaaattacctttgctagatataggcataaatatttggtcattatatgattcttcattaaatcatgctaaagccaccacacaaattgaatatatatcaacagcaatagatgtatctttttcatctataaatacagctttgtcaataggcgcaatcgcatatcctcctttggcaatagctatagttccgataactattttttctcatgaagtaaaaaactatgctgtttatgtgaatcaaattaatgagcgccataagttatggctcgaagctgaaaagtatctggacaatggaagtgcaaaggttctaagcattaacaaagccacaggcataatcgatttatcaaataatcaggtgttaggtaatatttatttagatatgagagaaaatcctccaatattacacggtgagaaatcatataatagcggaaagaatattggtagtcatcctgatatgactgacagagagattatggagtctagagcatacaattttgcatgcacaaaactctcagatgcaggtgaacccgatattttcggttggggagataaggaaatatgtaattcaatggaattatcagaatcacaattagctaatgggtattctaaccgccaatggccttctcagattccagttattccagaaggaatttataatacagtatatcttggatatggagaaacattgcgagctaatactgaagttacattgagtagcactggttacttttacgagattgcaagggcatatactgatgatgaactatctgagccattattaacagtatgtaaccaacatagtcatgttattggtggaaaagaaccattaacaattattattcccgctattgaacatggtatgcttggctctaatctacatatgattgaacgttttaaaaactataatttctcgatatcaggagggaagggagggataaaattaatggttggtggtattggtgattacaacatagaatgtacccccggtgttagaaatattatatcgtttgaacaattatcacgtgacttcaatctggatttggatttatcagatgggaggaaacaaaattttaattttcatcatccctcaggtttttattcaggaaaagttatgagcataacgcaaaagggtataaatgcggttgttggtactaaactgggatatgataagattcgtggtaataatcttgataataccttttctcttgggagtggaggaggtgttatatattctggaggagggagcaatacctatttcgttcccgccacactacaggataatttacacatatatatatcagaaaaatcaaatggcaatcatattatattaggtgatatgcactctcgcctatctattgaatgccactttagtaataatgaaagagagtttataaagatgggctactataatggatgtgatgtgattttagaaagtgacactatacaaaaaataaaatcatttgcaaaaaatataacaatacagacagcggatggagttatggcaaattgggatgataaactaaatactctgtctgtttattcaatagatatgattgcatggagggataaaaataaaactgcaaaagaaccgttaccagttgatgtaatccagttaactaattggaggatgcataacacatgctctttattttatgataaatatcaagttgatattgaagccaataagttaacgtatacctgtctcttatacacatctgacgctgccgacgaatag

SEQ ID NO: 37321 - DNA, 699 bp, Escherichia coli; identical to SEQ ID NO: 37272

SEQ ID NO: 37322 - DNA, 282 bp, Escherichia coli
atgtctgatctgtttacgcgaatgtgttgccggatggacgtggcgaccgttcgggtgatgggcaaacaggcggagattaacggcgtcgtgtacgacgtgatgccggaggaagagtccgcggagatgggggcgctttcgggcagccagttgtcactggtggtgttttcagcccggtaccgtccggcccgtcatgatgttgttgtgtttgcggggcgcacactgacggtgacccgttatgacacgtacaacggtaaaccccggatttttgtcgaacaggaatga

SEQ ID NO: 37323 - DNA, 327 bp, Escherichia coli
atggcgaaaaattttgtacaggacggtaccaccattgaactggtgaatgccggagatcagaccatcctgagcggtgctgcggtggtggtcggcagtatggtggccgtggccattaccgatattcctgccggtgaggccggtgacggttttgccgaaggcgtgttcctgctgcccaaacagtctgctgacgacattcagtccggcgcggtggtttatctgaaggacggggttgtgcagctggctgcagacggtgcggtggcagcgggggtagcctgggaaaatgcccctgcaaacagcgccactgtggcggtaaaaatcaatgtctga

SEQ ID NO: 37324 - DNA, 894 bp, Escherichia coli
atgcagatggtcgggctggcgctgacgcacagcacctctgattttggcaatattctgctggatgtgtcgaacaaggggctgatccagggctgggaggaatcagaagaaaccttccagaagtggacccgtaagggacgcctgtcagacttcaaaacagcgtatcgcgtggggatgggcggttttggttctctgcgccaggttcgtgagggggcggagtataaatacatcaccacctcagatcgcaaggagaccattgcactggccacttacggggagattttctccatcacccgccaggccattatcaatgatgatctgaatatgctggtggacgtgccgatgaagatggggcgtgcggcgaaggcaacgattggtgacctggtctacaaggtgctgacggataacccgaaactgtccgacggtaaggcgctgttccatgccgatcacaaaaatattgccaccggggggatctccgtttccggactggatgcggcccgtcagatgatgcgcctgcagaaagaaggcgatcgtgccctgaatatccgtccggcctttatgctggtaccggtggcactggagacggtggcgaaccagaccatcaaatcggccagtgtgaaaggggcggatgcaaacgccggtgtcattaaccctatccagaactttgctgaggtgattgcagaagcgcgtcttgatgcggcagacccgaaaacctggtatctggcggcggcacagggcactgacaccattgaagtggcctggctggatggtgtggacacgccatacattgatcagcaggaaggtttcaccactgacggcattgccacaaaaatccgtattgatgccggagtggcaccacttgactggcgcgggctggtgcgttcgtcggtggcctga

SEQ ID NO: 37325 - DNA, 591 bp, Escherichia coli; identical to SEQ ID NO: 23964

SEQ ID NO: 37326 - DNA, 699 bp, Escherichia coli
atgcaggatattcacgaagaaagtctgaacgagtcggttaaatcagagcagtcaccgcgggtggtgctcagggaaattgacctgacggtgcagggcggtgagcggtattttttctgtaatgagctgaatgaaaaaggggaggcggtcacctggcaggggcggcaatatcaggtatacccgattgacggcagcggttttgagatgaacgggaagggcagcagtgccagaccgtcgctgacggtgtccaatctgtttggtctggtcaccgggatggcggaggacctgcagagcctggtgggggccacggtggtccgccgccgggtgtatgcccgttttctggatgcggtgaattttgtggcgggcaatccggaagcggacccggagcaggagctgagcgaccgctgggtggtggagcagatgtcagagctgacggccatgacagcctcgtttgtgctggccacaccgacggagacggacggagcgctgtttcccggtcgcattatgctggcgaatacctgtatgtggacctaccgctctgatgagtgtggttacacgggcggggctgtggcggatgagttcgataaacccaccaccgatatccgtaaggacagatgcagcaagtgcatgcgcgggtgtgagatgcgcggcatggtggctaattttggcggtttcctttccattaataaactttcgcagtaa

SEQ ID NO: 37327 - DNA, 744 bp, Escherichia coli
atgacacagactgaatcagcgattctggcgcatgcccggcggtgtgcgcctgcggagtcgtgcggcttcgtggtgagaacgccggagggggagcggtatatcccttgtgtgaatatctctgcagagccggaggcgtattttcgtattgcaccggaagactggctgcgggcagagatgcagggggagattgtggcactggtccacagtcatcccggtggtctgccctggctgagcgaggccgaccggcggctgcagataaaaagtgcactgtcctggtggctggtctgccggggggaaattcataaattccgctgtgtgccacatctgacaggacggctctttgagcacggggtgacggactgttacacgctgttccgggatgcataccatctggcgggaattgatatgccggattttgagcgtgaggatgactggtggcgcaatggtcagaacctgtacctggacaatatggaggcgactggtttttaccgggtgcccctgtcctctgcacaggcgggcgatatcctgctgtgctgctttggcgcatcggtggccaatcatgccgccatatactgcggcaacggtgaactgcttcaccatctgcctgaacaactgagtaaacgggagaggtattccgaaaaatggcaacgacgaacgcattcagcctggcgtcaccgccactggcacgtatctgccttcacggggatttacaacgatttggccgccgcctcagcctgtacgtga

SEQ ID NO: 37328 - DNA, 168 bp, Escherichia coli; identical to SEQ ID NO: 23915

SEQ ID NO: 37329 - DNA, 270 bp, Escherichia coli
atgaacatattaaaaaaaattatgcagcgtctgtgcggttgcggaaagcatgatgaccgtgaaaacggggagttacttacagcacagctgcgactgggaccggcagacattctggagtccgatgagaatggtattatcccggagcaggacagggtaatcacgcaggtggtgatactggatgcggataaaaagcagatacagtgtgtggtaagaccgctgcaaatcctgcgtgctgacgggacgtgggaaaatattggcgggatgaaatag

SEQ ID NO: 37330 - DNA, 699 bp, Escherichia coli
atgcaggatattcacggggaaagcctgatcgagtcggttaaatcagagcagtcaccgcgggtggtgctctgggaaatcgacctgacggtgcagggtggtgagcggtattttttctgcaatgagctgaatgaaaaaggggaggcggttacctggcaggggcgggaatatcaggcatacccgattgacggcagcggttttgagatgaacgggaagggcagcagtgcccgcccgtcgctgacggtgtcgaatctgttcggtctggtcaccggaatggcggaggacctgcagagcctggtgggggccacggtggtccgccgccgggtgtatgcccgttttctggatgcggtgaattttgtggcgggcaatccggaagcggacccggagcaggagctgagcgaccgctgggtggtggagcagatgtcagagctgacggccatgacagcctcgtttgtgctggcaacaccgacggagacggacggagcgctgtttcccggtcgcattatgctggcgaatacctgtatgtgggattaccggggagatgaatgcgggtataacggtcctgcggtggcggatgagttcgacaaccccaccacggatatccgtaaggacagatgcagcaagtgcatgcgcgggtgtgagatgcgcggcatggtggctaattttggcggtttcctttccatcaataaactttcgcagtaa

SEQ ID NO: 37331 - DNA, 144 bp, Escherichia coli; identical to SEQ ID NO: 23988

SEQ ID NO: 37332 - DNA, 342 bp, Escherichia coli; identical to SEQ ID NO: 37224

SEQ ID NO: 37333 - DNA, 198 bp, Escherichia coli
atgacatcattaaccccggaagcagcactggatattctgattgcgtggctgcaggacaatatcgacagcgaatccggaattatcttcgacaacgatgaggataaaacggattcggcagcattgttgccctgtatcgaacaggtcagggaagatgtccgtaccctgcgccaactgcagcttctgcaacagaaccggtga

SEQ ID NO: 37334 - DNA, 315 bp, Escherichia coli; identical to SEQ ID NO: 24010

SEQ ID NO: 37335 - DNA, 432 bp, Escherichia coli
atgtttggaatcttcaaaaagaaaacccgcagagcggcaacggaaattaaaaagtttgaaaaacgcgatctggcacaggtggtgattaacgccgcatacctggtggcctgtgcagatggtgaatgtgaggcatccgagaaagcgaagatcgaacaggtactgcgtaatcagcctgcgctgtccgcgtttacgtcagaaattaatgcgattagcgcaaccattatcggtcagctggatacgaactttaaaactggtcgtcgtgcggcgttacgtgagattgaggatgtgaaacacgatacgcgtgaagcggaagatgtgctggatgtggcggtggccattgcggaggcagacggcgaaattgagccggaagagcgcaaggtgctggaagagattgccggtgttctgggtcttcgtctggagaattacctgtga

SEQ ID NO: 37336 - DNA, 168 bp, Escherichia coli; identical to SEQ ID NO: 29859

SEQ ID NO: 37337 - DNA, 546 bp, Escherichia coli
atgcttagccttgtttataatgaacttgattcaatacaggttcccgaatcatgcaaagaattagaactcgatttcaataaccttacagaatttccacaagtacctgatggaattaccctgatctccgtaaataataacctgatatcgcatattgactcatttccgccaaaggctaagaaaatttttattagtcacaataagctatcggaaacaccagcaataccagacaccgctaaggtttttgattgtggctataataagatacaagaaattcgatacttccccaaaaatctgaaagaagcgcgtattggatataataatattgaggttgttcctgcgatacctggcaatttaaaaatactttttatggaatgtaatcctattaaagaggcatttttaatgccatggactctgacagggatctgctatgaaatatcgcagcgaaaatatattgttacgaatccagccgattatgataaatattccgatatggttaaaaagcatgtaatagatggtgaggaactcataattaaatattttatgtaa

SEQ ID NO: 37338 - DNA, 978 bp, Escherichia coli
atgacggaacgggaactgtccattattcgtgcactgggagaagaattttccacagtgctggcggatttacagcgcacatttgaggagaaaatagccgcgcaggcacaaacgtttgaagaaaaactggcttctcagtctgtggtattacagaagtgcgtgacgggtgatgatgtgcgtccgatgcttgagcagatggtgaaagaggcagtgagccatattcctgttccgcgcgacggtcgtgactacgatccggatgttctgcagaaggcggtgaatgatgcggttgcgaatattccggtaccggcagacggcaaaagtatcaccccggatgatgtgcgtccgatgcttgagcagatggtgaaagaggcagtgagccatattcctgttccgcgtgatggtcgtgactacgatccggatgttctgcagaaggcggtgaatgatgcggtcgcgaaaataccggtaccggcagacggtaaaagtctcaccccggatgatgtgcgtccgatgcttgaacagatggtgaaggaggcggtaagccatattcctgttccgcgtgatggtcgtgactacgatccggatgttctgcagaaggcggttctggatgcggtgagtgccctgccggctccgcaggacgggcgtgatgccacggcactggaaatactccccgccattgacgatcaaaaatcctttccccggggctcgtatgccacacaccagggtggactctggcgggcgtatgaaaaaacgtacgggatgcggggatgggaatgcctggttgacggggtggcggatattgacgtcagcatgacgggtgagcggttgttctctgtggtggtccggcagagcagtggccagcgtacggaaaaaacattttccctgccggtgatgctctaccgtggtgtgttcagaatcggcgaaacttaccaccccggcgatacggtgacgtggggggctcgttgtggcactgcaacagtatga

SEQ ID NO: 37339 - DNA, 744 bp, Escherichia coli
atgacacagactgaatcagcgattctggcgcatgcccggcggtgtgcgccagcggagtcgtgcggcttcgtggtgagaacgccggagggggagcggtatatcccttgtgtgaatatctctgcagagccggaggcgtattttcgtattgcaccggaagactggctgcgggcagagatgcagggggagattgtggcactggtccacagtcatcccggtggtctgccctggctgagcgaggccgaccggcggctgcagataaaaagtgcactgtcctggtggctggtctgccggggggaaattcataaattccgctgtgtgccacatctgacaggacggcgctttgagcacggggtgacggactgttacacgctgttccgggatgcctaccatctggcgggaattgatatgccggattttgagcgtgaggatgactggtggcgcaacggtcagaacctgtacctggacaatatggcggcgactggtttttaccgggtgcccctgtcctctgcacaggcgggcgatatcctgctgtgctgctttggcgcatcggtggccaatcatgccgccatatactgcggcaacggtgaactgcttcaccatctgcctgaacaactgagtaaacgggagaggtattccgaaaaatggcaacgacgaacgcattcagcctggcgtcaccgccactggcacgtatctgccttcacggggatttacaacgatttggccgccgcctcagcctgtatgtga

SEQ ID NO: 37340 - DNA, 636 bp, Escherichia coli
atggtccgggagacggcggacagcaccacggaccagctgcagaacagaacgctgtggtcgtcatacaccgaaatcatcgatgtgaaacagtgctacccgaacacggcgattgtggggctgcaggtggatgcggagcagtttggcggtcagcagatgacggtgaactaccatatccgcggtcgcatcatccaggtgccgtcaaactatgacccggaaaaacgcacgtacagcggcatctgggacggcagcctgaaaccggcatacagcaacaacccggcctggtgcctgtgggacatgctgactcacccgcgctacggcatgggaaaacgcctgggggcggcggatgtggacaagtgggcgctgtatgccattgcgcagtactgcgaccagacggtcccggatggtttcgggggcacagagccgcggatgactttcaatgcgtacctgtcacaacagcgtaaggcgtgggacgttctcagtgatttctgctcggcgatgcgctgtatgccggtatggaacgggcagacgctgacgtttgtgcaggaccgtccgtcagatgtggtgtggcctacaccagcagtgatgtggtggtggatgataacggcgtggggtttcgctacagcttcagcgccctga

SEQ ID NO: 37341 - DNA, 432 bp, Escherichia coli; identical to SEQ ID NO: 24030

SEQ ID NO: 37342 - DNA, 270 bp, Escherichia coli; identical to SEQ ID NO: 23881

SEQ ID NO: 37343 - DNA, 411 bp, Escherichia coli
gtggccagatgtacagtggcacgtctcatggcggttatgggacttgccggtgttctccggggtaaatgggcccgtcgtccgtctggcaccatccatcacagcgataaaggctctcagtatgtgtcactggcctatacggagcgactaaaagaagccggattactggcatcaacagggagtacaggcgactcgtatgacaacgcgatggctgagagcatcaatggtctttacaaagcggaggtaatacaccgtaagagctggaaaaaccgtgcagaagtggaactggccacactaacgtgggtggactggtataacaatcgacgattgctgggaaggctgggccatactcctccggcagaagcagaaaaagcttattatgcttccatcggaaacgatgatctggcagcctga

SEQ ID NO: 37344 - DNA, 492 bp, Escherichia coli
gtggctgattttacttacgtcagcacatggcagggcttcgtctatgtggcgtttatcattgatgtgtttgccggatacatcgtggggtggcgggtctcatcgtctatggaaacgacattcgtgctggatgcgctggagcaggcgttgtgggcccgtcgtccgtctggcaccatccatcacagcgataaaggctctcagtatgtgtcactggcctatacggagcgactaaaagaagccggattactggcatcaacagggagtacaggcgactcgtatgacaacgcgatggctgagagcatcaatggtctttacaaagcggaggtaatacaccgtaagagctggaaaaaccgtgcagaagtggaactggccacactaacgtgggtggactggtataacaatcgacgattgctgggaaggctgggccatactcctccggcagaagcagaaaaagcttattatgcttccatcggaaacgatgatctggcagcctga

SEQ ID NO: 37345 - DNA, 492 bp, Escherichia coli
gtggctgattttacttacgtcagcacatggcagggcttcgtctatgtggcgtttatcattgatgtgtttgccggatacatcgtggggtggcgggtctcatcgtctatggaaacgacattcgtgctggatgcgctggagcaggcgttgtgggcccgtcgtccgtctggcaccatccatcacagcgataaaggctctcagtatgtgtcactagcctatacggagcgactaaaagaagccggattactggcatcaacagggagtacaggcgactcgtatgacaacgcgatggctgagagcatcaatggtctttacaaagcggaggtaatacaccgtaagagctggaaaaaccgtgcagaagtggaactggccacactaacgtgggtggactggtataacaatcgacgattgctgggaaggctgggccatactcctccggcagaagcagaaaaagcttattatgcttccatcggaaacgatgatctggcagcctga

SEQ ID NO: 37346 - DNA, 222 bp, Escherichia coli
atgagtatggctgtaaatgaactcataaaactgaccaaaatagagaataatgtagacctgaataaattcactactatatgcacagacgttctatcccccctcgtcaccaaacataataaacaaaaaagtcaaaacgacattctacccttcgcaaaaatcccctttttaattttcattgaaaaaatggaaattgataatatgaatccaggtcatgtacattaa

SEQ ID NO: 37347 - DNA, 2979 bp, Escherichia coli
atgcaaaggaaaaaattattgtctgtttgtgttgccatggcgttaagtagccagacatgggctgcggatacttcaatacccgactcaaccgaaaaaacacgtaagtccagtaagataacatgtccggcaaatattcattccctgagcaaagagcagctagaaaatttatccgcggagtgcagagaaaataaagatagtgcagttttaccatgggcagctgcaggtcttgctgcagtagctacgggaattgctatatataccttaagtgacgatgacaatcaccaccataataactccccagttccggatgatggcggtgatacgcctgttccgccagacgacggcggtgatacgccagttccgcctgatgacggcggtgatacgccggttccgccagatgacggcggtgatacgccagttccgccagacgatggtggcgataccccggttaaacacaatcctgtcgtctataaaaatggcgtaacttgggatcaggatgcaaaaactgtcaaaattcgcgaaactacctttacctacagccaaaatgccgatgggagctacaccttaacggcgcctgagggcaaggagacgatagttaagtcctggacagtccatgacgacagcaacaccgttgtctttgatggcgtaaatacctcaggtggcatcacctggagttacgacgatgatggactcatccacatcactaaagaggccggcgtcgttgttgacggcacaaccgggaatgcgattgagtttggtaacgcgatcatcaccgatcagggcggcaacacggcgctgaatggcggtactgtcatgacggttgatggtgacaacatctccctcaacaacgacggcaaaacgacggccatcggagaaggctcggttgtcggtatactcactggcgacaatatcaccattaacaataatggcgagacggaagttgatggcggtaccgcggtaatcatcaatggcgataataccaagctaaacactgcgggcgactcgaccatcaccaatggtggtacgggtagccttatcaatggcgataatgcgcgggtcgataatcaaggtaccatgagcgttgacggagagaattccactggctcgaaaattgtcggtgacggtgccaccatcaaacaggaaggcgacttatacgtaagcggtggtgcgcacggtattgacgttgacggcaatgatacgttcgttagcaacaaaggtaatattacggtcatcgaagataactctattggcatgctgcttgatggtgatggcgtcagcgtgatcaacatgggcgacctcaatgttggtcaggccgcagcgggtgaaaatgccattggcattcagatcgacggtgataatgcgacatttgttaacgttggtgatatttccgcgaccaatgccggaaccggtgtcagcgttgctggggataaagctaatatttcactcgcgggtgggttagacgttggggatttctccaccggtcttgatgtctctggcaataataacaacatgacgctggcgacttatgagctgaatgtgacagggcaaaaagcgacgggtgttaatgtttcgggtgatggtaatactatcgaaatagcgggcagtattctggttgataaagatcagaaagccgataatgcgcagccttacttctttaatccctcaaccggggtaaatatcagcggtgacaacaacgacgtcacgctggatggtcagttaaccgttgttgctgatagtaaaaccacgtcgcgttcctatgcgagttacgacggtgctcaggaacacattgcaggtattgttattgctggcgatgacaatacctttacgcttaatggcggtgtccattttgtcggtgaaaaaaatgtcatggatgatggctcaaaaccatcagcttctcgacgtggtatcggagacacaccgcttattaacgttgatgggcattccccggtctacctgaatggtgagtcaaccatcagcggcgagttcccgctggggttcgaaaatctcattcagttgagccatggcgcggagctggagattggcgctgacgcaacgtttgatatgagtgatgtggattctttcacttattattatcgtgtagcgttatccaccattagtattgattctggtgcgaaggcgacaaacaacggtgaagtggaactgaaaaatatcggttttgcggctgcctggaataaagattcaacggtaatcaataacggatccattggcctggcgatgtacgattttggtaccgacccggcaccaaaagtctttgatgttgaatacggtgggattggcgttaacaatggtaccatgaccaccaaaatgatgaatcagcacagtgtgctgaattatccggcagagtggaacttgtctgatggtacctctttcaataacaaggcattagggctgacaggtatgcttgccagctactcgtcatccattctgaacggcgaaacgggtattattgatatgtatggccgtggcagtgtagggatgctagccatcgataaatcaaccgcggataacgaagggcaaatcaccctggatacgctgtgggttgatgaaaatgatgaaacatcgctgcgtaataatgttgcaaatagcacggcgaaagatttcggtgtgggaatggcttcaggtaccgatgcctataatggggcattaactaaagccacggcaaccaaccacgagaatggtgtgattactgtctacaacgccggtgcggggatggcggcgtatgggaatactaatacggtcattaaccagggaaccatcaacctggagaaaaatgaaaattacaacgattctctcggtgtgaataaactcgtcggcatggcggtttatcacgaaggcaccgccattaatgaccagacaggcgtaatcaacattaacgcggaaaatggtcaggcattctataacgatggcactgggcttattatcaactatggcacaatttgtacctttggcgtttgctag

SEQ ID NO: 37348 - DNA, 1359 bp, Escherichia coli
ttgcaaaaaagagttctgcctattgatgtttattctgatgaaacagatgaaccaagactaattgttagaaaaaaagagcatgatctttataaatattatatactgcaggattctaaagattataaacctgaaaagccatcggatactgagttagtattcattagcaacgctgaaacaattagagattatttgttgcggttatctgttgatgagttgaagttgcttgctaaatatattttgcaaaatgtatatatcgtatttgtgcaaacagatgatttcgcatcatcatttagactctttaatgtattaaatagtcgaggtttacctttaagtaatgcagatcttttaaaaaatgcactgtttgaatcagcttctacacataataaaaaatcagagcaaatagaatcagcatggtcgcaaattgaagatatggtcggagtgagacggcttgataaatttcttactcttcataagctttccgagaaaaaagatcgtgacagggtgttacaaaaaggttttgaagcttttattgaaaatctccagcagcaatttgatggagatgctattgctatgtcactgatgttggttaattctgcaaaaaattatactaagattttagagaatgattttgaacacccttcaatacgacgaaaaatagcatcgctaagtaatttaggggtagatgagtggattcctccggttatggcattcatgaatcgaatggctcgtacagaagattttaatttagatgatttttctcaatttattaccgcctttgagaaggtatatatgcatgggtggttaaaaaaacaaattaaaagccaaagagaaatggtttgttattcagctctggtagcaataaataatgatatgccttttgattctgtgataaatcagataaaccaacatgcagataattcaggttttatagctgctctggatgaagatttatatgagcctcgtccgaatcaagtgaacttaataaaagcaattttgcttcgcttagatatggagcaacaagatgagagcgtgattaaaacctatacggggagaatcacaattgagcatattcttcctcaagcattagttaatgaatactggattaatagattccaacctcaagagcatgtctactggctgcataaaataggtaatttaacactcataagtggttccaaaaattctgaagcacaacactatgattttatcaaaaagaaatctatttatgagaaacttaatagtaaaagctcttttgatttaacaaaagatgtttgtaattcttcagaatggggattggctgaactgaaaatgagacatgaaaaaatgaaaacgcaattgaagaagctttggttggtctga

SEQ ID NO: 37349 - DNA, 249 bp, Escherichia coli
atggctgttggcgtttaccaggcgttatatcaggcagagttacaggttccgcaggatatcgcggtgattggctatgacgatatcgaactggcaagctttatgacgccaccattaaccacgatccatcaaccaaaagatgaactgggggagctggcgattgatgtactcatccatcggataacccagccgacccttcagcaacaacgattacaacttactccgattctgatggaacgtggttcggcttag

SEQ ID NO: 37350 - DNA, 147 bp, Escherichia coli
atgatatattccatggcgcagatgggaacgattatatcgaaggtaattatggtaatgatcgactatacggcgatgatggggatgattatatatccggaggacagggagacgaccagttatttggtggtagtggaaacgataaattga

SEQ ID NO: 37351 - DNA, 198 bp, Escherichia coli
atgagtttttttccagcggaacgtacgcttgatgatgctgtattaaatgctgattttgtagtcaatgtcgcattattgaaaatgttctttattttatttactgtcatattagttttctttctcaatattaaaattaaaatcttgtctgttttttacttcagacataagttcatgatggtattgcctgaatatttttga

SEQ ID NO: 37352 - DNA, 315 bp, Escherichia coli; identical to SEQ ID NO: 23639

SEQ ID NO: 37353 - DNA, 414 bp, Escherichia coli
atggcaaaagtatttacacaggaagagcgggaaaaaattaaagggcaggttgttgagctagtacgccggagtgggcgcgagacgttacggcaactggaagccaagacaggtgcgacaagatatctgatgagcgttcttgccagagagctggttgccagtggcgatgtatacaactctggttacgggttattcccatctgaacaggctcgtaaggactggcaaaacgcccgcaaaaaactatcgagggcaaaactgaagaaaccggttgtggttgatcctgaccttatctggtcattaccagacggagaaatacgccgctatgacaggcaattgaacataatttgtagtgagtgccgtaacagtgaagtgatgcagcgagttttgatattttacacaggagtaatgatggaatag

SEQ ID NO: 37354 - DNA, 1023 bp, Escherichia coli
gtgacgttaatacccgaagacgaaaccgtaacgcgtccgataatggcatgggaaaagcttactgaagtcagacttgaagaagtattaacggcttataaagcagatatcccgctaggcatgattagagaagaaaatgactttcgcatctcggttgctggcgcacaggagaagacagcactgctcagaataggcaatgactggtgcattccgaaaggaataacgccgacgacgcacatcattaaattaccgattggggaaatcaggcagcccaatgcgacgctcgatctcagccaaagcgttgataatgagtattactgtctgctgctggcgaaagaacttgggttgaatgtcccggacgcagaaatcattaaagcgggaaatgtgcgcgcgttagcggtcgaacgttttgacaggcgttggaatgctgagcgaacggttttacttcgcttgccacaggaggatatgtgtcagacattcggtttaccttcatcggtgaaatatgaatcagatggaggcccaggcatcgcgcggatcatggcttttttgatggggttcagcgaggcgcttcgcgatcgttatgattttatgaaattccaggtcttccagtggttgattggcgcaacggatggccatgcaaaaaacttctccgtatttattcaggctggcggcagttatcgactcacgccattttacgacatcatttcagcatttccggtccttggcggtacgggaatacacatcagcgatctcaaactggcaatggggcttaacgcatccaaaggcaaaaaaacggcaatcgataaaatttatccgcgacattttttggcgacagcaaaggtgctgagattcccggaagtgcagatgcatgaaatcctgagtgactttgccagaatgattccggcagcactggataacgtgaagacttcattaccgacagattttccagagaacgtggtgacggcagttgaaaccaatgtgttgaggttgcacggtcggttaagccgagaatacggtattaagtaa

SEQ ID NO: 37355 - DNA, 792 bp, Escherichia coli
atggcctgcgggagtgtatgtgctggtcagttcgtatgcgttattgccgaagctgcgcaccgtctcgcggtgcagcctgtcgcgcgtgaactccaccagcggcgtcccgcccagcttcatccccgcaagataaccgctgccgtaggtcagccactccacccgcggcaggctgtccggcgtgacgcggtttgccagaccctgttcgttgtatgcgtgctctgtctcatgctgccacagcagttcccccgtctccgggttatgcaccgtctggcgctccccggccaggcggcccttatcatcataaccgtaatgcaccgccacctgatggccttcgctcaggtggctgatttctgtcagccagccgtgctcgtcgtactgccactgctctgccggttcgccgttcaccgtgcggtgagtgaggcggtccgattcgtcgtagtgccagagggtgacaagcccctcatcttcactctgcgtgagttttccggtcaggtcatagtggtaacgttgcgtccgcccgtcaaagccgcgctgctgtaccagccggtcaagcgcatcgtaggtaaactcactccggctgccgttctcgttggtcagcgtggtgatgcgtccggcgaggtcatactccatactgcgcgtcagcccgccctgcgtggtgctgaccgcttttccccacgcatcgtactgtgtctcgctccggttgccgtccggagtgataacggcagtcaggtcgcctgcggcgttgtactcataccgcgtttcatggccctgtgcgtctttcaccgaggttaa

SEQ ID NO: 37356 - DNA, 330 bp, Escherichia coli
atgtttgcatgcacattctttttcttgcatggtgccgggtgcctcccggtgaattcagtatcagcacctgaatccgcgattatcacatatacctggttgctgattgcccctccgcacagggggattcaccatgcagtagtatttttaataaacagtaaacaaaaaaatcaagcattatgcaggctgtttctttttatcaccggccacagcaataccacaatgccgcagaccagagcgccatcagtcagtaccaacattatcctgctggtgaaatccatcatcaccatcactaaaagcaggatcacaacagcaagcagacacagtttataa

SEQ ID NO: 37357 - DNA, 270 bp, Escherichia coli; identical to SEQ ID NO: 23554

SEQ ID NO: 37358 - DNA, 1176 bp, Escherichia coli
  misc_feature (1154)..(1163): n is a, c, g, or t
atgatgagtaaatgtagttctcataatagtctgtatgcactgatattgcttgcacaatatcataatataactgtcaatgctgaaactataaggcatcagtataatacccacacacaagattttggggtgactgaatggttactggcagcgaaatctattggcttaaaagcaaaatatgtagaaaaacatttttccagattgtcaataatttctttacctgcgttgatatggcgggatgacggtaagcattatatattgtctcgtattactaaagattcatcacgctatcttgtttatgatccagaacaacatcagtcactaacttttagtcgggatgagtttgaaaaactgtatcagggaaaagtcattctggttacgtcaagagcaacagtagtcggagagttagctaaatttgatttttcttggtttatcccctctgttgtgaaatacaggaggattttacttgaggtgttaactgtttctgcttttattcagtttcttgcgttaataacacctcttttttttcaggttgtaatggataaggttttagttcaccgggggttttcaacgttaaatattatcacaatagcatttattatagtgatactttttgaagtgatattaaccggagccagaacttatattttctctcatactacaagtcgtattgacgtcgaactgggtgctaagttattcagacatttgcttgcattgcctgtttcatattttgaaaatcgcagggtcggagagaccgttgccagagtaagggaactggagcaaattcgtaattttttaaccggacaagcgttgacatcagttcttgatctatttttttctgtaatatttttttgtgtcatgtggtattacagccctcaattaacactggttatattattgtcactaccttgttatgttatatggtcattgtttatatcacccttattacgtcgacgtcttgatgataagtttctcaggaatgcagaaaatcaagcttttcttgtcgaaacggtaacagcaataaatacaatcaaatccatggcagtatcaccacagatgattgctacatgggataaacaactggccgggtatgttgcttccagtttcagggtaaatctggttgcaatgacagggcagcaggggatacagctgatacnnnnnnnnnncagaaaagtgtaa

SEQ ID NO: 37359 - DNA, 189 bp, Escherichia coli
atgaaaaatatgtcaagaatatgtaagaacagaaccgtaattattattgcacacaggttgtcaactgtaaaaaatgcaaacagaataattgttatggataatggctttatttctgaagatggcacacataaagagcttatctccaaaaaagacagtttatatgcatatttatatcagttgcaggcataa

SEQ ID NO: 37360 - DNA, 1440 bp, Escherichia coli; identical to SEQ ID NO: 23690

SEQ ID NO: 37361 - DNA, 699 bp, Escherichia coli
atgcagaatattcatgaagaaagcctgaacgagtcggttaagtcagagcagtcaccgcgggtggtgctctgggaaatcgacctgacggtgcagggcggtgagcggtattttttctgtaatgagctgaatgaaaaaggggaggcggtcacctggcaggggcggcaatatcaggtatacccgattgacggcagtggctttgagatgaacgggaagggcagcagtgcccgcccgtcgctgacggtgtccaatctgttcggtcttgtcaccgggatggcggaggatttgcagagcctggtgggtgccacggtggtccgccgccgggtgtatgcccgttttctggatgcggtgaattttgtggcgggcaatccggaagcggacccggagcaggagctgagagaccgctgggtggtggagcagatgtcagagctgacggccatgacagcctcgtttgtgctggcaacaccgacggagacggacggagcgctgtttcccggtcgcatcatgctggcgaacacctgtatgtgggattaccggggagatgaatgcggttatcacggtcctgcggtggcggatgagttcgacaaccccaccacggatatccgtaaggacagatgcagcaagtgcatgcgcgggtgtgagatgcgcggcatggtggctaattttggcggtttcctttccattaataaactttcgcagtaa

SEQ ID NO: 37362 - DNA, 315 bp, Escherichia coli; identical to SEQ ID NO: 24010

SEQ ID NO: 37363 - DNA, 279 bp, Escherichia coli
gtgggggcaaccggacctcaggggccgaagggcgacccgggggagacgcaaatacggttccgtctggggccgggaaacattattgagacaaacagccatggctggttcccggatacagatggcgcactcatcaccggactgacctttcttgaccccaaagatgccacacgggttcagggtttttttcagcatttgcaggtcaggtttggtgacgggccgtggcaggatgttaaggggctggatgaagtgggcagtgatacaggcagaacaggagaatga

SEQ ID NO: 37364 - DNA, 270 bp, Escherichia coli; identical to SEQ ID NO: 29814

SEQ ID NO: 37365 - DNA, 555 bp, Escherichia coli; identical to SEQ ID NO: 23817

SEQ ID NO: 37366 - DNA, 309 bp, Escherichia coli
atgcggggatgggaatgcctggttgacggggtggccgatattgacgtcagcatgaccggcgaacggtcgttcactgtggtggtccggcagagcagtggccagcgtacggaaaaaacattttccctgccggtgatgctctaccgcggtgtgttcagagccggtgaaacctaccaccccggtgatacggtgacgtgggggggctcgctgtggcactgcaacagtatgaccgaagataaacccggagaagctcattcatcagcctggaccctggctgccaaacgtggacgggatgcaggaggcggaaaatga

SEQ ID NO: 37367 - DNA, 792 bp, Escherichia coli; identical to SEQ ID NO: 37355

SEQ ID NO: 37368 - DNA, 270 bp, Escherichia coli
atgaatattttgagaaagcttatggagcgtctgtgtggttgcggaaagcatgatgactgtgaacacgggcagtcgcttacagtacaactgcgactggggccggcagacatcctggagtcagatgagaatggcattattccggagcaggacagggtaatcacacaggtggtgatactggatgcggataaaaagcagatacagtgcatggtaagaccgctgcaaatcctacgtgctgacgggaggtgggaaaatattggcgggatgaaatag

SEQ ID NO: 37369 - DNA, 1272 bp, Escherichia coli
atgcggcgtggcggttatctgaaaatagcctggtgtcagctcaatccgagacggcgctgccggtgcggcaatccggaacgataccgatgccggatcgccctgctgtccccacgcatttaccgcccggacagtcagcctgtagttccccagcgccagttgcgtgaagcggtatgtggtttccgtcgtcctggccgtactgaccagccgctcactgccatcgtccgctgccacggtcaggcgaagcaggaagctcacccccttcaccaccttcggcgtgtcccagcgcgccagcacctgatattccccgctgtctgcggtgacttcggcagtcaggtgctgcaccgcgggcggcgtgacgccattcaccgtgccgctcaggtcgccgtcaaagtgcgccccgttatccacgatggcttctttttcgggtacatgctgcacggcggtgatggcatacgtgccgtcgtcgttctcacggatactcacgcagcggaacaggcgctggcgcaacgtcggcaacttcagcccccatacgctgtatccggcaacgccgtcaggaacacggctcacttttaccttcacgccgtcggtgacggactggacctccacgctgaccggattgccacttccgtcaaccaggcttatcagcgtggtaccggaggatggcagcgtgatttcacggtcgagcgtcagcgtccgggtctggctgttcaccgccagcacacgcccaccgatgctgatccccgcatagtcatcatcacagatttcaatgacatcgcccggtacatggcgaagcccttctgcgcccacgctgaaatccacggtctgcgtctccagcagctccgttttaatcagccacagcccggcgcggtgtgcctgcccccggctggtacagccaaaggcatccatcttcgtgacgttacgaccgtaacggagaatggcctgcgtgtcctccacaagctctgtcgccgtctcccagccgttatccgggtcaatccagttcacctcaacggcattatggcggtccttgagggcgctgaagctgtagcggaacgacgcgccatcatccggcatcaccacattactgcggttataggtccacaccttatccgacggtcggtcctgcacgaacgtcagcgtctgcccgttccataccggcatacagcgcatcgccgagcagaaatcgctgagaacatcccacgccttacgctgtgtggtcaggtaggcattacaggtgatgcgcggctccgtgccgccaaagccgtccggcactga

SEQ ID NO: 37370 - DNA, 210 bp, Escherichia coli; identical to SEQ ID NO: 23992

SEQ ID NO: 37371 - DNA, 402 bp, Escherichia coli
atgcttttaattcaacctggatttggacttagcatcaaaaaaggccacatgtttggcgagaaagagtcacaacgaaaaatggtgtctatccggttgccatttatcagtatttattggctaaacagggaggcaacaaattattggtatacatgcgccagagcagcatttaacgaccctgactggtttgtgaaaaaccaccacgcagttcgtcaggcaaagagaaaggccaatatgacatacatgaaggcgtatcaaaaagcatggaaagaacaccgcgatcgataccaacaagacatggaaaagcttgaatcagaaaacatggaattaagacgaaagctcggtgaagcaaaacgagacattgatgcttacaagcgactttttaatggtgaaagccatgcttag

SEQ ID NO: 37372 - DNA, 213 bp, Escherichia coli; identical to SEQ ID NO: 37296

SEQ ID NO: 37373 - DNA, 213 bp, Escherichia coli; identical to SEQ ID NO: 29883

SEQ ID NO: 37374 - DNA, 432 bp, Escherichia coli; identical to SEQ ID NO: 24030

SEQ ID NO: 37375 - DNA, 519 bp, Escherichia coli; identical to SEQ ID NO: 37222

SEQ ID NO: 37376 - DNA, 207 bp, Escherichia coli
atggaaaaaatcacaacgggtgtgtcatacaccacgtcagcggtggggacgggatactggttactgcagctgctggacaaagtctctccgtcccagtgggtggcgataggcgtgctggggagtctgctgtttgggctgctgacatatctgacgaacctgtatttcaagattaaagaagaccggcgtaaggcggcgcggggagagtaa

SEQ ID NO: 37377 - DNA, 564 bp, Escherichia coli; identical to SEQ ID NO: 29853

SEQ ID NO: 37378 - DNA, 546 bp, Escherichia coli
atgattggccaccgatgcgccaaagcagcacagcaggatatcgcccgcctgtgcagaggacaggggcacccggtaaaaaccagtcgccgccatattgtccaggtaaaggttctgaccgttgcgccaccagtcatcctcacgctcaaaatccggcagcgttatccccgccagatggtatgcatcccggaacagcgtgtaacagtccgtcaccccgtgctcaaagcgccgtcctgtcagatgtggcacacagcggaatttatgaatttccccccggcagaccagccaccagggcagggcactctttatctgcagccgccggtcggcctcgctcagccagggcagaccaccagggtggctgtgaaccagcgccacaatctccccctgcatctctgcctgcagccagtcttccggcgcaatacgaaaatacgcctccggctctgcggagatattcacgcagggctggtaccgttcgccctccggggtgcctatcacgaagccgcacgactccgcaggcgcacaccgccgggcatgcaccagaatcgctga

SEQ ID NO: 37379 - DNA, 213 bp, Escherichia coli; identical to SEQ ID NO: 3614

SEQ ID NO: 37380 - DNA, 240 bp, Escherichia coli
atgatactgggcggtgtggcccagatgctggcaccgaaggcaaaaacaccggagtacagggcgacggataacggtaaacagaacacgtatttttcgtcactggataacatgattgcccaggggaacccgatgccggtgccttatggtgaaatgctggttggttcacgacggatatcccaggacatcagcacccgtgatgagggcggagacgggaaagtggtggttatcgggcggggatga

SEQ ID NO: 37381 - DNA, 570 bp, Escherichia coli; identical to SEQ ID NO: 37228

SEQ ID NO: 37382 - DNA, 555 bp, Escherichia coli; identical to SEQ ID NO: 23965

SEQ ID NO: 37383 - DNA, 195 bp, Escherichia coli; identical to SEQ ID NO: 37317

SEQ ID NO: 37384 - DNA, 291 bp, Escherichia coli
atgtctgctcagtgggatgccggacattaccggacaactgctgcggcacctcaactccgatttgatgaacgcaatattcacaagcaatgcgtggtgtgcaaccagcataaaagcggaaatctcgttccctatcgcgtcgaactgattaaccgaatcgggcaggaagcagtagacgaaatcgaatcaaaccataaccgccatcgctggactatcgaagagtgcagggccatcaaggcgaagtatcagcagaaacttaaagacctgcgaaacagcagaagtgaggccgcatga

SEQ ID NO: 37385 - DNA, 546 bp, Escherichia coli
atgattggccaccgatgcgccaaagcagcacagcaggatatcgcccgcctgtgcagaggacaggggcacccggtaaaaaccagtcgccgccatattgtccaggtaaaggttctgaccgttgcgccaccagtcatcctcacgctcaaaatccggcatatcaattcccgccagatggtatgcatcccggaacagcgtgtaacagtccgtcaccccgtgctcaaagcgccgtcctgtcagatgtggcacacagcggaatttatgaatttccccccggcagaccagccaccagggcagggcactctttatctgcagccgccggtcggcctcgctcagccagggcagaccaccagggtggctgtgaaccagcgccacaatctccccctgcatctctgcctgcagccagtcttccggcgcaatacgaaaatacgcctccggctctgcggagatattcacgcagggctggtaccgttcgccctccggggtgcctatcacgaagccgcacgactccgcaggcgcacaccgccgggcatgcaccagaatcgctga

SEQ ID NO: 37386 - DNA, 753 bp, Escherichia coli
atgaaaaacggtcagccagttaataatcaatccgttacattctcaacaaactttgggatgttcaacggtaagtctcaaacgcaagcaaccacgggaaatgatggtcgtgcgacgataacactaacttccagttccgccggtaaagcgactgttagtgcgacagtcagtgatggggctgaggttaaagcgactgaggtcactttttttgatgaactgaaaattgacaacaaggttgatattattggtaacaatgtcagaggcgagttgcctaatatttggctgcaatatggtcagtttaaactgaaagcaagcggtggtgatggtacatattcatggtattcagaaaataccagtatcgcgactgtcgatgcatcagggaaagtcactttgaatggtaaaggcagtgtcgtaattaaagccacatctggtgataagcaaacagtaagttacactataaaagcaccgtcgtatatgataaaagtggataagcaagcctattatgctgatgctatgtccatttgcaaaaatttattaccatccacacagacggtattgtcagatatttatgactcatggggggctgcaaataaatatagccattatagttctatgaactcaataactgcttggattaaacagacatctagtgagcagcgttctggagtatcaagcacttataacctaataacacaaaaccctcttcctggggttaatgttaatactccaaatgtctatgcggtttgtgtagaataa

SEQ ID NO: 37387 - DNA, 429 bp, Escherichia coli
atggcgattattccgttctttgtgaatcgggtagggccaaaaaatgcattacttatcggtgttgtgattatggcgttgcgtatcctttcctgcgcgctgttcgttaacccctggattatttcattagtgaagctgttacatgccattgaggttccactttgtgtcatatccgtcttcaaatacagcgtggcaaactttgataagcgcctgtcgtcgacgatctttctgattggttttcaaattgccagttcgcttgggattgtgctgctttcaacgccgactgggatactctttgaccacgcaggctaccagacagttttcttcgcaatttcgggtattgtctgcctgatgttgctatttggcattttcttcctgagtaaaaaacgcgagcaaatagttatggaaacgcctgtaccttcagcaatatag

SEQ ID NO: 37388 - DNA, 429 bp, Escherichia coli
atggcggaggatttgcagagcctggtgggggccacggtggtccgccgccgggtgtatgcccgttttctggatgcggtgaattttgtggcgggcaatccggaagcggacccggagcaggagctgagcgaccgctgggtggtggagcagatgtcagagctgacggccatgacagcctcgtttgtgctggcaacaccgacggagacggacggagcgctgtttcccggtcgcattatgctggcgaatacctgtatgtggacctaccgctctgatgagtgtggttacacgggcggggcagtggcggatgagttcgacaaccccaccacggatatccgtaaggacagatgcagcaagtgcatgcgcgggtgtgagatgcgcagcatggtggctaattttggcggtttcctttccattaataaactttcgcagtaa

SEQ ID NO: 37389 - DNA, 429 bp, Escherichia coli
atggcggaggacctgcagagcctggtgggggccacggtggtccgccgccgggtgtatgcccgttttctggatgcggtgaattttgtggcgggcaatccggaagcggacccggagcaggagctgagcgaccgctgggtggtggagcagatgtcagagctgacggccatgacagcctcgtttgtgctggcaacaccgacggagacggacggagcgctgtttcccggtcgcattatgctggcgaatacctgtatgtggacctaccgctctgatgagtgtggttacacgggcggggctgtggcggatgagttcgacaaccccaccacggatatccgtaaggacagatgcagcaagtgcatgcgcgggtgtgagatgcgcggcatggtggctaattttggcggtttcctttccattaataaactttcgcagtaa

SEQ ID NO: 37390 - DNA, 513 bp, Escherichia coli; identical to SEQ ID NO: 37232

SEQ ID NO: 37391 - DNA, 588 bp, Escherichia coli
atgcattatggcaaagttaaaattgtcgatataagcgaatccgtcgtaagtcaatatctggaaagtcagcataagctgacgaggactcgtctgactgacattccgctttacctgttgctggaacccaacaatcctgcgttggctgcggctttaattaccagccagggattttccggagaggtcacggatatgtttcttatgatggcctgcctgtctctgtttgaaacagatgaacggatgtcattgtttttaagtggatgtttatccagcataagtgccaaagtcagggcgataattcagacagatatatcagcaagctggacgcttggtgcgattgcgttacgcctgcatatgagtgagagtttgttaaagacaaaactgaaaaatgaagggggcatgttcagtcgcttgttgctggaagagcggatgcgtgttgctgtaaatatgttatgttcccggtatggatatggacaggctgtagcagaaaaatgtggttattcaagccggtcctactttatttctgtatttcaccgctattatggcttcccgccagacagatatgtatccaggcaagggcttgattattga

SEQ ID NO: 37392 - DNA, 147 bp, Escherichia coli; identical to SEQ ID NO: 29858

SEQ ID NO: 37393 - DNA, 168 bp, Escherichia coli; identical to SEQ ID NO: 29859

SEQ ID NO: 37394 - DNA, 270 bp, Escherichia coli; identical to SEQ ID NO: 24012

SEQ ID NO: 37395 - DNA, 270 bp, Escherichia coli; identical to SEQ ID NO: 23985

SEQ ID NO: 37396 - DNA, 366 bp, Escherichia coli
gtgctgggggcagcagccatcgtgggctctttcttcaccgccggcgcaacgatggcgttgtggggcgcagccctgagtgccggagggctgactgccaccacgatgctgttctcactgggtgccagcatgatactgggcggtgtggcccagatgctggcaccgaaggcaaaaacaccggagtacagggcgacggataacggtaaacagaacacgtatttttcgtcactggataacatgattgcccaggggaacccgatgccggtgccttatggtgaaatgctggttggttcacgacggatatcccaggacatcagcacccgtgatgagggcggagacgggaaagtggtggttatcgggcggggatga

SEQ ID NO: 37397 - DNA, 522 bp, Escherichia coli
atgattacgctggataatacgccgacttccggtaagcagtcgtacgcaaaaggttcatccattgctttggtcagcccggttgaattctcaacctcttcatggcgccgcgcggttttgtctctcgatgaacatcagaaagcatggttgctttggtgttacagcgaaagcgttcgatgggggcatcaggtcaccataacgcaatgggcatggagcgagtttaaagatttgttaagtaacagaaaaattgcaggtaagacactggatcgcctgaagacgttaatctggctggctgcacaggatgtgaagagcgaacttgcagggcgtgaggcctatgaataccagacactggcatcattggtgggagtgacaacaaaaaactggtccgagacatttactgaacgctgggttgcaatgaagcacatttttctacagcttgatagtgatgctttattgcttgtgacgagaacacgttcaaaacaaaaggcagcatttttacagcaaaatattgcaaaactggattaa

SEQ ID NO: 37398 - DNA, 375 bp, Escherichia coli
atggctctgcctgagcctgagtttacacctgctgagcttgccgcattccgggattactggatggcggaggggaaggttttcacgcaggttcagtgggagcagaaatttgcccgtcacgtgcagcacgtcagggcacaggtaaaaccagtcagcaagggggtaagccatgcagcaccaggtggcaccgcatcacgggcagttcaggaaattcgggcagcacgtgaacagtgggaacgtgaaaacggatttatcagcaacggaaacggcctggaagctgtgggaacttatgggggaggtgtattcgaaccgctggacccagaagaacggggctgcgccgtcgaagctctggattgctcagattggcgcgatgactga

SEQ ID NO: 37399 - DNA, 168 bp, Escherichia coli; identical to SEQ ID NO: 29864

SEQ ID NO: 37400 - DNA, 390 bp, Escherichia coli
atgatggcatgcctgtcgctgtttgaatcagatgaacggatattattatttttaagtggatgtttatccagtataagtgccaaagtcagggcgataattcagacagatatatcagcaagctggacgcttggtgcgattgcgttacgcctgcatatgagtgagagtttgttaaagataaaactgaaaaatgaagggcacatgttcagtcgcttgttgctggaagagcggatgcgtgttgctgtcaatatgttatgttcccggcatggatatggacaggctgtagcagaaaaatgtggttattcaagccggtcctactttatttctgtatttcaccgctattatggcttcccgccagacagatatgtatccaggcaagggcttgattattga

SEQ ID NO: 37401 - DNA, 309 bp, Escherichia coli; identical to SEQ ID NO: 24051

SEQ ID NO: 37402 - DNA, 180 bp, Escherichia coli; identical to SEQ ID NO: 23969

SEQ ID NO: 37403 - DNA, 183 bp, Escherichia coli
atgaagcatcctcacgataatatccgggtaggtgcgatcactttcgtctactccgttacaaagcgaggctgggtatttcccggcctttctgttatccgaaatccactgaaagcacagcggctggctgaagagataaataataaacgaggggctgtatgcacaaagcatctcctgttgaattaa

SEQ ID NO: 37404 - DNA, 219 bp, Escherichia coli
atgtcagtcagtgtcaacgggggaacgccgccttataaatacgcctggaagaaggatggtcagccggtcgagggacagactactgacactttcagtaaagccaatgcgcagtcaggtgataagggggcttatacctgcatggtaatggattctgcagaacagccgcagagcattacctctgatgcgtgtacggtaacggttaatggtgcgggcggataa

SEQ ID NO: 37405 - DNA, 1059 bp, Escherichia coli
atgtacgaacaggattctcttagcgcactggatgcgattaccgaagctcaacgcattgcctttgcccctatgctttttcaaacagcactctgcctacgtaatgcgggtgtactttcatatctggatcggcaaggcaaacatggcgcaacgctggctgatatcaccgaacatagccatatcaacgaatatgctaccagcgttctgttagatatgggcttaagcgggcgaattattacctgtaaagagggaatttattacctggcgaaaatcggtcattacctcctgcatgacactatgactcgcgtgaatatggatttcacccaggatgtctgttaccaggggctcttcttcctcgccgattcactcaatgaaggaaaaccttccgggttaaaagtatttggcgactggtcgacgatatatccggcactttcgcaattaccagacgccgctcgtgaaagctggtttgcgtttgatcattactattcagatggcgcatttaacgccgcactgccttatgtattcgccaacaaccccacaacattgtacgatgtaggcggcaatacgggtaagtgggctttgcgttgctgcaaatacaatgaaaacatcgccgttacgttattagatctgccacaacaaatcgtactagcgaaagaaaatatcgcgaatgcaggtttttctgatcgcatagatttccatgcggtggatatgctaagcgatgccccattaccgggcgaggctgatatctggtggatgagccaatttttagactgtttttcacccgaacaaataattagcatactcagcaaaattgccagcgtaatgaagcctggcgcaaaagtttgcatcatggagttgttctgggatgcgcagcggtttgaagcagcatcgtttagcctgaacgcgtcctcactttattttacctgcatggcaaacggtaacagccgtttctatagtgcagagaaattttacgactatctgaataaagcaggattccaggtagcagagcgccacgataatttaggcgttgggcatacacttttgatatgccaaaagaaataa

SEQ ID NO: 37406 - DNA, 366 bp, Escherichia coli
atgaagcagaccttaccgcttgcacgctggctgactgcgccacgccctgatgacacacccattgcgtggctgaacgaaagtacctggacgctgggcgatttgcgtcacgatgtcgcgcaacttatctgccgcttgcagcaacagccgggtgaacgctgggcgctgtgctttgagaacagctatctgtttatcgttgccctgctcgccacgctacacgccggaaaaacgccggtgcttccggggcataaccgtgttatccagcttaacgagcaacgtgaactttttgatggtgtgcttagcgacagcgaacttaactggcaaggttcattgctgttggtagcaagttctccacaaatcgcgacataa

SEQ ID NO: 37407 - DNA, 123 bp, Escherichia coli
atgaacggactcacggcaacgggtgtcaccgtcggtatttgtgcagggctttggcagttagtgtcttcacatgtcgggctctctcagggatgggaattattaggaattattaggaattattag

SEQ ID NO: 37408 - DNA, 393 bp, Escherichia coli
atgggaagaccaagaaaaaataaaaaagataatgtactgccaccgcgggttagatcgaatggttacagttacgtgtggaaacccgaaggaagtacaagaagtatagggctaggaagagtgcggaaaaccagcgtagctaaagtctggcaaaattatgaactggaaaaagcaaaactccacaacataatgaccgtagctaaattgtggcacatgtttatggactcccctgcatttacagaactggccccccgaacccaaaaagattatcgacaacatcagaaggcgttgctgatggtattcggaaaagtgcttgctgataatgtcaaaactgagcaggtaagaattttcatggataaacgagggcttgggcaaatcatgaactggcaagcctga

SEQ ID NO: 37409 - DNA, 174 bp, Escherichia coli
atgaagaataaccgtgcgtgggcgcttatcagtggtctgatattgttcagcggaacggccccagctgccgataacctgcattttaccggtaatttgcttggtaaatcctgtactcctgtaatcaatataccattacctgcgataccgctgtccgtgaccctcaaatggaaatga

SEQ ID NO: 37410 - DNA, 729 bp, Escherichia coli
atgagacactttatctatcaggacgaaaaatcacataaattctgggcggttgagcagcagggaaacgagctgcatatcaactggggcaaagtcggcactaacgggcaaagccagataaaaagttttgcggatgttgcagcagcggaaaaagcgaaactgaagcttatcgcggagaaaacgaaaaaaggctatgtggaaaatgcttcagcaaacgtgcatatcccccccatcaccaaagccactcctgaagttgaaacttcccctgagagtaaaaaccaacgcccgtggctggctgatgatgcagttattccggtaactgacgatattaaccgatttgcttttcctcatcgctctcgccccagagagatcaattatctgcgcaaagacggtgagatatggaagcgtattgcagataacaccagggcatatgatcccgacaacaattaccgctcttatcctgaaaactggcagcaggcttttgctgagttacaaaggcgaattctggataatcaacagacagggagtgcgcaatctgatgcagcattgctctggagtttttggaactcttactctgcagatgaactggtcgatgacttagtcattcgctgtggtctggaaagcgccgttgaaatcgtcctttttgcccttcaactcaaatataaaccagtaaaaggcgcagtaaccaccatcattccacctaatcacgaagcagaatcgctacctagttag

SEQ ID NO: 37411 - DNA, 1206 bp, Escherichia coli
atgagcatggttgaatggataagccacgagaaaaaagatagcctgatactatttgtacatggattaaatggtggtttggaaacatggaactttaataaagaaacttcatttccaaaactattagcagaagatgaagacattggcaatgtatttgatattgcatgtttcaattatttcaccaaatttacacaaacgtatgctaaaacgtcaggattatgggctcgtattttctctaagaaaaataagttagagagaaatttaccaactgatgaaatagctgagttattgtatactgagattagggtaacgctaagtgattactctcgaattataataatcgcccatagtatggggggggtaatatcaaaaaatctaattctaaaaaaagttgagcatgaggaacaatctaatataattggattcatttcgttagcagtccctcactttggtgctaaattggcgaatataacttcaatggtatcttcaaatgctcagttagtagatcttggattgttaagtgaagcgaccgatacgttgaataggcgctggataaattgtagcaaaaaacttcctatcactagatatgtttatggttctcatgacactatagttgataaaaaaagcgcattaccgatggatagtgaacgaaataactcaattgcagttaatgaagggcatagctcaatttgcaagcccgaaaacagctcgtctacagtgtttgttgcggtaaagcaatttattcagcagataaatttagaagcacccaagaagatatgtgttgagcgtttttctgatgagaaacaatatgataatgagtatttcgtcttaaaaatgattgtcgcagatatacatcaggatatcgctatgcatgcaaaggaatattattataatgctgagcttgcgagaaatatttttacgagtgattacgataggaaactacttggtcatttgtattctaaaataagggagatttaccaggaagagtatgagcaatatatcgcgaattcaatttccccagataaatttattgctgctgttcatagacgaatagcccaagaggataagtcgtcgttagattctcttataaataagaaaggaatgttgcatcaactggctaacaaaaatgacagggatattgtctggtcatctgaaaccagcgtagaaactttggagcaattacggcgaggtaatcatgaagaaaaataa

SEQ ID NO: 37412 - DNA, 207 bp, Escherichia coli
atggagggagtggttagccaagaacaagccggacaccgcgccagtaaaaacaacagattcgtgcttttcttcagccagggtaagaactccacggggattaatccgtcgtctggtggaatcagtcggcagcatgacgaacaggccgcgcagccggacaccaccagcagaaggtattatgattttcgtaatacctttagcaaagcgtga

SEQ ID NO: 37413 - DNA, 147 bp, Escherichia coli
atgataacggttaacctggaaaaaattccggtgaatatttgccctgacagttcccatatcggcggcacacctgaaaaaaccgtgtacacaaggatgtacacaataaaaatcgttattacagaaatcccagtaatgacaagcctttga

SEQ ID NO: 37414 - DNA, 222 bp, Escherichia coli; identical to SEQ ID NO: 23761

SEQ ID NO: 37415 - DNA, 123 bp, Escherichia coli
atggcatcaaaaaatactggcttaactgccagtagcaaaactcaccccgaatttatgtgcggggatatttaccgcaatgaatacggtagccacatgacgatgatcagcagaggtaagaaatga

SEQ ID NO: 37416 - DNA, 192 bp, Escherichia coli
atgcagcaaataacactggcagaagcctcactgcaagcgcaacaggtcgaagtaatcagccgcatgattgaacgcaaccacgaagaaatagacgaccatgacctttctgttattgcaggacttatcaaacaactttccagcaatgtggcggtgtggttaatgacggaggaagaaaaacgcggcgaacaataa

SEQ ID NO: 37417 - DNA, 210 bp, Escherichia coli
atgtgtgatttttccgatatgactgttgatgaagcagcaaaaagcgcaatgcaggcagaacttatttgttctctgatgatgggtaacacaggtggaatgactgagggtgagattgagtcattgctcgccctgattaagcagcttacaggtaaggcaggtagctggctgattgctgcatcgggtgatgatgcaatatgcgtcaatgactga

SEQ ID NO: 37418 - DNA, 1026 bp, Escherichia coli
atgcctgacatccgcaacgctgccgccctgtacatcgacacggcggatacgttcgcacaactgagcctcaaccattctgattacatgcaccatatcgtgagccatttcgccgctgagcgcatgaaacacgttaagcattatcagaaggaggttttattaaattatcgcgctggtggccctgtatggcgcgaatatccgcatgatgcaggaatggcaggcaaaacaaaggcgaccacggaagggtcgccaatggagataaaggaaatcaagcgcatcaccaactatgccatgagtgtagctggtggacaaggctatcagccaggcggtcggtttttagtggcttttaaccgccgtgggtatttctcgacaaaatcttcaagggcaaatcgtgttggcctggtgagtggcagtggattaagtaacaacctcctttgccgttgtgctttttcgcgctgtcgctcaagtatggataatgcgatttcctgtaattcttcatttgtcattgtctgtacccgtaaagcggtgcgctgtagtacctcatatcacagcgcaggtattttttatggttgtaatttgcgtgatgattcaggtcgctttgcgacacactgcataaacataaataacgtgatgttattatgtgctttcaaagaaaacgcaggtatttttcgcacaaacttctctcgcaacacatccgaccacttaagcaaaaaagcggcatatactgaggctatcccttataaaacggggatcgggattggcctcccgctggagttagaggcgatacacgacgcgccagcgtctttttttttgtatcggcgcacacgcacacctcaacaatggtgggctgtatggaacttccttcgggaaggctggtttcctctaacaccagtaaggccaattccgtacagtccaccgccagcaagattggcctcttgggcggtgggtataatcccaaagtcagaggagcctttcacatggctgtatccgcacgcccttactttgtctggcgctttatgcagtgcctga

SEQ ID NO: 37419 - DNA, 1470 bp, Escherichia coli
atgcttcaaaagctagacgtcgcagacagcgtgcgtcgcgagctgtctccccgtaccgcgcgtaaacacaaagcagagttcggccagttcatgacgccttctggcgtggcccgttttatggcctccttgtttccaccgagcacaatgaaaacttgccgtctactggacgcaggcgctggtttaggcgcactgtcttgcgccttcctcgaccgttggctggttggcgagtttggctttgagtctgtcgaggcaacagcctacgaaatcgacaaaaagctgtgtggtcaccttgcgaagcacttaaccgggtacaggagagtgacgccccgcatcatcgaaggggattatattgagctggcaaccgccgaaggtctacaggatcgaggttatacccatgcaatacttaatccgccttacaagaagatcaatagccagtcagcccaccggcaggctcttcgcactgtcggtatcgagacggtaaatctgtattccgcctttgttgcactggctgtaggtgaggttgcacctggcgggcagatagtggccataatcccacgtagtttctgcaacggaccgtattaccgtccgttccgtaatttcatacttgagcgggcagcaatccgccatattcatttgttcgaatcacgtagcaaagctttcagggatgacgatgtgttgcaggaaaatattatcatccgcctggagcgtggaggccgtcaggaggctgttacagtcacaacttcgaccgatgatagcttttttgacctggtcacctacgaacacccatttgaccagattgtgtacccggacgattcggagcggtttattcatgtgccgaccacgctcgagaaaagcaccattgagttatcatctgccgtacaatgttcgctggctgatattggcgtgaaggtatcgaccggaccgatagttgatttccgactgaaagctcatttgcgcagcatgccagaagaaggaactgttcccctgatctacccgagccatttgagtatgagtagcactgtctggcctgtggaaggtttgaagaaacccaacgcaatcatgcgcaacgacgagacagaaaagtggctttacccgaacggtttttattgtgtggtgcgtcgtttctcgtcgaaggaggaaaagcgccgagtggtagcaagcgtcgttgatcctgctaccttcagtgagtattcagtgttgggatttgaaaatcacatgaacgtgtttcatgagaacaaacatgggttacccgaggcgctggcccgtggcttggccgtgttcctgaacactaccgcagtggataagtatttccgtcgcttcaacgggcatacacaggtcaatgcaaccgacctcaagatgattaagtacccaagccgtgacactctgatagagcttggcaagtgggctatgcaacaagaaactctcacgcaagaacatattgacgctaagctaggagctctgactgcatga

SEQ ID NO: 37420 - DNA, 954 bp, Escherichia coli
atgaacaaccaaaatgattatattgaggccgctcagcaaattatagcatccttaggcctgcccagagcgcagcagaatgagcgttctgctttgtgtttgctggcactcctgaacctcacaccgggaaaagcatgggccgacgcggaaaatccgcttgtgggcattacaccaatcatgaattgggttcgggagcactacggcaaggtctacgcacccaatactcgtgagacattccgccgccagtctatgcatcagttctgcgctgctggagtagccctctacaatccggacaagcccgatcgcccagtgaacagcccgaaggctgtttatcagatcgaacctgctgctctgtccatgctacgcactttcggcagcccggcatggcacgatagccttgcaacctatttagccgagcgtgaaacgctggttacccgctatgctaaggagcgcgaacagaatcgtatccctgttgaaattgctgcgggccagcaaataaccctcagtcccggcgagcacagcgaacttatccgtgccataatagaggacttcgccccacgttttgctccgggtagcgtgctggtctatgctggcgacactggcgaaaagtggggctacttcgacgctccactgctggccgggctaggtgttgatgtggattcacacggtaaaatgccagatgtggtgctacattttactgcgaaaaactggctgctactggttgagtctgtcaccagtcatggaccggttgatgggaagcggcatgctgagcttgccaggctgtttgccggatcaacagccggacttgtctatgtgaccgcttttccaaatcgctccatcatggggcgatatcttggtgaaatcgcatgggaaacagaggtatgggtggctgatgcaccttctcatcttattcacttcaacggagtgcgatttcttggcccctactctactgaatga

SEQ ID NO: 37421 - DNA, 444 bp, Escherichia coli
atgcaatttaaagatttaccagaggatattcagaaaatagctgcggatacgcttaaagcccatttatcggtgcttgatttaacaaaggaaccaaaggcgaatctggaaaatatatcccgtaacgtgcgagatgtttttgtcgggctgtatgcttatgacaatgaaaagcacgaggaacatattcaaaatggttgcattaataaatgtcaacaaaatatcaaacttcctgttgctgataaaacagagcagaaaacagatgtattagtattctggaataccgttgaggctatcgccaggagcacgatgttggagtttaacaacatcaatcattccgggatcgacactcatcaatcatcacatcgtgaggggttttccattcttctaactctgttacaagagcaaggcgaatatcctcagccgacatcaaacgatactgagcaatag

SEQ ID NO: 37422 - DNA, 702 bp, Escherichia coli
ttgatttttccgtttggtcttaatgaaagtcagttgctggctgtcgaacgggcattttcctcacagatttcagttattgaaggaccacctggaacaggtaaaacacagactatactcaatattgttgctaatatattaattcagaataaaacagtggcaattttgtccaataataactcagctgtcagtaatgtttatgaaaagatggacaaacagcaactgggatatgtgatggcacgactggggagtacggagaacaggcaacagtttttttcaacgtcgatttcgcgttctgaggaagtcttacctgactcaccgtctgcaaatgcgattgatgatgtacttcaacaagtgaaaaaacacctgaatgccattaaccaggtcgcttcgttaaaagcagaaattaatgagctgaatattgagtataaatacctgcagcaatggcagagtcagaatcttcgaccggaggagcttttttctcacaaataccgattttcctcacaaaaaacaaccgacctgatggcttatattcattacctttctgacaggcggattggattcagaaacagaattgatttgttgttaaacttcatgatactgaaagtcaaaccattgatgattccggagagaaggctggcgctatttacttctcttcagctttcttattatgaaaaaatatccgggaaaaacaaatttctctga

SEQ ID NO: 37423 - DNA, 1158 bp, Escherichia coli
  misc_feature (1120)..(1127): n is a, c, g, or t
atgcgcaggttaagttttagaaatatatataaatttgtttatgtaagtcaggatgatattggtagtaaatctttcttgcgattgggtgattggtcccgctacgcatttacgaaagaagtttttaaatacatgttcaatgtgttggatgaaagcatcgccagactccaaggtgaaatatctgcaaaaagtagtttagtaacggaattaaataggaagtatcagataatatctgaatttcttcgcgatacagactatgaaacgattgaatcaattgatgatgagattaataggatagatcttgttttagaagaacttgttgcaggtttgtctgctctcgataaaaatatgaaagcggattccatacagtatacagaattgaaagatgctcacaattttatttcgcttaaatacaaagagtgcatattaaatattactgcgcttgaggataagattgataaatattcgcggttaaaaaatgactatgataatgatattgaaaaactcaaagcgattaaaacagcaaattctcgcattggtgtattggataaggaagtattttcctgtccagtctgtgatagccacattaaaatagatgattctgattttccatttgaaatttcatcagaaaaagatcttaatgaagagttgaattcacttagtcgacgtagacgaaatattaatgacatgatctcagaaatgtcatttaaattaaaaaaagaatcaggttataaaaaggaattagatgaacgacttgacgagttgagagaattgattgacgaagaaagccagtcaatgattacaccattcttgactcagagagatttttatattaaagagatctcaaaaaatgagaaggttagggagcagttagtaaaagatttgaaggttagaaaccagcaagaggaactgcttgaaaagtatcaggtactgagaaaagatattgaagcattaactgaacgcttggaggcgttaaagaaaaacgcacctagcatggagggcattttacaaggtttgggtgatagatttagtcagtatttgaagggtattaatatcaaaaacagaacggggataaaaatctctgaaagctattacattcctgttataagagaaaaagaatatnnnnnnnncttctattgggtatcttttgtctattcttga

SEQ ID NO: 37424 - DNA, 315 bp, Escherichia coli; identical to SEQ ID NO: 24010

SEQ ID NO: 37425 - DNA, 315 bp, Escherichia coli; identical to SEQ ID NO: 23637

SEQ ID NO: 37426 - DNA, 177 bp, Escherichia coli
atgaaaaataatgtaatgaaaaatggaactatcgacagccaggctctgttgaaaatggtgaatgaagcgcggagactgtgcggtgaaaaagaagtacgcaacaacgacttcattgcacgcatcaaagatgaacttgatgggggggggttacgaaattttcgtaacccccatggataa

SEQ ID NO: 37427 - DNA, 240 bp, Escherichia coli
atgaacatcatagcaaggttcttttatttgataattttctgcatggcaacatcaggatgcactaccactacgaaaataaatcgcggagatgaaaaggaacagtacatcattgcctgtggtgccgctacaccatggggagtatgctatgataaagccaatgccctatgtaaaaatggatataaagacattttaaaggaacagggatttaacaggaaagaattaaccattgagtgtaaataa

SEQ ID NO: 37428 - DNA, 258 bp, Escherichia coli
atgcgtacaacccaacaattcagcattacattaaccaacgaaatggctgacatggtgcgcgcccgtgtggcttccggtgcatacgcttcagaaagcgaagttattcgtgaagggcttcgtgcactgaatgaacgcgacaaagcaatggaagcgtggttaatacactcagccgcgccgccactcgacgctattcgtgagaacctaggcaaagggcactccatttcacaggttcgctctgagattcgcgcccggaactaa

SEQ ID NO: 37429 - DNA, 987 bp, Escherichia coli
atgtcttctgtttctacatcgggttctggcgcacctaagtcgtcattcagcttcgggcgtatctgggatcagtacggcatgctggtggtgtttgcggtgctttttatcgcctgtgccatttttgtcccgaactttgccacctttattaatatgaaagggttgggcctggcaatttccatgtcggggatggtggcgtgtggcatgttgttctgccttgcttccggtgactttgacctttctgtcgcctccgtaattgcctgtgcgggtgtcaccacggcggtggttatcaatctgactgaaagcctgtggattggcgtggcagcggggttgctgcttggcattctctgtggcctggtcaatggctttgttatcgccaaactgaaaataaatgctctgatcacgacactggcaacgatgcagattgttcgaggtctggcgtacatcatttccgacggtaaagcggtcggtatcgaagatgaaagcttctttgcccttggttacgccaactggttcggtctgcctgcgccaatctggctcaccgtcgcgtgtctgattatctttggtttgctgctgaataaaactacctttggtcgtaataccctggcgattggcgggaacgaagaggctgcgcgtctggcgggtgtaccggttgctcgcaccaaaattattatctttgttctctctggcctggtatctgcgatagccggaattattctggcttcacgtatgaccagtgggcagccaatgacgtcgattggttatgagcttattgttatctccgcctgcgttttaggtggcgtttctctgaaaggtggcatcggaaaaatctcatatgtggtggcgggtatcttaattttaggcaccgtggaaaacgccatgaacctgcttaatatttctcctttcgcgcagtacgtggttcgcggcttaatcctgctggcagcggtgatcttcgaccgttacaagcaaaaagcgaaacgcactgtctga

SEQ ID NO: 37430 - DNA, 393 bp, Escherichia coli
atgcgtgatattcagcaggttctggaacgatggggggcgtgggcggcaaataactatgaggatgttacatggtcgcccattgctgccggatttaagggactgatccccgaaaaagtaaaatcacgtccacagtgttgtgacgatgacgcgatgattatatgcgggtgtatggctcgccttaacaggaacaacagcgatctgcatgacttgctggttgattattacgtgttggggaaaacgtttatggcgctggcacgtaagcatggatgctctgatggacatatcggaaagcggctacagaaagcggaaggtgttgttgaaggcatgctgatgatgctggatgtgaagctggagatggatcggtatgttgagcgcgattcagtgacggcataa

SEQ ID NO: 37431 - DNA, 1137 bp, Escherichia coli
atgtataaaataaggcttcagaaaaacataactatattatttatttttattgtcatgctgtcatttagttactggcttgctaatagttttggtatgaagtggggcgtacttgcaattattggttttttcttgggttttacattgtcttttagtcgatttgggatagttgcaggttggagagacatgctgaccatgagcaactcatactatgtaaggattcacttaattaccatcgctcttgaggtggttttgtttacactctgcctgtcattcagccatgctttttttggcgggaagatggttgggaatattacagcaataagtatcccttttctggtgggtgcgtttgtttttggtattggaatgcaaattgccggagcatgtgcgtcaggaacactctattgttgtggtgagggccgtccggcattttggtttgttttgtgctgctatggtatagggacattaattggcaatcactataagccagtgctaaaaccaatttttcccggagaaattattaccaccaaagatattactggcggcttgtggtcaggcatgttattaagtcttgtatttatattgatactataccttgttttttcatacattgagaaaaaacgcaccgggaaaatatctaaaattatcaccagtggtggttctttctggaaagataacagatttactgttctttctggcgggttaattatagctgtactgaactcactggttctggcaatgcacggttcagcatggacaattaccggagccatctacgatacatccttgcatactgcatcatttcttggggttttatctgataattctgttattactaaaccattatttcagaatcctatggttgggatgttcgtaggtggattgctgggggctgcaatggctactgtactaacgggaaaaaggatcaaagagcctctgactcgtggaagcataatggcaggaataactggtggattgcttatgggaacaggaggagcgtatgcttcctgtaatttgggaggattcttcgatggaactgcatcaggaagtttacatggatggttgtggatgtttatggctctggctggcagtgtaattgggataaatcttcggagattttttatttgttcacgctgttaa

SEQ ID NO: 37432 - DNA, 294 bp, Escherichia coli
atgtatgcgccgtcagggcagcagcgaccagaacgcttaaagatatggggattgaccagaaaaaagaagatcctttacggggcacgaagtacaggggtgaaacagggcgaagagacggaagttaatatggacacaataactgataaaaaagccgaacaactggaatctcagggactatggcgaagagccgccgctcgttggcttgacgtaatgaaagaggcccacaccgatccgcagcgagaacatatagccagacggcgggaaatatgccttgcgaacttcaggatgctgtaa

SEQ ID NO: 37433 - DNA, 387 bp, Escherichia coli
atgagactgacgcaatacaaaaaagagatcctcagttacttcactcccgacaatctggcgtgggttactgccgaaattggcagtccgccgtttgatgtctccggtgtggcttacctgctgcatggtatggattcattcaacagccggtatcagatcgaatcaacaaggcgcacgctggaagctatggtgcgtgatggtcttcttgagcggattaatgtgtatgagcgtcgtgagggcgctggtgatggtgttcgtcgaaaggtggcgcgttatggcctgcctggtcattctgttgtggtgcgtgacggtgagggccggaacggtgcaattgacggcgaatgtatacgcatcaatgctacagatgtggtgctggtggaggggcaataa

SEQ ID NO: 37434 - DNA, 291 bp, Escherichia coli
atgacggacagcgtggcacagaaacttgaggagcgcggtttatggcgacgtgcggcgacccgatgggctgaggttcttcttcacgcagaaacggacagtgaacgcgaggaagctgccagacgtcgggcgatatgcatcagtaaaacccgtcgtatgcctgagcagttcgtcacctttggcgatgtgaaaaaggccgcagacagaacgctgaaagagatggggattaatccgcaggatgaatggagaaattacagcttcagtgatgcaggcgacgatttagcgctaccgtga

SEQ ID NO: 37435 - DNA, 417 bp, Escherichia coli
atgaaccagcagaccacacaacaggaccagaccacacgtaaaccatcacggcgcataccgtggcagcacatgacaaagcggcagcgaaaaaaccgcaggaggataaaccgactggctgagtactggcctgaactgtttggggcagagaatataaaaccccttaaggctggcgtgatacacgatatgttgcaggacgcgaaggcgcgggaactggcgattggtcatggcgtattacgtggcgcattaacctcatacatccacacgacgcgatacctgaaagccattgtcgctggcggcgcacggtatggactgaacgggcaaccttgcggtgaagtcacggaagaagataaatcagtagccagcgaactactgaagcggagactggagcagatgaagcagaaaaacagtcagcagtaa

SEQ ID NO: 37436 - DNA, 450 bp, Escherichia coli
atgacagagaaacacgccaaaaaatcacattcacacgctatcgatttaaccgaaccggaatctgttgtgaggttcgtatcggtacgaggcagagccacgctttatatacctgacgaacatctgcatcactgcgacaaacataaacttccgatcctgattgtctggaagcgaacggtatacgccgatgtgacatggctgaatgattcgctgatgttgatacaccgtgacctgtttgaacgtgaagagttccgacgggatattgaagagcgggcaggaaaaatctatgagaaatatgcagcaaacagcaaaagagcagcacgggcgatcacttaccatttcatgacgctgtatgacctgaaagcggaagatgcagaaaaagcggcatgtgatttattcgatatgacaatgggtattatccaagagtaccggaacaaggagcgcagaccatga

SEQ ID NO: 37437 - DNA, 798 bp, Escherichia coli
atgctggcaggtaaggccaacacggtatcggcaagcatgaaggcactggaggatgcaagggaacgcgcattagtggttggcttttcactgattattctgccggatatgacccgctacgcgggtgatggtgcagggataaaggccattacgggcggtgacaaggtggcaattgacccgaaacacaaagcgccatactcaacgcgtattccggcggttgtgctggcggttaacaacagcgccatgtcattcagtgaccgcagcggggggatctcacgtcgtcgtgtgatattcaatttttcggaggttgtaccggaaaacgaacgcgatccgatgctgccggaaaaaatagaaggtgagcttgctgtagtgattcgtcatctgcttacacggtttgctgatcaggacgaagccagacgccttttatatgagcagcagaaatcagaagaagcactggcgataaagcgtgagggggattcgctggtggacttctgcggctatctcatgtcgtcggtaatgtgtgacggcctgttagtcggtaatgctgagattattcctttcagtccacgccgttatctttatcacgcctatctctcgtatatgagggcgcacggtttcagtaagcccgtaacactgacgcgcttcggtgcagatatgccaggcgcaatggcggaatatggcagggagtatatgaaaaagagaactaaagaaggtgtgcgatcaaacgtgatactgacggatgagtctgaggactggctgccgtcatgtgcaccagtgaaaaatgagggtgataaaaattaa

SEQ ID NO: 37438 - DNA, 2109 bp, Escherichia coli
ttggatctcgctgttccgcaagcctgggttgaagagctggaaaatggttacgttccgccagaaaactgggagcggggaatcaatgcgttttatacgtcttattacgtaagtcagtattacagtgactataaagcctcgggcaatagtaagagcacttatgtgcgttttaacagtgggctaaatttgctgggatggcagctgcattcagatgccagttttagcaaaacggataataatcctggtgagtggaaaagcaacacgctgtatctggagcatggattttctcaaattctcggtacgctgcgtattggtgatatgtacacctcagccgatatatttgattccgttcgcttcaccggggttcggttatttcgtgatatgcagatgttgccaaactcgaagcaaaattttaccccacgggtacaggggattgcccagagtaacgcgttggtaactattgaacagaacggttttgtcgtttatcagaaagaggttccaccaggtccgttttcgattagtgatttgcagttagcgggcggaggggcggatcttgatgttagtgttaaggaagccgatggttctgtgactacgtatctggtgccttatgcggcagtacctaatatgctgcaacctggtgtatcaaaatatgattttgcggcaggccgtagtcatattgaaggtgcgagcaagcaaagtgattttgtccaggcgggttatcagtatggttttaataatttattgacgctgtatggcggcacgatggttgctaataattactatgcctttaccctcggaacaggttggaacacgcgtattggcgcaatttcagtcgatgcaactaaatcgcacagtaagcaagacaatggtgatgtgtttgacggacaaagttatcaaattgcctataacaaatttttgagccaaacatcaacacgttttggtctggcggcctggcgttattcgtcgcgtgattaccgcacatttaacgattatgtgtgggcaaataataaagataattatcgtcgtgataaaaacgatgtctatgatattgccgattattaccagaatgattttggtcgcaaaaatagcttttccgccaatatgagtcagtcattgccagaaggctggggatctgtgtcattaagtactttatggcgtgattactgggggcgaagcggcagtagtaaagattatcaactgagttattccaataactggcggcggataagctataccctcgcggcaagccaggcgtatgacgagaaccacgccgaagagaaacgctttaatatttttatatcgattccctttgactggggcgatgacgttacgacgccgcgacggcaaatatatatgtctaactcaacgacctttgatgatcagggttttgcttcaaacaataccggattatcgggaaccgttgggaaccgcgatcagtttaactatggtatcaacttgagccatcaacatcagggaaatgaaacgacagctggggccaatttgacctggaccgcaccggccgcaacagtgaatggcagctatagtcagtcgagtacttatcgacaggtcggagccagtgtttcagggggactggttgcctggtctggtggcgttaatctggcgaaccgtctttccgaaacgtttgctgtgatgcatgcgccgggaatcaaagatgcttatgtcaatgggcaaaaatatcgtacaacaaactgtaatggtgtggtggtgtacgacggactgacaccttatcgggaaaatcacctgatgatggatgtgtcgcaaagcgatagcgaaacagaattacgcgggaaccgtaaaatgaccgccccttatcgcggcgcggtcgttctggttgattttgataccgatcagcgtaagccctggtttataaaagcattaagatccgatggacagccattaacgtttggttatgaagtcaatgatatgcatggtcataacattggtgttgtcggccagggcagtcagatatttattcgcaccaatgaaataccgccagcggttaatgtggcaattgataagcaacaagggctttcatgcacaatcaccttcggtaaagagattgatgaaagtaaaaattatatctgtcggtga

SEQ ID NO: 37439 - DNA, 738 bp, Escherichia coli; identical to SEQ ID NO: 37207

SEQ ID NO: 37440 - DNA, 744 bp, Escherichia coli
gtgctcatcatactgccactgctctgccgggtcgccgttcaccgtccggtgcgtgatgcggtccgacgcatcgtagtgccagagggtgacaagcccctcgtcttcactctgcgtgagttttccggtcaggtcatagtggtaacgttgcgtccggccgtcaaaaccgcgctgttcagtcagcctgtccaccgggtcataccggaacgtggactggctgccgttctcgttggtcagcacggtgatgcgcccggcagcgtcataccccatgctgcgcgtcagaccgccctgcgtggtgctgacggcctttccccacgcatcatactgtatctcactgcggctgccgtccggggcaacgatagcggtgaggtcgcctgcggcgctgtactcataacgggtttcacgcccctgcgcatccttctgactgaccagttggccacgcgggttataactgctgtaagtgctgatgccttcttcccggtgaacggcgatttgttgaccgtaccggtcatactcataccgcgtcgtgtaccccgagcagtccgtaaaggtcagcagctgaccgtaacggctccatgccatctgttttgtactgcccgtcgcgtcctgtatccctgtcggcagctcactcgccgggtcatcatagctgtaccgcgtcgtctctccgctgcgcgaggtctccgccgccagccttcccttctcatcatactcccggctgctgcgcagcccgtccgggtacgtcactga

SEQ ID NO: 37441 - DNA, 312 bp, Escherichia coli
atgaaaaacatcgccgcacagatggttaactttgaccgtgagcagatgcgtcggatcgccaacatcgataaccaggacatgacgatatcggtctgggtctttcctgatactgatatttcagatgtatcgcgtgagttaattgcggcaattaaacaggggtatctaacagtaaaagccgccggggtatgggcggggggcattgaaacaccttcggtggaaactccatcggaaggctctaaattttttggttttgatatggataacgaattcatcagtggttttgatgtaggggcatggggagtattactctga

SEQ ID NO: 37442 - DNA, 1257 bp, Escherichia coli
atggtacgacgggacgatgatctggatgacctctgtcaggtgcagacacatatccggaccatcacccacagggtgacggacaccacccttaaggtggtggctgccgatccgaatacggtatccggtatcaagtccgtggggacgctgattgatgaactgtggttatttggcaagcagtacaaagcggaggacatgttacgtgaagccataggcggccttgcctcccgcccggaagggtttgtggtgtatacgaccacccagtcgaatgagccgccagccggggtgttcagacagaaactgcagtacgcccgggatgtccgtgacggcaaaattcatgatccgcattttctgccggtgatatttgaacaccctcctgaaatggtggaaagcggggctcacctgctgatggaaaacctcgccatggtcaatccgaatctcggttattcggtggatgaggcttttctgtaccgggagtaccgtaaagcccgggaagccggtgaagagacattccgggggttcatgtcaaaacacgccaatgtggaaattggtcttgccctgcgctctgaccgctgggcgggggctgatttctgggaagagcagggccgttgtatcagcctggacgatatcctgcgtcgtgctgatgtggtgacggtggggattgacggcggagggctggatgatctgctggggatgtatgtgattgggcgtgaccgggagacccgcgaatggctgggctggggccatgcctgggcgcatgaaaccgcggtggtcagacggaagagtgaggcatcccgttttcaggattttgtggcctgtggagacatgacgattgtccgtcgggtcggggatgacacggcggaagtggcggagtatgtgcgtcgtattcatgaggctgagttactggatcatatcggtattgacccgtcaggtgtggggcagattctggattcactggcggaagccgggatccccgatgagagtgtggtggggataagccagggctggaagctgggcggggccatcaaaaccaccgagcgcaaactggctgaaggggtgctgattcacggtgatcagcccctgatggcctggtgtgtcggtaatgcccgggtggagcctaaaggtaacgccattcttatcaccaaacaggccagcggacggggaaaaattgacccgctgatggcgctcttcaatgcggtgtccctgatgtccctgaatccggaaccgaaaaagaaagcgtatgaggtttttttcatataa

SEQ ID NO: 37443 - DNA, 1938 bp, Escherichia coli
gtgactcttaaacgggcctgttccctgctgacggtgaaatccttcagcgaggatgaacgggtgatcaccgggattgcgtcaacgccttctccggatcgggatggtgacatcctggagccggagggagcggagtttggcagtacgatcccgtttctctggcagcatgaccattcccgccctgtaggccagtgtacggtgcgtcgggtcagggaagggctggaaatcacggcaatgctggtgaagccggagccggggatgccctcccagatggcagcccggctggatgaggcctgggcggccattaagaccgggctggtcagggggctttctgtgggcttccggccccatgaatacacttatctggacggaggcggactgcattttctgcgctgggagctgatggaggtgtctgccgtcaccgtgcccgcgaatgcggaatgcaccatccggaccattaaatctttcgaccgcccgttttctgccgcgtccggcaaccggagaccggtggtgaaaatcgcatcttctgccggcgcttcggcacagtcaataacctcttttcataaggaaaagtcagcaatgaatactggtgaacagattaaaagttttgaaaacaagcgtgcggcgctggcagcctcccttgaggagatcatgaacaaagccgcagaggaaggccgcacactggatgtggaagaggaagagcactacgacaacaccgcagcggaaatccgtcaggtggatgcgcacctgaagcgcctgcgtgaactggaaaccagtaaggccgccacggcacagccggtgaaacaggccggtaacgggaatgtggccacggtggcttcagcgccggtgatccgtgttgagcagaaactggagaaggggattggtttcgcccgctttgccaaatcactggccgcggctaaaggtgtccgctctgaagccctggaagtggcccgtcgtcagtatccggatgacagccgtctgcatcatgtcctgaaatcggcggtgggggcagggaccaccacggacccgcagtgggcaggcagcctgtctgaatatcaggaatacgcacaggactttattgattacctgcgtccgcagaccattatcgggcgatttggtcagggcgggatccctgcacttcgtcaggtgccgttcaatatccgtgtgcatgcccaggtgtccggcggagctgccggctgggtgggggagggtaaggcaaaacccctgacgaagtttgattttgaatccatcaccttcagtcatgcgaaggtgtcggccattgcggtactgacggaagaattgatccgtttttccagtccggctgctgatgcactggtccgtaatgcgctggcggaagcggtggtggcgcgtctggatacagactttgtggacccgaaaaaagcggcggtggcagatgtctcccctgcgtccatcacccatgatgtgaagggcacggcgtcaagcggtaatccggatgcggatgccgaggccgcgtttggccagtttgtgacggcaaatctgcagcccaccggtgcggtctggctgatgtccagcacgaatgccctggcgctgtccatgcgtaaaaatgcgctggggcagaaggaatatccggacatgaccctgctgggcgggaccttccaggggctgccggtgattgtctcccagtatgtgggtgaccagctggtactggtgaatgcgccggatatttatctggcggatgacggtggtgtggcggtggatatgtcccgtgaagcgtcactggagatgcagtctgaaccgaccagcgacagcagcacaccgtcaccggtggagctggtctccatgttccagaccggcagcgtggccatccgtgcggagcgctggatcaactggcgtcgtcgccgtaccgcggcggtggctgtgatcaccggtgtgaactacggaactgcgtccggcggctga

SEQ ID NO: 37444 - DNA, 561 bp, Escherichia coli
gtggtggggcctcccgggccaaagggggaaccggggcccgcgggtcctcaggggccgaagggagataaaggagagcgtggagacaccggcccggcaggggcaaccggcgaacggggaccggcaggtgatgctggtccggcagggccgcaggggccgaaaggtgacaggggagagaccggtctgacgggaaatgcaggtccacagggtccaaagggagacaccggggcagcaggcccggcaggcccacagggaccgaaaggagaaacaggtgcggctggcccggtgggggcaaccggacctcagggaccgaagggcgacccgggggagacacaaatccgttttcgtctggggccggcgagcattattgagacaaacagccatggctggttcccgggtacagatggtgcgctcatcaccggactgacctttcttgcccccaaagataccacacgggttcagggtttttttcagcatttgcaggtcaggtttggtgacgggccgtggcaggatgttaaggggcttgatgaagtgggcagtgatacaggcagaacaggagaatga

SEQ ID NO: 37445 - DNA, 546 bp, Escherichia coli
atggaagtcaacaaaaagcagctggctgacattttcggcgcgagtatccgtaccattcagaactggcaggagcagggaatgcccgttctgcggggtggtggcaagggtaatgaggtactttatgactctgccgccgccataaaatggtatgccgaaagggatgctgaaattgagaacgaaaagctgcgccgggaagttgaagaactgaggcaggacagcgagacagatctccagccagggactattgagtacgaacgccatcgacttacgcgtgcgcaggccgacgcacaggaactgaagaatgccagagactcagctgaagtggtggaaaccgcattctgtactttcgtgctgtcgcggatcgcaggtgaaattgccagtattctcgacgggatccccctgtcggtgcagcggcgttttccggaactggaaaaccgacatgttgatttcctgaaacgggatatcatcaaagccatgaacaaagcagccgcgctggatgaactgataccggggttgctgagtgaatatatcgaacagtcaggttaa

SEQ ID NO: 37446 - DNA, 279 bp, Escherichia coli
gtgggggcaaccggacctcagggaccgaagggcgacccgggggagacacaaatccgttttcgtctggggccggcgagcattattgagacaaacagccatggctggttcccgggtacagatggtgcgctcatcaccggactgacctttcttgcccccaaagatgccacacgggttcaggttttttttcagcatttgcaggtcaggtttggtgacgggccgtggcaggatgttaaggggctggatgaagtgggcagtgatacaggcagaacaggagaatga

SEQ ID NO: 37447 - DNA, 573 bp, Escherichia coli
atgcctggattaatatcatatgtgtcatcggcttcattcgtgaatgagatgatggagctgcgtcagcaggtaatggaggggcagattggtggatttctcctgggaggggagagggttagagtttcttatatgccagatacaggccgttttttagcagaaagtgaagggcagggacgggtttatgcagaattattgaatattgcttttaatgatggagttaatgtgctcagaaacaggatattaagtgcgctccctggaatgggagggcgaaactctttgcaggaaaaaatatcggagtgtgcctttactgtcgatattgaaaaacttcaatgtcctggtgatgcgcttcaatgtccaattacactggagcagcctgaaaaaggtgtttttgtgaagaattcagatggttcagatgtatgtactttatttgatgccgctgcattttctcgtttgactggtgaagacttaccccacccactgacccgggaaccaataacggcatcaataattgtaaaacatgaagaatgcatttatgacgataccagaggaaacttcgttataaagggtaattga

SEQ ID NO: 37448 - DNA, 240 bp, Escherichia coli; identical to SEQ ID NO: 23933

SEQ ID NO: 37449 - DNA, 198 bp, Escherichia coli; identical to SEQ ID NO: 29815

SEQ ID NO: 37450 - DNA, 591 bp, Escherichia coli
gtggatctggatgctcgtggggatttggggcgtaccgcacttaatgaggccgtaagtaatgggtattttgatattgttaagcttttagtagaatcaggagccgatcttactataaaggatgaatttgggaaaacggcattagaattggctgaggtacaccagaattataaaatagttgaatggctatcacattatagagatcataatcccatacccgatttttctgtacttattaatatctacggtgagcgatattttggtggagagattatagatacagatgcaaggacagaacttggcgagggggttcttcatatagctgttaggaaaagaagacaattagatgtcagatgttttattcaacatggtgccgatataaatgctaaggcaaataatggctttgacttcactcctttgcattattcgatagggataggggattttgatatgatgaagcttttgttgaaattaggtgctgatatttatttggagagtgagatgggatactcccctatggatttggctattttgatgggggataagagaattattttttatttatatggttatatttctcatgtttctgaataa

SEQ ID NO: 37451 - DNA, 360 bp, Escherichia coli; identical to SEQ ID NO: 23715

SEQ ID NO: 37452 - DNA, 228 bp, Escherichia coli; identical to SEQ ID NO: 23996

SEQ ID NO: 37453 - DNA, 2514 bp, Escherichia coli
atgactttcaatgcgtacctgtcacaacagcgtaaggcgtgggacgttctcagtgatttctgctcggcgatgcgctgtatgccggtatggaacgggcagacgctgacgtttgtgcaggaccgtccgtcagatgtggtgtggccctacaccagcagtgatgtggtggtggatgataacggcgtggggtttcgctacagcttcagcgccctgaaggaccgccacacggcggtggaggtgaattacaccgacccgcagaacggctggcagacctccacggaactggtggaagacccggaagccatactgcgctacgggcgcaacctgctgaagatggatgcgttcggctgtaccagtcgcggtcaggcccaccgtgccgggctgtgggtgataaagaccggactgctggaaacgcagacggtggatttcacgctcgggtctcaggggctgcgtcacacacccggtgacattattgaaatctgtgataacgactatgccgggaccatgaccggcggacgtgtcctgtccatcgatgccgccagccgcaccctgacactggaccgtgaggtgaccctgccggagaccggtgccgccacggtgaacctgattaacggcagcggtaagccggtgagcgtggccatcactgcacaccccgcgccggaccggatacaggtcagcaccctgcctgatggcgtggagacatacggtgtgtgggggctctccctgccgtcactgcgtcgtcgcctgttccgctgtgtctccatccgggaaaacacggacggcacctttgccatcacggcagtgcagcacgtaccggaaaaagaagccatcgtggataacggggcgcactttgacggcgaccagagcggcaccctgaacagcgtcatccctccggcagtgcagcacctgacggtggaggtgagtgcagctgacagccagtatctggcgcaggcgaaatgggacacgccgcgggtggtgaagggcgtgcgcttcagtctgcgcctgaccagtggaagcggtcaggacagccgtctggtgaccaccgccatcactgcggatacagagcatcgtttcagtggtctgccgctcggggaatacaccctgacagtcagggcaattaacagttatggccagcagggggaaccggccatcaccaccttccggattaacgcgccagcaaaacccgccaccattgaactgacgccggggtattttcagataacggcggtaccggtgctggcggtgtatgacccgacggtgcagtttgagttctggttttcggaaaaacgcatcacgaacacggcacaggtggaaaaatctgcccgttatctggggagcggcagtcagtggactgtccagggaagccggattaagccggggacggatttctggttttacgtgcgcagcgtcaacctggtggggaaatctgcgtttgtggaagtcagcgggcagcccagcaatgatggtgaagggtatctggaatttttccgggaaaaaataggaaaactgcatctggctcaggggctatgggagctgatagacaacagccagcttgcggatgagatggcggagatgaagaccaccatcacggaaacccgcaatgaaatcacacagacggtcagtaaaacgctggagaaccagagcgccactatacagcagatacagcgcgtgcagaaggacacaaatgatgacctggctgcgctgtacatgctgaaggttcaaaaaacgaaagacggcattccctatgtggccgggattggtgcagggattgaggatactgatggccagccactgagcaacatactgctgctggctgaccgtatcgcgatgataaatccggagagcggcaacagcacgccgttatttgtggcgcaggggaatcagctgttcatgaacgacgtgttcctgaagcgactgtttgcggtgagtatcacctcgtccggcaatcccccgacgttttccctgacgccggacgggcgactgacggcgaaaaatgcggatatcagtggcagtgtgaatgcgaactcagggacgctcaacaacgtcacgattaatgagaactgtcagattaaggggaaactgtcagccaaccagattgaaggcgatattgtcaaaacggtcagcaagtctttcccccgcacgagcacttatgccagtggcaccatcacggtaagaatcagtgatgatcagaagtttgaccggcaggtcatgataccgccagtgttattccgcggtggtaagcatgagaatttcaacagtaataaccaacagtcatactggtattcaacctgccggttaagagtgacccgcaatggtcaggagatttttaatcagtccacgacggatgctcagggcgtattttcctcagttatagatatgcctgccggacaggggacgctgacactgacattcaccgtatcttcatcaggagcgaataactggacaccaacaaccagtatcagcgatctgctggttgtggtgatgaagaaagccaccgcaggcatcagtatcagctga

SEQ ID NO: 37454 - DNA, 2256 bp, Escherichia coli
atgtggaaccttttacggcgaacccgaaaaaaccagaaatcaggacgtgacgtaagagaggcgggctggaccagcctgtttcaggcggtggctgagcccttttccggcgcctggcagcagggcgtgaaagccgatcctgaagccgtcctctcctttcatgcggtgtttgcatgtatttcgctgatatcccaggatatcgccaaaatgcggctgcgtcttatgcagacggatgcgcatgggatacgcagggaaacgcgccggggggatattgcccgcctctgtcgtcgtcccaacgcccagcagaaccgcatccagttttttgaactgtggctgaacgccaaactgcgtcatggcaatacggtggtgctgaaaatccgtaatgcccggtggcagatcaaagaactgcgtattctggactggagccgggttgaacctctggtggcggatgacggcgaggtgttctaccgcatcacgccggaccggaactgcgggatcacggaggcggtgacggtgcctgcccgggaagtgatccacgaccggtttaactgtttttttcatccgcttataggattgccgccggtgtatgccgccgggctggcggccacgcaggggcatcatattcaggaaaattcgacgtcttttttcagaaatggcggcaggccgtccggggtgattgagatccccggcagtattacggaagaaaatgcgaaaaaactgaagagcaactgggacagcgggtatacaggcgaaaatgcggggaaaacggccattctgagcaacggggcaaaatacaaccccacgacgttttcaccggtggatgcgcagacggtggaacaactgaagatgaccgctgaaattgtctgttcggtgttccgtgtcccggcctacaagattggcgtgggacaaccgccttccagtgacaacgtggaggcgctggagcagcagtattattcccagtgcctgcagacgctgattgagtccattgaactgttactggatgaggcgctggaaacgggggaaaacgagagtacagaatttgatgtcaccacgctgctgagaatggacagtgagcggcgcatgaaaacgctgggggatgcggtgaaaaatacgcttctcacgcccaatgaggcccgtaaacgggagaacctgccgcccctggccggcggtgatgcactgtatcttcagcagcagaactacagtctggaggcgctgtcccgtcgtgatgcccgtgaggatccgttcgcgtctgccgggaaaacagtttcatcacagctgcctgacggcgcatctgacggtaataaggcaatcagtgaaacagagcatgatgcggtgaaagcgatgttcaggggggatactgagaaaatgacggaacgggaactgtccattattcgtgcactgggcgaagaattcgccatggtgctggcggatttacagcgtacatttgaggagaaaatagccgcgcaggcacaaacgtttgaagaaaaactggcttctcagtctgtggtattacagaagcatgtgacggtggatgaggtgcgtccggttctgcaggcgatggtggatgacgctgtgggggccattccggtaccgcgtgatggtcgtgactatgatccggaagtactgcagaaggcggtgaatgatgcggtcgcaaatattccgcagccggcagacggtaaaagtctcaccccggatgatgtgcgtccgatgcttgaacagatggtgaaggaggcggtaagccatatccctgttccgcgtgatggtcgtgactacgatccggatgttctgcagaaggcggttctggatgcggtgagtgccctgccggctccgcaggacgggcgtgatgccacggcactggaaatactccccgccattgacgatcaaaaatcctttccccggggcacgtatgccacacaccagggcggactctggcgggcgtatgaaaaaacgcacgggatgcggggatgggaatgcctggttgacggggtggcggatattgacgtcagcatgacgggtgagcggttgttctctgtggtggtccggcagagcagtggccagcgtacggaaaaaacattttccctgccggtgatgctctaccgcggtgtgttcagagccggtgaaacctaccaccccggcgatacggtgacgtgggggggctcgctgtggcactgcaacagtatgaccgaagataaacccggagaagctcattcatcagcctggaccctggctgcaaaacgtgggcgggatgcaggaggctga

SEQ ID NO: 37455 - DNA, 357 bp, Escherichia coli
gtggatacgtatgcctctctgaaccgacagtatgcggagctgcagagtgaatataagcatctgcggcggtatttcggtgtgacggtgcaggtgccgtacaccgatgtgtggacgtataaaccggtgcagtactatccagggaaacatccgtgcgaaaaaccggcagaaatgttgcagcagataatcagcgcaagcagtcgtccgggagacctggttgcagatttcttcatggggtcggggtcgacagtgaaagcagcgatggcgctgggacgtcgtgcaactggcgttgaactggagactgaacgttttgagcagacggtgcgggaagtacaggatttaatcattcgtaacggatga

SEQ ID NO: 37456 - DNA, 723 bp, Escherichia coli
atgcttaatactgtaaaaatatccagttgtgagttaatcaacgccgactgcctggaatttatgcggtcgttacccgaaaattctgttgacctgatagtcacggacccgccgtacttcaaagtgaaacccgagggctgggataaccagtgggcgggtgatgaagattacctgaagtggctggaccagtgtcttgcgcagttctggcgggtgctgaaacctgccggaagtctttacctgttctgtggccatcgtctggcatctgacaccgaaatcatgatgcgtgagcggtttaacgtgctgaaccatatcatctgggcaaagccgtccggacgctggaacgggtgcaacaaggaaagcctgcgggcgtatttccccgccacagagcgcattctgttcgcagagcattatcaggggccgtatcgtccgaaagatgccgggtatgaggcgaagggtaggacactgaaacagcatgtgatggccccgctgattgcttactttcgtgatgcgcgcgctgtcctggggataacggcaaaacagattgcagatgccacaggaaagaaaaacatggtgtcgcactggttcagtgccggtcagtggcagctgccgaacgaaagcgattatctgaaattacaggcactgtttgcccgggtggcagaagagaagcatcagcggggtgaactggaaagccccaccaccagctggtggatacgtatgcctctctga

SEQ ID NO: 37457 - DNA, 1308 bp, Escherichia coli
atgcacgacgagcgcacccaccactatcactacgacagccagcaccgcctggtgttccacacgcggatacagcacggcgaaccacaggtggagagccggtacctctatgacccgctgggccgccggacgggaaaacgggtgtggcggcgggagcgtgacctgacggggtggatgtcgctgtcgcgtaaaccggaggagacctggtacgggtgggacggtgacaggctgaccactgtacagacccaacagacaagaatccagacggtataccagccgggaagcttcacgccgctcctgagaatcgaaacagagaatggtgaacaggcgaaggcgcggcaccgtagcctggcggaggtgttgcaggaggacacgggtgtgacgctaccggcggagctggcggtgatgctgggaaggctggagcgggagctgcggcagggcagcgtgagtgaagaaagccagcagtggcttgcgcagtgcgggctgacggcggagcagatggccgcgcagctggaggcggaatacatcccggagaggaaacttcatctttaccactgcgaccaccggggactgccgctggcgctcatcagcccggaaggggaaacggcgtggcagggggagtatgacgagtggggaaacctgctgggcgaaaccagcgcgcagcaccttcaacagtcactccgtctgccggggcagcagtatgatgaggagtcggggctgtactacaaccgcaaccggtactatgatccgttgcaggggagatatatcacccaggacccgatagggctggaggggggatggaacctgtatcagtacccactcaatcctattgaacatatagatccgttggggttagcacttgatttgaattattattctccgtcagatcctatatataaaggttctcttaatgtaagggaatttccaacgggttttacagttggaggtcatggttcgcctacatctatgagtgatgacagaatcaaaaaaggaagtgatctgacaataaaacaattagctagcgacataagagcgaatcctaaatatcatgaaggtatgcctgtagtcttgttttcctgcgaaacaggaaaaggcaaaaattcatttgcacagaaactagctaacgaacttgatgctacagtgattgctcctgatgaaataatatggatttggccggatggaaactatgctattatggggcaaacagctaggataacaataggcggtaaggacaacggggtgtttgaattggtgccagacgagaaacaaccaagggactttcataagtttacacctacaggaagcaaatag

SEQ ID NO: 37458 - DNA, 600 bp, Escherichia coli
atgcgtaaattatgtgctgttattttgtccgcagtagtctggcaggtcgccgctgctacgccagcgagtgcagcagaacatcagtccacgctgagcgcgaggtatctccatgcctcgacgaacgttcccggtagtgatgatctgaacgggattaacgtgaaataccgttatgagtttatggacgcgctggggctgattacgtccttcagttatgccaatgctgaggatgagcaaaaaacgcgctacagcgatacccgctggcatgaagattccgtgcgtaaccgctggttcagcgtgatggcggggccgtctgtacgcgtgaatgaatggttcagcgcgtatgcgatggcgggtgtggcttacagccgtgtgtcgactttctacggggattatctccgcgtaactgacaacaaggggaaaacgcacgatgtgctgaccggaagtgatgacggtcgccacagcaacacgtctctggcgtggggggctggcgtgcagtttaacccgaccgaatccgtgaccattgaccttgcttatgaaggttccggtagtggcgactggcgatcggatgcatttattgttggtatcggataccgtttctga

SEQ ID NO: 37459 - DNA, 345 bp, Escherichia coli
atgccggagaggcggagacgtccgcgaggaatgccggcatatcagccagtcaggcagaagagaacgctgcaaatgctgacacttcagcaggggatgcatcggagtcagcccggcaggcggcagaaagtgcagccgctgcaaagcagtcagaggaggcgtcctcgtcctcggcctctgcggccgctcaaaaagccagtgagtcattacaaagtgcaacagatgctgagttgtcaaaaaagacggcagaaagtgcagccggtaatgcagccagggatgcaacgaccgcagcagaaaaagcccgggagtcagcagaaagcgcacagtcagcggaacaaagcaggatag

SEQ ID NO: 37460 - DNA, 147 bp, Escherichia coli
atggggtggctaatgatatcggataaactcataacgctggcgaagatcctctgtgtaatcgtcggcatttcatttttagtcatgctggttgccattttcttttccaccgcctggcgagtcctgacgttatcgggactggtggggtga

SEQ ID NO: 37461 - DNA, 564 bp, Escherichia coli
atgatgaccgtgccgtttcacggcgattctctttatgtggttaaccataacggcgaaccatacgttcccatgaaacctgtcgttgcggggatggggctggcctggcaatcacagttggctaagttaagacagcgttttgcgtcaactataacggaaatcgttatggttgctgaggatgggaaacgacgcaatatggtgtccctgccgcttcgaaaacttgcaggctggttacaaaccatcaatcccaacaaagtaaaacccgaaatccgcggcaaggtaatccagtatcaggaagagtgtgacgatgttctctatgaatactggacgaagggttttgtcgttaatccccgtcgaatgagtgtgatggaagaactcaatcaggcttgcgctgacatgaaacgggataaaaacattgccagtgtgtttgctaccgggctgaatgagtggaaacaggttaaatccgcgcatgtatcaaaaatccgcacattgataaacgaagcgaatctgctgattgattttgtcctggctgatacaggcaaagggaaaataacaaaggcggattga

SEQ ID NO: 37462 - DNA, 309 bp, Escherichia coli
atgcaggtgcgccagcgtgatgttgctgcgctcgatgcaaaatactcgagggaattagccgatgcgagagctgaaaatgaaactctgcgtgctgatgttgccgctggtcgtaagcgcctgcggatcaacgccacctgccccggtaccgtgcgtgaagccaccggcacctccggcgtgggcaatgatgccgccgtcgaactctctccggttgctggacgaaacgttctcggtatcagagacggaatcatcagcgaccaggcagcattgagaatgcttcaggaatatatccgcactcagtgtattaactag

SEQ ID NO: 37463 - DNA, 501 bp, Escherichia coli
ttggatatatacgatgattctccggtgcttgaagacacgttgcctgctttatcttctgaaatagtaccaactccagaacatagtattaaacaaatttattcgaaaattaaggaggggcacatagaactgtccgattcagacatcatattgtgtcgcggcacaaccggtattcaagctgaaaatatcgttgaatataaaactgctggagggcttcctgattcaaatccaaatgtaaaagcaccagatgaatatatggcacaacagcaggtacgtattggaagaatattgcctgaatacacatcggatcttagcgttgctgatcggtttagtcgtgagcattatctaatagttgttaaagtaaaggcaaaatatatcacacgaggaagtgttacagagagtggttgggttatagataagaccgcacctgttgaaccacttgcgataattgatagaacttttggtatgaaggaaaatatctcaatggtaaatgcatcgaaatag

SEQ ID NO: 37464 - DNA, 270 bp, Escherichia coli
atgaacatattaaaaaaaattatgcagcgtctgtgcggttgcggaaagcatgatgactgtgaacacgggcagtcgcttacagtacaactgcgactggggccggcagacatcctggagtcagatgagaatggcattattccggagcaggacggggtaatcacgcaggtggtgatactggatgcagataaaaagcagatacagtgtgtggtaagaccgctgcaaatcctgcgtgctgacgggacgtgggaaaatattggcgggatgaagtaa

SEQ ID NO: 37465 - DNA, 279 bp, Escherichia coli; identical to SEQ ID NO: 37446

SEQ ID NO: 37466 - DNA, 165 bp, Escherichia coli
atgttgctggataaatccgtatcctatgttagacacagcggaatactctgtgaaatcaggactcgcctcatatcggtcactgatcgtacccagcctttcgaagaaagccctctcattctcttcatgcctcatggcagcctgtcgaagggcattcaggttacgtag

SEQ ID NO: 37467 - DNA, 600 bp, Escherichia coli
atgcgtaaattatgtgctgttattttgtccgcagtagtctggcaggtcgccgctgctacgccagcgagtgcagcagaacatcagtccacgctgagcgcggggtatctccatgcctcgacgaacgttcccggtagtgatgatctgaacgggattaacgtgaaataccgttatgagtttatggacgcgctggggctgattacgtccttcagttatgccaatgctgaggatgagcaaaaaacgcgctacagcgatacccgctggcatgaagattccgtgcgtaaccgctggttcagcgtgatggcggggccgtctgtacgcgtgaatgaatggttcagcgcgtatgcgatggcgggtgtggcttacagccgtgtgtcgactttctccggggattatctccgcgtaactgacaacaaggggaaaacgcatgatgtgctgaccggaagtgatgacggtcgccacagcaacacgtctctggcgtggggagctggcgtgcagtttaacccgaccgaatccgtggccattgatattgcttatgaaggctccggcagtggcgactggcgcactgacggtttcatcgtgggtgtcggttataaattctga

SEQ ID NO: 37468 - DNA, 309 bp, Escherichia coli
atgataccgccagtgttattccgcggtggtaagcatgagaatttcaacagtaataaccaacagtcatactggtattcaacctgccggttaagagtgacccgcaatggtcaggagatttttaatcagtccacgacggatgctcagggcgtattttcctcagttatagatatgcctgccggacaggggacgctgacactgacattcaccgtatcttcatcaggagcgaataactggacaccaacaaccagtatcagcgatctgctggttgtggtgatgaagaaagccaccgcaggcatcagtatcagctga

SEQ ID NO: 37469 - DNA, 240 bp, Escherichia coli; identical to SEQ ID NO: 37380

SEQ ID NO: 37470 - DNA, 207 bp, Escherichia coli
atggaaaaaatcacaacaggtgtgtcatacaccacgtcagcggtggggacgggatactggttactgcagctgctggacaaagtctctccgtcccagtgggtggcaatcggtgtgctggggagtctgctgtttggcctgctgacgtatctgactaacctgtatttcaaaatcagagaggaccgtcgtaaggcggcgcggggggagtaa

SEQ ID NO: 37471 - DNA, 168 bp, Escherichia coli; identical to SEQ ID NO: 29864

SEQ ID NO: 37472 - DNA, 366 bp, Escherichia coli; identical to SEQ ID NO: 23997

SEQ ID NO: 37473 - DNA, 408 bp, Escherichia coli
atggaacaggctattgaggcagccagacttgcaggtgcccatgattttattagagaactaaaagaagggtacaatactattgttggagaacagggcgttggtctttcaggagggcagcgccaacggatcgcaatagcccgggctcttgttacaaatcctcgaattcttatttttgatgaagcaaccagtgctcttgattatgagtcggaaaatataataatgaaaaatatgtcaagaatatgtaagaacagaaccgtaattattattgcacacaggttgtcaactgtaaaaaatgcaaacagaataattgttatggataatggctttatttctgaagatggcacacataaagagcttatctccaaaaaagacagtttatatgcatatttatatcagttgcaggcataa

SEQ ID NO: 37474 - DNA, 222 bp, Escherichia coli
atgcgcttttacatgaaaggtttatgggatttggtttgccgttataagacggttttttctgatgtctggaaaattcgtcacacacttgatgctcctgtgagagaaaaagatgagtatgcatttcttcctgctcaccttgaactcattgaaacaccagtatccagacgttctcattctgtctcttatacacatctgacgctgccgacgatctactctgtgtag

SEQ ID NO: 37475 - DNA, 546 bp, Escherichia coli
atgattggccaccgatgcgccaaagcagcacagcaggatatcgccaggctgtgcggaaggcagggaaatcctgtaaaaaccagtcgcctccatattgtccaggtacaggttctgaccattgcgccaccagtcatcctcacgctcaaaatccggcatatcagtccccgccagatgataagcatcccggaacagcgtgtaacagtccgtcaccccgtgctcaaagcgccgtcctgtcagatgtggcacacagcggaatttgtgaatgtcaccccggcagaccagccaccagggcagtgcgctttttatctgcagccgccggtcagcctcgctcagccagggcagcccaccgggatgactgtggaccagtgccacaatctccccctgcatctctgcccgcagccagtcttccggtgcgatacgaaaatacgcctccggctctgcagaaatattcacacaagggatataccactccccctccggcgtgcttatcacgaagccgcacgactccgcaggcgcacaccgccgggcatgcgccagaatcgctga

SEQ ID NO: 37476 - DNA, 312 bp, Escherichia coli
atgggagttgagcagaataatttcagggacatgctgaccggttatctgtccggcccgccgcagacgcagcatgtgttttgtgtattcccggcggctctggtcgcgcacgcgggtctggcaggcaaagaacggctgaaagccttcctgctgcagattttccaggacagtgatagtgggaatgtacgcatagtgttcactgcgagaggtatgtcggttttccccaaaaatactcggtacatggcgcatcagttcttcgtgtgtcagcggacgatcacgacgtatctggttcgcataaccaaaacgactggctaa

SEQ ID NO: 37477 - DNA, 207 bp, Escherichia coli; identical to SEQ ID NO: 37376

SEQ ID NO: 37478 - DNA, 588 bp, Escherichia coli
atgataagacgttcttttcgtgaaatcagctcagcgacgatatttaatgatgttatcagaacggtgccccgtaaaggcttcaaaatcaatgaagaaatcagcataactgttctcgacaataatcacaatgagaatgaaagtgttgagagtgaagagaatggtacccacactgaaaatataaataaaaatcacattgcaaaaggtatatttaccacaaagaatacattacttatagtttgtttttttgcggcatgggggatagtgtatatatcttcttattttttcgatatggcttttcaaagcaaatcccacactataaaaaaaatagatgctttctcaaattatgctcaacaccctactcaggaaggatgcagttatttctatgataataaatactttaattccgtagacatgttatcaccgattattgaaaaattgcagaagatggaaattaactgcaaaatacatccttacatttacattgcaacaaatgatagcatgagcggattttatgctttcacctgtagtcagatgttaaactctgaatcaccaaataattgcaactctctctattataaagcggagtaa

SEQ ID NO: 37479 - DNA, 345 bp, Escherichia coli
atgaagaaaaaatacgaactggttgttaaagggataaataattacccggataagattactgttactgtggcactggaaattggtgggtatccgtcactgttgttgccagatgtggcgattagtcttgaccgtactgaaggtgccacgctggagttttacgaagctgaggcgaaaaagcaggcgaagcagtttttcatggatgttgctgccgggttatgtgaaggggatggtccgttaccggaaaagcgtcccgtaattttagaggcgcaggatgtgttgataacctacagaggaaaactaccgggaataattacgggttctctgaagactccaccgctggcctga

SEQ ID NO: 37480 - DNA, 216 bp, Escherichia coli; identical to SEQ ID NO: 29884

SEQ ID NO: 37481 - DNA, 309 bp, Escherichia coli; identical to SEQ ID NO: 37468

SEQ ID NO: 37482 - DNA, 270 bp, Escherichia coli
gtggtgatatctcctggtattgagtatatggaggacggtcttcccgatccggtgaaagcgatggggcgtcttctggtggagaacattaataccgaccccaggctggcgctggatgcggcttataagctggcgcagttcacgcaccacaaaaaaggggatgccggtaaaaaatcggcaaaaggtgacgcggcgaaaaaagcggctaaccgttttgcggtgccaccaccaccccgcctggtggtgaataatgataatgagggcaacggatga

SEQ ID NO: 37483 - DNA, 327 bp, Escherichia coli
atgaagtggcttttattaatcacattgagtctatattcttttattgtgcaaagtgctccctgtggattgaccaatgtcggggaacaacgtggaacatatatactcaaaccactgagtatgaaaggtaatctcaccgccgaaaaaattgaaaatactgggaatatcattgagtgtgcagacttgcaagagacgaccaacgccattaaagttcattttttaacacagaacgctttaaggtttaaagtcggaagtcgtcattatattattaatttcccctttgaatctgacggtaaaaaaaatagcgcttccagggaagtcatcttataa

SEQ ID NO: 37484 - DNA, 693 bp, Escherichia coli; identical to SEQ ID NO: 23889

SEQ ID NO: 37485 - DNA, 315 bp, Escherichia coli
atgcacctgataactcaaaaagcattgaaagatgctgcggaaaaatacccgcaacataaaacggagttggtggctctagggaacacgattgctaagggatatttcaaaaaacctgagtcattaaaagcagtattcccatctctggataacttcaaatatctggataagcattatgttttcaatgttgggggcaatgaattacgtgttgtagcaatggtcttttttgaatcgcaaaagtgctacatacgtgaagttatgacgcataaagaatacgatttttttaccgctgttcatcgtactaaggggaaaaaatga

SEQ ID NO: 37486 - DNA, 591 bp, Escherichia coli
atgaaaataatatccactgttattcaaacacctttcccatttgagaataataattctcatactggcgtagtaacggagcctattctcggtaagttaatagggcaaggttcaacagcagaaatctttgaagatatgaatgattcgtctgctttatataaaaagtatgatcttgttggtaaccagcacaatgaagttctggaaatggctaggcaagaatctgccctttttaatactttttatggcgatgacgcatcagttgttatacagtatggcggtgatgtgtatctccgaatgctacgcgtgccagggattccccttagtgatattgatacagctgatattcctgataatctagagagcctttatctgcagttgatatgtaaattgaatgagttgagtataatccattacgatcttaatacaggtaatatgttgtatgataaagaaagtaatagtttatttccaatagattttcgaaatatttattctgaatattactctgcaaccaaaaatgataaagagattatcgatcgacgattacagatgcgtacaaatgatttttattcattattaaacagaaaatatttataa

SEQ ID NO: 37487 - DNA, 270 bp, Escherichia coli
atgaacgtactaaaaaaacttatgcagcgtctgtgtggttgcggaaagcatgatgaccgtgaacacggggagttacttacagcacagctgcgactgggaccggcagacattctggagtccgatgagaatggtattattccggagcaggccagggtaatcacgcaggtggtgatactggatgcggataaaaagcagatacagtgcgtggtaagaccgctgcaaatcctgcgtgctgacgggacgtgggaaaatattggcgggatgaaatag

SEQ ID NO: 37488 - DNA, 426 bp, Escherichia coli
atgaaaatcaaacatgagcacatccgcatggcgatgaatgcctgggcatatcctgatggtgagaaagttcctgcagctgaaatagcccggacttatttcgaactggggatgacgttcccggaactgtacgacgacagccatccggaagccctggctcgtaatacccagaaaattttccgttggctggataaagacacccctgatgctgttgaaaaaatgcaggctctgttaccggcgatcgaaaaggcaatgccgcctctgctggtggcccgtatgcgcagtcacagctctgaatattaccgtgagatcgtcgaacggagggatcggctggtgaaagatgtggatgattttgtcgcagcggcgatcgcctggggcaccctgactaacagtgggggtcagcctggtaatgctgttgtcgtgcattga

SEQ ID NO: 37489 - DNA, 270 bp, Escherichia coli; identical to SEQ ID NO: 37368

SEQ ID NO: 37490 - DNA, 1035 bp, Escherichia coli
ttgcttgtgaaaactccagttaacccacttttgcaatggcttaacatgttttttagtcgccgttcattatccggagctgatggacgggcgttatatgcttaccgttgtactgatacagagtacgaaagtttggcagaactactgcgtacatatgccccccgtagttatccaagaacgatattcatttcctatagcgatgttctatttagcatatatgccgcagagtttatccgccggactcatacggtcggacaccctaaatgggacacaattttagattctattaactggaaagttccgtatgttcatcgacagaagctggttaatgatggcattcgctactggaaaagaaagataagaaacctgggacaagcttcgggttatctgcatacactggcttgtgaaggtggtttgcctatccgcatgattgaaaatgagagcggttatttgattacctatttcagaaggatatatcaggcgcttcgtgggcaatcatctcaatatcctgccgctaaaattgcacaagaattaggcgatacgattcctgtcacaatgcaaaacgaactggtctatgaaatagccggtgaattctgcgagactctctgccgattacttagtgagcatcctcctcatagcagtgatcccgtttctgcattacgtaagctctctccagactggcatcttcaacttccactcgttctccccgaagcgaatgctgcagagattgtaaggcgattactttctcaatcttctgaaatacgcagtgcaagtagtcttcaggttgaaagaatctgggtcgatgttgatgacagttggtattgcgatgcccggttccgattcccggccacaatgcgtacagaacagttaacctctttgtttgaatgccatattcagccggagcagacccgactcatcatttcaggaaaatggaaaaatggcggggcaaggttggcaatgctaagctgcaaaaactctctggtgcagatgcaatggccgaaatctcattgtcgcttcatgaaggtccaattctgttag

SEQ ID NO: 37491 - DNA, 1650 bp, Escherichia coli; identical to SEQ ID NO: 25361

SEQ ID NO: 37492 - DNA, 729 bp, Escherichia coli; identical to SEQ ID NO: 37410

SEQ ID NO: 37493 - DNA, 462 bp, Escherichia coli
gtgagcgtggggagactggcccccgaggtgaacctggtcctgcaggtccgagaggcgaacgaggagagaccggacctcagggaccgatgggagcacgaggtgagcgtggggagactggcccccgaggtgaacctggtcctgcaggtccgagaggcgaacgaggagagaccggacctcagggaccgatgggagcacgaggtgagcgtggggagactggcccccgaggtgaacctggtcctgcaggtccgagaggcgaacgaggagagaccggacctcagggaccgatgggagcacgaggtgagcgtggggagactggcccccgaggtgaacctggtcctgcaggtccgagaggcgaacgaggagagaccggacctcagggacctcgtggagagccaggtccggcaggcagcgctgcaaatgtggctgatgcaacgacggcacagaagggaattgtgcagttaa

SEQ ID NO: 37494 - DNA, 147 bp, Escherichia coli; identical to SEQ ID NO: 37460

SEQ ID NO: 37495 - DNA, 570 bp, Escherichia coli
atgaatatgatgaccgtgccgtttcacggcgattctctttatgtggttaaccataacggcgaaccatacgttcccatgaaacctgtcgttgcggggatggggctggcctggcaatcacagttggctaagttaagacagcgttttgcgtcaactataacggaaatcgttatggttgctgaggatgggaaacgacgcaatatggtgtccctgccgcttcgaaaacttgcaggctggttacaaaccatcaatcccaacaaagtaaaacccgaaatccgcggcaaggtaatccagtatcaggaagagtgtgacgatgttctctatgaatactggacgaagggttttgtcgttaatccccgtcgaatgagtgtgatggaagaactcaatcaggcttgcgctgacatgaaacgggataaaaacattgccagtgtgtttgctaccgggctgaatgagtggaaacaggttaaatccgcgcatgtatcaaaaatccgcacattgataaacgaagcgaatctgctgattgattttgtcctggctgatacaggcaaagggaaaataacaaaggcggattga

SEQ ID NO: 37496 - DNA, 132 bp, Escherichia coli
atgaaagagattgatttattatatgaaaatatttatcagcttttaattaaaccttacctactcgatctttctagccagtctggaaaaaaaaatagaattaaattacacatgcaaaataaaagatgctgctga

SEQ ID NO: 37497 - DNA, 426 bp, Escherichia coli
atgaaaatcaaacatgagcacatccgcatggcgatcaatgcctgggcctatccggacggtgagaaagttcctgcagctgaaatagcccggacttatttcgagctggggatgacgttcccggaactgtacgacgacagccatccggaagccctggctcgtaatacccagaaaattttccgttggctggataaagacacccctgatgctgttgaaaaaattcaggctctgttaccggcgatcgaaaaggcaatgccgcctctgctggtggcccgtatgcgcagtcacagctctgaatattaccgtgagatcgtcgaacggagggatcggctggtgaaagatgtggatgattttgtcgcagcggcgatcgcctggggcaccctgactaacagtggtggtcagcctggtaatgctgttgtcgtgcattga

SEQ ID NO: 37498 - DNA, 480 bp, Escherichia coli
atggattcacggcccggcttaacgatcaccagcccgagttccggtaccagaacaggtcgaagtaatacccgcacgttacctccagatgcgttgctggaatgtgcgggacggacgcggtgggcgttcggagtaaggaagcctgacggagattatccagtgacgataatcgagactgagggctttcttaacctcgtatccgcgcctgcggtaacactgaatcagccattcagcctgttcttcggtgcaggggtcgtgctgataccagtcagatttgaatgcatgagaacgccgcccgtgcctgctggcaggggcggcagagttatccgaattgtaaaatttggtatcgtgcgccatctgttttctctgctggcgcagcaggtgccagttgttcaggctgacggatggattgtaaaccagaacgaccagaaaaaacaaaacccgccgaagcgggttaagtgcgggtgcgttgaggatgcctga

SEQ ID NO: 37499 - DNA, 1008 bp, Escherichia coli
atgaaaaatgatgatgttagtgggaaggccaaaggcggtaaggcacgcgcggcaaaaatgacagcagagcaaagaaaagaatcctcaagaaaggctgttgccgcaaaaaaagaaaaagctttattgcccgtatctgcgaatgagggaaagttaaagatcggtgatgcggaattagatgtcgcggttctcgaaaatggacggcgtatcatatcacaagcttctgtttttaaagcatttggccgaccacaaagagggggtagagcacctcaagaagagggggtgatcaatatgcccgcttttatggatgctgcaaaccttaaaaaatatataaatcaagatgttatgggtgtgatcaataaggtcaaatacaagacgattactggctccgtccaggaaggttatgacgcatccataatacctcttgtctgcgatgtttatttaaaggcaagagaggcaggcgctatcaccaggccaaaccagttagagacagccaagaaagctgaaattctggtgcgctcattagctaaagtcggaataatagcgcttgttgatgaagcgacggggtaccagcgagatagagaaaaagatgcgctcgccaaaatactcgaggcctttgtcgcaaaggaaattcaaccttatattacaacatttcctgctgattattatgaagagcttttcaggttaaggggcttagaatacccgccggaaaatccccgcttccggcctcagtattttggcgttttgacaaatgatatcgtctacaagagattggcaccaaacatccttgaggagcttaaaaagcagaacgtaaaggcctcaaaaggtacaaagttgtttcaggggctgacgccaaatattggatatcaaaaattaagagagcatctgtcatcaaccgttacgattatgaagctatctaacgactattcagattttattgcaaaaatgaatcgcctgcatccaaggtttgaggatgtgaaaacagacgaactggatgattcagacaagtaa

SEQ ID NO: 37500 - DNA, 759 bp, Escherichia coli
  misc_feature (653)..(685): n is a, c, g, or t
atgatagatgttgtttttgccacattgttcaatatccctgtctggatgcatctgtttaatattattaataaccttgatggtgtgaaacttggatttattatatctcttccagtctttctgatatctgcattaaattttgtttttacaccgttctcattcaggtatatatttaaaccttttttttgtattctgtttatctgtagttccattgttacatatgccaccatgaaatatggtgtgcagtttgataaaacaatgatgcagaatatttttgaaacaaatgcaggtgaaatgacatcatatttcaatatgtctgttgtactgtggtttttatttacgggtatacttccatgtggactattgttgttagtaaatatccgttatcctgagacatggataaagggtattacatatcgtttaatatcaatgtttgcatctctcttgattatatttgcgattgcgtttttcttttataaggattatgcatcagttggcagaaacaactcttcattaaataaagaaataatacctactaattatatctacagtgggtttaaatatgtaagggatttttttgtttctcctggcgagtttcgtcagactggaacggatgcatcccgcacaataaatgaaaaacaaaagccggtaattannnnnnnnnnnnnnnnnnnnnnnnnnnnnnnnnatgtttttagttgtcggggagacagcaagaagtcaaaactatgctctgaatggatattctcgtggtaccaatga

SEQ ID NO: 37501 - DNA, 2028 bp, Escherichia coli
atgaataaactcttaaatatatttaaaaaagcagagtcatatcacgatcttattctggctctcttcttctttatggctgtaatgatgatgattattccactaccaacagttgtggtggatatcattatcgcgattaatatttcgacagctttacttttattaatgctctcaatctatataaaaaatcctcttgaactaacttctttccccacaatcctgttgattacgacgttgatgcgcctgtcgctcagtgttagtacaaccagacttattctgctgcatcacgatgcgggtgacattatttactccttcggtaactttgttgttggcggtaatattgttgttggcctggttatttttactattatcaccattgttcaatttatggttattacaaaaggggccgagcgtgttgctgaagtgagtgctcgtttttcccttgatggtatgccaggaaagcaaatgagtattgatggtgatatgcgcgcaggcgttattgacccgcttgaggcaaaagttcttcgctcccgagtgcaaaaggaaagccagttttatggttcaatggacggggcgatgaagtttgtaaaaggggacgctattgctggtatcattattgttttagttaacctttttggtggcgtgctcattggtatgtggcaatttgacatgccatttagtgcggcacttagcctgttttctgtattgtctgtcggtgatgctttggttgcccagatccctgcgcttattatttctgtcaccgcaggcgtggttgttactcgtgtgcccggtgaaagcgaaaaagaagaaaaccttgcaggtgatattgttcaacaggtttctgttaatagtcgcccttttttaatcagtgccgcactaatgctcgtaatggcgattattccgggctttcctgcattggtcttcttatttctggcggtttgcctgttggggatagcctggaaattacagaagaaaagaacatttggaactggcaataataaggatgctatgggagctgatttgtctaatagccaaaacatctcaccgggcgctgagccattgattttaaacttaagtagtaatatttatagttcagacattacacagcaaattgaggtcatgcgttggaatttctttgaggaaagtggaattccattgcctaagattattgttaatccggttaaaaataatgatagcgcaatagaatttttgctctatcaagagtcaatatacaaagatactcttatagatgatactgtctattttgaggctgggcatgcagagatatcattcgaatttgtccaggaaaagctttcgactaactctatcgtatataagacgaataagactaatcaacagctcgctcaccttacaggtatggatgtttatgcaacaacaaatgataagataacgtttttgctaaagaaacttgtattgtctaatgccaaagagttcatcggcgtacaagaaacgcgttatttgatggacatcatggagagaaaatataacgagcttgtgaaagagctgcagcgccagcttggtttgagcaaaattgttgacatcctacaacgtctcgtagaggaaaatgtctcaattagagacctgagaactatctttgagacgcttattttttggtcaacaaaagaaaaggatgtggttatcttgtgcgaatacgttcgtattgccctgcgtcggcatattttaggtcgctatagcgttagcggtacacttctgaacgtttggcttattggctctgatattgaaaatgagctacgagagtcgatcagacaaacgtcatcaggttcgtatctgaatatctcaccggagcgaactgagcagataattggcttcttaaaaaatatcatgaatccaacggggaacggcgtcattctgaccgctttagatatcaggcgctatgtgaagaaaatgattgaaggttcgttcccgtcagtccccgtgctctcttttcaggaggttgggaataatatcgaacttaaagtattaggaacggtaaatgatttcagagcatga

SEQ ID NO: 37502 - DNA, 846 bp, Escherichia coli
atgcgggagttgcagcagatccgcgacagcttccgccagaaggatgcggaccttcagtctcagtatcagaccggggatatcagtgaggatttttacagacaggctctggcacagaacgcgcagtatctgagcgaacgccttaaggaccaggcagtcttttatgccgaatcggatgtgcagcgtgcggactggcagaaagggctgcaggagggattcagtaactgggtggataatgcgtccgattacgcctcacaggcagcacagctggcgacggagggtatctcagggatggtgaataacatcacggagatgctgaacggaaataaagtggaatggcgcagctgggcctcatcagtgctgcaggaaatatcaaaagttcttatgaatgccgcgattgtcaacggaattaagacggcggcaaacggtatgtccggtgcgggaggatttctcggcagcattggtgactggctgggcggagcggtggccaatgcaaaaggcggcgtgtatacctcggcaaacctgagcgcgtacagcaacagcattgtggacacgcccacgtactttgcgtttgcaaaaggggccgggctgatgggggaagccggacctgaagctattatgcccctgacccgggcggcggatggctcgctgggcgtacgcgccgtgggcagtatgaacggcagtgctggtctggtgtattccccggtctaccacattgccattcagaatgacggggctaacggacagatagggccggaggcggcaggcagtcttgtgcagctgattgaccagcgggtgcaggcggtgatgctgtccatgcgacgtgacggaggaatgctgagtggctga

SEQ ID NO: 37503 - DNA, 342 bp, Escherichia coli
gtggctgagataaaaacgctgcatctggtcccgcgtgaagggatgcaggtgagtgagaagccgtcggtggtgagggtgcggtttggtgacggttatgaacagcgccgccccacagggctgaatcctcaactgaagacgtttcaggcggtgttccgggtgacggatgagtcaacccggcgctggctggatgaatttttatcctggcatggtggttaccgtgcctttttgtggcgaccgccgaaacataaccggacggtgagggttgtgtgccgtgagtggagtgtcacggataatgcccggtacagtgatttcagctgtacgatagagcaggtggtgaactga

SEQ ID NO: 37504 - DNA, 195 bp, Escherichia coli
atgacgttcacagtaaaaaccattccagacatgctcgttgaggcatatgaaaatcagaccgaggtagccagaatactgaactgtagtcgcaacacggtcagaaaatacactggcgataaagaagggaaaagacacgctatcgtcaacggtgttcttatggttcaccgcggatggggtaaagatactgatgcgtga

SEQ ID NO: 37505 - DNA, 234 bp, Escherichia coli
atggacgaagtcaagaaaattgaacattgtaaaattttaaacacagacacacccgataattctgcttcggatttagacagtttcttaaagaaaaacaaaaaaaataaagaaatgagtgagattgtcgctggaaccattctccagttattacgtcagactcaggataaccaattttctacgttggggaaaaagaatgggcacatgaagtctattgacaacaaatcgtctctctag

SEQ ID NO: 37506 - DNA, 666 bp, Escherichia coli
atgcagcagcaccaggtggcaccgcatcacgggcagttcaggaaattcgggcagcacgtgagcagtgggaacgtgaaaacggatttatcagcgacggaaacggcctggaagctgtgggaactcatgggggtggtttattcgaaccgctggatccagaagaacggggccgcaccttcgaagctctggattgcacagattggcgcgatgactgagcagcaaatccggcaggtctgccgccagtgcatggaccgctgccgggcgggtgaaacatggcctccggacctggctgagtttgtggcactgatttcgaaaagcggagccaatccattcggtctgacggtggatgctgtgatggaggagtaccgccgctggcgcaatgagtcctggcgatacgacggaagtgataagtacccgtggtctcagcctgtgctgtatcacatttgcctcgagatgcgttcaaaggggattgagcgccagatgaccgaaggggaattaaaacggcttgcagaacggcaactgacgaaatgggcaaagcatgttagtaacggcctgagcgttccgccagtccggcgacaactggcggcccccaaacgcccgtcggggccaacgccaattgagttgctgaaacaggaatatgaacgccggaaagcggctggttttgtttga

SEQ ID NO: 37507 - DNA, 663 bp, Escherichia coli
atgcagcatcaggtggcacggcatcacgggcagttcaggaaatccgggctgcacgcgaacagtgggaacgtgacaacggatttatcagcaacggaaacggcctggaagctgtgggagctcatgggggaggtgtattcgaaccgctggactcagaagaacggggccgcaccttcgaagctctggattgcccagattggtgcgatgactgaacagcaaatccgtctggtgtgccgtcagtgcatggaccgctgccgggcgggtgaaacgtggcccccggacctggctgagtttgttgcgctgatttcggagagtggggcaaatccatttggtcttacggtggatgccgtgatggaagagtatcggcgctggcgcaatgaatcttggcgatacgacgggagtgataaatacccgtggccacagcctgtgctgtaccacatctgcctcgaaatgcgtaccagagggattgagcgccagatgacgcagggcgagttaaaacgacttgcggaacggcaactgacgaaatgggcgaagcatgttggtaacgggatgagcgttccgccagtacggcgacaactggcggcaccaaaacgcccgttgggaccaacgccaattgagttgctgaaacaggagtatgaacgccggaaagcggctggttttgtctga

SEQ ID NO: 37508 - DNA, 771 bp, Escherichia coli
atggaaaccgtattgcatgcactgaaagcgatgggtaaagccaattctgttgaactggcggcacgaattgatatcagccgtgaagaagttctcaacgaactgtgggagctcaaaaaaaatggcgttgttgataaaacgggtcacacctggtttctggctgtcgaaggtgaatcccgggtaaccgaagagcggccagtaaaatctgaaacacaggatatgctgaccgaagaggtcgctccaaaagttagcgctaacatgatgattgagtttatcgctcaggagggggctaaaacctgtgaagaaatagcgggtaagttcggtgtcagtactcgcaaggttgcttccacgctggcggtggtaaccgcaacggggcggctggcacgcgttaatcagaacggtagatttcgttactgcatgccgggcgataatttaccagcagagccgaaagccgcgctggtaacggaaaatgatggtaaggcctttcctcagccagcaggtgctgcgttaccagtccgggaagccgcaacacaggaagaaataaaaactgaaagtgtggcggtcacagtgcagtcacagccgttgttcaccagaaaacatccggatggtctgattttaccatcgctgcatgtggctaaccgcgagctgcgccgggcaaaaggtcaggttcagaagtgggagcgtgtctgcgccgcgctgcgggagctgaacaagcaccgggatattgttcggcagattgtcgattcatccggtcgtattgtgtcggaaaagtga

SEQ ID NO: 37509 - DNA, 381 bp, Escherichia coli
atggcgaaaccttttacacacgaacagcgtgaagaactgaaggcccgaattatcgggctggtacgcaaaaatgaacgcatgacgatatcacaactggagagagcgacgggagcaggctggcattcagtcagacgttgccttgtggatgtactggcttgtggcgatttatacatgcccggtaaatacggtgtttttgcatcagaacaggtgtatcgcgtatggcgtaaggcagcggagaaaacaaccgaccagacattgattcgaaagttaccagacggagaaatacgccgctatgacaggcatcagaacataatttgcagtgagtgccgaaatagcgaagttatgcagcgtgtactggcgttctgtcaggggaatttttag

SEQ ID NO: 37510 - DNA, 2211 bp, Escherichia coli; identical to SEQ ID NO: 23925

SEQ ID NO: 37511 - DNA, 1902 bp, Escherichia coli
gtggccatcactgcacaccccgcgccggaccggatacaggtcagcaccctgcctgatggtgtggagacatacggtgtatggggactctccctgccgtcactgcgtcgtcgcctgttccgctgtgtctccatccgggaaaacacggacggcacctttgccatcacggcggtgcagcacgtgccggaaaaagaagccatcgtggataacggggcgcactttgacggcgaccagagcggcacggtgaatggtgtcacgccgccagcggtgcagcacctgaccgccgaagtcaccgcagacagcggggaatatcaggtgctggcgcgctgggacacgccgaaggtggtgaagggcgtgagcttcctgcttcgcctgaccgtggcagcggatgacggcagtgagcggctggtcagcacggccaggacgacagaaaccacataccgcttcacgcaactggcgccggggaactacaggttgacagtccgggcggtaaatgcgtggggacagcagggcgatccggcatcggtatcgttccggattgccgcaccggcagcgccgtctcggattgagctgacaccgggctattttcagataaccgccacgccgcatcttgcggtttatgatccgacggtacagtttgagttctggttctcggaaaagcggattgctgatatcaggcaggttgaaaccacagcccgctatcttggcacggcgctgtactggatagctgccagtatcaatatcaaaccgggccatgattattacttttatatccgcagtgtgaacaccgttggcaaatcggcatttgtagaggctgtcggtcagccgagtgatgatgcatcaggctatctggattttttcaaaggcgagatagggaaaacccatctggctcaggagctgtggacgcagattgataacggtcagcttgcgcctgacctgactgaaatcaggacgtccataacggatgtcagcaatgaaataacacagaccgtcaataagaaactggaagaccagagtgcagcgatccagcagatacagaaggttcaggttgatacaaataataacctgaacagcatgtgggcagtgaagctgcagcagatgcaggacggacgcctttatattgcgggtatcggtgccggtattgagaacacccccgacggcatgcagagtcaggtgctgctggcagcagacaggattgcgatgattaatcctgcgaatggcaacacaaagccgatgtttgttggtcagggcgatcagatattcatgaatgaagtgttcctgaaatatctgacggctcccaccattaccagcggcggtaatcctccggcattttccctgacaccagacgggcgactgacggcgaaaaatgcggatatcagtggcagtgtgaatgcgaactcaggagcgctcaacaatgtcacgattaaccagaactgtacgattaagggcatgctggaggcgacccaggtcagaggggatttcgttaaagctgtatcaaaagccttcccgaaaaaagtcggtacgtggggtaacacggaaacaccaaacggtacggttacagtcaccatcagcgatgatcataactttgaccgccagattattattccgcccattatttttaacggtatagcgtatgacgatccggggagcggaaataacccaggaggcacgcgatacacggggtatggttttgaagttcgcaaaaacggcgtattaatcgcatccagagaaactaaaggggccattcccggtagttacagtgcagttattgatatgcctagtggtggtggtagcgtcactctggagtttaagattttccagaaaggcaatcagggggcaggcaatatcaccgactgtacggtgattgtgaccaaaaaagctgcttccggcatcagtattcgttga

SEQ ID NO: 37512 - DNA, 588 bp, Escherichia coli
atgcattatggcaaagttaaaattgtcgatataagcgaatccgtcgtaagtcaatatctggaaagtcagcataagctgacgaggactcgtctgactgacattccgctttacctgttgctggaacccaacaatcctgcgttggctgcggctttaattaccagccagggattttccggagaggtcacggatatgtttcttatgatggcctgcctgtctctgtttgaaacagatgaacggatgtcattgtttttaagtggatgtttatccagcataagtgccaaagtcagggcgataattcagacagatatatcagcaagctggacgcttggtgcgattgctctacagttgcatatgagtgagagtttgttaaagacaaaactgaaaaatgaagggggcatgttcagtcgcttgttgctggaagagcggatgcgtgttgctgtaaatatgttatgttcccggtatggatatggacaggctgtagcagaaaaatgtggttattcaagccggtcctactttatttctgtatttcaccgctattatggcttcccgccagacagatatgtatctaggcaagggcttgattattga

SEQ ID NO: 37513 - DNA, 216 bp, Escherichia coli
atgaaccagatggaaaaaatcacaacaggtgtgtcatacaccacgtcagcggtgggaacgggctactggttcctgcagttgctggacagggtttccccgtctcagtgggcggcaataggcgtgctggggagtctgctgtttggtctgctgacgtacctgacgaacctgtatttcaaaatcagagaggacaggcgtaaggcggcacggggagagtag

SEQ ID NO: 37514 - DNA, 699 bp, Escherichia coli
atgcaggatattcacgaagaaagtctgaacgagtcggttaaatcagagcagtcaccgcgggtggtactctgggaaatcgacctgacggcgcagggtggtgagcggtattttttctgtaatgagctgaatgaaaaaggggaggcggtcacctggcaggggcggcaatatcaggcatacccgattgacggcagcggttttgagatgaacgggaagggcagcagtgcccgcccgtcactgacggtgtccaatctgtttggccttgtcaccgggatggcggaggacctgcagagtctggtgggggccacggtggtccgccgccgggtgtatgcccgttttctggatgcggtgaatttcgttgcgggcaatccggaggccgacccggagcaggagctgagtgaccgctgggtggtggagcagatgtcgcagctgacagccatgacggcctcgtttgtgctggccacaccgaccgagacggatggggcgctgtttcccggtcgcatcatgctggcgaacacctgtatgtggacctaccgctctgatgagtgtggttacacgggcggggctgtggcggatgagttcgacaaccccaccacggatatccgtaaggacagatgcagcaagtgcatgcgcgggtgtgagatgcgcggcatggcggttaattttggcggtttcctttccatcaataaactttcgcagtaa

SEQ ID NO: 37515 - DNA, 168 bp, Escherichia coli
atgccattcgttatcaaatgcgccaaaggttcccagtttcaggttgtttgtcgccactttcgcattgtggtacatcacattcaggtcttttgcatctgtctggatgtagaacgctgccagcaggttattccccccgtctccggtcagggcaacgccctgtggcagtga

SEQ ID NO: 37516 - DNA, 429 bp, Escherichia coli
ttggtatttttggtaaaaaaagcccgcagagcggcaacggaaattaaaaagtttgaaaaacgcgatctggcacaggtggtgattaacgccgcatacctggtggcctgtgcagatggtgaatgtgaggcatccgagaaagcgaagatcgaacaggtactgcgtaatcagcctgcgctgtccgcgtttacgtcagaaattaatgcgattagcgcaaccattatcggtcagctggatacgaactttaaaactggtcgtcgtgcggcgttacgtgagatcgaggatgtgaaacacgatacgcgtgaagcggaagatgtgctggatgtggcggtggccattgcggaggcagacggcgaaattgagccggaagagcgcaaggtgctggaagagattgccggtgttctgggtcttcgtctggagaatcacctgtga

SEQ ID NO: 37517 - DNA, 168 bp, Escherichia coli; identical to SEQ ID NO: 29866

SEQ ID NO: 37518 - DNA, 426 bp, Escherichia coli
ttggtatttttaaaaaaagcccgcagagcggcaacggaaattaaaaagtttgaaaaacgcgatctggcacaggtggtgattaacgccgcatacctggtggcctgtgcagatggtgaatgtgaggcatccgagaaagcgaagatcgaacaggtactgcgtaatcagcctgcgctgtacgcgtttacgtcagaaattaatgcgattagcgcaaccattatcggtcagctggatacgaactttaaaactggtcgtcgtgcggcgttacgtgagatcgaggatgtgaaacacgatacgcgtgaagcggaagatgtgctggatgtggcggtggccattgcggaggcagacggcgaaattgagccggaagagcgcaaggtgctggaagagattgccggtgttctgggtcttcgtctggagaattacctgtga

SEQ ID NO: 37519 - DNA, 846 bp, Escherichia coli; identical to SEQ ID NO: 29857

SEQ ID NO: 37520 - DNA, 432 bp, Escherichia coli
atgtttggaatcttcaaaaagaaaacccgcagagcggcaacggaaattaaaaagtttgaaaaacgcgatctggcacaggtggtgattaacgccgcatacctggtggcctgtgcagatggtgaatgtgaggcatccgagaaagcgaagatcgaacaggtactgcgtaatcagcctgcgctgtccgcgtttacgtcagaaattaatgcgattagcgcaaccattatcggtcagctggataccaattttaaaattggtcgtcgtgccgcgttacgcgagattgaggatgtgaaacacgatacgcgtgaagcggaagatgtgctggatgtggcggtggccattgcggaggcagacggcgaaattgagccggaagagcgcaaggtgctggaagagattgccggtgttctgggtcttcgtctggagaatcacctgtga

SEQ ID NO: 37521 - DNA, 375 bp, Escherichia coli
atgcgtatagagtttgttttgctttacccgccgacggtgaacacctactggcgacgtcgtggcagcacatattttgtatcaaaagccggtgagcgttatcgccgggctgtggcgcttattgttcgccagcagcggctgaaattaagcctgtccggaaggctggcgataaagattattgccgagccaccggataagcgccgccgtgacctggacaatattctgaaagcgccgctggatgcgctgacgcatgcggggttgctaatggacgatgagcagtttgatgaaatcaatatcgttcgtgctcagccagtatctggtggacgtctgggggtgaagatttaccccataatgcttgaagggcaggtcaaaaaatga

SEQ ID NO: 37522 - DNA, 210 bp, Escherichia coli
atgtggatggagttcgacagggtatccccgctgggtgatgagcgcggggatatccgtaatgcacagatcgtgaaagcggttttcggggcacaggggatgaatgttgcactgaaggacgccatgctctgctggggcgaggatgaggataagccggaggtggatccgtttgcggcgctggaagacgcgctgagccttgcagcaatgtcataa

SEQ ID NO: 37523 - DNA, 375 bp, Escherichia coli
atggcaaaagatctgaaaacactggcgctggccagactgtcggggttccgtcataaaacggtgaaggtgccggaatggagaaatgtcagcgtggtgctgcgggagccttcggcagaggcctggtatctgtggcaggaagtgctcaatggtgatggagaggatgacgataccctgtcggtggtggcgaaaacccgccgtaacctggaagcggatgtgacgctgttctgcgatgtcctgtgtgatactgacctgcaacgggtgttcactccggacgaccgtgagcaggtgctggccgtctatggtccggtacatgcccggttgctgcgtcaggcactggaactgatcgctgatgcagagtcggccagaaaaaagtag

SEQ ID NO: 37524 - DNA, 495 bp, Escherichia coli
atggtgtcgcactggttcagtgccggtcagtggcagctgccgaacgaaagcgattatctgaaattacaggcactgtttgcccgggtggcagaagagaagcatcagcggggtgaactggaaaagccccaccaccagctggtggatacgtatgcctctctgaaccgacagtatgcggagctgcagagtgaatataagcatctgcggcggtatttcggtgtgacggtgcaggtgccgtacaccgatgtgtggacgtataaaccggtgcagtactatccagggaaacatccgtgcgaaaaaccggcagaaatgttgcagcagataatcagcgcaagcagtcgtccgggagacctggttgcagatttcttcatggggtcggggtcgacagtgaaagcagcgatggcgctgggacgtcgtgcaactggcgttgaactggagactgaacgttttgagcagacggtgcgggaagtacaggatttaatcattcgtaacggatga

SEQ ID NO: 37525 - DNA, 717 bp, Escherichia coli
atgtctgctttgtatgaacgttcacagctgacgcaggtgatgatttcatctgccccggcgactgctgaaaccatggagaaggcggaatatctgcgcctggactgcaccatcaaggaagtccagttcaccgccggtcagaaacaggatattgatgtgaccacgctctgctccacagagcaggagaacatcaacggtctgggggcgtcgtccgagatttccatgtcgggtaatttttatctgaatcaggcccagaacgccctgcgtgatgcctatgacaatgacacggtgtatgcgtttaaggtgcagtttccgtccggtaagggctttaagttcctggcggaagtgcgtcagcacacctggtcatccggtaccaacggcgtggtggctgcaacgttttcacttcgcctgaagggtaaaccggtgtcctatgtggtaccgctggcgtttgtgaaaaatctggataagacacttaccgtgaataccggtgcgctgctgacaatgtcagtcagtgtcaacgggggaacgccgccttataaacacgcctggaagaaggatggtcagccggtagagggacagactactgacactttcagtaaagccaatacgcagtcaggtgataagggggcttatacctgcgaggtaacggattctgcagaacagccgcagagcattacctctgatgcgtgtacagtaacggttaatggtgcgggcggataa

SEQ ID NO: 37526 - DNA, 270 bp, Escherichia coli; identical to SEQ ID NO: 23881

SEQ ID NO: 37527 - DNA, 309 bp, Escherichia coli
gtgctgacgcacttccgccaggaacttaaagcccttaccggacggaaactgcaccttaaacgcatacaccgtgtcattgtcataggcatcacgcagggcgttctgggcctgattcagataaaaattacccgacatggaaatctcggacgacgcccccagaccgttgatgttctcctgctctgtggagcagagcgtggtcacatcaatatcctgtttctgaccggcggtgaactggacttccttgatggtgcagtccaggcgcagatattccgccttatccatggtttcagcagtcgccggggcagatga

SEQ ID NO: 37528 - DNA, 270 bp, Escherichia coli; identical to SEQ ID NO: 23881

SEQ ID NO: 37529 - DNA, 255 bp, Escherichia coli
atggcgggtgtggcttacagccgtgtgtcgactttctccggggattatcttcgcgtaactgacaacaaggggaaaacgcacgatgtgctgaccggaagtgatgacggtcgccacagcaacacgtctctggcgtggggagctggcgtgcagtttaacccgaccgaatccgtggccattgatattgcttatgaaggctccggcagtggcgactggcgcactgacggtttcatcgtgggtgtcggttataagttctga

SEQ ID NO: 37530 - DNA, 309 bp, Escherichia coli
gtgctgacgcacttccgccaggaacttaaagcccttaccggacggaaactgcaccttaaacgcatacaccgtgtcattgtcataggcatcacgcagggcgttctgggcctgattcagataaaaattacccgacatggaaatctcggacgacgcccccagaccgttgatgttctcctgctctgtggagcagagcgtggtcacatcaatatcctgtttctgaccggcggtgaactggacttccttgatggtgcagtccaggcgcagatattccgccttctccatggtttcagcagtcgccggggcagatga

SEQ ID NO: 37531 - DNA, 213 bp, Escherichia coli; identical to SEQ ID NO: 29883

SEQ ID NO: 37532 - DNA, 168 bp, Escherichia coli; identical to SEQ ID NO: 23915

SEQ ID NO: 37533 - DNA, 168 bp, Escherichia coli; identical to SEQ ID NO: 29859

SEQ ID NO: 37534 - DNA, 219 bp, Escherichia coli; identical to SEQ ID NO: 37404

SEQ ID NO: 37535 - DNA, 327 bp, Escherichia coli; identical to SEQ ID NO: 37483

SEQ ID NO: 37536 - DNA, 222 bp, Escherichia coli
gtgactcgcggctatgaatccagtaaacgagatgtgcggattgaaggcgcgggtatcttaggtggtatgaactatcgggtcagcgaagggccgttacaagggatgaatttctttcttgctgccgataaagggcgggaaaagcgcgatggcagtacgctgggcgatcgcctgaattactgggatgtgaaaatgagtattcagtatgactttatgctgaagtaa

SEQ ID NO: 37537 - DNA, 306 bp, Escherichia coli
atgagtaagcgtctattccctatgaataatttatgtcgttattcgtcctgtcatccaccctctgtatggttaagcctgggttatattttgtacaatatcgggataccgttcgaaccaatccagaatattacgcatcgcgtcactgatgtttttatcgtctttatattgattctcaagtctattatttcgaacaatagtaagcttagaacgtattttatcatcacaatcgacaattttcgcattcaatgcatttacttcatcctgcacttctatactattccaattgtcccttttgttatcaaataa

SEQ ID NO: 37538 - DNA, 483 bp, Escherichia coli
atgactttcttgccagatggacatgttgccgttgctccaggccaacgccacgcagtagctgaagcggtaacaatttggctatcacctgcgccaatttttttccacgtaccggattggcacggaggccagtgccaatccggtgtgtggagaacttccggttcctctaacggtagttacagtaatcttggctcacacagaggatcatttactggtcgcaatacaggaagtggtacgctgtttgtttacgcctctggagggaatggtggttccgccgggggagattgcgctaacacatccagattgcagggatacgttgcaggggcattgattagcacaaatgcgagcaacaacccatcttatgggaagacagcattcatctcttttgctgtccctgctggcgcaacttatcagatcacctcttatccggcccaaaactactcttgtggctcaggggtattttcagtatttggataccaaacttaa

SEQ ID NO: 37539 - DNA, 702 bp, Escherichia coli
  misc_feature (215)..(245): n is a, c, g, or t
atgaaagggttattatctttactcatctcttctatgatattccccgtgcatgccggaatggttattttcgggacccgtatcatttacccggcagagcagaaagaggtcatggtacaactgatgaatcagggaaaccgctcttcgctgatgcaggcgtggattgatgatggcgacacgtctctgccgccagaaaagattcaggttcctttcatgtnnnnnnnnnnnnnnnnnnnnnnnnnnnnnnngccaccagtagtgaaagtagcggccaattctgggcaacaaataaaaattaaaatcatgcctaataaattacccagtaataaggaaagtattttttatcttaatgttctggatattccaccgaatagcccagaagatgaaggaaagaatgcgttaaaatttgccatgcaaaacagaatcaagttgttttaccgacctgctggtattgctccggtaaataaaacgacttttaaaaaattacgagtgagtcgtagcggtaataacgtagtcataaaaaatgactcgccaaattgggtaacgatttctgatgttaaggctaataacgtcaaagtgaattatgaaacaatcatgattgcaccacaagaaagtcagaatgttagtgaaaaaaataataatgcgaatggctggcaactgaccattatcgatgatcacggcaactatattagtgacaaaatttaa

SEQ ID NO: 37540 - DNA, 831 bp, Escherichia coli
  misc_feature (747)..(756): n is a, c, g, or t
atgttggatgtagctattgaaaaccagaacgggtggaattatagtgcacctgcacctcataaaacgggtgccgggatttgcaccccgatgatcactagagcgcataaccgcgccaaagcggtttttttatgcgtaaagcgcagccacattcagattatggtggggcgtatggggccgttttcgggcgggccggattctctagtgaccggtagtgcaaaccctgtacgtctcaccacccatgagatttgcacctccggtggtgagtttaccaacttatcactagaggctgccatcatggctactatccctaccctttctcaccctgacgtaaccatcgaaaatggtcgtgctgtcactacgtctgttgcagttgcagagtttttccgcaagctgcataaaaacgtcattcaaaaaattgaagctctggaatgttcctcagaattcactgagcttaattttaagccaagtgaatacaccgactcaaccgggcgcaaactcccaatgtaccaaatcaccaaaaacggcttcgttttcctggtgatgggtttcactggcaaaaaagccgctgcattcaaagaggcctacatcgctgagttcgaccgcatggaagcagagctacgccagaataataccactcccacaaacaaaatcattccgggcgatgggcgcactctggttgttcgcttcgacaaattcggcaacgtcgaattcactgaaaccgttcctgatggcgctctcgtctgtacnnnnnnnnnncgtctgtaccctggacactttccgcctttatctggagaaacagggctggactcttgtaaaccgaagcgcaattaa

SEQ ID NO: 37541 - DNA, 240 bp, Escherichia coli
atgactcttgacgagtacttgagacaaagctctatcagacaagccgattttgcggcgattgttggagtttctcagggatttgtcagtggggttattacagggagatacatgcctcaggggcgaaaagccattgaatgggcaaaagctacagactggaatgtaactccccatgaactaaacccgtatgactaccctgacatggaagatggtattccgcttcatgtaaggcaaacagtctga

SEQ ID NO: 37542 - DNA, 720 bp, Escherichia coli
atgacaaagaaaattacaattactgacaaagacatccagaacgctgaacgactgcgcaaaatctgggatgaaaaacggaaacagctatccctaagccaggaaaaagccgcagatatcctcggcttcaaaacgcagggggctgttagtcagttattgaacgcaaaaattgcgttaaatactgaaaatacccttaagtttgcggctttattacaggttcctgcggaagaaattaatccagatctgagtgatttgttacgcagtattcgtacccacactcccggaaacaggcgtaacctgttcgagaaatattacgaatatccgttactctcctgcgtacaggctggcgcattcacaatggatgatttttcgtacacacagaaggatgcgataaagtggatctccaccaccacaaaagccagtgacaggtcgttctggctggaagtcaaggggcattcaatgaccgcgccacagggtggtaagcccagtttccctgaagggatgctgatactcgttgaccctgagcgggagattgaggatggcgatttttgcgtggcccgaatgaatggcgatgaattcaccttcaaacgattcattcgtgagagcggtaaagcgtacctggagccactcaacccaagattcgagatgattgagtgtaacgaaaactgccagtttgtcggaaaggtcatcaagtcgcagtggaatgatgagacttttgattga

SEQ ID NO: 37543 - DNA, 285 bp, Escherichia coli; identical to SEQ ID NO: 34751

SEQ ID NO: 37544 - DNA, 876 bp, Escherichia coli
atgtttagcataagaaccctactacctattagcgccagcgtatcagttccgacaaaacaatctcaatccatcccaataactttagcagggagaacaatcgaaaaagcgcaagagaaagaaggattacttgtttttttaggaatgaaatccgttaatgactatactcttaatattcttggccaaaatgtttcaagagtcacaacggggaaaaaaccgtatgatttattattcctgaatgatgctacaaaacaagattttgataaaaggaaaatggagtttacatatcctggagcaaataaaagccatctacaatcaagtaatagcgatgttgttgctgctgcagctataagtattacagcgacagagatgaaaaccatcctgccagatgatttaacactaggaaaatacaacaaaatttatctgtctgggcatggttctgctggtctacctcttcttaagtgcggagatgaatttttatcaccgtcagatattgtcgaccgcattgttcagcataatcttcatgaaatagatgatatcagattaacatcctgtaactcagccaacataataaaaaacaaagacttctctcctgatgaaatagaaaaatccgcaaatatgaataacggctggttggccagggcattatttggtcaaaagaggtctttagcagaacacgtctatgccgagtttgaacgtcgcggaattaacgtttctatatcaggttaccatggcactggcgttttttatgtaccagagcatggtaaaccaacaacgcatctacgctccacaactgtgcctgcaacacctgaacatactgtaagaagaagcgactacagagccactttgggtagaactcaacccatagatattgagtaa

SEQ ID NO: 37545 - DNA, 321 bp, Escherichia coli
gtgcgcgggcaggggataaattaccggatttacttgatgaatatatcagagcaacaactgaataatatgatgagcgctgtcacaactgcattacagcccctgataagggcattgccggtgacgccagttgaatgggctgatcaaaattattatctgcctaaagaatcttcatatggtgagggcgaatggaaaacgctgccattccagatcgccatcatgaacagtatggggaatgatcagatccgcactgttaatctgattaaatctgcccgtgttggctatacaaagatgttgctggggggggggcgggtattttattga

SEQ ID NO: 37546 - DNA, 1335 bp, Escherichia coli
gtgacagcctcaggcaccgggctgggctatggcgaaggcgatgagtcctatggctatgacagctgtggctacctgaaggcgcagtctgcgggcgggcaccggataagtgaagagactgaccagtatgccggaggccaccggctgaaacaggccggaaacacgcagtatgactatgacgccgcaggccggatggtcagccgcaccagacaccgtgacggctatcgcccggaaacagagcggttccggtgggacagccgggaccagctgaccgggtattgcagcgcacagggtgagcagtgggaataccgccacgacgccagcggcagacgaacagagaaacgctgcgaccggaagaaaatccgcttcacgtacctgtgggacggcgacagtattgcggaaatccgggaataccgcgatgatgaactgtacagcgtacggcacctggtgtttaacggctttgagctgataagccagcagtgcagccgggtacggcagccgcacccgtccgtggccccgcagtgggtgacacgaacgaatcatgcggtgaacgacctgacgggccgtccgctgatgctctttaacagtgaaggtaaaaccgtctggcggccggggcagaccagcctgtgggggctggcactcagcctgcccgcagacacagactacccggacccgcgcggggagcgggacccggaagcggaccccggcctgctgtatgcgggacagtggcaggatgcagaatcggggctgtgctataaccggttccggtactacgagccggaaaccgggatgtacctggtgagtgatccgctggggttgcagggaggggagcagacttaccggtatgtgccgaatccttgtgggtgggttgatccgctgggattggctgcaagttctaaaatcagcagtttgatggactatattggcgatggtcgtcgtgttagtgggcatacgggtttcctggatggggttcgtttatcacgtagtcaaataaacaatattgctaaagaaatggagaagctaggaattaaagtaataaggaaagcagataaatatttgccaccaaatgctagggcagcttttgattatggtcttcgcaatatttatcttaggaaaaatgctaccttatatgaggtgtatcatgaagtgattcatgctaagcaatttgcgaaaattggacgagaagcatacgaagcactaggacgtttatctagggaggaacacgttctaaatgaaatattaaaaagtaaaaatttattcaatgaagcggaaatagctcatgccataaaatatgttgagggattgagagaaaaattcatgatgggactaataaattga

SEQ ID NO: 37547 - DNA, 759 bp, Escherichia coli
atgacaactaaaatttctgttgaaactctctccccgatcacccataaccagattcctgttattaccaccgaacttttggcgcagctttacggcactgagccggtgcgtattcgccagaatcatcatgagaacaaagtacgcttcgttgaagggaaacactttttcaaagttgttggtaatgaccttaaagaattgcgggtagctttaaactactcacaaaatttgcgggttactttaagtaactcacaaaatttgcgggttactttaagtaactcacaaaatttgcaaccatctttaagagggttacaaatttccccgaaagcccgctccctcatcctctggacagaacgcggcgcagcccgtcacgcaaaaatgctcgaaaccgatcgggcgtgggaagtgttcgaaaaactggaagactgctatttcagtcaaaaaatcccagaacaacttcagcttccagaatcaacactatctatcaactaccctctctcgtggttttcagagcatcacccctactccatgatgagctatgttgatcgaaaaactcttaacctggacgtttctgtgctcttcgatatgccaagcccaactatgcgcatcctcaacgagctacacagcaagggctataacgtcgatgcagctgtcgccgaatttaacgccttcaagcatctgacggaagaaatgcgccgtactctacaggatatttcaagattgtcagatcgaaattcccgaaaaggcttctcgttaagtctttaa

SEQ ID NO: 37548 - DNA, 231 bp, Escherichia coli
gtgagcgggattgactaccaggatttggctgctgccaacgctttcctggcggatgtgcgggcaggggcgtttaacgacctttgcgcggcgtttgtcaggcacgcaaaaattgcaggactgggtgatggcgacactgtgacgcttaaggaagcgactgatgcgctgctgcactgtgcggaacaacttcgcgcacctgaaggcttggtaatactagctgaatgcccacaatag

SEQ ID NO: 37549 - DNA, 651 bp, Escherichia coli
atgccgtctgaacagaatctccaaccgtgttttgaaatcaatccttgtttggatgaaaaatctgttatcaatcttcttcagcaatttgctaacgtacttggcgaattatggttccatcgccatgagtatgatgataactggattaatggatgtagggcctatggatggataaaaaactttcttgtaaaaaatcataaaaaactcaaaggagtggcgattctttcaacacctctgaattttgtgtttaccctgaacagggtgccgttacagtttgtgaccgataaactggattcaccaaaaaagaaacatcgcttatgtaaaaatgatgttgagtgtcgtcagttatctctttttgaagatgatgttaattttgaacatgatgttacatggcgtgttctggctgaaaaattaccatctgcaaataaaaaagatgaagatattgaacctccaacgtggcttttagccctgataggttttgattcatcaaataatgtagtgagtagatacgaattggtgtctaaagtccatgctccagtacaagcagctaatactgacgtattgccagaggccgtggaaacaccaccgctgaatttgcagcggcgtgttaagaatgcgaaaaaagcagatagtgataaatatggaactatttga

SEQ ID NO: 37550 - DNA, 1122 bp, Escherichia coli
atggaactatttgattctataggtaattatcgtggtgactgcttaaaattagctcgtcaggctaaaggggttacgggcgaagagcttgctactgctttgggggtgactcggcaatttataaacaagttagagcgtggttatcccccttcatctcagatgttgacagctcttgcagattatctggatgttaaagagtcgtttttcttcactggaaggaaatcaccattagacagcgagaactgccatttcagaagcaagagatcaaggacgcagtccttaactaatagtattctggctcgagctgaaattttggagcagtttgtaaagtgtttggaaacagaaatagttcttccagaattgaactttcctgatacgtccggattacctttgaactccgatgaagatattgaaagaattgccgaggcctgtagaaggtattggggtttggggctgggaccgatatcttcaatggttaatttcgtggaaagtattggggttgttgttgctcatgtatctggcgtggatgatcgtattgatgcgtttactattaatagtaaacgcccattgataattagaaattccgcgaaaaagagtgtgtgtcgatttcgctcagatctcggtcatgaactggggcatcttgttttgcatgaagggattataacaggggataaaattacagaacatcatgcggattatttttcgagcgcattccttgtacctagagtttcgttcgttaatgaatttcctaaaatgcgaggatcgcatcttgactggaatgcactaattaatttcaaagaacgatggaaaatcagtcttcgcatgtgtatttatcgtgctacggttttggggctgattacgccacaacaaatgagaacgggatttatccatctaaataaaagagggacgattaaaggagagatgggggatgagttaatccctgaggaaaaacctcgcttactttcctgtgcagttgaattgctggatatatcttcttggaagcagatactggatatgtcgggagtgagggaacgctttgtttccaaaatgtttggaataaggcgcacacatgatgatatatcgagtaatattgtgcctctttatagatacaaagactttggttaa

SEQ ID NO: 37551 - DNA, 543 bp, Escherichia coli
atgatttacccaacaaataccggaaaaagcggagaacatcttcgactcaatacgttggaaagcatctggatacaggggaaactgcgtatgtgggggcgctggtcgtacattggtggcggcaggtcagggaatatgtttaatcagttgctgacatccaaaaaattgacaaaaacagccatcaatgaagccctgcgcagattgaaaaaagcgggaattgataaaccagagttggaagcatttttgcgtgagatgatcgaaggaaagcaaaaaagctggttaactcactgcactgatgcagaggcactaaaaattgatagtgttataggtgaagttctggcggatcatccaggactactaaatgtcctgagtcagcgttatgtggggcgagggatgagtaagagaaggatggccgagttattaaacgaacagtacccagagtggtgttttagcacatgcgaaaagcgaattgctaattggttggcagttgctgagtatgtcctatatattcccatgcgagaatcatttgctcaaaaaatagcttga

SEQ ID NO: 37552 - DNA, 468 bp, Escherichia coli; identical to SEQ ID NO: 23852

SEQ ID NO: 37553 - DNA, 234 bp, Escherichia coli
atgaaaatcacatttgaaagttacggtttaacagcaagtgtggttatctccagctctatattcgaaagccgcaaacatcagcatatcgttgatgcagtgaaactcaaagccccggaagttaccgtcacaacacatggacttttcaggatacgaacgacgttgactacaacacacctctcggcatgccgtgtttatgatatggcactcaaggaatacaaccagtgttcgtcctga

SEQ ID NO: 37554 - DNA, 399 bp, Escherichia coli
atgaacgcagtgctcacagaattgaacaaattaggaaaagcatcagccgaaagtatttctaaaggtctcaatattgatttgaatgacgttattgacactctatggaagttaaaaaaccagggggtagtaactgtaaaaaatggcatctggcaggcagttgcaagggaagtggacaaaaaaccaaatatcgcctcagtgcagccagtgcagccagtgcagccagtgcagccagtgcagccagtgcagccagtgcagcacaacattataggtgacctgctacgtaaatcacggaaagaagcgcgtcgcgccgggcggaaacagaaacgatgggagggtgcatgtaaggcgctgcaagaactgaataaataccgtgacttgatcaacgaattgtcagagtga

SEQ ID NO: 37555 - DNA, 192 bp, Escherichia coli
atgcacaaagcatctcctgttgaattaagaacgagtatcgggatggcacatagcctcgctcaaattggagtcaggtttgtgccaataccagtagaaacagacgaagaatttcatacgttagccacatccctttcacaaaagctggaaatgatggcggcgaaagcagaagcaaacgagagagacccggcatga

SEQ ID NO: 37556 - DNA, 216 bp, Escherichia coli
atgacacctcagcaggaaaacgcccttcgcagcattgcccgtcaggctaattctgaaatcaaaaaagccagacagcagtttccggataaaaacgtcgatgacatttgccgtagcgtactgaagaagcaccgcgaaacggtaacgctaatgggattcacaccgactcatttaagtctggcgatcggcatgttaaacggcgtctttaaggagcgatga

SEQ ID NO: 37557 - DNA, 273 bp, Escherichia coli
atgtcagaaattacatccctggtcactgctgaagcagtgaaggaagtcctgcgctctgaagaagtcctgagtgcactgaaacaaaaacttcgccataacctggaagcgcgtcttgatgcagaggttgatgccattctggatgagctgcttggtgtacaggcagagccaccgactgaagcgggagataccaccgcagagagcggtgaagttcagcctgaatcaccggtcgccgatgcgactgaacctcaacccgaatcggtcatgatgctgtaa

SEQ ID NO: 37558 - DNA, 324 bp, Escherichia coli
atgaactggatagtgattgacacggtaatccagccagcatgtggcatatcattttcagccatatggtgtaacataaaattaatattatggtatcagtcagataccttcctccctccgggctgtatttttacaccaacccggacaggcgtaatactcaataataaagagctccccgtcaccatttacaacgtggccccatttaataaaaacgtctggaatttaattaaaaacagccaggagtgccctgcaaacacaggaaatatcacagataagtgttttaatcatcgctgcattctggaaatatgcccatacgggcgaaaataa

SEQ ID NO: 37559 - DNA, 270 bp, Escherichia coli
atgaagaagatgtttatggcggttttatttgcattagtttctgttaatgcaatggcggcggattgcgctaaaggtaaaattgagttttccaagtataatgagaatgatacattcacagtaaaagtggccggaaaagagtactggaccagtcgctggaatctgcaaccgttactgcaaagtgctcagttgacaggaatgactgtcacaatcaaatccagtacctgtgaatcaggctccggatttgctgaagtgcagtttaataatgactga

SEQ ID NO: 37560 - DNA, 417 bp, Escherichia coli
atgaataaaaacgaccttgaagcattatctgacactaggcttaatgaggccaaatgcttgcttgatcatggcttttttcatggtgcatattatctttgtgggtatgcagttgaatgtgcattgaaggcctgtattgccaagtcatttttacaacatgagtttccaaacaaaaaagtcgtaaatgattcatatactcatgatttgtcgcaacttctcaaaattgccaacttacatcaaattttgattgctgacgcaaaaaatgatgtttcgttggagattaactggtcggtcgttaaagactggagcgagcaatttagatacgacaataacataagtaaagctatggccgaacaattgtttgatgctgtaggtgaccaaaattctggagttttgaaatgggtaaaagcacactggtaa

SEQ ID NO: 37561 - DNA, 348 bp, Escherichia coli
atgactatcaaagcgactgacatagagattcttcatcgttatgctgaaggggtaatggaacgttctaaccatcatgcaaaaaatgttggtgcagccgctcttacattgctaggaggtgttatctggaaagccctgcccggatcaatcgagataagaacgtataacggaagtcttgcaaatatggtgtggtggcaaagcgaaagaacattaaaaaattatgcaatctcatacaaccataattcatgtgaaattgaaatgagagatgaatcagtcaaaggtgctgtattatttagcatttccaacgaaaccactccagaaaaaatattatcacagctttctgagctttaa

SEQ ID NO: 37562 - DNA, 327 bp, Escherichia coli
  misc_feature (239)..(248): n is a, c, g, or t
atggtcgatcaggactggatggattccagtaaccccggaacctggacggatgaaagtagacaccctgatacacaactcaattatgccaacgaatttgatctgaatatcaaaggctggctcctcaacgaacccaattaccgcctgggactcatggccggatatcaggaaagccgttatagctttacagccagaggtggttcctatatctacagttctgaggagggattcagagatgatannnnnnnnnngatgatatcggctccttcccgaatggagaaagagcaatcggctacaaacaacgttttaaaatgccctacattggcttga

SEQ ID NO: 37563 - DNA, 552 bp, Escherichia coli
atggaatctgcgcccagcgcgacagagttaataccgttggcactgctattactaccaagcgcaagactcttatcaccagttgcattactggctgtgcctaaggcaatggtgtttaagcctctcgactggctaccattacccagagcgatggcatccacgccatcagctttgttgccctggcctatggcgattgcattatctgccagagcctggctgccatttcctaatgcgatagtattgactttatcggcaaggcttccgaaccccattgccatgctattagtcccttttgccttcgcattattgccaatagcagttgcattttcagcggcttcggtctcagcacctatcgcaatagcgttttcttcagatgcgacgctacttgctcccagcgccattgaatacgcttttgacgcattggcggtgtcgccaagagcaatactcataatctcagtagctttagtggcatttcccagggcaatggcgtttgctccttccgctttggaagagtcccccatagcaatagacaatttacccaatgcttttgaataa

SEQ ID NO: 37564 - DNA, 228 bp, Escherichia coli
gtgagctgcactgaatgcctttttagtttcgttccagagcagggcatcagcctgaaggtcaccaacggaatccgtcaggttggtgatattggtggtattggtggcaatatttgccgtattcgtggcaatgttgctggtattagtagcgatattggcggtgttggcttcgacatcgtcattggtagctttcagttgggaaccgttaaccgcatccttactggaggctga

SEQ ID NO: 37565 - DNA, 2448 bp, Escherichia coli
atgccggtatggaacggccagacgctgacgttcgttcaggacagtccgtcggatgtggtgtggccgtacaccaacagtgatgtggtggtggatgataacggcgtggggtttcgctacagcttcagcgccctgaaggaccgccacacggcggtggaggtgaattacaccgacccgcagaacggctggcagacctccacggaactggtggaagacccggaagccatactgcgctacgggcgcaacctgctgaagatggatgcgttcggctgtaccagtcgcggtcaggcccaccgtgccgggctgtgggtgataaagaccggactgctggaaacgcagacggtggatttcacgctcgggtcacaggggctgcgtcacacacccggtgacattattgaaatctgtgataacgactatgccgggaccatgaccggcggacgtatcctgtccatcgatgccgccagccgcaccctgacactggaccgtgaggtgaccctgccggagaccggtgccgccacggtgaacctgattaacggcagcggtaagccggtgagcgtggccatcactgcacaccccgcgccggaccggatacaggtcagcaccctgccggatggcgtggagacatacggtgtgtgggggctctccctgccgtcactgcgtcgtcgcctgttccgctgtgtctccatccgggaaaacacggacggcacctttgccatcacggcggtgcagcacgtaccggaaaaagaagccatcgtggataacggggcgcactttgacggcgaccagagcggcaccctgaacagcgtcatccctccggcagtgcagcacctgacggtggaggtgagcgcggctgacggccagtatctggcacaggcgaaatgggacacgccgcgggtggtgaagggcgtgcgcttcagtctgcgcctgaccagtggaagcggtcaggacagccgtctggtgaccaccgccatcactgcggatacagagcatcgttccagtggtctgccgctcggggaatacaccctgacagtcagggcaattaacagttatggccagcagggcgaaccggccaccaccacgttcaggattaatgcacctgcggtacccgccacgattgagctgacaccgggctattttcagataaccgcggtcccgcgtcttgcggtgtatgacccgacggtacagtttgagttctggttctcggaaacgcggattaccgatatcaggcaggttgaaaccacagcccgctatcttggcacggggctgtactggatagccgccagtatcaatatcaaaccgggccatgattattacttttatatccgcagtgtgaacaccgttggcaaatcggcatttgtagaggctgtcggtcagccgagtgatgatgcatcaggctatctggattttttcaaaggcgagatagggaaaacccatctggctcaggagctgtggacgcagattgataacggtcagcttgcgcctgacctgactgaaatcaggacgtccataacggatgtcagcaatgaaataacacagaccgtcaataagaaactggaagaccagagtgcagcgatccagcagatacagaaggttcaggttgatacaaataataacctgaacagcatgtgggcagtgaagctgcagcagatgcaggacggacgcctttatattgcgggtatcggtgccggtattgagaatacgccagcaggaatgcagagtcaggtgctgctggcggcagacaggattgcgatgattaatcctgcgaatggcaacacaaagccgatgtttgttggtcagggcgatcagatatttatgaatgaagtgttcctgaaatatctgacggctcccaccattaccagcggcggtaatcctccggcattttccctgacaccagacgggcgactgacggcgaaaaatgcggatatcagtggcagtgtgaatgcgaactcaggagcgctcaacaatgtcacgattaaccagaactgtacgattaagggcatgctggaggcgccccaggtcagaggggatttcgttaaagctgtatcaaaagccttcccgaaaaaagtcggtacgtggggtaacacggaaacaccaaacggtacggttacagtcaccatcagcgatgatcataactttgaccgccagattattattccgcccattatttttaacggtatagcgtatgacgatccggggagcggaaataacccaggaggcacgcgatacacgggttatggttttgaagttcgcaaaaacggcgtattaatcgcatccagagaaactaaaggggccattcccggtagttacagtgcagttattgatatgcctagtggtggtagcgtcactctggagtttaagattttccagaaaggcaatcagggggcaggcaatatcaccgactgtacggtgattgtgaccaaaaaagctgcttccggcatcagtattcgttga

SEQ ID NO: 37566 - DNA, 2436 bp, Escherichia coli
atgccggtatggaacggccagacgctgacgttcgttcaggaccgcccgtcggatgtggtgtggccgtacaccaactgcgatgtggtggtggatgataacggcgtggggtttcgctacagcttcagcgccctgaaggaccgccacacggcggtggaggtgaattacaccgacccgcagaacggctggcagacctccacggaactggtggaagacccggaagccatactgcgctacgggcgcaacctgctgaagatggatgcgttcggctgtaccagtcgcggtcaggcccaccgtgccgggctgtgggtgataaagaccggactgctggaaacgcagacggtggatttcacgctcgggtcacaggggctgcgtcacacacccggtgacattattgaaatctgtgataacgactatgccgggaccatgaccggcggacgtatcctgtccatcgatgccgccagccgcaccctgacactggaccgtgaggtgaccctgccggagaccggtgccgccacggtgaacctgattaacggcagcggtaagccggtgagcgtggccatcactgcacaccccgcgccggaccggatacaggtcagcaccctgccggatggcgtggagacatacggtgtgtgggggctctccctgccgtcactgcgtcgtcgcctgttccgctgtgtctccatccgggaaaacacggacggcacctttgccatcacggcagtgcagcacgtaccggaaaaagaagccatcgtggataacggggcgcactttgacggcgaccagagcggcaccctgaacagcgtcatccctccggcagtgcagcacctgacggtggtggtgagtgcagctgacagccagtatctggcgcaggcgaaatgggacacgccgcgggtggtgaagggcgtgcgcttcagtctgcgcctgaccagtggaagcggtcaggacagccgtctggtgaccaccgccatcactgcggatacagagcatcgtttcagtggtctgccgctcggggaatacaccctgacagtcagggcaattaacagttatggccagcagggggaaccggccatcaccaccttccggattaacgcgccagcaaaacccgccaccattgaactgacgccggggtattttcagataacggcggtaccggtgctggcggtgtatgacccgacggtgcagtttgagttctggttttcggaaaaacgcatcacgaacacggcacaggtggaaaaatctgcccgttatctggggagcggcagtcagtggactgtccagggaagccggattaagccggggacggatttctggttttacgtgcgcagcgtcaacctggtggggaaatctgcgtttgtggaagtcagcgggcagcccagcaatgatggtgaagggtatctggaatttttccgggaaaaaataggaaaactgcatctggctcaggggctatgggagctgatagacaacagccagcttgcggatgagatggcggagatgaagaccaccatcacggaaacccgcaatgaaatcacacagacggtcagtaaaacgctggagaaccagagcgccactatacagcagatacagcgcgtgcagaaggacacaaatgatgacctggctgcgctgtacatgctgaaggttcaaaaaacgaaagacggcattccctatgtggccgggattggtgcagggattgaggatactgatggccagccactgagcaacatactgctgctggctgaccgtatcgcgatgataaatccggagagcggcaacagcacgccgttatttgtggcgcaggggaatcagctgttcatgaacgacgtgttcctgaagcgactgtttgcggtgagtatcacctcgtccggcaatcccccgacgttttccctgacgccggacgggcgactgacggcgaaaaatgcggatatcagtggcagtgtgaatgcgaactcagggacgctcaacaacgtcacgattaatgagaactgtcagattaaggggaaactgtcagccaaccagattgaaggcgatattgtcaaaacggtcagcaagtctttcccccgcacgagcacttatgccagtggcaccatcacggtaagaatcagtgatgatcagaagtttgaccggcaggtcatgataccgccagtgttattccgcggtggtaagcatgagaatttcaacagtaataaccaacagtcatactggtattcaacctgccggttaagagtgacccgcaatggtcaggagatttttaatcagtccacgacggatgctcagggcgtattttcctcagttatagatatgcctgccggacaggggacgctgacactgacattcaccgtatcttcatcaggagcgaataactggacaccaacaaccagtatcagcgatctgctggttgtggtgatgaaaaaatccacagcaggtatcagtatcagctga

SEQ ID NO: 37567 - DNA, 627 bp, Escherichia coli; identical to SEQ ID NO: 23595

SEQ ID NO: 37568 - DNA, 429 bp, Escherichia coli; identical to SEQ ID NO: 37387

SEQ ID NO: 37569 - DNA, 486 bp, Escherichia coli
atgagaaatgacggtcaacaatcagggaagcctgctgtcaaccattccaaatacttcaagattgacgttcttgatatagaagtcagtgctgggccgggtgtcatcaaccgtgagtttgtagaagtcctacgctcggttgagtactcgtttgacgatgctcgtcacatgttcgatggcaggaaggcagaaaatatccgcatcattaacgtacgcggtgacagcatgtcaggaacgatcgaaccaggtgatcttctgttcgttgatatcactgttaaatctttcgacggtgatggtatctatgcgtttctgtacgacgacacagcccatgtaaagcgcctgcaaatgatgaaggataagctgctggttatctctgataacaagagctactcaccgtgggacccgatcgaaaaagacgaaatgaatcgggtatttatatttgggaaagttattgggagcatgccacagacatatagaaaacatgggtag

SEQ ID NO: 37570 - DNA, 285 bp, Escherichia coli
atgaccagtcaactcatccccgtattcaacggcactatcgacaacgaaacaattcttctagttaacgctcgtgagctacactcttttcttggtgtgggcagaatgttcgcgcactgggttaaagagcgcattgctgaatatggattcgttgaaaatcaagattttgttattgcttgccaaaattggcaagcaaaaggtagaggcggtcacaaccgcaaggaataccacctcaccctcgacacagccaaagagcttgcgatggttgacgactgcgtccaatactga

SEQ ID NO: 37571 - DNA, 321 bp, Escherichia coli
atggccgaaaaacaagtaaaagactacgacaagttcaacctccgttttcctgacggaatgcgagatgctatagctgaacgagccaaacgaaacgggcgctctatgaactcagagattgttcagatactggaagatgccttgaatgcagaaaatacactcggggaaatagcagataaaattaacagcgtctcggttccgctaaatgttgatgcgctagttcaacttcaagcccaggttatcgccatgcaaaaagaaatacaggaaaagttcagagagcagaacgaaaagttgagagaactactaaataaaaaacccacctga

SEQ ID NO: 37572 - DNA, 174 bp, Escherichia coli
atgcaagatacacttttcactgagcgcaaaaatatcaaactcaaccttcgccttccatcacggctgaatgaagaccttcgccgcctggcggaaatggactgtatatctctgaactctgcaattgttcgtttgctggcaaaaggtgttagggaagaggtggcgaatggtcgctaa

SEQ ID NO: 37573 - DNA, 1005 bp, Escherichia coli
atggtcgctaaaaacagcgaagcctcaatggctgcaaccattgaggcttctaaattaccagttaaccacgagaaaactgatatgactagtttagcaattgcagatcgcacaatcaatgttccattccacggaacaaatctctttttggttggaattaacaatgagccttatgttcctatgaagcctgttgttgaaggtatggggatggtttgggctgctcaatttgttaagttaaaacagaggtttgtcaaaggtatttcggaaatcgaaataccttctgctggcggtaaacagttaatgacatgtcttgcctttcgtaaatttgcggcttggctttcaagcattcaaccaaacaaagtccgccctgaaatccgcgacaaggtaatccagtatcaggaagagtgtgacgatgtgctctacgagtactggactaaaggccatgtgattaacccgcgcaaagctaaaaaggcattgccggggaaaatcaccactgaacagcaggaagccattaaacaactcgtcatgagtcgcggtcagtctctgccaaaagaaaaacaggcgaaggcgatgatcaccatgtggtcgtcactgaaatctcattttgggtgttcatacaaagaaatcagcgaggagcagtttaccgaagctctgtcacttgctgctcgcgttccgcttgaaggagagttaatcggcaaacaagagaagagcaccaacgagctttccgcaaaagaagcaaacagccttgtatggctatgggattatgccaaccgctcacaggcattattccgcgaactgtatccggcgctaaaacaaattcaatcgaactattccggcagatgctacgactacggtcatgagttctcgtatgttattggaatggcgagagacgttttaattaatcacacacgagatgttgatatcaatgagccagacggaccaacgaatctttccgcatggatgagacttaagaataaagaattacctccttcaccgcatcactactaa

SEQ ID NO: 37574 - DNA, 363 bp, Escherichia coli
gtgaatacctacagcatcacattaccctggcctccgagcaataatcgctactaccggcataatcgcgggcgcacgcacatcagcgcagaagggcaggcataccgtgataacgtcgcccgaatcatcaaaggctccatgctggatatcggcctggctatgccagtgaaaatccgtattgagtgccacatgccggatcgccgtcgccgtgacctggataatctgcaaaaagccgcttttgacgcactcaccaaagcaggtttctggctggatgatgctcaggtcgttgattaccgtgttgtgaagatgcccgttaccaaaggtgggaagctggagctgaccatcaccgaactggggaatgaatga

SEQ ID NO: 37575 - DNA, 141 bp, Escherichia coli
atgatgtttgagtcttatatggcagaacgtcttcgccaccgctggatgcgcctgcgcttatatcgttttcctggttctgttttgaccgattaccggatactgaagaattacgccaaaacactgaaaggagctgccgcatga

SEQ ID NO: 37576 - DNA, 1107 bp, Escherichia coli
atgctgacagaaaaaataaagctacgtaatcgtatcgttatggctcctatgacgacctggtcagcgaatcctgatggaaccatctctgagcaagaactcgaattttataaacgtcgctcacaaaatgttggtttagtaataacaggatgtacctatgtcacgccaagcggcattgggtttactcatgaatttgccgcgtatgacgaccgtttcattaacagccttgaaaagttagcagcggcagccaaaagtggcggtgctccggctattttgcagattttccacgccggtaataaagccatcccggagcttgtaccaaataacgatgttattagtgccagcgcatcaagcgtaaaatctggtgactttatgaagagagtggtacaaagcagggaaatgactgaaaacgaaattcaggaaaccattagagcattcggagatgtcacaaaaagggcgattaaagcaggttttgatggcattgaacttcatggtgcgcacggattccttctacagaattttttctcccctctatttaaccagcgtaatgaccgatggggaggagatctcgaaggacgtatgcgcttcccgctggccgtattacaggaagtaaaaaatgtagtctatgaatatgcgacaaagccctttgccatcggttacagaatatctcctgaagaatctgcaacaggggggctgcggatagaggatacttataaactccttgatcggctcatttcatccggtatttcgtatatacatacctcgctggtcagtattaacgatagctaccctgttgagtcgccaaatggcccccgaactattgaattgattttaaatcatattgcaggcagagtgccggtaatcgctgcaggtaaaatacgcacaccgtctcaggctcaagaagcaatttccactggcctgccacttgttgcgatcggtaaagggctggtgataaatccagaatgggtgactttagctgaatcaggtagaggccatgaaattcaaacaacccttaatccacaacttgttcctgaattaaccattccggataaactatgggatcaaattcaggcatcgaaaggaactggctggtttccgttaatggattaa

SEQ ID NO: 37577 - DNA, 429 bp, Escherichia coli
  misc_feature (304)..(313): n is a, c, g, or t
atgaaccatcgtgcacatatcgatcgtcggctggctccgattgcgaatatgttacttacatatagtgagagcctaccaaccggttgtgatgtattgccaactgttagtcgtgagcagtttaatgaagctaaacagatgctattaaggaaccccgacagctttgggcgtatcagtatcttccctaaagaactttggtctagtgctattactccagagttaaaatctgtttttaataagctttggattgaagataaatatcactcacggcttgaaaaacgttttaatttgatgttagtcgcagcgnnnnnnnnnnataataacctgatacatcaactgtctgcgctttttgaatttcactatcagcaagccccacagcaattaggggtaatctatcaatattattttgaacaagcaggagtatgtcattga

SEQ ID NO: 37578 - DNA, 1344 bp, Escherichia coli
atggacgttcagcaactgcattatgcgccacttctaaatcagcttcatcagcgtgcggtgaggtcggtggtaagtcagttggcattgcggagcaagtcgttgactcattatctggaatcacaatattttcagcctcccggtcaggaggggtcactgcttgcagacccggtattcgaaagtacattcggctggatgcctgcggatgaaacaatggaggatttgcgggacaagctgatctccagcccgctggttgatgcattgagcaaagcgccagtgccatttcgtcatcaacttactgcgtggcgaacgattctggaagacaaaaaatccttgttagtgagcagcggtacgggatccgggaaaacagaatgctttatggtaccggttctggaagatcttattcgtcagcaaaaatcgacccgccagtcactaacagggacacaagctattttcttgtatccgttaaatgcattaattaacagccaacaggagcggcttcgcgaatggacgcgcggatttaaggggaaaatacgcttcgcgctatataatggcgaaacccggcataccaaatacgaaattcaggaagatcagttgaaagtacctgaacaagctttgagtcgggaagccatttatgaagcaccaccttccatcatggtgacgaataccaccatgctggaatatatgctgattcgtcgtaaagatgccccaatcatcgaaaagtctcaggggatgttaaagtatatcgtcctggatgaagcccatagttatattggttctcaggctgctgagttagcgctgcttttacgtcgtgttatgcaggctttcaatgttggacccggcacagataaacctgtgcagattatcgcgacctctgccactattggtgaagactctcctgaaggtaataaggagcttgctaaatttgtcgctgatctcgcgggcgttacagaacgtgatgtcaaagtggttcgcggttatcgacaaataccgcgggtatcggagtcgctgattcgtcatgaataccccacatctttaacttctcttaaatccctgagccctcaggatctttaccaacagctttgtcattaccgtgtggcccagcaattgcgtcaggcgttaactcatcccggacggcaggcagtacgtttgagtgagttgctcaatgttgccagaagaacctggccagatattaatcaccgtgagctactgcaactcctcgatctaatggcaagatcgcgagaaggtgaactggcttttacgccattacgtatgcatgggtttatcagaacactggcgggtctatgggcatgttcaaacaatgctcacataaagcacatgaattaa

SEQ ID NO: 37579 - DNA, 1050 bp, Escherichia coli
gtgcgggtattacttcgacctgttctggtaccggaactcgggctggtgatcgttaagccgggccgtgaatccatgccggtattccacaatacccgggtactggtggagccggaaccgaaaagcatgcgtaatctgccgtccggggtcgttcctgccgttcgccagccgctggcggaggataaatcattactgccatttttcagcgacgaacgagtgattcgtgctgctggtggcgctggcgcactgtctgactggttactgcgccatgttaaatcctgccagtggccacacggcgattatcaccacagtgaaaccgtcattcaccgttatggtaccggcgcaatggtgttgtgctggcactgcgacaaccagttgcgtgaccagacctccgaatcacttgagcaacttgctcaccaaaacctgtcagcatggatgattgacgtcattcgtcacgcaatgaatggcacacaggagcgtgaattatcgctggctgaattatcctggtgggcggcctgcaatcaggtggtggatgcactacctgaggcagtagcgcgtcgttcgctgggattaccagcggaaaaaatccgctccgtataccgtgagagtgacatcgtaccgggagaacagacagccatcagcatactgaagcagcgcacaaaaaatattgcgctgccacttcacgtccaccagcaacaaaatccaccacagaaaaaaacggttgtcagtatcgccgttgatccggagtctcctgaatcgttcatgaggcggcctaaacgttgccgctgggttaatgagaaatacacgcgctgggtaaagacacagccgtgtgcgtgttgtggtaagcctgctgacgatccgcatcacctgattggtcatggtcaggggggaatggggacaaaggcccacgatattttcacgctaccgttgtgccgggagcaccacaacgaacttcatgcagacccgctggagtttgagaaaaagtacggctctcagattgagttaatttttcgttttcttgatcacgcctttgcgactggcgtgctcgggtaa

SEQ ID NO: 37580 - DNA, 318 bp, Escherichia coli
atggcgttatggggttcagccctggcagccggtggtttttctgccaccacgatgctgttttcactgggggccagcatgatactgggcggtgtggcccagatgctggcaccgaaggcaaaaacaccggattaccgcgcaacggataacggcagacagaacacgtacttttcctcactggacaacatgattgctcaggggaacccgatgccggtgccttacggtgaaatgctggttggctcacggcgaatctcccaggacatcagtacccgtgatgaaggtggtgacgggaaggtggtggttatcgggcggcaggcataa

SEQ ID NO: 37581 - DNA, 324 bp, Escherichia coli
gtgttaaaactaaatcaacgcattgaacgccacggaaaactagacgacttgctcaataaaatcaccttagataaaatcaatgcaaataaaatttacaccaacatcaaagatataaaggatgcaacgttcaaaaagtacaaagaattgtctatagtcattaagaacataaaaaatatccccaaagaggagattgaagattatgttaaaaaagaagcgtttgttcaattcaaggcatgcgacgttgacaatttaaaaacccagtataggaaactatttcttgcctacgacttgttgattcatggaaatgttgaaaagataaattaa

SEQ ID NO: 37582 - DNA, 828 bp, Escherichia coli; identical to SEQ ID NO: 29807

SEQ ID NO: 37583 - DNA, 615 bp, Escherichia coli
atgtatgataaaaaactatctgatatttaccttgaaaatatccataaacaagaatcataccctgccagtgagagggataattatctgttaggcttattaagagaagagttaaaaaatatcccagaaggtaaggactctttgattgagtcatatgcagaaaaaagagaacatacttggtttgattttttcaggaatttggccatgttgaaggctggaagtttgtttacagagacgggaaaaactggatgccataacatatcgccctgtagcggatgtatatatcttgatgccgacatgattattaccgataaattaggagtcctgtatgctcctgatggtatcgctgtgcatgtagattgtaatgatgagataaaaagtcttgaaaatggtgcgatagttgtcaatcgtagtaatcatccagcattacttgcaggcctcgatattatgaagagtaaagttgacgctcatccatattatgatggtctaggaaagggtatcaagcggcattttaactattcatcgttacacgattataatgctttttgtgattttattgaatttaagcatgaaaatattataccgaataccagtatgtatacctgcagttcatggtaa

SEQ ID NO: 37584 - DNA, 660 bp, Escherichia coli
  misc_feature (631)..(641): n is a, c, g, or t
gtgctactaaccaaactgggggtaaagaccggtaacctcaatacagaagataattgtattttactggataaagcggttcatggtggacaatatcagtgggatatcagtgaacaccgactaaatttaacagtaccacaggcgtatatcaatgaacttgaaagaggttacgttcccccggaaagttgggatcgcggcattgatgctttttatacctcctataatttaagtcagtatcgctcttatgacagcaataataacagtaatacagccagttatggccgatttaacagtggattaaatttatttagttggcagttacactctgatgccagctatagcaaacccgatgatatgaaaggcacatggcaaagtaatactctttacctggaacatggctggtcgcagatattaagcacagttcagataggagaaaattacacatcctcactcatattcgactctctgagatttagcggaatacgcttatttcgcgatatgcaaatgctacctgattctatgcagagctttacacctttagtacaaggtgttgcgcaaagtaatgccttgataacggtttcgcaaaatggctacatcatttaccaaaaagaggttcccccgggaccatttactnnnnnnnnnnngatctcgatgtcagcataa

SEQ ID NO: 37585 - DNA, 744 bp, Escherichia coli
atgacacagactgaatcagcgattctggcgcatgcccggcggtgtgcgcctgcggagtcgtgcggcttcgtgataagcacgccggagggggagtggtatatcccttgtgtgaatatttctgcagagccggaggcgtattttcgtatcgcaccggaagactggctgcgggcagagatgcagggggagattgtggcactggtccacagtcatcccggtggtctgccctggctgagcgaggccgaccggcggctgcagataaaaagtgcactgtcctggtggctggtctgccggggtgacattcacaaattccgctgtgtgccacatctgacaggacggcgctttgagcacggggtgacggactgttacacgctgttccgggatgcttatcatctggcggggactgatatgccggattttgagcgtgaggatgactggtggcgcaatggtcagaacctgtacctggacaatatggaggcgactggtttttacaggatttccctgccttccgcacagcctggcgatatcctgctgtgctgctttggcgcatcggtggccaatcatgccgccatatactgcggcaacggtgaactgcttcaccatctgcctgaacaactgagtaaacgggagaggtattccgaaaaatggcaacgacgaacgcattcagcctggcgtcaccgccactggcacgtatctgccttcacggggatttacaacgatttggccgccgcctcagcctgtatgtga

SEQ ID NO: 37586 - DNA, 744 bp, Escherichia coli
atgacacagactgaatcagcgattctggcgcatgcccggcggtgtgcgcctgcggagtcgtgcggcttcgtgataagcacgccggagggggagtggtatatcccttgtgtgaatatttctgcagagccggaggcgtattttcgtatcgcaccggaagactggctgcgggcagagatgcagggggagattgtggcactggtccacagtcatcccggtggtctgccctggctgagcgaggccgaccggcggctgcagataaaaagtgcactgtcctggtggctggtctgccggggggaaattcataaattccgctgtgtgccacatctgacaggacggcgctttgagcacggggtgacggactgttacacgctgttccgggatgcttatcatctggcggggactgatatgccggattttgagcgtgaggatgactggtggcgcaatggtcagaacctgtacctggacaatatggaggcgactggtttttacaggatttccctgccttccgcacagcctggcgatatcctgctgtgctgctttggcgcatcggtggccaatcatgccgccatatactgcggcaacggtgaactgcttcaccatctgcctgaacaactgagtaaacgggagaggtattccgaaaaatggcaacgacgaacgcattcagcctggcgtcaccgccactggcacgtatctgccttcacggggatttacaacgatttggccgccgcctcagcctgtatgtga

SEQ ID NO: 37587 - DNA, 744 bp, Escherichia coli
atgacacagactgaatcagcgattctggcgcatgcccggcggtgtgcgcctgcggagtcgtgcggcttcgtggtgagaacgccggagggggagcggtatatcccttgtgtgaatatttctgcagagccggaggcgtattttcgtatcgcaccggaagactggctgcgggcagagatgcagggggagattgtggcactggtccacagtcatcccggtggtctgccctggctgagcgaggccgaccggcggctgcagataaagagtgccctgtcctggtggctggtctgccggggggaaattcataaattccgctgtgtgccacatctgacaggacggctctttgagcacggggtgacggactgttacacgctgttccgggatgcttatcatctggcggggactgatatgccggattttgagcgtgaggatgactggtggcgcaatggtcagaacctgtacctggacaatatggaggcgactggtttttacaggatttccctgccttccgcacagcctggcgatatcctgctgtgctgctttggcgcatcggtggccaatcatgccgccatatactgcggcaacggtgaactgcttcaccatctgcctgaacaactgagtaaacgggagaggtattccgaaaaatggcaacgacgaacgcattcagcctggcgtcaccgccactggcacgtatctgccttcacggggatttacaacgatttggccgccgcctcagcctgtatgtga

SEQ ID NO: 37588 - DNA, 744 bp, Escherichia coli; identical to SEQ ID NO: 37586

SEQ ID NO: 37589 - DNA, 270 bp, Escherichia coli
atgaacatactaaaaaaacttatgcagcgtctgtgtggttgcggaaagcatgatgaccgtgaacacggggagttacttacagcacaactgcgactggggccggcagacatcctggagtcagatgagaatggcattattccggagcaggacagggtaatcacacaggtggtgatactggatgcggataaaaagcagatacagtgcgtggtaagaccgctgcaaatcctgcgtgctgacgggaggtgggaaaatattggcgggatgaaatag

SEQ ID NO: 37590 - DNA, 723 bp, Escherichia coli
ttgcccccaccgggccagccgcacctgtttctcctttcggtccctgtgggcctgccgggcctgccggaccagcatcacctgccggccccctttcaccggttgcccctgccggaccggtgtctccacgctctcctttatctcccttcggcccctgaggacccgcgggacccggttccccctttggcccgggaggccccaccaccgtggggattcggtttacggcctcttccgccgctatcctgctttgttccgctgactgtgcgctttctgctgactcccgggctttttctgttgcggtcgttgcatccctggctgcattaccggctgcactttctgccgtcttttttgacaactcagcatctgctgcactttgtgatgactcactggctttttgagcggccgcagaggccgaggacgaggacgcctcctctgactgctttgcagcggctgcactttctgccgcctgccgggctgactccgatgcatcccctgctgaagtgtcagcatttgccgcgctctcttctgcctgactggctgatatgccggcattcctcgcggacgtctccgcctctccggcattcttcttcgcctcctcagcgtgacgcgccgcttcttccaccatcagttcaaaacgacgcagtgcctccggccggacgtcatcctccgacatggcaccgagaaaatcattcagcgtccccggttgagaatcttcatacacggtga

SEQ ID NO: 37591 - DNA, 270 bp, Escherichia coli; identical to SEQ ID NO: 23881

SEQ ID NO: 37592 - DNA, 345 bp, Escherichia coli
atgccggagaggcggagacgtccgcgaggaatgccggcatatcagccagtcaggcagaagagaacgctgcaaatgctgacacttcagcaggggatgcatcggagtcagcccggcaggcggcagaaagtgcagccgctgcaaagcagtcagaggaggcgtcctcgtcctcggcctctgcggccgctcaaaaagccagtgagtcatcacaaagtgcagcagaagctgaattgtcaagaaagacggcagaaagtgcagccggtaatgcatccagggatgcaacgaccgcagcagaaaaagcccgggagtcagcagaaagcgcacagtcagcggaacaaagcaggatag

SEQ ID NO: 37593 - DNA, 372 bp, Escherichia coli
atgaaaattaataatttaatcgttgcattgtctgtcgcgcctgaagttaccgctatagcagagaaaataagactattagataaggaattacgaagagctttggtatcattgaaaactttgaagagtaaaggtgtaaattcattcagtgatttttatgctattgacttaaccagtaaaaatggacgagagttatgccgtacacttgcctataaaatattcgaaaaaatcataattaatacggataataaaacctgtgatatctattttatgaatggcattgtttttaaacactatcctttaatgaaagtaatatccgcccagcaggcgataagtgctctcaaatatatggttgatggtgaggtttatttttga

SEQ ID NO: 37594 - DNA, 222 bp, Escherichia coli
atgcgtgaacgtgatggacgtaaccaccgcgacatgtgtgtactgttccgctgggcctgccaggacaacttctggtccggtaacgtgctgagtccggccaaactccgcgacaagtggacccagctcgaaatcaaccgaaacaagcaacaggctggcgtgacagccggcaaaccaaaactcgacctgacgaacactgactggatttacggggtggatttatga

SEQ ID NO: 37595 - DNA, 222 bp, Escherichia coli
atgcgtgaacgtgacggacgtaaccaccgcgacatgtgcgtgctgttccgctgggcatgccaggacaacttctggtccggtaacgtgctaagtccggccaaactccgcgacaagtggacccagctcgaaatcaaccgtaacaagcaacaggcaggcatgatagccagcaaaccaaaactcgacctgacaaacactgactggatttacggggtggatttatga

SEQ ID NO: 37596 - DNA, 1089 bp, Escherichia coli
atgtcaccgcagaataatcatctgcagcgtccgcctgctgctgtgttatacgccgatgaactggcaaaattaaaacaaaatgataacgcaccttgcccgcccggttggcagttaagtttgcctgcggcccgtgcttttatccttggcgatagcgcgcaaaatattagccgtaaagtggtgattagtccctccgctgtcgaacgtatgttagtcactcttgccaccggacgcggtttgatgttggtgggggaacctggcaccgcaaaatctctcctgtctgaattactggcaacctctattagcggcgatgccgggttaaccatccagggcggcgcatctactaccgaagatcaaatcaagtacggctggaactacgccctgcttatcaatcatggtccatcaacggaagcgctggtccctgccccgctttaccagggaatgcgcgacggcaaaatcgtccgttttgaagagataacgcgtacaccgctggaagtgcaagactgtctgttaggtatgctttctgacagggtgatgacggtgccggaactcactggtgaagccagtcagctctatgcgcgagaaggctttaatattattgccactgccaatacccgcgatcgcggcgtcaatgaaatgagtgctgcgctaaagcgtcgcttcgattttgaaactgtctttccgattatggatttcgcccaggagctggagcttgtcgccagtgcttcggcgcgtttgctggcccatagcggtattccgcataaagtgcctgacgcggtactggagttactggtccgcaccttccgcgatctgcgtgccaacggcgaaaagaaaacgtcaatggatacactaacagcgattatgtccaccgctgaagccgtgaacgtggcccacgctgtgggcgtccgcgcctggtttttagcgaatcgcgcgggggagcctgccgacctggtggactgtattgccggaaccatcgtcaaagataacgaagaagatcgcgctcgtctgcgccgttacttcgaacagcgtgtcgccacacataaagaagctcactggcaggcttattatcaagcccgccaccgcctgccgtga

SEQ ID NO: 37597 - DNA, 432 bp, Escherichia coli; identical to SEQ ID NO: 24043

SEQ ID NO: 37598 - DNA, 939 bp, Escherichia coli
gtgctgcaccgctggcggcgtgacaccattcaccgtgctgctctggtcaccgtcaaagtgcgccccgttatccacgatgccctctttctccggcacatgctgcacggcagtgatggcatacgtgccgtcgtcgttctcacggatactcacgcagcggaacaggcgctggcgcagcgtcggcagcttcagcccccacacgctgtattcagcaacaccgtcaggaacccggctcacttttaccttcacgccgtcggtgacggactgaacctccacgctgaccggattgccacttccgtcaaccaggcttatcagcgtggtgccggaggatggcagcgtgatttcacggtcgagcgtcagcgtccgggtctggctgttcaccgccagcacacgcccaccgatgctgatccccgcatagtcatcatcacagatttcaatgacatcgcccggtacatggcgaagcccttctgcgcccacgctgaagtccacggtctgcgtttccagcagttccgttttaatcagccacagcccggcacggtgtgcctgcccccgactggtacagccaaaggcatccatcttcgtgacgttacgaccgtaacgggcaatggcctgcgtgtcctccacaagctctgtcgccgtctcccagccgttgtccgggtcagtccagttcacctcaacggcattatggcggtctttcagggcgctaaagctgtagcggaacggcgcgccatcatccggcatcaccacattactgcggttataggtccacaccttatccgacggccggtcctgcacgaacgtcagcgtctgcccgttccataccggcatacagcgcatcgccgagcagaaatcactgagcacatcccacgccttgcgctgcgtggtcaggtacgcattacaggtgatgcgcggctccgtgccgccaaagccgtccggtactga

SEQ ID NO: 37599 - DNA, 474 bp, Escherichia coli
atgtttgccgtctttggtctgctcaattttgacgccccacatggcattccatttatcgttagcgtccttccactctttcgaaaactcatccagtctgctggcgttatcctccgtcagatcgactttttccagcagctccttgccgagatgagattcggttatcttgcctttgaaaaaatccagataaccttccgcatcatcgctcgcccgaccgacggcctccacgaatgccgatttgccaacggtgttcacactgcggatataaaagtaataatcatggcccggtttgatattgatactggcggctatccagtacagcgccgtaccaagataacgcgcgctggtttcaacctgcctgatatccgcaatccgcgtttccgagaaccagaactcaaactgtaccgtcggatcataaaccgcaagatgcggcgtggcggttatctgaaaatagcccggtgtcagctcaatctgtga

SEQ ID NO: 37600 - DNA, 2517 bp, Escherichia coli
gtggattttttaggtattcaggataacacaataaaagttaagcttgaaagtgatattaaacctataagtgaaatccaacagccccttcattccattctttcacggcagaaagaacacgtaaagaatttactatctggattgcttgatgagttttcaaataagttaagaaagcaaggtctttcacttaaaacaaatgttctttcagttaataacttcaaagaatcaaagataaatagtgatacagtggaggttacagtaacagatctgcaaggaagactttatcgtgttgatatagatacaagagttattggcttaacttttaaagaggggataaatagtttatccgaagcactcgaacacatgaatatcgatgcgattatgtctgttattggcttggttcaatatgcacgaatgataaaaatgaatgacaatattagtgcaatagatcatgcaggagcagtatcagatataaaaaatattgtagacaaatttttaggcggaattttgactcttactaataatcgcgtatataatcctggcggtgtatctggtgcctcgcttgaaggatttatatcttctgggttggaggtgtgtgcttcaagaatgggtggcaccgcagggcgttatcttagcaatgtggcaaaagtaattaaattacctttgctagatataggcataaatatttggtcattatatgattcttcattaaatcatgctaaagccaccacacaaattgaatatatatcaacagcaatagatgtatctttttcatctataaatacagctttgtcaataggcgcaatcgcatatcctcctttggcaatagctatagttccgataactattttttctcatgaagtaaaaaactatgctgtttatgtgaatcaaattaatgagcgccataagttatggctcgaagctgaaaagtatctggacaatggaagtgcaaaggttctaagcattaacaaagccacaggcataatcgatttatcaaataatcaggtgttaggtaatatttatttagatatgagagaaaatcctccaatattacacggtgagaaatcatataatagcggaaagaatattggtagtcatcctgatatgactgacagagagattatggagtctagagcatacaattttgcatgcacaaaactctcagatgcaggtgaacccgatattttcggttggggagataaggaaatatgtaattcaatggaattatcagaatcacaattagctaatgggtattctaaccgccaatggccttctcagattccagttattccagaaggaatttataatacagtatatcttggatatggagaaacattgcgagctaatactgaagttacattgagtagcactggttacttttacgagattgcaagggcatatactgatgatgaactatctgagccattattaacagtatgtaaccaacatagtcatgttattggtggaaaagaaccattaacaattattattcccgctattgaacatggtatgcttggctctaatctacatatgattgaacgttttaaaaactataatttctcgatatcaggagggaagggagggataaaattaatggttggtggtattggtgattacaacatagaatgtacccccggtgttagaaatattatatcgtttgaacaattatcacgtgacttcaatctggatttggatttatcagatgggaggaaacaaaattttaattttcatcatccctcaggtttttattcaggaaaagttatgagcataacgcaaaagggtataaatgcggttgttggtactaaactgggatatgataagattcgtggtaataatcttgataataccttttctcttgggagtggaggaggtgttatatattctggaggagggagcaatacctatttcgttcccgccacactacaggataatttacacatatatatatcagaaaaatcaaatggcaatcatattatattaggtgatatgcactctcgcctatctattgaatgccactttagtaataatgaaagagagtttataaagatgggctactataatggatgtgatgtgattttagaaagtgacactatacaaaaaataaaatcatttgcaaaaaatataacaatacagacagcggatggagttatggcaaattgggatgataaactaaatactctgtctgtttattcaatagatatgattgcatggagggataaaaataaaactgcaaaagaaccgttaccagttgatgtaatccagttaactaattggaggatgcataacacatgctctttattttatgataaatatcaagttgatattgaagccaataagttaacgtatacagtcttatttcctgatacggagttacccgttcagctcaattataccagtattatttatggtaatcatggggcaaaatacaccttcctcaattcaggaagtaaaactatagatattcacattcttgataaaaatagtgattatgatacttttctgtctcttatacacatctga

SEQ ID NO: 37601 - DNA, 1143 bp, Escherichia coli; identical to SEQ ID NO: 29799

SEQ ID NO: 37602 - DNA, 1332 bp, Escherichia coli
gtggaggcgctggagcagcagtattattcccagtgtctgcagacgctgattgagtccattgaactgttactggatgaggcgctggaaacgggggaaaacgagagtacagaatttgatgtcaccacgctgctgagaatggacagtgagcggcgcatgaaaacgctgggggatgcggtgaaaaatacgcttctcacgcccaatgaggcccgtaaacgggagaacctgccgcccctggccggcggtgatgcactgtatcttcagcagcagaactacagtctggaggcgctgtcccgtcgtgatgcccgtgaggatccgttcgcgtctgccgggaaaacagtttcatcacagctgcctgacggcgcatctgacggtaataaggcaatcagtgaaacagagcatgatgcggtgaaagcgatgttcaggggggatactgagaaaatgacggaacgggaactgtccattattcgtgcactgggagaagaattttccacagtgctggcggatttacagcgcacatttgaggggaagatggcctcgcaggcacaagcgtttgaagagaaactgacttccctgtcggcggtattacagaagcatgtgacggtggatgaggtgcgtccggttctgcaggcgatggtggatgacgctgtgggggccattccggtaccgcgtgatggtcgtgattatgatccggaagtactgcagaaggcggtgaatgatgcggtcgcaaatattccgcagccggcagacggtaaaagtctcaccccggatgatgtgcgtccgatgcttgaacagatggtgaaggaggctgtaagccatatccctgttccgcgtgatggtcgtgactacgatccggaagtactgcagaaggcggttctggatgcggtgagtgccctgccggctccgcaggacgggcgtgatgccacggcactggaaatactccccgccattgacgatcaaaaatcctttccccggggcacgtatgccacacaccagggcggactctggcgggcgtatgaaaaaacgcacgggatgcggggatgggaatgcctggttgacggggtggcggatattgacgtcagcatgacgggtgagcggttgttctctgtggtggtccggcagagcagtggccagcgtacggaaaaaacattttccctgccggtgatgctctaccgcggtgtgttcagagccggtgaaacctaccaccccggcgatacggtgacgtgggggggctcgctgtggcactgcaacagtatgaccgaagataaacccggagaagctcattcatcagcctggaccctggctgcaaaacgtgggcgggatgcaggaggctga

SEQ ID NO: 37603 - DNA, 270 bp, Escherichia coli; identical to SEQ ID NO: 29818

SEQ ID NO: 37604 - DNA, 279 bp, Escherichia coli
gtgggggcaaccggacctcagggaccgaagggcgacccgggggagacacaaatccgttttcgtctggggccggcgagcattattgagacaaacagccatggctggttcccgggtacagatggtgcgctcatcaccggactgacctttcttgcccccaaagataccacacgggttcagggtttttttcagcatttgcaggtcaggtttggtgacgggccgtggcaggatgttaaggggcttgatgaagtgggcagtgatacaggcagaacaggagaatga

SEQ ID NO: 37605 - DNA, 132 bp, Escherichia coli; identical to SEQ ID NO: 24006

SEQ ID NO: 37606 - DNA, 279 bp, Escherichia coli
gtgggggcaaccggacctcagggaccgaagggcgacccgggggagacacaaatccgttttcgtctggggccggcgagcattattgagacaaacagccatggctggttcccgggtacagatggtgcgctcatcaccggactgacctttcttgcccccaaagataccacacgggttcagggtttttttcagcatttgcaggtcaggtttggtgacgggccgtggcaggatgttaaggggctggatgaagtgggcagtgatacaggcagaacaggagaatga

SEQ ID NO: 37607 - DNA, 639 bp, Escherichia coli
gtggtactctgggaaatcgacctgacggtgcagggtggtgagcggtattttttctgcaatgagctgaatgaaaaaggggaggcggttacctggcaggggcggcaatatcaggcatacccgattgacggcagtggttttgagatgaacgggaagggcagcagtgcccgcccgtcgctgacggtgtcgaatctgtttggtctggtcaccgggatggcggaggacctgcagagcctggtgggggccacggtggtccgccgccgggtgtatgcccgttttctggatgcggtgaattttgtggcaggcaatccggaagcggacccggagcaggagctgacggaccgctgggtggtggagcagatgtcagagctgacggccatgacagcctcgtttgtgctggcgacaccgacggagacggacggagcgctgtttcccggtcgcattatgctggcgaatacctgtatgtgggcctaccgctctgatgagtgtggttacacgggcggggctgtggcggatgagttcgacaaccccaccacggatatccgtaaggacagatgcagcaagtgcatgcgcgggtgtgagatgcgcggcatggtggctaattttggcggtttcctttccatcaataaactttcgcagtaa

SEQ ID NO: 37608 - DNA, 546 bp, Escherichia coli
atgattggccaccgatgcgccaaagcagcacagcaggatatcgcccgcctgtgcagaggacaggggcacccggtaaaaaccagtcgccgccatattgtccaggtaaaggttctgaccgttgcgccaccagtcatcctcacgctcaaaatccggcagcgttatccccgccagatggtatgcatcccggaacagggtgtaacagtccgtcaccccgtgctcaaaacgacgcccggtcaggtgcggcacacagcggaatttatgaatttccccccggcagaccagccaccagggcagggcactctttatctgcagccgccggtcggcctcgctcagccagggcagaccaccagggtggctgtgaaccagcgccacaatctccccctgcatctctgcctgcagccagtcttccggcgcaatacgaaaatacgcctccggctctgcggagatattcacgcagggctggtaccgttcgccctccggggtgcctatcacgaagccgcacgactccgcaggcgcacaccgccgggcatgcaccagaatcgctga

SEQ ID NO: 37609 - DNA, 639 bp, Escherichia coli
gtggtactctgggaaatcgacctgacggtgcagggtggtgagcggtattttttctgtaatgagctgaatgaaaaaggggaggcggtcacctggcaggggcggcaatatcaggcatacccgattgacggcagcggttttgagatgaacgggaagggcagcagtgcccgcccgtcactgacggtgtccaatctgtttggccttgtcaccgggatggcggaggacctgcagagtctggtgggggccacggtggtccgccgccgggtgtatgcccgttttctggatgcggtgaatttcgttgcgggcaatccggaggcggactcggagcaggagctgagtgaccgctgggtggtggagcagatgtcgcagctgacagccatgacggcctcgtttgtgctggctacaccgaccgagacggatggggcgctgtttcccggtcgcatcatgctggcgaatacctgtatgtggacctaccgctctgatgagtgtggttacacgggcggggctgtggcggatgagttcgacaaccccaccacggatatccgtaaggacagatgcagcaagtgcatgcgcgggtgtgagatgcgcggcatggcggttaattttggcggtttcctttccatcaataaactttcgcagtaa

SEQ ID NO: 37610 - DNA, 345 bp, Escherichia coli
atgacggaggcggatttgtatcctcatctggcgcatcttgccggcgggcaggtgtacccgtatgtggtccccctgctggatggcaggccgtcggtggcgcttccgtgggtggttttcagcctgatttcatcggtgtcggcggacgtgatgggcgggcaggcggagtcctcagtgtcggtgcagatagacgtttatgccgggactgtgacgcaggcgcgtcagatacgtcaggacgcccgtgaagccataatgctgctggccccgggatccgtcagtgaaatgcaggactatattccggaaaaccgctgttaccgtgcaaccctggagtttcaggtcacggtgtaa

SEQ ID NO: 37611 - DNA, 210 bp, Escherichia coli
atggggcgtcttctggtggagaacattaataccgaccccaggctggcgctggatgcggcttataagctggcgcagttcacgcaccacaaaaaaggggatgccggtaaaaaatcggcaaaaggtgacgcggcgaaaaaagcggctaaccgttttgcggtgccaccaccaccccgcctggtggtgaataatgataatgagggcaacggatga

SEQ ID NO: 37612 - DNA, 306 bp, Escherichia coli
atgcgtatagagtttgttttgccttacccgccgacggtgaacacctactggcgacgtcgtggcagcacatattttgtatcaaaagccggtgagcgttatcgccgggatgtggcacttattgttcgccagcagcggctgaaattaaacctgtccggaaggctggcgataaagattattgcagagccaccggataagcgccgtcgtgacctggacaatatcctgaaagcaccactggatgcgctgacgcatgccggacttctcatagacgacgagcagtttgatgaaatcaatattgtgcgcggctag

SEQ ID NO: 37613 - DNA, 372 bp, Escherichia coli
gtgctggatgcgctggagcaggcgttgtgggcccgtcgtccgtctggcaccatccatcacagcgataaaggctctcagtatgtgtcactggcctatacggagcgactaaaagaagccggattactggcatcaacagggagtacaggcgactcgtatgacaacgcgatggctgagagcatcaatggtctttacaaagcggaggtaatacaccgtaagagctggaaaaaccgtgcagaagtggaactggccacactaacgtgggtggactggtataacaatcgacgattgctgggaaggctgggccatactcctccggcagaagcagaaaaagcttattatgcttccatcggaaacgatgatctggcagcctga

SEQ ID NO: 37614 - DNA, 360 bp, Escherichia coli
atgttagatatatcaaaggattttatcgaagagttattgactgcaaaacattatgattttacggggttatcattagcgatcagtcatagacatgatcatgttgtcaaattatacggaaagttatttaaaaaacttgataccagtccatataaaatgtcaattatcctagcattagcaattgattgcgagagaaataatgcaaacataattattgatagtgagtacaagtcaaataaggcagtaaaggaatatgtagaaattttaaaagaattcaatatatgcccagaaaaggtagcagaatacctaagcgagttcagcggaaaacatttcctcgatgtatataattattattccaattga

SEQ ID NO: 37615 - DNA, 258 bp, Escherichia coli
atgctgatggacaaggttcgtcaggctaccgccgtgctgctggcctacattcagggcagccgggataaggtgattcgtgaggacggtgaactgatcccgggcgaggcattaacccggatgaagggggctgccatgcgactgaccgggatgctgtaccggaatccggatcttgctgagcgggaagacctcgtgcagggggaactgccgttttctgtttccgtgctgatttacgatttgcgttgtccgacggtgttatga

SEQ ID NO: 37616 - DNA, 255 bp, Escherichia coli
atgccagcgggtatcgctgtagcgcgttttttgctcatcctcagcattggcataactgaaggacgtaatcagccccagcgcgtccataaactcataacggtatttcacgttaatcccgttcagatcatcactaccgggaacgttcgtcgaggcatggagataccccgcgctcagcgtggactgatgttctgctgcactcgctggcgtagcagcggcgacctgccagactactgcggacaaaataacagcacataa

SEQ ID NO: 37617 - DNA, 186 bp, Escherichia coli
atggcgcaggcggaaatccgcatctgggtgcgcggtcagtccggtcgggaaatcacggcagcgtcacgacttcatgtgctgagtggtccctggcgtgaccggatcctgaacgttgtcgggctgcccgtgccggatgcgaccggcggacgtctggaaattctctgtcggctgggaggggaaaaatga

SEQ ID NO: 37618 - DNA, 186 bp, Escherichia coli
atggcgcaggcggaaatccgcatctgggtgcgcggtcagtccggccgggaaatcacggcagcgtcacgacttcatgtgctgagtggtccatggcgtgaccggatcctgaacgttgtcgggctgcccgtgccggatgtgaccggcgggcgtctggaaattctctgtcggctggggggggaaaaatga

SEQ ID NO: 37619 - DNA, 2142 bp, Escherichia coli
atgtcaaccggattacgtttcacactggaagtggacggcctgccaccggacgcttttgcggtggtttcctttcatctcacccagtcactctcttcgctcttttccctcgatctctccttggtcagccagcagtttctctcccttgaatttgcgcaggtgctggacaaaatggcctacctgacaatatggcagggtgatgatgtacagcgccgggtgaaaggtgtggtgacctggtttgaactgggggagaacgacaaaaaccagaagctgtacagcatgaaggtgcccccgccgctgtggcgtgccggtctgcgccagaacttccgtatcttccagaacgaggacatcacaagcatcctcggcacgatattgcaggaaaacggggtgaccgagtggagcccgctgttcagcgagccacatccttcccgtgagttttgtgtccagtacggtgagactgattacgatttcctgtgccggatggcggcggaggaaggcatcttcttttatgaggagcacgcgcaaaaaagtaccgaccagagcctggtgctgtgcgatacggtcctccatctgcccgaatcttttgaaatcccctggaatccgaacacccgtaccgaggtaagcaccctctgcatcagccagtttcgctacagcgcacaaatccgcccttcttccgtggtgaccaaagactacacctttaaacgccccggctgggcaggacgttttgatcaggaaggccagcaccaggattaccagcgcacacagtatgaagtgtatgactatcccggacgtttcaagggcgcccacgggcagaactttgcccgctggcagatggacggctggcgaaacaacgcagaagtggcgcgcggaacaagccgttcgccggagatatggccgggacggcgaattgtgctgacggggcatccgcaggcgaacctgaaccgggaatggcaggtggtggcaagtgaactgcacggtgagcagccgcaggcggtgccgggacgcaggggttcaggcaccacgctggataaccattttgcggtaataccggcagacagaacatggcgaccacagccgttgctgaaaccgctggtggacggcccgcagagcgccgtcgtgacgggaccggcaggcgaggaaatcttctgtgatgaacatggccgcgtgcgggtgaaatttaactgggaccgctataacccgtcaaaccaggacagttcatgctggatccgtgtggcacaggcgtgggcaggcaccgggtttggtaacctggcgataccgcgtgtgggtcaggaggtcattgtggacttcctcaacggcgatccggaccagccgatcattatggggcgtacctaccaccaggaaaaccgcacacccggtagcctgccggggacgaagacgcagatgaccattcgttcgaaaacctataagggcagcgggtttaatgaactgaagtttgacgatgcgacagggaaagaacaggtctacatccacgcgcagaagaacatgaacaccgaggtgctgaataaccgcaccacggatgtgataaacaaccatgccgaaaaaataggtaacaaccaggcgatcaccgttaccaataaccagatcctgaacattggcgttaatcagatacagacggttggtgtcaaccaggtggaaacggtaggcagtaaccagattatcaaagtgggatcaaaccaggttgaaaaggtggggatcattcgtgcgctgacggtgggtgtggcgtatcagacgacggtaggcggcattatgaatacctcggtggcgttgttgcagtcctcacaggtagggctgcataaatcactgatggtgggaatgggctacagcgtcaatgtagggaataacgtcaccttctcggtgggcaagacgatgaaggaaaacaccggacaaacagcagtttattctgccggtgagcatcttgaactctgctgtggtaaggcaaggctggtgctgacgaaggacggaagcatatttcttaatggtacgcacattcatctggaaggggagtcggatgtgaacggtgatgcgccggtgattaactggaactgtggtgccacacaacctgtaccggatgcgcctgtgccgaaagatttaccccccggaatgccggatatgcggcaattttga

SEQ ID NO: 37620 - DNA, 279 bp, Escherichia coli
gtgggggcaaccggacctcagggaccgaagggcgacccgggggagacacaaatccgttttcgtctggggccggcgagcattattgagacaaacagcaatggctggttcccggatacagatggcgcactcatcaccggactgacctttcttgaccccaaagatgccacacgggttcagggtttttttcagcatttgcaggtcaggtttggtgacgggccgtggcaggatgttaaggggctggatgaagtgggcagtgatacaggcagaacaggagaatga

SEQ ID NO: 37621 - DNA, 990 bp, Escherichia coli; identical to SEQ ID NO: 23819

SEQ ID NO: 37622 - DNA, 747 bp, Escherichia coli
atgaaaatatcagttataactgtgacttataataatgctgaagggttagaaaaaactttaagtagtttatcaattttaaaaataaaaccttttgagattattatagttgatggcggctctacagatggaacgaatcgtgtcattagtagatttactagtatgaatattacacatgtttatgaaaaagatgaagggatatatgatgcgatgaataagggccgaatgttggccaaaggcgacttaatacattatttaaacgccggcgatagcgtaattggagatatatataaaaatatcaaagagccatgtttgattaaagttggccttttcgaaaatgataaacttctgggattttcttctataacccattcaaatacagggtattgtcatcaaggggtgattttcccaaagaatcattcagaatatgatctaaggtataaaatatgtgctgattataagcttattcaagaggtgtttcctgaagggttaagatctctatctttgattacttcgggttatgtaaaatatgatatggggggagtatcttcaaaaaaaagaattttaagagataaagagcttgccaaaattatgtttgaaaaaaataaaaaaaaccttattaagtttattccaatttcaataatcaaaattttattccctgaacgtttaagaagagtattgcggaaaatgcaatatatttgtctaactttattcttcatgaagaatagttcaccatatgataatgaataa

SEQ ID NO: 37623 - DNA, 411 bp, Escherichia coli
atgacagcacagatagcggcttacgggcggctggtggacgacccgcaggtaaaacagaccagtaagggcacaccgatgacgctggcgcgtatggcggtatcgttgccatgtagtcaggcgcaggatgggcaggcgacgttatggctatcggtcatcgcatttggtaagcaggccgacttcctggctaaacatcaaaaaggcgacgttgccagcgtatccggcacgatgcaggtcagccagtggaccggacagaacggggaaacgcggcagggttatcaggttattgcagacagcgtaatcagtgcccgtgcggcacgtcctggcgggaacagacgcaaaaccacaggcacacagggtaatcagccaccagcgggaggcgatgacccttacggtgacggtattccgttctga

SEQ ID NO: 37624 - DNA, 3399 bp, Escherichia coli
atgggtaaaggcagcagtaaggggcataccccgcgcgaagcgaaggacaacctgaagtccacgcagctgctgagtgtgatcgatgccatcagcgaagggccggttgaaggtccggtggatggattaaaaagcgtgctgctgaacagtacgccggtgctggacagtgaggggaataccaatatatccggcgtcacggtggtgttccgggccggtgagcaggagcagacaccgccggagggatttgaatcctccggctccgagacggtgctcggtacagaagtgaaatatgacacgccgatcacccggaccatcacgtcggcaaacattgaccgtctgcgttttactttcggcgtgcaggcactggtggaaaccacctcaaagggggacaggaatccatcggaagtccgcctgctggttcagatacaacgtaacggtggctgggtgacggaaaaagacatcaccattaagggtaaaaccacttcacagtatctggcctcggtggtggtggataacctgccgccgcgcccgtttaatatccggatgcgcaggatgacgccggacagcaccacagaccagctgcagaacaaaacgctctggtcgtcatacaccgaaattatcgatgtgaaacagtgctacccgaacacggcactggtcggcgtgcaggtggactcggagcagttcggcagccagaaggtgagccgtaattatcatctgcgcgggcgtattctgcaggtgccgtcgaattataacccgcagacgcggcaatacagcggtatctgggacggaacgtttaaaccggcatacagcaacaacatggcctggtgtctgtgggatatgctgacccatccgcgctacggcatggggaaacgtcttggtgcggcggatgtggataaatgggcgctgtatgtcatcggccagtactgcgaccagtcagtgccggacggctttggcggcacggagccgcgcatcacctgtaatgcctacctgaccacacagcgtaaggcgtgggatgttctcagcgatttctgctcggcgatgcgctgtatgccggtatggaacgggcagacgctgacgttcgtgcaggaccgaccgtcggataaggtgtggacctataaccgcagtaatgtggtgatgccggatgatggcgcgtcgttccgctacagcttcagcgccctcaaggaccgccataatgccgttgaggtgaactggattgacccggataacggctgggagacggcgacagagcttgtggaggacacgcaggccattctccgttacggtcgtaacgtcacgaagatggatgcctttggctgtaccagccgggggcaggcacaccgcgccgggctgtggctgattaaaacggagctgctggagacgcagaccgtggatttcagcgtgggcgcagaagggcttcgccatgtaccgggcgatgtcattgaaatctgtgatgatgactatgcggggatcagcatcggtgggcgtgtgctggcggtgaacagccagacccggacgctgacgctcgaccgtgaaatcacgctgccatcctccggtaccacgctgataagcctggttgacggaagtggcaatccggtcagcgtggaggtccagtccgtcaccgacggcgtgaaggtaaaagtgagccgtgttcctgacggcgttgccggatacagcgtatgggggctgaagttgccgacgttgcgccagcgcctgttccgctgcgtgagtatccgtgagaacgacgacggcacgtatgccatcaccgccgtgcagcatgtacccgaaaaagaagccatcgtggataacggggcgcactttgacggcgacctgagcggcacggtgaatggcgtcacgccgcccgcggtgcagcacctgactgccgaagtcaccgcagacagcggggaatatcaggtgctggcgcgctgggacacgccgaaggtggtgaagggggtgagcttcctgcttcgcctgaccgtggcagcggacgatggcagtgagcggctggtcagtacggccaggacgacggaaaccacataccgcttcacgcaactggcgctggggaactacaggctgactgtccgggcggtaaatgcgtggggacagcagggcgatccggcatcggtatcgttccggattgccgcaccggcagcgccgtctcggattgagctgacaccaggctattttcagataaccgccacgccgcatcttgcggtttatgatccgacggtacagtttgagttctggttctcggaaacgcggattgcggatatcaggcaggttgaaaccagcgcgcgttatcttggtacggcgctgtactggatagccgccagtatcaatatcaaaccgggccatgattattacttttatatccgcagtgtgaacaccgttggcaaatcggcattcgtggaggccgtcggtcgggcgagcgatgatgcggaaggttatctggattttttcaaaggcaagataaccgaatctcatcttggtaaagagctactggaaaaagttgacctgacggaggataacgccagcagactggatgagttttcgaaagagtggaaggatgctaacgataagtggaatgccatgtggggcgtcaaaattgagcagaccaaagacggcaaacattatgtcgcgggtattggcctcagcatggaggacacggaggaaggcaagctgagccagtttctggttgccgccaatcgtatcgcgtttattgacccggcaaacgggaatgaaacgccgatgtttgtggcgcagggcaaccagatattcatgaacgacgtgttcctgaagcgcctgacggcccccaccattaccagcggtggaaatccaccggcattttccctgacaccggacggaaagctgactgctaaaaatgcggatatcagtggcagtgtgaatgcgaactccgggacgctcaacaacgtcacgattaatgagaactgtcagattaaggggaaactgtcagccaatcagattgaaggcgatattgtcaaaacggtcagcaagtctttcccccgcacgagcacttatgccagtggcaccatcacggtaagaatcagtgatgatcagaaatttgaccggcaggtcatgataccgccagtgttattccgcggtggtaagcatgagaatttcaacagtaataaccaacagtcatactggtattcaacctgccggttaagagtgacccgcaatggccaggagatttttaatcagtccacgacggatgctcagggcgtattttcctcagttatagatatgcctgccggacaggggacgctgacactgacattcaccgtatcttcatcaggagcgaataactggacaccaacaaccagtatcagcgatctgctggttgtggtgatgaaaaaatccacagcaggtatcagtatcagctga

SEQ ID NO: 37625 - DNA, 300 bp, Escherichia coli
atgaaacttaaatatcctggcttaactgacagcggcaaaactcgcactaaattcatgcgcggggatatttaccgcgaccagtacggcggcacggtaatgattaagggcgtggaggaacggcgcgtaacctaccatcgtgaaggctacgaatatgattgcgtgatgcctgtttatcagttccggcgtgatttttctctggtacaggcagcgccccgcagtaaaccaaccagcagggagaaagcacgcgccaatattcaggaaataaaaaagatgcttaacgtattcaggggtaaaaaatga

SEQ ID NO: 37626 - DNA, 279 bp, Escherichia coli; identical to SEQ ID NO: 37363

SEQ ID NO: 37627 - DNA, 270 bp, Escherichia coli; identical to SEQ ID NO: 29814

SEQ ID NO: 37628 - DNA, 270 bp, Escherichia coli; identical to SEQ ID NO: 29818

SEQ ID NO: 37629 - DNA, 279 bp, Escherichia coli
gtgggggcaaccggacctcagggaccgaagggcgacccgggggagacacaaatccgttttcgtctggggccggcgagcattattgagacaaacagccatggctggttcccgggtacagatggtgcgctcatcaccggactgacctttcttgcccccaaagataccacacgggttcaggttttttttcagcatttgcaggtcaggtttggtgacgggccgtggcaggatgttaaggggcttgatgaagtgggcagtgatacaggcagaacaggagaatga

SEQ ID NO: 37630 - DNA, 1125 bp, Escherichia coli
gtgaacaccgttggcaaatcggcatttgtagaggctgtcggtcagccgagtgatgatgcatcaggctatctggattttttcaaaggcgagatagggaaaacccatctggctcaggagctgtggacgcagattgataacggtcagcttgcgcctgacctgactgaaatcaggacgtccataacggatgtcagcaatgaaataacacagaccgtcaataagaaactggaagaccagagtgcagcgatccagcagatacagaaggttcaggttgatacaaataataacctgaacagcatgtgggcagtgaagctgcagcagatgcaggacggacgcctttatattgcgggtatcggtgccggtattgagaacacccccgacggcatgcagagtcaggtgctgctggcagcagacaggattgcgatgattaatcctgcgaatggcaacacaaagccgatgtttgttggtcagggcgatcagatattcatgaatgaagtgttcctgaaatatctgacggctcccaccattaccagcggcggtaatcctccggcattttccctgacaccagacgggcgactgacggcgaaaaatgcggatatcagtggcagtgtgaatgcgaactcaggagcgctcaacaatgtcacgattaaccagaactgtacgattaagggcatgctggaggcgacccaggtcagaggggatttcgttaaagctgtatcaaaagccttcccgaaaaaagtcggtacgtggggtaacacggaaacaccaaacggtacggttacagtcaccatcagcgatgatcataactttgaccgccagattattattccgcccattatttttaacggtatagcgtatgacgatccggggagcggaaataacccaggaggcacgcgatacacggggtatggttttgaagttcgcaaaaacggcgtattaatcgcatccagagaaactaaaggggccattcccggtagttacagtgcagttattgatatgcctagtggtggtggtagcgtcactctggagtttaagattttccagaaaggcaatcagggggcaggcaatatcaccgactgtacggtgattgtgaccaaaaaagctgcttccggcatcagtattcgttga

SEQ ID NO: 37631 - DNA, 882 bp, Escherichia coli
atggcttaccgcctctttcaccatctgttcaagcatcggacgcacatcatcgggggtaatacttttgccgtccgccggtaccggaatattcgcaaccgcatcattcaccgcctgcttcagtacttccggatcataatcacgaccgtcacgcggagcagggatatggcttacagcctctttcaccatctgctcaagcatcggacgcacatcatcgggggtgatacttttgccgtccgccggtaccggaatattcgcaaccgcatcattcaccgcctgcttcagtacttccggatcataatcacgaccgtcacgcggagcagggatatggcttacagcctctttcaccatctgctcaagcatcggacgcacatcatcgggggtgatacttttgccgtccgccggtaccggaatattcgcaaccgcatcattcaccgcctgcttcagtacttccggatcataatcacgaccgtcacgcggagcagggatatggcttacagcctctttcaccatctgttcaagcatcggacgcacatcatcgggggtgatacttttgccgtccgccggtaccggaatattcgcaaccgcatcattcaccgcctgcttcagtacttccggatcataatcacgaccgtcacgcggagcagggatatggcttacagcctctttcaccatctgctcaagcatcggacgcacatcatcgggggtgatacttttgccgtccgccggtaccggaatattcgcaaccgcatcattcaccgcctgctgcagtacatccggatcataatcacgaccatcacgcggtaccggaatggtccccacagcgtcatccaccatcgcctgcagaaccggatgtacctcatccaccgtcacatgcttctgtaa

SEQ ID NO: 37632 - DNA, 249 bp, Escherichia coli; identical to SEQ ID NO: 23611

SEQ ID NO: 37633 - DNA, 444 bp, Escherichia coli
atggacgaatatgtttatagcgcaaggcataatgcttttttccctgtggatatgattgataaatataaatcagagggatgggatttatcagacgctaaggaagtaaatcaaaatattatcagtgagtttatggctgaaccgccacaaggaaaaatccgtattgccggagatgatgggctgcctgcgtgggcagatattcctccacccacgcatgaagagcttattgaaattactgaatcagaaagacagctactaattaaccaggccaacgaatacatgaacagtaagcaatggcccggtaaagcggctattggtcgtctgaaaggtgacgaactgacgcaatataatttgtggctggattatctggacgcactggagctggtcgatacttccggtgcgccagatattgaatggcctacgcctccggcagttcaggccagatga

SEQ ID NO: 37634 - DNA, 594 bp, Escherichia coli
atgaaacctgtttttgatgaaaatgggctggctacagtgccgggcgatatgcgttgtttttattatgatgctgaaacatctgagtatacgggctggtctgatgaatatattaatactggcgtaagtatgcccgcctgttccactggtattgaccctggcgaaaacattccgggaagagtggcagtatttacaggtaagggatggagccatgaagaagaccatcgcaatgagactgtttactcaatcgaaaatggcgcagctgttacagtggattatatcggtgccatcaaagacggttatgtcacgatttcaccgttaacgccatacgataaatgggatggtgagaaatgggtgacagacactgaggcacaacacagtgccgcagtagacgcggcagaagcacagcgccaatcactgattgatgcagcaatggcttccattagtctgattcagctgaagttacaggccggacggaaactgactcaggcagaaacaacccgacttaacgccgtgctggattacattgacgcggtgacggcaacagataccagcaccgcgccggatgtcatctggcctgaactgccggaggcgtag

SEQ ID NO: 37635 - DNA, 147 bp, Escherichia coli; identical to SEQ ID NO: 23916

SEQ ID NO: 37636 - DNA, 267 bp, Escherichia coli
gtggcgcttattgttcgccagcagcggctgaaattaagcctgtccggaaggctggcgataaagattattgccgagccaccggataagcgccgccgtgacctggacaatattctgaaagcgccgctggatgcgctgacgcatgcggggttgctaatggacgatgagcagtttgatgaaatcaatatcgttcgtgctcagccagtatctggtggacgtctgggggtgaagatttaccccataatgcttgaagggcaggtcaaaaaatga

SEQ ID NO: 37637 - DNA, 648 bp, Escherichia coli; identical to SEQ ID NO: 37226

SEQ ID NO: 37638 - DNA, 444 bp, Escherichia coli
gtgaaataccgttatgaatttacggacacgctggggctggtgacgtcattcagctatgcaggagacaagaatcgccagcttacccgttacagcgatacccgctggcatgaagattccgttcgtaaccgctggttcagcgtaatggcggggccgtctgtgcgcgtgaatgaatggttcagcgcgtatgcgatggcgggtgtggcttacagccgtgtgtcgactttctccggggattatcttcgcgtaactgacaacaaggggaaaacgcacgatgtgctgaccggaagtgatgacggtcgccacagcaacacgtctctggcgtggggggctggcgtgcagtttaacccgaccgaatccgtggccattgatattgcttatgaaggctccggcagtggcgactggcgcactgacggtttcatcgtgggtgtcggttataagttctga

SEQ ID NO: 37639 - DNA, 192 bp, Escherichia coli; identical to SEQ ID NO: 24041

SEQ ID NO: 37640 - DNA, 270 bp, Escherichia coli; identical to SEQ ID NO: 23985

SEQ ID NO: 37641 - DNA, 783 bp, Escherichia coli
atgcagttttcctattttttcccggaaaaattccagatacccttcaccatcattgctgggctgcccgctgacttccacaaacgcagatttccccaccaggttgacgctgcgcacgtaaaaccagaaatccgtccccggcttaatccggcttccctggacagtccactgactgccgctccccagataacgggcagatttttccacctgtgccgtgttcgtgatgcgtttttccgaaaaccagaactcaaactgcaccgtcgggtcatacaccgccagcaccggtaccgccgttatctgaaaataccccggcgtcagttcaatggtggcgggttttgctggcgcgttaatccggaaggtggtgatggccggttccccctgctggccataactgttaattgccctgactgtcagggtgtattccccgagcggcagaccactgaaacgatgctctgtatccgcagtgatggcggtggtcaccagacggctgtcctgaccgcttccactggtcaggcgcagactgaagcgcacgcccttcaccacccgcggcgtgtcccatttagcctgcgccagatactggccgtcagctgcgctcacctccaccgtcaggtgctgcactgccggagggatgacgctgttcagggtgccgctctggtcgccgtcaaagtgcgccccgttatccacgatggcttctttttccggtacgtgctgcactgccgtgatggcaaaggtgccgtccgtgttttcccggatggagacacagcggaacaggcgacgacgcagtga

SEQ ID NO: 37642 - DNA, 339 bp, Escherichia coli
atgccggattttgagcgtgaggatgactggtggcgcaatggtcagaacctgtacctggacaatatggaggcgactggtttttacaggatttccctgccttccgcacagcctggcgatatcctgctgtgctgctttggcgcatcggtggccaatcatgccgccatatactgcggcaacggtgaactgcttcaccatctgcctgaacaactgagtaaacgggagaggtattccgaaaaatggcaacgacgaacgcattcagcctggcgtcaccgccactggcacgtatctgccttcacggggatttacaacgatttggccgccgcctcagcctgtatgtga

SEQ ID NO: 37643 - DNA, 621 bp, Escherichia coli
atggcggttatgggacttgccggtgttctccggggtaaaaaggtccgtacgaccatcagccggaaagccgttgccgcaggcgaccgcgtaaaccgtcagttcgtggcagaacgacctgaccagctgtgggtggctgattttacttacgtcagcacatggcagggcttcgtctatgtggcgtttatcattgatgtgtttgccggatacatcgtggggtggcgggtctcatcgtctatggaaacgacattcgtgctggatgcgctggagcaggcgttgtgggcccgtcgtccgtctggcaccatccatcacagcgataaaggctctcagtatgtgtcactggcctatacggagcgactaaaagaagccggattactggcatcaacagggagtacaggcgactcgtatgacaacgcgatggctgagagcatcaatggtctttacaaagcggaggtaatacaccgtaagagctggaaaaaccgtgcagaagtggaactggccacactaacgtgggtggactggtataacaatcgacgattgctgggaaggctgggccatactcctccggcagaagcagaaaaagcttattatgcttccatcggaaacgatgatctggcagcctga

SEQ ID NO: 37644 - DNA, 270 bp, Escherichia coli
atgaatatactaaaaaaacttatgcagcgtctgtgcggttgcggaaagcatgatgaccgtgaacacggggagttacttacagcacagctgcgactggggccggcagacatcctggagtcagatgagaatggcattatcccggagcaggccagggtaatcacgcagctggtgatactggatgcggataaaaagcagatacagtgcgtggtaagaccgctgcaaatcctgcgtgctgacgggacgtgggaaaatattggcgggatgaagtaa

SEQ ID NO: 37645 - DNA, 291 bp, Escherichia coli
atggttaactttgaccgtgagcagatgcgtcggatcgccaacatcgataaccaggacatgacgatatcggtctgggtctttcctgatactgatatttcagatgtatcgcgtgagttaattgcggcaattaaacaggggtatctaacagtaaaagccgccggggtatgggcggggggcattgaaacaccttcggtggaaactccatcggaaggctctaaattttttggttttgatatggataacgaattcatcagtggttttgatgtaggggcatggggagtattactctga

SEQ ID NO: 37646 - DNA, 291 bp, Escherichia coli; identical to SEQ ID NO: 37645

SEQ ID NO: 37647 - DNA, 279 bp, Escherichia coli; identical to SEQ ID NO: 37446

SEQ ID NO: 37648 - DNA, 291 bp, Escherichia coli; identical to SEQ ID NO: 37645

SEQ ID NO: 37649 - DNA, 270 bp, Escherichia coli
atgaatatactaaaaaaacttatgcagcgtctgtgcggttgcggaaagcatgatgaccgtgaacacggggagttacttacagcacagctgcgactggggccggcagacatcctggagtcagatgagaatggtattatcccggagcaggacagggtaatcacgcaggtggtgatactggatgcggataaaaagcagatacagtgcgtggtaagaccgctgcaaatcctgcgtgctgacgggacgtgggaaaatattggcgggatgaagtaa

SEQ ID NO: 37650 - DNA, 345 bp, Escherichia coli; identical to SEQ ID NO: 37479

SEQ ID NO: 37651 - DNA, 429 bp, Escherichia coli
ttggtatttttggtaaaaaaagcccgcagagcggcaacggaaattaaaaagtttgaaaaacgcgatctggcacaggtggtgattaacgccgcatacctggtggcctgtgcagatggtgaatgtgaggcatccgagaaagcgaagatcgaacaggtactgcgtaatcagcctgcgctgtacgcgtttacgtcagaaattaatgcgattagcgcaaccattatcggtcagctggatacgaactttaaaactggtcgtcgtgcggcgttacgtgagattgaggatgtgaaacacgatacgcgtgaagcggaagatgtgctggatgtggcggtggccattgcggaggcagacggcgaaattgagccggaagagcgcaaggtgctggaagagattgccggtgttctgggtcttcgtctggagaattacctgtga

SEQ ID NO: 37652 - DNA, 309 bp, Escherichia coli; identical to SEQ ID NO: 24051

SEQ ID NO: 37653 - DNA, 330 bp, Escherichia coli; identical to SEQ ID NO: 37221

SEQ ID NO: 37654 - DNA, 204 bp, Escherichia coli
atgcagtccggtgcggaaatggcgcaggcggaaatccgcatctgggtgcgcggtcagtccggccgggaaatcacggcagcgtcacgacttcatgtgctgagtggtccatggcgtgaccggatcctgaacgttgtcgggctgcccgtgccggatgtgaccggcgggcgtctggaaattctctgtcggctgggaggggaaaaatga

SEQ ID NO: 37655 - DNA, 204 bp, Escherichia coli
atgcagtccggtgcggaaatggcgcaggcggaaatccgcatctgggtacgcggtcagtctggtcgtgaaatcacggcggcgtcacgacttcatgtgctgagtggtccctggcgtgaccatgtcctgaatgtcgtcggggtcccggttccggatgcaaccggcgggcgtctggaaattctctgtcggctgggaggggaaaaatga

SEQ ID NO: 37656 - DNA, 186 bp, Escherichia coli; identical to SEQ ID NO: 37617

SEQ ID NO: 37657 - DNA, 381 bp, Escherichia coli
atgaacaataataatggcatagcaaagaatgattgtgactggctaacggcccttgattttgtaaaggatgtcaacggttcaccaacgcatctcactttttatatctaccaaaaaaatgctttcttgcacgattttggaaactactgggttctatatattgagcttagtggtgattttcgtcaggttccaacagatacatttatcagactctgcaatatcctggccgttagtaacgaatataaacaaatgggtattttcctgtctaataagaagtggtatctttgccaaattttgcaatttgataaactagagcaattatcttcatcggatacaatgatgccgccaacacacttgttttctgatataggacgaattgtgtaa

SEQ ID NO: 37658 - DNA, 360 bp, Escherichia coli
atgcgtatagagtttgttttgccttacccgccgacggtgaacacctactggcgacgtcgtggcagcacatattttgtatcaaaagccggtgagcgttatcgccgggatgtggcacttattgttcgccagcagcggctgaaattaaacctgtccggaaggctggtgataaagattattgcagagccaccggataagcgccgtcgtgacctggacaatatcctgaaagcaccactggatgtgctgacgcatgccggacttctcatagacgacgagcagtttgatgaaatcaatattgtgcgcggtcagctcgttcctggtgagcggctggggataaaaatcacagaactggagtgcgcatga

SEQ ID NO: 37659 - DNA, 315 bp, Escherichia coli; identical to SEQ ID NO: 24016

SEQ ID NO: 37660 - DNA, 732 bp, Escherichia coli
atgattaacaatgtttcttcactttttccaaccgtcaaccgcaatattacagctgtatataaaaaaagcagcttctctgtatcaccacagaaaatcacattaaatcctgtaaaaatcagctcacctttttcaccaagcagtagctccatcagcgcaacaactctctttcgagccccaaacgcccattcggcatcatttcatcgacagtctactgctgaaagttcgttacatcaacaacttcctaatgtgaggcagcgcctgatacaacatcttgcagagcatggcattaaacctgcccggagtatggctgaacatattcctccggcacctaactggcctgcgccaccaccgccagtacaaaatgaacaatcaagacctctgcctgatgtggctcagcgtctggtgcagcatcttgcagagcatggcattcaaccagcccggagtatggctgaacatattcctccggcacctaactggcctgcgccaccaccgccagtacaaaatgaacaatcaagacctttgcctgatgtggctcagcgtctgatgcagcatcttgcagagcatggcattcaaccagcccggaatatggctgaacatattcctccggcacctaactggcctgcgccaacgccgccagtacaaaatgaacaatcaagacctttgcctgatgtggctcagcgtctgatgcagcatcttgcagagcatggcattaatacatctaagcgctcgtga

SEQ ID NO: 37661 - DNA, 1551 bp, Escherichia coli
gtgagcttcctgcttcgcctgaccgtggcagcggatgacggcagtgagcggctggtcagcacggccaggacgacagaaaccacataccgcttcacgcaactggcgccggggaactacaggttgacagtccgggcggtaaatgcgtggggacagcagggcgatccggcatcggtatcgttccggattgccgcaccggcagcgccgtctcggattgagctgacaccgggctattttcagataaccgccacgccgcatcttgcggtttatgatccgacggtacagtttgagttctggttctcggaaaagcggattgctgatatcaggcaggttgaaaccgcagcccgctatcttggctcggcgctgtactggatagctgccagtatcaatatcaaaccgggccatgattattacttttatatccgcagtgtgaacaccgttggcaaatcggcatttgtagaggctgtcggtcagccgagtgatgatgcatcaggctatctggattttttcaaaggcgagatagggaaaacccatctggctcaggagctgtggacgcagattgataacggtcagcttgcgcctgacctgactgaaatcaggacgtccataacggatgtcagcaatgaaataacacagaccgtcaataagaaactggaagaccagagtgcagcgatccagcagatacagaaggttcaggttgatacaaataataacctgaacagcatgtgggccgtgaaactgcagcagatgcaggacggacgcctttatattgcgggtatcggtgccggtattgagaatacgccagcaggaatgcagagtcaggtgctgctggcggcagacaggattgcgatgattaatcctgcgaatggcaacacaaagccgatgtttgttggtcagggcgatcagatatttatgaatgaagtgttcctgaaatatctgacggctcccaccattaccagcggcggtaatcctccggcattttccctgacaccagacgggcgactgacggcgaaaaatgcggatatcagtggcagtgtgaatgcgaactcaggagcgctcaacaatgtcacgattaaccagaactgtacgattaagggcatgctggaggcgacccaggtcagaggggatttcgttaaagctgtatcaaaagccttcccgaaaaaagtcggtacgtggggtaacacggaaacaccaaacggtacggttacagtcaccatcagcgatgatcataactttgaccgccagattattattccgcccattatttttaacggtatagcgtatgacgatccggggagcggaaataacccaggaggcacgcgatacacggggtatggttttgaagttcgcaaaaacggcgtattaatcgcatccagagaaactaaaggggccattcccggtagttacagtgcagttattgatatgcctagtggtggtggtagcgtcactctggagtttaagattttccagaaaggcaatcagggggcaggcaatatcaccgactgtacggtgattgtgaccaaaaaagctgcttccggcatcagtattcgttga

SEQ ID NO: 37662 - DNA, 318 bp, Escherichia coli
atgataaaaaatttgcgctgtgaagatattatgcctggccgatggaccactcaacttgtcaataagcacttaggttacagatacacaggagtattcaaaaccctggcaagtattgatgacaaaccgtcccgtttcgaaattttgataccattggtacaaactttagttcgcgacaatgtaaagctaaataatgatgtgtataaagaactgaaaaagtttatgcacgattacgacaaaacatccccagaaatgagaaaataccttcagagcatcaacgagtctatgttccttatgaaaaaaatatctcatcaagattaa

SEQ ID NO: 37663 - DNA, 933 bp, Escherichia coli
atgacagatggtatctcaacttcgccacattgtctttataaatcaaatatagtagatgatgtaataataaataaaacaagacaaaatgagttagtaaaagtgttttgcgagtataaaacagagttcttaattttgtttgatgactttttcagaagccaggatttgcctaaaccatctccagtcctccatcatttttttcaatatactcatctgagagatgcacatttttatagatgtaaactcatagaacatacagttcaattttctttttttaaacacaaaggcatcacattacttagattggatgtttttgatgacagaacaagcgaatgtctttctgaagagattaagatatatcaagaatgccatgaaaaatttattaaatttttaaaggcaaacttcaatcaggaaatatacccagagctatacactcctgaaatattttatgaggcctgcagaaatctccagtcattttatgatcatcaggagacgtcacaaaacgctaagtacagtgcaatagtcaagaaaaaaagttattttaataaggaaatcagaaatctaataaaaaagaatatttatcctgagctatacaatgagcaatgcaataaaatccccgcctcatcgacagatgataaccagaaaataacatggcagaattttaaaactagcaatgcggcatattcacaactatgtgaaaaattatctttattaaaaagctcgcccagtcggttaatagagaaatcagcttactgctcaaatgaaaacatgatcaccgataaatttgatgttgtcttttcttactgcggagataatgtaaaggaatttatacttttattaccctataataaatcgctggagatgcatgaacttaacgagcaaaacatccagtatttgactgcccttaatattattatccaatatatcatgttttga

SEQ ID NO: 37664 - DNA, 555 bp, Escherichia coli
gtgaaacagtgctacccgaacacggcgattgtggggctgcaggtggatgcggagcagtttggcggtcagcagatgacggtgaactaccatatccgcggtcgcatcatccaggtaccgtcaaactatgacccggaaaaacgcacgtacagcggcatctgggacggcagcctgaaaccggcatacagcaacaacccggcctggtgcctgtgggacatgctgactcacccgcgctacggcatgggaaaacgcctgggggcggcggatgtggacaagtgggcgctgtatgccattgcgcagtactgcgaccagacggtcccggatggtttcgggggcacagagccgcggatgactttcaatgcgtacctgtcacaacagcgtaaggcgtgggacgttctcagtgatttctgctcggcgatgcgctgtatgccggtatggaacggccagacgctgacgttcgttcaggacagtccgtcggatgtggtgtggcctacaccaacagtgatgtggtggtggatgataacggcgtggggtttcgctacagcttcagcgccctga

SEQ ID NO: 37665 - DNA, 183 bp, Escherichia coli; identical to SEQ ID NO: 37241

SEQ ID NO: 37666 - DNA, 183 bp, Escherichia coli; identical to SEQ ID NO: 29889

SEQ ID NO: 37667 - DNA, 432 bp, Escherichia coli; identical to SEQ ID NO: 24030

SEQ ID NO: 37668 - DNA, 432 bp, Escherichia coli; identical to SEQ ID NO: 23993

SEQ ID NO: 37669 - DNA, 429 bp, Escherichia coli; identical to SEQ ID NO: 37288

SEQ ID NO: 37670 - DNA, 429 bp, Escherichia coli; identical to SEQ ID NO: 37516

SEQ ID NO: 37671 - DNA, 306 bp, Escherichia coli
atggagtctagagcatacaattttgcatgcacaaaactctcagatgcaggtgaacccgatattttcggttggggagataaggaaatatgtaattcaatggaattatcagaatcacaattagctaatgggtattctaaccgccaatggccttctcagattccagttattccagaaggaatttataatacagtatatcttggatatggagaaacattgcgagctaatactgaagttacattgagtagcactggttacttttacgagattgcaagggcatatactgatgatgaactatctgagccataa

SEQ ID NO: 37672 - DNA, 270 bp, Escherichia coli; identical to SEQ ID NO: 23881

SEQ ID NO: 37673 - DNA, 177 bp, Escherichia coli
atgccgcctctgctggtggcccgtatgcgcagtcacagctctgaatattaccgtgagatcgtcgaacggagggatcggctggtgaaagatgtggatgattttgtcgcagcggcgatcgcctggggcaccctgactaacagtgggggtcagcctggtaatgctgttgtcgtgcattga

SEQ ID NO: 37674 - DNA, 423 bp, Escherichia coli; identical to SEQ ID NO: 23955

SEQ ID NO: 37675 - DNA, 261 bp, Escherichia coli
gtgccagatttcaacaccaaatgtcagtgccagattttaggtgaagggattgtttttttgccagattacatggtccgtgaggcgatggcgcaatccctgctggttacccgacaaatccataacccgcgccaggattcacgcatgttactggcgactcagcattctgctacgggtcaggtgacgcagtggattaaaaaacaatttgcgccaaatggcatattaacggggatctatcaggatttactgcatcgggagaattaa

SEQ ID NO: 37676 - DNA, 171 bp, Escherichia coli; identical to SEQ ID NO: 23816

SEQ ID NO: 37677 - DNA, 279 bp, Escherichia coli
gtgggggcaaccggacctcagggaccgaagggcgacccgggggagacgcaaatacggttccgtctggggccgggaaacattattgagacaaacagccatggctggttcccggatacagatggcgcactcatcaccggactgacctttcttgaccccaaagatgccacacgggttcagggtttttttcagcatttgcaggtcaggtttggtgacgggccgtggcaggatgtcaaggggctggatgaagtgggcagtgatacaggcagaacaggagaatga

SEQ ID NO: 37678 - DNA, 315 bp, Escherichia coli; identical to SEQ ID NO: 23639

SEQ ID NO: 37679 - DNA, 2121 bp, Escherichia coli; identical to SEQ ID NO: 23691

SEQ ID NO: 37680 - DNA, 1197 bp, Escherichia coli
atgctgatcacctttaccgttattctttggcaaagtgcgggtatgctctcattcactgttggtggaacagaatggaatatccaggggtatatggtctataccgttgtgctcattgtgatcggtggaactttatttacccataaggtgggtaaacgtattcgtccgcttaatgtggaaaaacaacgtagcgaagcgacatttcgaactaatcttgtgcagcataataagcaggcagaactgattgcgctaagcaatgctgagtctctacaacgccaggagttgagcgacaattttcataccattaaagagaactggcatcgtttaatgaatcgtcagcggtggcttgattactggcagaatatttattcgcgctcgcttagcgttcttccctactttctgttattgccgcagtttattagcgggcagatcaatctgggcggactgatgaaatcgcgccaggcatttatgctggtatcgaacaatctaagctggtttatttataaatatgatgaacttgctgaactggctgcggttatcgatcgcttgtatgagttccatcaactcaccgaacagcgccctacgaataagcctaaaaattgccaacatgcggtacaagtggctgacgcgagtattcgtactcctgataataagatcatattagagaacctgaactttcatgtttcgccaggcaaatggctattactgaaaggttactctggtgcgggaaaaaccacactgcttaaaacattatcccactgctggccgtggtttaaaggtgatatttcttctcctgccgacagttggtatgtgtcacaaacaccgttaatcaaaaccggcttactgaaagagattatttgtaaagcacttcccctgcccgtagacgataaatcattgagcgaagtactgcatcaggttggtcttgggaaattggctgcgcgtattcatgaccacgatcgctggggagatattctttccagcggcgaaaaacaacgtatcgccctggcacgattaattttacgacgtccgaaatggatatttcttgacgaaactacctctcatcttgaggaacaagaggctatccgcttactgcgtctagtgcgtgaaaaactacccacaagcggcgtcattatggttacacatcaacccggtgtctggaacctggccgatgatatttgtgacattagcgcggttttataa

SEQ ID NO: 37681 - DNA, 507 bp, Escherichia coli; identical to SEQ ID NO: 23860

SEQ ID NO: 37682 - DNA, 150 bp, Escherichia coli
atgaatgagaaatttcgcacagaccttgcacatacgtttgggatagctcttgaagagcaaactgacgtgctctctttccacgataacgatggccatgaatggatactggagtgtgcatctcaatctgaaattctgtttttttattgttaa

SEQ ID NO: 37683 - DNA, 426 bp, Escherichia coli
atgttaacgcattttagcagcaacggcacacgctacggaccctacgtaaaactgtcctgggacgcgacaaaagatcttaattttggcattcgctatcgttacgactggaaagcttaccgacaacaagacttatccggtgatatgtctcgtgataacgttcatcgttgggatggatatgtcacttaccatattaatagtgatttcaccttcgcatggcaaacgacgctatacagcaaacagaacgattatcgctatgcaaaccataagaaatgggcgacggaaaatgcatttgttctacaataccatatgacgcccgatattacgccatacatagaatatgactacctggaccgtcagggtgtttacaacggcagagataatttatcggaaaacagttatcgcattggtgtgtcatttaaactgtag

SEQ ID NO: 37684 - DNA, 327 bp, Escherichia coli
  misc_feature (279)..(288): n is a, c, g, or t
atgaaaaaggctaaaatactttctggcgtattattactgtgcttttcgtcaccattaatttctcaggctgcgacactggacgtacgtggtggatatcgtagtggaagccacgcctatgagactcgactcaaagtcagtgagggatggcaaaatggatggtgggcaagcatggaaagtaatacctggaataccattcatgataataaaaaggaaaatgccgcactcaatgatgttcaggttgaagttaattacgcgattaaacttgatgatcaatggacnnnnnnnnnntcaatggacggtgcgcccgggaatgttaacgcattttag

SEQ ID NO: 37685 - DNA, 144 bp, Escherichia coli; identical to SEQ ID NO: 23988

SEQ ID NO: 37686 - DNA, 240 bp, Escherichia coli; identical to SEQ ID NO: 37380

SEQ ID NO: 37687 - DNA, 405 bp, Escherichia coli
gtggatgtgtttcgtggctgggtcagcagtatcggtaaggccgtgacggcgaaagaagtgatcacccgcacggtgaaagtcactaacgtgggtaaaccttctgtagcggaagaacgcagcaaaattacgccggtcagtgcgattaaggtgacgccgacatccggtacggtggcaaaagggaaaacaaccaccctgacggtttcttttgagccggaaagtgcaacagacaagacgttcagagcggtttccgccgatccgtcgaaagccaccattagtgtgaaagatatgacaattacggtaaacggcgtggcgacaggtaaggtgcagatccctgtggtgagcggaaatggtcagttcgccgcagtggctgaagtcaccgttactgaagcgggcgctgcagggtaa

SEQ ID NO: 37688 - DNA, 441 bp, Escherichia coli
gtgcgggcctataaaatccgtttcccaaatggcacggtggatgtgttccgtggctgggtcagcagtatcggtaaggccgtgacggcgaaagaagtgatcacccgcacggtgaaagtcactaacgtgggcaaaccttccgtggcggaagaacgcagcgaaattacgccggccactgcaattaaggtgacaccgacatccggtacggtggcaaaagggaaaacaaccaccctgacggtttcttttgagccggaaagtgcaaccgacaagacgttcagagcggtttccgccgatccgtcgaaagccaccattagtgtgaaagatatgacaattacggtaaacggcgtggcgacaggtaaggtgcagatccctgtggtgagcggaaatggtcagttcgccgcagtggctgaagtcaccgttactgaagcgggcgctgcagggtaa

SEQ ID NO: 37689 - DNA, 450 bp, Escherichia coli
atgcgaaaaataacaattattctactgctgacattctcatgtacaaaaggtctggcatttgacatttccatgtctaaagaatgtagtggtgttgatgaacttgaatttattgattgtgttaaaaactcatttattatgagcactattacacttaaaaaagcagaagcaaatataaaagagaaaattcaaaaatggaatagtgatgaggacgaagcaataagaaaagaagcagttatttctttaaaaagactagagtcttctaatagggaatttatacgttacagatttgctcaatgctcttttactctaacctggggggccagagtagggcgactggcattctctcggctatatccatgctatactgagttaaacaaaataagagccatgcaactaaacaatgcttacatttctgactttcaaaatccagatgagatatccagcaaatga

SEQ ID NO: 37690 - DNA, 429 bp, Escherichia coli
ttggtatttttggtaaaaaaagcccgcagagcggcaacggaaattacaaagtttgaaaaacgcgatctggcacaggtggtgattaacgccgcatacctggtggcctgtgcagatggtgaatgtgaggcatccgagaaagcgaagatcgaacaggtactgcgtaatcagcctgcgctgtccgcgtttacgtcagaaattaatgcgattagcgcaaccattatcggtcagctggatacgaactttaaaactggtcgtcgtgcggcgttacgtgagatcgaggatgtgaaacacgatacgcgtgaagcggaagatgtgctggatgtggcggtggccattgcggaggcagacggcgaaattgagccggaagagcgcaaggtgctggaagagattgccggtgttctgggtcttcgtctggagaatcacctgtga

SEQ ID NO: 37691 - DNA, 168 bp, Escherichia coli; identical to SEQ ID NO: 29866

SEQ ID NO: 37692 - DNA, 168 bp, Escherichia coli; identical to SEQ ID NO: 29864

SEQ ID NO: 37693 - DNA, 309 bp, Escherichia coli; identical to SEQ ID NO: 37530

SEQ ID NO: 37694 - DNA, 345 bp, Escherichia coli; identical to SEQ ID NO: 37479

SEQ ID NO: 37695 - DNA, 231 bp, Escherichia coli; identical to SEQ ID NO: 23233

SEQ ID NO: 37696 - DNA, 327 bp, Escherichia coli; identical to SEQ ID NO: 37483

SEQ ID NO: 37697 - DNA, 450 bp, Escherichia coli; identical to SEQ ID NO: 23733

SEQ ID NO: 37698 - DNA, 204 bp, Escherichia coli
atgtccacagccctgacggggaacttctctgcgggagtgtgcggggataatcaaaaacgatgcacaccgggttttctcatttttcacgagatgggagcgatttcccgcgaagccgcctgtccggtgcggtggtggaagaaaccggataaaacaaccgcattgtgcaaatatcgatcaaatatggtgctgctgtgtgaaatctga

SEQ ID NO: 37699 - DNA, 702 bp, Escherichia coli
atgttgctggatacgctggcgtggatacttgaaaaactcggtgtgcttccggatgaagcggaaagggcgcgcaagaaaatcgaagacgcacaacgtgcggccattcttcaggacaaggttgctctgtttcagggagacattgcgaaaatcaatccgccgaagtctgcgggaaatagcaatggcaccggagatgataaacccaaagacaacaaacctctcacagacagcaataccggcacgctacgcagactcagcaaaattgctgataacacaggtaagctggttgatgagacaaaaaaacgcattggccccggcgatattgtctttaagaacctgccccgcgcacttgctgttcgtggggagtggcaggagcggaagattgcgcaggtcagtaagcctgcccccgcaattaatatcacacccgtggtcccggctccgctgcctccggcgctggtccctgttgttgcggccagctcccgcccggtggtggaggccatacgatcgccagtggcatcagttcctgcaacttcccgtaaccgggagcctgttgcctccggatttggcggtgaaattcatgttcatctgcataacgttgttacgcagaatccccgcgaactggcgaaactggtcggcgaaatggtcagggcagaaatggaacggcgcgcccgtgccaggcgtggcagtttttacgataaagattga

SEQ ID NO: 37700 - DNA, 264 bp, Escherichia coli
ttgtttttatcagaaggaataacggaagttggcgttcaccgcgttatccacgttgtacttaccagatgccgatttttcaaactccagaccgaagcggatgttgtcgcgaatttccgcattcaggccaacattcatgagcatacgaccgtctttttcacccttgatgcgtttttcgccggatgcatcacgcagtacggtttcaccgttagccagcaggtcaaactgataaccgataccgtcgcgggcagtgaaagagataattga

SEQ ID NO: 37701 - DNA, 372 bp, Escherichia coli
atgcgtatagagtttgttttgccttacccgccgacggtgaacacctactggcgacgtcgtggcagcacatattttgtatcaaaagccggtgagcgttatcgccgggctgtggcgcttattgttcgccagcagcggctgaaattaagcctgtccggacggctggcaataaaaattattgcagaaccaccggataagcgccgccgtgacctggacaacattctgaaagcaccgctggatgcgctgacgcatgcggaagtgctcattgatgacgagcagtttgatgaaatcaatattgtgcgcggtcagcctgtgccaggtggacggctgggcgtgaagatttacgaaatcagaggtggtaacgatggcgcgtga

SEQ ID NO: 37702 - DNA, 270 bp, Escherichia coli
gtggcgacaaacaacctgaaactgggaacctttggcgcatttgataacgaatggcatacgctggctttccgctttgccgggaataacagcctgcaggtgacgccggttattgatggtcaggatggcacaccgttcacgctgacgcagtcaccggtcagtgcctttgcggcggataaactgcatgtgacagacattaccagaggtgcgacttacccggtactgatagacagcattgcggtggaagtgaacagcacagacactgcggcatga

SEQ ID NO: 37703 - DNA, 273 bp, Escherichia coli
atgtcagaaattacatccctggtcactgcagaggcagtgaaggacgtcctgcgctctgaagaagtccggagcgcactgaaacagaaacttcgccataacctggaagcgcgtcttgatgcagaagtggatgccattctggatgaactgcttggtgtacaggcagagccaccgactgaagcgggagataccaccgcagagagcggtgaagttcagcctgaatcaccggtcgccgatgcgactgaacctcaacccgaatcggtcatgatgctgtaa

SEQ ID NO: 37704 - DNA, 192 bp, Escherichia coli
atgggggaggtgatactctatcagttgcatagtctactggctgctacagcgctcggtttttgccgattggcaccaactttctatttgttaccatttttcgccagtgggaatataccaacagtagtccgtcatccgcggcatttcaataataatagtggtatcatgtgcattagttcagcattaccactatga

SEQ ID NO: 37705 - DNA, 432 bp, Escherichia coli; identical to SEQ ID NO: 24030

SEQ ID NO: 37706 - DNA, 519 bp, Escherichia coli; identical to SEQ ID NO: 37222

SEQ ID NO: 37707 - DNA, 144 bp, Escherichia coli; identical to SEQ ID NO: 23988

SEQ ID NO: 37708 - DNA, 546 bp, Escherichia coli
atgcagatgccgggattccgccgtcagatgaacgaaggctggtaccagatacgtattgccggtgatgacacggcaccggaggcggtgtacgcccgtcttcacgaacagctgggtgagggaacggtcatccatattgtgccgcgactggccggggccggaaagggtggactgcagattgtgctgggggcggcagccatcgtgggctctttcttcactgccggggcatcaatggcgttatggggttcagccctggcagccggtggtttttctgccaccacgatgctgttttcacttggagccagcatgattctgggcggtgtggcccagatgctggccccgaaggcaaaaacaccggattaccgcgcaacggataacggcagacagaacacgtacttttcctcgctggataacatgattgcccaggggaacccgatgccggtgccttacggggaaatgctggttggctcccggcgaatctcccaggacatcagtacccgtgatgaaggcggtgacgggaaggtggtggttatcgggcggcaggcataa

SEQ ID NO: 37709 - DNA, 1140 bp, Escherichia coli
atgtttccattaaatgatctgtcgttaaaaactcagtcggttcaattaaataaaatcacatcgaatactgagtctacgataaaacaacacgagttagtatctgatgatgcaatcataaatgaattatcaagtgagttagtcagttgtcttggaaatgataagtttacaccagttagtgaagactgcaacttactgaatatgctgtctgaatttaagttattgagagagcaatgtttcaggtggggtaattatactctattgtttgaaaattatggggcttatgataagacgggatctatcacgatagaaaaaagtcagggggaggggactttacccattcggcataaattagagtttatatcgaccaatattgcagagttgctggacaagttaaccaaaattacagatgccaggctttgcaaaggtttcagtgactgggctagttcagtcaaagaaggcggatcgaatgacctcaaagaaaatgtagatagagcgttggtgagaatgtttaaatgtgttaagcttcacagtaatgaacttgacttatcatacctatttttgggttctgtgccgcctcttccagattggattgaaatgcttagccttgtttataatgaacttgattcaatacaggttcccgaatcatgcaaagaattagaactcgatttcaataaccttacagaatttccacaagtacctgatggaattaccctgatctccgtaaataataacctgatatcgcatattgactcatttccgccaaaggctaagaaaatttttattagtcacaataagctatcggaaacaccagcaataccagacaccgctaaggtttttgattgtggctataataagatacaagaaattcgatacttccccaaaaatctgaaagaagcgcgtattggatataataatattgaggttgttcctgcgatacctggcaatttaaaaatactttttatggaatgtaatcctattaaagaggcatttttaatgccatggactctgacagggatctgctatgaaatatcgcagcgaaaatatattgttacgaatccagccgattatgataaatattccgatatggttaaaaagcatgtaatagatggtgaggaactcataattaaatattttatgtaa

SEQ ID NO: 37710 - DNA, 537 bp, Escherichia coli
atgccgggattccgccgtcagatgaacgaaggctggtaccagatacgtattcgcggtgaggacacggcaccggaggcggtgtacgcccgtcttcacgaacctctgggtgagggggcggtcatccatattgtgccgcgactggccggagccggaaagggcggactgcagattgtgctgggggcagcagccatcgtgggctctttcttcaccgccggcgcaacgatggcgttgtggggcgcagccctgagtgccggagggctgactgccaccacgatgctgttctcactgggtgccagcatgatactgggcggtgtggcccagatgctggcaccgaaggcaaaaacaccggagtacagggcgacggataacggtaaacagaacacgtatttttcgtcactggataacatgattgcccaggggaacccgatgccggtgccttatggtgaaatgctggttggttcacgacggatatcccaggacatcagcacccgtgatgagggcggagacgggaaagtggtggttatcgggcggggatga

SEQ ID NO: 37711 - DNA, 537 bp, Escherichia coli
atgccgggattccgccgtcagatgaacgaaggctggtaccagatacgtattcgcggtgaggacacggcaccggaggcggtgtacgcccgtcttcacgaacctctgggtgagggggcggtcatccatattgtgccgcgactggccggagccggaaagggtggactgcagattgtgctgggggcggcagccatcgtgggctctttcttcacggccggggcatcaatggcgttatggggttcagccctggcagccggtggtttttctgccaccacgatgctgttttcactgggggccagcatgatactgggcggtgtggcccagatgctggcaccgaaggcaaaaacaccggattaccgcgcaacggataacggtaaacagaacacgtatttttcgtcactggataacatgattgcccaggggaacccgatgccggtgccttatggtgaaatgctggttggttcacgacggatatcccaggacatcagcacccgtgatgagggcggagacgggaaagtggtggttatcgggcggggatga

SEQ ID NO: 37712 - DNA, 168 bp, Escherichia coli; identical to SEQ ID NO: 29864

SEQ ID NO: 37713 - DNA, 195 bp, Escherichia coli
atggaaaaaggcctgccccagcacctgtttgaatcgctatgcatcgatcatttgcaacgccacggggccagcaaaaaagccattacccgtgcgtttgatgacgatgttgagtttcaggagcgcatggcagaacacatccggtacatggttgaaaccattgctcaccaccaggttgatattgattcagaggtataa

SEQ ID NO: 37714 - DNA, 477 bp, Escherichia coli; identical to SEQ ID NO: 37301

SEQ ID NO: 37715 - DNA, 498 bp, Escherichia coli
atgaacgggaagggcagcagtgcccgcccgtcgctgacggtgtcgaatctgttcggtctggtcaccggaatggcggaggacctgcagagcctggtgggggccacggtggtccgccgccgggtgtatgcccgttttctggatgcggtgaatttcgttgcgggcaatccggaggcggactcggagcaggagctgagtgaccgctgggtggtggagcagatgtcgcagctgacagccatgacggcctcgtttgtgctggctacaccgaccgagacggatggggcgctgtttcccggtcgcatcatgctggcgaatacctgtatgtggacctaccgctctgatgagtgtggttacacgggcggggctgtggcggatgagttcgacaaccccaccacggatatccgtaaggacagatgcagcaagtgcatgcgcgggtgtgagatgcgcggcatggtggctaattttggcggtttcctttccatcaataaactttcgcagtaa

SEQ ID NO: 37716 - DNA, 393 bp, Escherichia coli
gtgacggactgttacacgctgttccgggatgcctaccatctggcgggaattgatatgccggattttgagcgtgaggatgactggtggcgcaacggtcagaacctttacctggacaatatggcggccaccggcttttaccgggtgcccctgtcctctgcacaggcgggcgatatcctgctgtgctgctttggcgcatcggtggccaatcatgccgccatatactgcggcaacggtgaactgcttcaccatctgcctgaacaactgagtaaacgggagaggtattccgaaaaatggcaacgacgaacgcattcagcctggcgtcaccgccactggcacgtatctgccttcacggggatttacaacgatttggccgccgcctcagcctgtacgtga

SEQ ID NO: 37717 - DNA, 603 bp, Escherichia coli
atgtatagaactcaccgacaacacagcctgttaagctctggtggagtgccatcgtttattggtgggctggtggtgtttgtgtcggcagcgttcaatgcacaagctgaaacctggttcgatccagcctttttcaaagatgatccctcaatggtggccgatttgtctcgtttcgaaaaaggacaaaaaataacgccaggggtttatcgtgtcgatattgttctgaatcagacaattgtagatacgcgcaacgtcaattttgttgagataacgccagagaaggggattgccgcctgtttgacgactgaaagcctggatgcaatgggcgtgaatactgatgcatttccggcttttaaacaactggacaaacaagcgtgtgcgccattggcggagattattccggatgccagcgtaacttttaatgtgaataaactccgtctggaaatttcagtaccgcaaattgccatcaaaagtaatgctcgtggttatgtccccctgaacgttgggatgaagggatcaacgcgctattactgggatattcatttagcggggctaacagtattcatagcagcgcagacagtgattctggcgacagttattttctga

SEQ ID NO: 37718 - DNA, 4851 bp, Escherichia coli
atgagtgaaggaccaggcgggccacagggagcgaccgcaggcggtacgctggcaatgcggatgctgtcgcagcgggcgatggccgccagccagatgaaacgggcagccaacgacaaagccattgcacagatgttggcatcaaaaaagtctggcccccccgccgccaggctgggcgatgaaattcagcacaagagttttttgggggcgctggcaggggccgtgctgggggcgatagtgaccatagcagaaggttgcctgattatggccgcctgtgccaccggcccttatgcgctggttctggtgcctgcgctgatgtatgccagctataaggcgagtgattatgtggaggagaaacagaaccagcttgaatcatggataaacagcttttgtgacacggacggcgccatcaataccggttctaaaaatgtaaaaattaacggaaagccagcagcccgtgcagccgtcacccttccccctcctcccccacctggagcaatacctgaagtcccacagggggaaccctcatggggtgatattgccactgacctgcttgaatcggcagcggaaaaagcagtaccactggcgaaggcctgggggaacgctgttatcaccctgacggacagcaatgccggttttatggatcgcgtcagcgccggcgcatcgcttctgtttcccgccggtccggtattaatggagtttgccaccatggtgggcgggcgtggcgaaatcaaaaaagatgtggatttcccggaagccggtgaggacacggcgctctgcgacaaggagaacaaaccaccgaggatagcccagggcagcagcaacgtctttatcaacaatcagcctgccgcgcgcaagggcgacaaactggagtgcagcgcggcaatcgtggaaggttcgccggacgtctttattgggggtgagcaggtcacctatctggatatccagccggagttcccgccatggcagagaatgatcctgggaggaataacgatagccagctatcttctgccgccagcaggactgctgggaaaactggggaatctggcgaaactgggcaaactgggaaacctgctggggaaaagcggtaagctgctgggcgcaaagctcggcgcgttgctggggaaaacaggtaattcgttaaaaagtattgccaataaagtcatcagatgggtaacagatcctgtcgatccggtaaccggcgcatactgcgacgaacgtaccgactttacgctgggccagacactccccctctccttcacccgtttccacagttctgtactgccgctgcatggcctgacgggcgtgggctggagcgactcctggagcgaatacgcctgggtgcgtgaacagggaaaccgggtggatgtcatcagcctgggagccacgctgaacttcgccttcgacggtgaaagtgatacggcggttaacccgtatcacgcccagtacattctgcgccgccgtgatgattatctggagctgttcgacagggatgcactgagcagccgcttcttttatgacgcctttccgggaatgcgtctgcgccacccggtgactgacgataccagcgatgaccgcctggcacacagccccgcagaccggatgtacatgctgggcgggatgagcgacaccgccagcaaccgcatcacgtttgagcgcgacacccagtaccggatcacgggtgtcagtcacaccgacgggatccggcttaaactgacgtaccacgccagcggctacctgaaagccattcaccgcacggataacggcatacagacgctggcgacctacgaacaggatgcgcggctggactaccacctgttttatgagtacgacgctgcggaccggatcatccgctggtccgataacgaccagacgtggagccgtttcacctacgatgcacagggccggtgcgtgaccgtcaccggggcggagggctattacaacgccacgctggactatggtgacggctgcaccaccgtgacggacggcaagggcattcaccgttattactatgatcctgacggcaatattctgcgggaagaagcgccggacggcagcaccaccacgtatgaatgggatgaattccatcacctgctggcccgccactcccctgccgggcgggtggagaagtttgaatacaacgccgcacacggtcagttaagccgttacacggcggcagacggcgcggattggcagtactgctatgatgagcgcggcctgctcagcaacatcaccgcccctgccgggcagacgtggacgcagcagtgtgatgaacgcggcctgccggtgagtctggtatcgccacagggcgaagagacccggctggcgtacacccctcaggggctgctgtcggggatattccgccaggatgaacggcgtctgggcatagagtacgaccaccacaactggccggaaacactcaccgacgtgatgggccgcgaacaccacaccgaatacagcggtcacgacctgccggtgaagatgcgcggccccggcggtcagtcagtgcggttgcagtggcagcagcaccataaactgagtggccttgagcgggcaggaaccggcgcggaaggattccgctacgaccgccacggcaacctgctggcgtacacggacggtaacggcgttgtctggacaatggagtacggcccgtttgatttgccggtggcgcgaacggacggtgaaggccaccgctggcagtaccgctacgataaagacacgctgcaactgacagaagtcattaacccgcagggcgagtcttatctttatattctggacaactgtggccgggtgacggaagaacgtgactggggcggcgtggtctgtcgttaccgttatgacgctgatggcctgtgtaccgccagggtcaacggcctggaggaaaccatcctctacagccgggatgccgcaggccgcctggcagaagtcatcactccggaaggcaaaacgcagtatgcgtatgacaaatccggcaggctgacgggtatcttcagcccggacggcacatcacagcgcaccggctatgatgaacgcgggcgggtgaatgtcaccactcagggccgacgggccattgaataccactaccccgacgaacacaccgtcatccgctgtatcctgccaccggaagatgaacgcgacagacaccccgacggatccctgctgaaaaccacataccgctacaacgccgccggagaactgacggaggttatcctgccgggggatgagacgctgacgttcagccgtgatgaggcgggacgtgaagtgctccggcacagtaaccggggttttgcctgtgaacagggctggaatgcagccggtcagcctgtcagccagcgcgccggacttttcccggcggaagccacatggggcggactgctcccttcactgctacgggaataccgttacgacagcgcgggtaacgtatcaggcgtcaccagccgggaagattacggacgggaaacacaccgggagtaccggcttgaccggaacggccaggtcacggcggtgacagcctcaggcaccgggctgggctatggcgaaggcgacgagacttatggctatgacagctgcggctacctgaaggcgcagtctgcgggcagacaccggataagcggagagactgaccagtatgccgcaggccaccggctgaaacaggccggaaacacacagtatgactatgacgccgcaggccggatggtcagccgcacaaaacaccgtgacggctaccgcccagaaacagagcggttccggtgggacagccgggaccagctgaccgggtatcgcagcgcacagggggagcagtgggaataccgccacgacgccagcggcagacggacggaaaaacgctgcgaccggaagaaaatccgttttacgtacctgtgggacggcgacagtattgcggaaatccgggaataccgcgatgataaactgtacagcgtaaggcacctggtgtttaacggctttgagctgataagccagcagttcagccgggtacgacagccgcatccgtccgtggccccgcagtgggtgacgcgaacgaatcatgcggtgagcgacctgacgggccgcccgctgatgctctttaacagtgaaggtaaaaccgtctggcggccggggcagaccagcctgtgggggctggcactcagcctgcccgcagacacagactacccggacccgcgcggggagcgggacccggaagcggaccccggcctgctgtatgcgggacagtggcaggatgcagaatcggggctgtgctataaccggttccggtactacgagccggaaaccgggatgtacctggtgagtgatccgctggggttgcagggaggggagcagacttatcggtatgtgccgaatccttgtgggtatatcgatcctttggggctggctatatgtcagttagcccgctggacgaaatgggggagtgagcaaagcaacatatctgatgttttgaactcattagggaatagagcacttaaatatgctaatggtgattggataaaatcagaggctgcattcaataaatacataaacatgataaataaaagactagaattaacaggtagtaaatttagagttgagattcaaccagccataaaaaatggagagcgagttcctgcgacaacgaatggaccatttaaagtaaatggtaagtggacatccggcactcattatacaggtggttccaaacgtctagatgccggtattattgatatcacatctcctacaaaccaatatggattacatccagttattgaaggatttgatataacacttaataaaacaaaaccatcagcagtggatatatattcagatgtgtttggtgggattgatattaacgactttcggttataa

SEQ ID NO: 37719 - DNA, 702 bp, Escherichia coli; identical to SEQ ID NO: 37699

SEQ ID NO: 37720 - DNA, 1365 bp, Escherichia coli
atgtggaaccttttgcggcgaacccgaaaaaaccagaaatcaggacgtgacgtaagagaagtgggctggcggtccctgtttcaggcggtggctgagccttttgccggtgcctggcagcagggggtgaaagccgatccggaaaccgttttgtcctttcacgcggtgttttcatgcatttcgctgatatcccaggatattgccaaaatgcggcttcgcctgatgcagactgatgtacagggaatacgccgggaaaagcggcagggagatactgcccgtctctgtcgtcgtcctaatgcgcagcagaatcgcatccagttttttgaactgtggctgaattccaaattgcgtcacggcaatacggtggtgctgaaaatccgcaccccccgggggcagatcaaagaactgcgtattctggactggaaccgggttgaacctctggtggcggatgacggcgaggtgttctaccgcatcacgccggaccggaactgtgggatcacagagtcggtgacggtgcctgcccgggaggtgatccacgaccgttttaactgtttttttcatccgcttgtggggctgccgccggtgtatgccgcaggactggccgccatgcaggggcatcatattcaggcaaattcgacgtattttttcagaaatggcgggcgaccatcaggcgtgattgaggtccccggcagtattacggaagaaaacgcgaaaaaactgaaggggaactgggacagcggatatacgggcgaaaatgccgggaagacggccatactgagcaacggggcaaaatacagccccacgacgttttcaccggtggatgcgcagacggtggaacaactgaaaatgacggctgaaattgtctgttcggtgttccgtgtcccggcctacaagattggcgttggccacccgccttccagtgacaacgtggaggcgctggagcagcagtattattcccagtgtctgcagacgctgattgagtccattgaactgttactggatgaggcgctggaaacgggggaaaacgagagcacggagtttgacgtcaccacgctgctgagaatggacagcgaacggcgcatgaaaacactgggtgaatcggtgaaaaatacgcttctcacgcccaatgaggcccgtaaacgtgagaacctgccgccccttgccggcggtgatgcactgtatcttcagcagcagaactacagtctggaggcgctgtcccgtcgtgatgcccgtgaggacccgttcgcgtcggccgggaaaacagtttcagcacaactgcctgacggcgcatctgacggtaataaggcaatcagtgaaacagagcatgatgcagtgaaagcgatgttcagggggatactgagaaaatga

SEQ ID NO: 37721 - DNA, 735 bp, Escherichia coli; identical to SEQ ID NO: 37275

SEQ ID NO: 37722 - DNA, 489 bp, Escherichia coli
atggcgaagcccttctgcgcccacgctgaaatccacggtctgcgtctccagcagctccgttttaatcagccacagcccggcgcggtgtgcctgcccccggctggtacagccaaaggcatccatcttcgtgacgttacgaccgtaacggagaatggcctgcgtgtcctccacaagctctgtcgccgtctcccagccgttatccgggtcaatccagttcacctcaacggcattatggcggtccttgagggcgctgaagctgtagcggaacgacgcgccatcatccggcatcaccacattactgcggttataggtccacaccttatccgacggtcggtcctgcacgaacgtcagcgtctgcccgttccataccggcatacagcgcatcgccgagcagaaatcgctgagaacatcccacgccttacgctgtgtggtcaggtaggcattacaggtgatgcgcggctccgtgccgccaaagccgtccggcactga

SEQ ID NO: 37723 - DNA, 195 bp, Escherichia coli; identical to SEQ ID NO: 37317

SEQ ID NO: 37724 - DNA, 198 bp, Escherichia coli
atgctaaaacagcaggatatgacagaaaccgccagagtggtgtttaatgaattaagcgttaccgaaccggcgacagtcggggagattgcgcagaatacttacctttcacgcgaacgctgccagttaatactgacccagctggttatggcgggtctggcagactatcagtgcggttgttacagacgcattcagtcctga

SEQ ID NO: 37725 - DNA, 180 bp, Escherichia coli; identical to SEQ ID NO: 23969

SEQ ID NO: 37726 - DNA, 315 bp, Escherichia coli; identical to SEQ ID NO: 24010

SEQ ID NO: 37727 - DNA, 189 bp, Escherichia coli
atgcaacatactgccatcctggatattggtgcgtgctccgatctgtacataatgtacatctccacgaatcacaacgagcggccagatccccacatcatcagccagacgaacgtcaccaatcacgacactgctatcgtcgatcattacgcgctgaccgatttgtggaaaaagatcgcggtatgggcgtaa

SEQ ID NO: 37728 - DNA, 126 bp, Escherichia coli
atgcctaaggttctattcctacgaatagccaacttgcaacttaaaatattatttatgcagccaattaaattctggtccttacaatatcaacctgaagattcttatcttgtgctgattgataaatga

SEQ ID NO: 37729 - DNA, 273 bp, Escherichia coli
atgtcagaaattacatccctggtcactgctgaagcagtgaaggaagtcctgcgctctgaagaagtccggagcgcactgaaacagaaacttcgccataacctggaagcgcgtcttgatgcagaagtggatgccattctggatgaactgcttggtgtacaggcagagccaccgactgaagcgggagataccaccgcagagagcggtgaagttcagcctgaatcaccggtcgccgatgcgactgaacctcaacccgaatcggtcatgatgctgtaa

SEQ ID NO: 37730 - DNA, 270 bp, Escherichia coli
gtggcgacaaacaacctgaaactgggaacctttggcgcatttgataacgaatggcatacgctggccttccgctttgccgggaataacagccttcaggtgacgccggttattgatggtcaggatggcacaccgttcacgctgacgcagtcaccggtcagtgcctttgcggcggataaactgcatgtgacagacattaccagaggtgcgacttacccggtactgatagacagcattgcggtggaagtgaacagcacagacactgcggcatga

SEQ ID NO: 37731 - DNA, 432 bp, Escherichia coli
gtgtatgcgtttaaggtgcagtttccgtccggtaagggctttaagttcctggcggaagtgcgtcagcacacctggtcatccggtaccaacggcgtggtggctgcaacgttttcacttcgcctgaagggtaaaccggtgtcctatgtggtaccgctggcgtttgtgaaaaatccggagaagacacttaccgtgaataccggtgcgctgctgacaatgtcagtcagtgtcaacgggggaacgccgccttataaatacgcctggaagaaggatggtcagccggtcgagggacagactactgacactttcagtaaagccaatgcgcagtcaggtgataagggggcttatacctgcatggtaatggattctgcagaacagccgcagagcattacctctgatgcgtgtacagtaacggttaatggtgcgggcggataa

SEQ ID NO: 37732 - DNA, 411 bp, Escherichia coli; identical to SEQ ID NO: 37343

SEQ ID NO: 37733 - DNA, 168 bp, Escherichia coli; identical to SEQ ID NO: 29859

SEQ ID NO: 37734 - DNA, 213 bp, Escherichia coli; identical to SEQ ID NO: 37296

SEQ ID NO: 37735 - DNA, 372 bp, Escherichia coli
gtgcttcggccgcgtttgctggcccatagcggtattccgcataaagtgcctgacgcggtactggagttactggtccgcaccttccgcgatctgcgtgccaacggcgaaaagaaaacgtcaatggatacactaacagcgattatgtccaccgctgaagccgtgaacgtggcccacgctgtgggcgtccgcgcctggtttttagcgaatcgcgcgggggagcctgccgacctggtggactgtattgccggaaccatcgtcaaagataacgaagaagatcgcgctcgtctgcgccgttacttcgaacagcgtgtcgccacacataaagaagctcactggcaggcttattatcaagcccgccaccgcctgccgtga

SEQ ID NO: 37736 - DNA, 828 bp, Escherichia coli; identical to SEQ ID NO: 29807

SEQ ID NO: 37737 - DNA, 1335 bp, Escherichia coli
gtgacagcctcaggcaccgggctgggctatggcgaaggcgatgagtcctatggctatgacagctgtggctacctgaaggcgcagtctgcgggcgggcaccggataagtgaagagactgaccagtatgccggaggccaccggctgaaacaggccggaaacacgcagtatgactatgacgccgcaggccggatggtcagccgcaccagacaccgtgacggctatcgcccggaaacagagcggttccggtgggacagccgggaccagctgaccgggtattgcagcgcacagggtgagcagtgggaataccgccacgacgccagcggcagacgaacagagaaacgctgcgaccggaagaaaatccgcttcacgtacctgtgggacggcgacagtattgcggaaatccgggaataccgcgatgatgaactgtacagcgtacggcacctggtgtttaacggctttgagctgataagccagcagtgcagccgggtacggcagccgcacccgtccgtggccccgcagtgggtgacacgaacgaatcatgcggtgaacgacctgacgggccgtccgctgatgctctttaacagtgaaggtaaaaccgtctggcggccgggacagaccagcctgtgggggctggcactcagcctgcccgcagacacagactacccggacccgcgcggggagcgggacgcggaagccgaccccggcctgctgtatgcaggacagtggcaggatgcagaatcggggttgtgctataaccggttccgatattacgagccggaaaccgggatgtacctggtgagtgatccactggggttgcagggaggggagcagacttaccggtatgtgccgaatccttgtgggtgggttgatccgctgggattggctgcaagttctaaaatcagcagtttgatggactatattggcgatggtcgtcgtgttagtgggcatacgggtttcctggatggggttcgtttatcacgtagtcaaataaacaatattgctaaagaaatggagaagctaggaattaaagtaataaggaaagcagataaatatttgccaccaaatgctagggcagcttttgattatggtcttcgcaatatttatcttaggaaaaatgctaccttatatgaggtgtatcatgaagtgattcatgctaagcaatttgcgaaaattggacgagaagcatacgaagcactaggacgtttatctagggaggaacacgttctaaatgaaatattaaaaagtaaaaatttattcaatgaagcggaaatagctcatgccataaaatatgttgagggattgagagaaaaattcatgatgggactaataaattga

SEQ ID NO: 37738 - DNA, 4851 bp, Escherichia coli
atgagtgaaggaccaggcgggccacagggagcgaccgcaggcggtacgctggcaatgcggatgctgtcgcagcgggcgatggccgccagccagatgaaacgggcagccaacgacaaagccattgcacagatgttggcatcaaaaaagtctggcccccccgccgccaggctgggcgatgaaattcagcacaagagttttttgggggcgctggcaggggccgtgctgggggcgatagtgaccatagcagaaggttgcctgattatggccgcctgtgccaccggcccttatgcgctggttctggtgcctgcgctgatgtatgccagctataaggcgagtgattatgtggaggagaaacagaaccagcttgaatcatggataaacagcttttgtgacacggacggcgccatcaataccggttctaaaaatgtaaaaattaacggaaagccagcagcccgtgcagccgtcacccttccccctcctcccccacctggagcaatacctgaagtcccacagggggaaccctcatggggtgatattgccactgacctgcttgaatcggcagcggaaaaagcagtaccactggcgaaggcctgggggaacgctgttatcaccctgacggacagcaatgccggttttatggatcgcgtcagcgccggcgcatcgcttctgtttcccgccggtccggtattaatggagtttgccaccatggtgggcgggcgtggcgaaatcaaaaaagatgtggatttcccggaagccggtgaggacacggcgctctgcgacaaggagaacaaaccaccgaggatagcccagggcagcagcaacgtctttatcaacaatcagcctgccgcgcgcaagggcgacaaactggagtgcagcgcggcaatcgtggaaggttcgccggacgtctttattgggggtgagcaggtcacctatctggatatccagccggagttcccgccatggcagagaatgatcctgggaggaataacgatagccagctatcttctgccgccagcaggactgctgggaaaactggggaatctggcgaaactgggcaaactgggaaacctgctggggaaaagcggtaagctgctgggcgcaaagctcggcgcgttgctggggaaaacaggtaattcgttaaaaagtattgccaataaagtcatcagatgggtaacagatcctgtcgatccggtaaccggcgcatactgcgacgaacgtaccgactttacgctgggccagacactccccctctccttcacccgtttccacagttctgtactgccgctgcatggcctgacgggcgtgggctggagcgactcctggagcgaatacgcctgggtgcgtgaacagggaaaccgggtggatgtcatcagcctgggagccacgctgaacttcgccttcgacggtgaaagtgatacggcggttaacccgtatcacgcccagtacattctgcgccgccgtgatgattatctggagctgttcgacagggatgcactgagcagccgcttcttttatgacgcctttccgggaatgcgtctgcgccacccggtgactgacgataccagcgatgaccgcctggcacacagccccgcagaccggatgtacatgctgggcgggatgagcgacaccgccagcaaccgcatcacgtttgagcgcgacacccagtaccggatcacgggtgtcagtcacaccgacgggatccggcttaaactgacgtaccacgccagcggctacctgaaagccattcaccgcacggataacggcatacagacgctggcgacctacgaacaggatgcgcggctggactaccacctgttttatgagtacgacgctgcggaccggatcatccgctggtccgataacgaccagacgtggagccgtttcacctacgatgcacagggccggtgcgtgaccgtcaccggggcggagggctattacaacgccacgctggactatggtgacggctgcaccaccgtgacggacggcaagggcattcaccgttattactatgatcctgacggcaatattctgcgggaagaagcgccggacggcagcaccaccacgtatgaatgggatgaattccatcacctgctggcccgccactcccctgccgggcgggtggagaagtttgaatacaacgccgcacacggtcagttaagccgttacacggcggcagacggcgcggattggcagtactgctatgatgagcgcggcctgctcagcaacatcaccgcccctgccgggcagacgtggacgcagcagtgtgatgaacgcggcctgccggtgagtctggtatcgccacagggcgaagagacccggctggcgtacacccctcaggggctgctgtcggggatattccgccaggatgaacggcgtctgggcatagagtacgaccaccacaactggccggaaacactcaccgacgtgatgggccgcgaacaccacaccgaatacagcggtcacgacctgccggtgaagatgcgcggccccggcggtcagtcagtgcggttgcagtggcagcagcaccataaactgagtggccttgagcgggcaggaaccggcgcggaaggattccgctacgaccgccacggcaacctgctggcgtacacggacggtaacggcgttgtctggacaatggagtacggcccgtttgatttgccggtggcgcgaacggacggtgaaggccaccgctggcagtaccgctacgataaagacacgctgcaactgacagaagtcattaacccgcagggcgagtcttatctttatattctggacaactgtggccgggtgacggaagaacgtgactggggcggcgtggtctgtcgttaccgttatgacgctgatggcctgtgtaccgccagggtcaacggcctagaggaaaccatcctctacagccgggatgccgcaggccgcctggcagaagtcatcactccggaaggcaaaacgcagtatgcgtatgacaaatccggcaggctgacgggtatcttcagcccggacggcacatcacagcgcaccggctatgatgaacgcgggcgggtgaatgtcaccactcagggccgacgggccattgaataccactaccccgacgaacacaccgtcatccgctgtatcctgccaccggaagatgaacgcgacagacaccccgacggatccctgctgaaaaccacataccgctacaacgccgccggagaactgacggaggttatcctgccgggggatgagacgctgacgttcagccgtgatgaggcgggacgtgaagtgctccggcacagtaaccggggttttgcctgtgaacagggctggaatgcagccggtcagcctgtcagccagcgcgccggacttttcccggcggaagccacatggggcggactgctcccttcactgctacgggaataccgttacgacagcgcgggtaacgtatcaggcgtcaccagccgggaagattacggacgggaaacacaccgggagtaccggcttgaccggaacggccaggtcacggcggtgacagcctcaggcaccgggctgggctatggcgaaggcgacgagacttatggctatgacagctgcggctacctgaaggcgcagtctgcgggcagacaccggataagcggagagactgaccagtatgccgcaggccaccggctgaaacaggccggaaacacacagtatgactatgacgccgcaggccggatggtcagccgcacaaaacaccgtgacggctaccgcccagaaacagagcggttccggtgggacagccgggaccagctgaccgggtatcgcagcgcacagggggagcagtgggaataccgccacgacgccagcggcagacggacggaaaaacgctgcgaccggaagaaaatccgttttacgtacctgtgggacggcgacagtattgcggaaatccgggaataccgcgatgataaactgtacagcgtaaggcacctggtgtttaacggctttgagctgataagccagcagttcagccgggtacgacagccgcatccgtccgtggccccgcagtgggtgacgcgaacgaatcatgcggtgagcgacctgacgggccgcccgctgatgctctttaacagtgaaggtaaaaccgtctggcggccggggcagaccagcctgtgggggctggcactcagcctgcccgcagacacagactacccggacccgcgcggggagcgggacccggaagcggaccccggcctgctgtatgcgggacagtggcaggatgcagaatcggggctgtgctataaccggttccggtactacgagccggaaaccgggatgtacctggtgagtgatccgctggggttgcagggaggggagcagacttatcggtatgtgccgaatccttgtgggtatatcgatcctttggggctggctatatgtcagttagcccgctggacgaaatgggggagtgagcaaagcaacatatctgatgttttgaactcattagggaatagagcacttaaatatgctaatggtgattggataaaatcagaggctgcattcaataaatacataaacatgataaataaaagactagaattaacaggtagtaaatttagagttgagattcaaccagccataaaaaatggagagcgagttcctgcgacaacgaatggaccatttaaagtaaatggtaagtggacatccggcactcattatacaggtggttccaaacgtctagatgccggtattattgatatcacatctcctacaaaccaatatggattacatccagttattgaaggatttgatataacacttaataaaacaaaaccatcagcagtggatatatattcagatgtgtttggtgggattgatattaacgactttcggttataa

SEQ ID NO: 37739 - DNA, 246 bp, Escherichia coli
atgaaacgccatagactgaccgaagccgaagagcgccgactggcagaagccattgccgctgaagctcgtgccatggggctgacgaaaaaggacaaaatgccgcaggaaacaaagcgacgcctccgggcacggatacttaaagccattcttgatgaacgaacggccagcaaaaatcgagaagccacactgactgccggacaggacccggatgacaccttcacctggcaaccactgcgccgccgctaa

SEQ ID NO: 37740 - DNA, 273 bp, Escherichia coli
atggaaaaagcgcctccggcgcggcctttttcggggttttcgtttcttgctcacatgttctttccggcgttatcccctgattctgtggataacactatcaccgcttttgagtgggcagataccgctcgccgcagccgaacgaccgagcgtagcgagtcagtgagcgaggaagcggaaaagcgcctggacgagcattttctccttacgcatctgtgcggcatttcacacccggcatggtgcacttttcataccatcctcactgatgccacatga

SEQ ID NO: 37741 - DNA, 261 bp, Escherichia coli
atgaaatccgccagcggtggcgaaacccgacgtggcttaaagatcatcaccgtttccggtgaatcgctccctcctgcgcccccacgttcccgccatatcgattaccggataccttttccgcctttctcccttgcgggacacgtggcgctttctcatagctcacgtcttctggtatctcggggcgacttaggcagttcgctccgggctgggctgtatgcaggaaccccccgttcagcccgactgctgcaccttctccggtaa

SEQ ID NO: 37742 - DNA, 147 bp, Escherichia coli
atgaaaaaaaagatagggggatctatgattctcgttcttgctgttttgtgtctgactgcttgccaagctaactatgtaagggatgttcagggtggaacaattgctccatcatcatcttcgaaactaatcggggtggcggttcagtga

SEQ ID NO: 37743 - DNA, 264 bp, Escherichia coli
atgaacaagatggcaatgatcgatttggcgaaattatttttagcttcgaaaattacagcaattgagttttcagagcgaatttgtgttgaacggagaagattgtatggtgttaaggatttgtctccgaatatattaaattgtggggaagagttgtttatggctgctgagcgatttgagcctgatgcagatagggctgattatgaaattgatgataatggacttaaggttgaggtccgatctatcttggaaaaatttaaattataa

SEQ ID NO: 37744 - DNA, 276 bp, Escherichia coli
atgacagcattggacaaggcaataaagattgctggtggtattcgtccgctagggcgtgcaataggggcttggccgtctcaaatacacaaatgggcaaatgaatacaatggtcgagtgccgacaggggagcgggttcgtcaaatttatattgcaactggggtgactcctcatgaattgcgaccagatttatatccgaatccaaccgacgggttgcctgctggagataaggctaacacacaaaatacaccggagttgattcatgaaaatcaagcatga

SEQ ID NO: 37745 - DNA, 390 bp, Escherichia coli
atggacatgagaaaaaagcaatacgacaccccgctggcagaaaggttagatacgatctcgcaacagcatcatttaagcggttcagatttagcgcgcatcgctggtgtaggacgctcatcagtcaacgcctggaaaaaaagagggacaatcagtaaagattccgcagccaaaattgcagaagcgacaaatgtttccctttcctggctactgacaggaaaagaagatacaaacagagaggcgcttgatgatgatgagaaagccctgcttgatgtttacagaaacctgccacctgtagagcgtagaaatatgctggcagcttttcaaatgcgccttcaaaaactgaccgaattttactcagaatacgttgacccaataacgcgacaaaaataa

SEQ ID NO: 37746 - DNA, 306 bp, Escherichia coli
atggaatttaaagatttaccaatgcaattccaggaaatggcagcgaatatagttcgttcccaactggcgactcttgacctgagtaccgtagaaaaagaaaccatcgacaatatatcccataatgtgcgtaattcctttattaagctgtacgaagagaatctgagttctgaaaacaaagatgattcacctaaattcaccccacacccaggtggagtgagtgagatttatcatgaaacaatggttaaagcactacgtatgcaaatagccgaacttgaacataaattaaatttagttagtaagtgctaa

SEQ ID NO: 37747 - DNA, 306 bp, Escherichia coli
atgcactctaaatcaatcaatcgatattatgtccatgtgcagttatttgaagcaacaatggaacaggagaaaaagttcgagactctgatgccaaattttaaatactccaggatgattaatgaaggtgacattgaatataaattattgccaggggcatacgttattcagtcaacgcttaatgcgaatcaaatacttgaacaaaccttttctattgctaattcagttggtgctaatgctcacatttttgtttgcccttatgatgaaagtgcaacccttttgccttgtgctgattttagcacttactaa

SEQ ID NO: 37748 - DNA, 672 bp, Escherichia coli
atggataatcttattggcacaccaccaaaccacgcagttccccataactatatagacatggagcaaatggaatatttatgtcatctcaatcgtttttctaaattgtctaacgattttttaataaatggtccaagagaggacctttttacatataaatatgttttagatggttcattttcaaatttacagcatttacttcctaaaggacaactacagaagatacaacagagattaagttctcttatgcataaaaacatgtttcattgttttcatgtttttttattaaaactatgctcaattgagagtattcctctcccaaatgccgattacgctttctttgatgacgaaatgccatttacattaactgatgaacagatcgaaaatatttcttttttaaacgcatatcacaaagaaaagaaaggaaacaacgacattgttacatttgatttcatgagcgctgatcaccactataattttagcacaaccatagctttaacaaatgatagcttccatatatcttcaataaacaaccataactcacaggttatattcgatgaaaacatccatttacatccctatgaattaccagaatcatcacaatggtgttatcagttaataaaaaacatgatttctttacattgcagatataataacaatttcaagataaactaa

SEQ ID NO: 37749 - DNA, 417 bp, Escherichia coli
  misc_feature (243)..(252): n is a, c, g, or t
atgaaatattcgacatttcatgatattaaccttgatatgtgtgagataaagaattgcaattttaacaattcagagatgaatttcatttcgtgcgtcgggacaaattttagcggttctacatttaacaatgtaaaaacaacaacagcgcaactaattaagacaccaacaaagtggacgaataatactctaaaatattggttctccagttgtaataaacgtaatatcatcttcacttttaatacnnnnnnnnnnaaattaaaaggtatcaaggatatattactgtcgttggttgaccaaaaagtcaatatttatagtgtaaggcaagagcttctgaattttcttaataatgatttatataaaaatgatggagagattctctcttataaagaatcaataatgttgttttgtgctgaatag

SEQ ID NO: 37750 - DNA, 648 bp, Escherichia coli
atgtgttttcccgatttctcctttgaaaaaatccaggtaaccttccgcatcatcgctcgcccgaccgacagcctccacgaatgccgatttgccaacagtattcacactgcggatataaaaataataatcatggcccggtttgatattgatactggcagctatccagtacagcgccgagccaagatagcgggctgcggtttcaacctgcctgatatccgcaatccgcttttccgagaaccagaactcaaactgtaccgtcgggtcataaacggcaagatgcggcgtggcggttatctgaaaatagcccggcgtcagctcaatccgcgacggtgctgccggtgcggcaatccggaaggtggtggtggcaggttcaccctgctggccatagctgtttatcgcccgcaccgtcagggtgtattccccgagcggcaggccgctgaaacggtgctccgtgtctgcggtgatggcggtggtcaccagtctggcatccgttcccttaccactggtcaggcgcagactgaagcgcacgcccttcaccacccgcggcgtgtcccatttcgcctgcgccagatactggctgtcagctgcactcacctccaccgtcaggtgctgtactgccggtgggatgacgctgttcagggaacctga

SEQ ID NO: 37751 - DNA, 189 bp, Escherichia coli
gtgagttcagcgtttgcactgatgatgacggtttttcttataacaggtgagccacagaatgtgattaccggaatttatgccagtaaagaatcctgccatcaggcaagagacgagcaaaaaatttccggtgaatgtctcccgttaaacaaagtatcgctgtacctgaataacgaaataccggctggataa

SEQ ID NO: 37752 - DNA, 939 bp, Escherichia coli
gtgctgcaccgcgggcggcgtgacgccattcaccgtgccgctcaggtcgccgtcaaagtgcgccccgttatccacgatggcttctttttcgggtacatgctgcacggcggtgatggcatacgtgccgtcgtcgttctcacggatactcacgcagcggaacaggcgctggcgcaacgtcggcaacttcagcccccatacgctgtatccggcaacgccgtcaggaacacggctcacttttaccttcacgccgtcggtgacggactggacctccacgctgaccggattgccacttccgtcaaccaggcttatcagcgtggtaccggaggatggcagcgtgatttcacggtcgagcgtcagcgtccgggtctggctgttcaccgccagcacacgcccaccgatgctgatccccgcatagtcatcatcacagatttcaatgacatcgcccggtacatggcgaagcccttctgcgcccacgctgaaatccacggtctgcgtctccagcagctccgttttaatcagccacagcccggcgcggtgtgcctgcccccggctggtacagccaaaggcatccatcttcgtgacgttacgaccgtaacggagaatggcctgcgtgtcctccacaagctctgtcgccgtctcccagccgttatccgggtcaatccagttcacctcaacggcattatggcggtccttgagggcgctgaagctgtagcggaacgacgcgccatcatccggcatcaccacattactgcggttataggtccacaccttatccgacggtcggtcctgcacgaacgtcagcgtctgcccgttccataccggcatacagcgcatcgccgagcagaaatcgctgagaacatcccacgccttacgctgtgtggtcaggtaggcattacaggtgatgcgcggctccgtgccgccaaagccgtccggcactga

SEQ ID NO: 37753 - DNA, 168 bp, Escherichia coli
atgaacgataaggaattaattgctgcgctttctataccaggtaattatgaagtaatagttcttgggaatggtgagtttatcgtaatgccattgccatctgatgttattctgatcagcaaagaatcgcatgcggattcggtcagttacttcagcattaaaagagactag

SEQ ID NO: 37754 - DNA, 180 bp, Escherichia coli; identical to SEQ ID NO: 23969

SEQ ID NO: 37755 - DNA, 741 bp, Escherichia coli
atgaaaaacattgcggcagttggggttcttgaacgtattcgcagacttgcaccacagggggcggttccaccgtaccggacggtggaggagtggcgggaatggcaacttgctgaaggacgaaaacgcagcgaggagattaaccgcctgaatcatcaggtgcgggttgaaaaaatcctgaaccgtgcgggcatccagccgcttcacaggaagtgctcattcgggaactaccgggtgcagaacgacggtcagcgccatgctctgagccaggcgaaatccattgccgatgaattgatgaccggatgtacaaacttcgtgttcagcggtaaacctggtaccggtaaaaatcacctggcagcagcgattggcaatcggctgatggcgaaggggagaagcgtgattatcgtcaccgtgtccgatgtcatgagcgtgttgcatgacggctacgacaacggccagtccggggaaaaatttttacaggagctttgtggagttgaccttctggtccttgatgaaattggcatgcagcgggatacgcgcaacgagcaggtcacgctgaaccagatagtcgaccgcagaacggcttcgatgcgtagtgtcggaatgctgacgaacctgaatcacgcagcgatgagcacactcctcggagatcgggtgatggaccgtatgaccatgaatggtggtcgttgggtgaattttaactgggagagctggcggtcaaacgttggacgtcagggtatgtga

SEQ ID NO: 37756 - DNA, 318 bp, Escherichia coli
atgacgttcccggaactgtacgacgacagccatccggaagccctggctcgtaatacccagaaaattttccgttggctggataaagacacccctgatgctgttgaaaaaattcaggctctgttaccggcgatcgaaaaggcaatgccgcctctgctggtggcccgtatgcgcagtcacagctctgaatattaccgtgagatcgtcgaacggagggatcggctggtgaaagatgtggatgattttgtcgcagcggcgatcgcctggggcaccctgactaacagtgggggtcagcctggtaatgctgttgtcgtgcattga

SEQ ID NO: 37757 - DNA, 1545 bp, Escherichia coli
gtggtgaagggcgtgcgcttcagtctgcgcctgaccagtggaagcggtcaggacagccgtctggtgaccaccgccatcactgcggatacagagcatcgtttcagtggtctgccgctcggggaatacaccctgacagtcagggcaattaacagttatggccagcagggggaaccggccatcaccaccttccggattaacgcgccagcaaaacccgccaccattgaactgacgccggggtattttcagataacggcggtaccggtgctggcggtgtatgacccgacggtgcagtttgagttctggttttcggaaaaacgcatcacgaacacggcacaggtggaaaaatctgcccgttatctggggagcggcagtcagtggactgtccagggaagccggattaagccggggacggatttctggttttacgtgcgcagcgtcaacctggtggggaaatctgcgtttgtggaagtcagcgggcagcccagcaatgatggtgaagggtatctggaatttttccgggaaaaaataggaaaactgcatctggctcaggggctatgggagctgatagacaacagccagcttgcggatgagatggcggagatgaagaccaccatcacggaaacccgcaatgaaatcacacagacggtcagtaaaacgctggagaaccagagcgccactatacagcagatacagcgcgtgcagaaggacacaaatgatgacctggctgcgctgtacatgctgaaggttcaaaaaacgaaagacggcattccctatgtggccgggattggtgcagggattgaggatactgatggccagccactgagcaacatactgctgctggctgaccgtatcgcgatgataaatccggagagcggcaacagcacgccgttatttgtggcgcaggggaatcagctgttcatgaacgacgtgttcctgaagcgactgtttgcggtgagtatcacctcgtccggcaatcccccgacgttttccctgacgccggacgggcgactgacggcgaaaaatgcggatatcagtggcagtgtgaatgcgaactcagggacgctcaacaacgtcacgattaatgagaactgtcagattaaggggaaactgtcagccaaccagattgaaggcgatattgtcaaaacggtcagcaagtctttcccccgcacgagcacttatgccagtggcaccatcacggtaagaatcagtgatgatcagaagtttgaccggcaggtcatgataccgccagtgttattccgcggtggtaagcatgagaatttcaacagtaataaccaacagtcatactggtattcaacctgccggttaagagtgacccgcaatggtcaggagatttttaatcagtccacgacggatgctcagggcgtattttcctcagttatagatatgcctgccggacaggggacgctgacactgacattcaccgtatcttcatcaggagcgaataactggacaccaacaaccagtatcagcgatctgctggttgtggtgatgaaaaaatccacagcaggtatcagtatcagctga

SEQ ID NO: 37758 - DNA, 396 bp, Escherichia coli; identical to SEQ ID NO: 23898

SEQ ID NO: 37759 - DNA, 585 bp, Escherichia coli; identical to SEQ ID NO: 23897

SEQ ID NO: 37760 - DNA, 699 bp, Escherichia coli
atgcaggatattcacggggaaagcctgatcgagtcggttaaatcagagcagtcaccgcgggtggtgctctgggaaatcgacctgacggtgcagggtggtgagcggtattttttctgtaatgagctgaatgaaaaaggggaggcggtcacctggcaggggcggcaatatcaggcatacccgattgacggcagcggttttgagatgaacgggaagggcagcagtgcccgcccgtcgctgacggtgtcgaatctgttcggtctggtcaccggaatggcggaggacctgcagagcctggtgggggccacggtggtccgccgccgggtgtatgcccgttttctggatgcggtgaattttgtggcgggcaatccggaagcggacccggagcaggagctgagcgaccgctgggtggtggagcagatgtcagagctgacggccatgacagcctcgtttgtgctggcaacaccgacggagacggacggagcgctgtttcccggtcgcattatgctggcgaatacctgtatgtgggattaccggggagatgaatgcgggtataacggtcctgcggtggcggatgagttcgacaaccccaccacggatatccgtaaggacagatgcagcaagtgcatgcgcgggtgtgagatgcgcggcatggtggctaattttggcggtttcctttccatcaataaactttcgcagtaa

SEQ ID NO: 37761 - DNA, 582 bp, Escherichia coli
gtgaacacggcagcggaagccatccgggcgctgtcgttacaggtgccgggattccgccgtcagatgaacgaaggctggtaccagatacgtattgccggttatgacacggcaccggaggcggtgtacgcccgtcttcacgaacagctgggtgagggaacggtcatccatattgtgccgcgactggccggggccggaaagggtggactgcagattgtgctgggggcggcagccatcgtgggctctttcttcactgccggggcatcaatggcgttatggggttcagccctggcagccggtggtttttctgccaccacgatgctgttttcacttggagccagcatgattctgggcggtgtggcccagatgctggccccgaaggcaaaaacaccggattaccgcgcaacggataacggcagacagaacacgtacttttcctcgctggataacatgattgcccaggggaacccgatgccggtgccttacggggaaatgctggttggctcccgccgtatatcccaggacatcagcacccgtgatgaaggcgggggcggaacggtcgtggttgtcgggcgacagggataa

SEQ ID NO: 37762 - DNA, 231 bp, Escherichia coli
atgaacgcaaaaatcagatacggcctgtcggctgccgttctggcgctgattggtgcaggggcgtctgcgcctgaaatcctcgaccagtttctggatgaaaaggaaggtaaccacaccacagcataccgtgatggtgcgggtatctggaccatctgccgtggagccacccgggtggatggtaagcctgttattcctggcatgaagctgtcgaagggtaagcgtacagcctga

SEQ ID NO: 37763 - DNA, 285 bp, Escherichia coli
gtggtgctgcgggagccttcggcagaggcctggtatctgtggcaggaagtgctcaatggtgatggagaggatgacgataccctgtcggtggtggcgaaaacccgccgtaacctggaagcggatgtgacgctgttctgcgatgtcctgtgtgatacggacctgcagcgggtgttcactccggacgaccgtgagcaggtgctggccgtctatggtccggtacatgcccggttgctgcgtcaggcactggaactgatcgctgatgcagagtcggccagaaaaaagtag

SEQ ID NO: 37764 - DNA, 240 bp, Escherichia coli; identical to SEQ ID NO: 37380

SEQ ID NO: 37765 - DNA, 732 bp, Escherichia coli
atgggcccggcgctggaagtgctatatgccttatggcggctggatgaaattagcggtatgcaaggtgcgcagatatcacaaacgacgttatgcgcggctatcgatcgcacgctgtggctgtgtgaatctaacggcagaccggatgaaaaggagtttcacgctcacctgcatagctggcaagcgctttgccatattctgcgcgatctacatagcggcgttaatttacccggcgtttctctttctgcggcggtagccttactggagcgacgcagtcaggcaatccatgccccggcgctggatcgcggcgcggctcttggcgcactgatgcgtctggaacatcccaacgctagtgccgaagcggcgctgacgatgctggcgcagttatccccggcacaatccggcgaagcgctgcacggtttgctggcgctggcccgccatcaactggcctgtcagccggcatttatcgccggtttcagcagtcatttaaatcaaccaagtgatgccgattttatcaatgccctgcccgatttacgcgcggcgatggcctggctaccgccacgagaacgcgggacactggcgcatcaggtgcttgaacattatcaactggcgcaacttcccgtttcggcgctgcaaatgccgttgcattgcccaccacaagccattgcacatcatcaacaactcgaacagcaggcactggcatcgctgcaaaactggggagttttccatgtctga

SEQ ID NO: 37766 - DNA, 414 bp, Escherichia coli; identical to SEQ ID NO: 37197

SEQ ID NO: 37767 - DNA, 459 bp, Escherichia coli
atgctttccgcgtttaccgttattctgctggtggtctgtggtgcgcttagtctggggctgaatcattaccgcgataacgccataacctacaaagagcagcgcgataaaaaagtcagtgagctggagctggcaaatgcaaccattactgatatgcagcagcgccagcgtgatgttgctgcacttgatgccagatactcgagggaattagctgatgcgagagctgaaaatgaaactctgcgtgctgatgttgccgctggtcgtaagcgcctgcgcatcaacgccaactgtccaggctccttgcgtaaagcccccatcacctccggcgtggataatgcaaccggtccccgactggcagaagccgctgaacgggattatttcatcctcagagaacggctgatggcaatgcagaagcaactggaaggagcacaggaatatatccgtacccagtgtataccgtga

SEQ ID NO: 37768 - DNA, 519 bp, Escherichia coli
atgtttgcatgcacattctttttcttgcatggtgccgggtgcctcccggtgaattcagtatcagcacctgaatccgcgattatcccatatacctggttgctgatcgcccctccgcacagggggattcaccatgcagaagtgtttttaataaacagcaaacaaaaaaatcaagcattatgcaggctgtttctttttatcaccggccacagcaataccacaatgccgcagaccagcaccccatccgccagcaccgacatgattctgctggtgaaatccaccatcaccaccagaaacagcaggagtgcagccacagccaggcgcagttttaccgtcacaggtgattctccagacgaagacccagaacaccggcaatctcttccagcaccttgcgctcttccggctcaatttcgccgtctgcctccgcaatggccaccgccacatccagcacatcttccgcttcacgcgtatcgtgtttcacatcctcaatctcacgtaacgccgcacgacgaccagttttaa

SEQ ID NO: 37769 - DNA, 744 bp, Escherichia coli
atgacacagactgaatcagcgattctggcgcatgcccggcggtgtgcgcctgcggagtcgtgcggcttcgtgataagcacgccggagggggagtggtatatcccttgtgtgaatatttctgcagagccggaggcgtattttcgtatcgcaccggaagactggctgcgggcagagatgcagggggagattgtggcactggtccacagtcatcccggtgggctgccctggctgagcgaggctgaccggcggctgcagataaaaagcgcactgccctggtggctggtctgccggggtgacattcacaaattccgctgtgtgccacatctgacaggacggcgctttgagcacggggtgacggactgttacacgctgttccgggatgcttatcatctggcggggactgatatgccggattttgagcgtgaggatgactggtggcgcaatggtcagaacctgtacctggacaatatggaggcgactggtttttacaggatttccctgccttccgcacagcctggcgatatcctgctgtgctgctttggcgcatcggtggccaatcatgccgccatatactgcggcaacggtgaactgcttcaccatctgcctgaacaactgagtaaacgggagaggtattccgaaaaatggcaacgacgaacgcattcagcctggcgtcaccgccactggcacgtatctgccttcacggggatttacaacgatttggccgccgcctcagcctgtatgtga

SEQ ID NO: 37770 - DNA, 744 bp, Escherichia coli
atgacacagactgaatcagcgattctggcgcatgcccggcggtgtgcgccagcggagtcgtgcggcttcgtggtgagaacgccggagggggagcggtatatcccttgtgtgaatatctctgcagagccggaggcgtattttcgtattgcaccggaagactggctgcgggcagagatgcagggggagattgtggcactggtccacagtcatcccggtggtctgccctggctgagcgaggccgaccggcggctgcagataaaaagtgcactgtcctggtggctggtctgccggggggaaattcataaattccgctgtgtgccacatctgacaggacggcgctttgagcacggggtgacggactgttacacgctgttccgggatgcataccatctggcgggaattgatatgccggattttgagcgtgaggatgactggtggcgcaatggtcagaacctgtacctggacaatatggaggcgactggtttttacaggatttccctgccttccgcacagcctggcgatatcctgctgtgctgctttggcgcatcggtggccaatcatgccgccatatactgcggcaacggtgaactgcttcaccatctgcctgaacaactgagtaaacgggagaggtattccgaaaaatggcaacgacgaacgcattcagcctggcgtcaccgccactggcacgtatctgccttcacggggatttacaacgatttggccgccgcctcagcctgtatgtga

SEQ ID NO: 37771 - DNA, 600 bp, Escherichia coli
atgcgtaaattatgtgctgttattttgtccgcagtagtctggcaggtcgccgctgctacgccagcgagtgcagcagaacatcagtccacgctgagcgcggggtatctccatgcctcgacgaacgttcccggtagtgatgatctgaacgggattaacgtgaaataccgttatgagtttatggacgcgctggggctgattacgtccttcagttatgccaatgctgaggatgagcaaaaaacgcgctacagcgatacccgctggcatgaagattccgttcgtaaccgctggttcagcgtgatggcggggccgtctgtacgcgtgaatgaatggttcagcgcgtatgcgatggcgggtgtggcttacagccgtgtgtcgactttctccggggattatcttcgcgtaactgacaacaaggggaaaacgcacgatgtgctgaccggaagtgatgacggtcgccacagcaacacgtctctggcgtggggagctggcgtgcagtttaacccgaccgaatccgtggccattgatattgcttatgaaggctccggcagtggcgactggcgatcggatgcatttattgttggtatcggataccgtttctga

SEQ ID NO: 37772 - DNA, 348 bp, Escherichia coli; identical to SEQ ID NO: 37298

SEQ ID NO: 37773 - DNA, 315 bp, Escherichia coli
atggcgttatggggttcagccctggcagccggtggtttttctgccaccacgatgctgttttcactgggtgccagcatgatactgggcggtgtggcccagatgctggcaccgaaggcaaaaacaccggagtacagggcgacggataacggtaaacagaacacgtatttttcgtcactggataacatgattgcccaggggaacccgatgccggtgccttatggtgaaatgctggttggttcacgacggatatcccaggacatcagcacccgtgatgagggcggagacgggaaagtggtggttatcgggcggggatga

SEQ ID NO: 37774 - DNA, 315 bp, Escherichia coli; identical to SEQ ID NO: 37773

SEQ ID NO: 37775 - DNA, 297 bp, Escherichia coli
atgaacgcttattacattcaggatcgtcttgaggctcagagctggacgcgtcactaccagcagatcgcccgtgaagagaaagaggcagaactggcagacgacatgggaaaaggtctgccccagcacctgtttgaatcactctgcatcgatcatttgcaacgccacggggccagcaaaaaagccattacccgtgcgtttgatgacgatgttgagtttcaggagcgcatggcagaacacatccggtacatggttgaaaccattgctcaccaccaggttgatattgattcagaggtataa

SEQ ID NO: 37776 - DNA, 624 bp, Escherichia coli
atgcaggcgaaattactgcgtttccttaatgatggcactttccgtcgggttggcgaagaccatgaggtgcatgtcgatgtgcgggtgatttgcgctacgcagaagaatctggtcgaactggtgcaaaaaggcatgttccgtgaagatctctattatcgtctgaacgtgttgacgctcaacctgccgccgctacgtgactgtccgcaggacatcatgccgttaactgagctgttcgtcgcccgctttgccgacgagcagggcgtgccgcgtccgaaactggccgctgacctgaatactgtacttacgcgttatgcgtggccgggaaatgtgcggcagttaaagaacgctatctatcgcgcactgacacaactggacggttatgagctgcgtccacaggatattttgttgccggattatgacgccgcaacggtagccgtgggcgaagatgcgatggaaggttcgctggacgaaatcaccagccgttttgaacgctcggtattaacccagctttatcgcaattatcccagcacgcgcaaactggcaaaacgtctcggcgtttcacataccgcgattgccaataagttgcgggaatatggcttaagccagaagaagaacgaagagtaa

SEQ ID NO: 37777 - DNA, 411 bp, Escherichia coli
atgctgagcagagaggacttttacatgataaagcaaatgcgccagcaaggtgcgtatattgttgatattgcgactcagattggttgctctgaacgaacggtcagacgttacctgaaatacccagaacctccggccagaaaaacacgccacaaaatggccgaaatggactatatcgacatgcgtctggctgagaatgtctggaacggcgaagttatcctggcggaaatcaaagcgatgggttataccggtggccgttccatgttgcttcgccagttcaggaagacaccggagcagcgctttacgcaggaacacagtctgttcttccggttgctgaaccgtcgatatgaaaaagcgagcattgtgctgacgtccaataaagggttcgccgactgggggagagatgttcggtga

SEQ ID NO: 37778 - DNA, 315 bp, Escherichia coli; identical to SEQ ID NO: 24016

SEQ ID NO: 37779 - DNA, 720 bp, Escherichia coli
atggcttaccgcctccttcaccatctgttcaagcatcggacgcacatcatccggggtgagacttttaccgtctgccggctgcggaatatttgcgaccgcatcattcaccgccttctgcagtacttccggatcatagtcacgaccgtcgcgcggaacagggatatggcttaccgcctccttcaccatctgttcaagcatcggacgcacatcatccggggtgagacttttaccgtccgccggctgcggaatatttgcgaccgcatcattcaccgccttctgcagtacttccggatcatagtcacgaccgtcgcgcggaacagggatatggcttaccgcctccttcaccatctgttcaagcatcggacgcacatcatccggggtgagacttttaccgtccgccggctgcggaatatttgcgaccgcatcattcaccgccttctgcagtacttccggatcgtagtcacgaccatcacgcggaacagggatatggcttacagcctccttcaccatctgttcaagcatcggacgcacatcatccggggtgagacttttaccgtccgccggctgcggaatatttgcgaccgcatcattcaccgcctgctgcagtacatccggatcataatcacgaccatcacgcggtaccggaatggcccccacagcgtcatccaccatcgcctgcagaaccggacgcacctcatccaccgtcacatgcttctgtaa

SEQ ID NO: 37780 - DNA, 315 bp, Escherichia coli; identical to SEQ ID NO: 24011

SEQ ID NO: 37781 - DNA, 210 bp, Escherichia coli
atggggcgtcttctggtggagaacattaataccgaccccaggctggcgctggatgcggcttataagctggcgcagttcacgcaccataaaaaaggggatgccggtaaaaaatcggcaaaaggtgacgcggcgaaaaaagcggctaaccgttttgcggtgccaccaccaccccgcctggtggtgaataatgataatgagggcaacggatga

SEQ ID NO: 37782 - DNA, 426 bp, Escherichia coli
atgctgagaaatgcagtattgaatttatcaatttttcaccagcttctggtctttctggctgtcatgcgcaaaacatatggctttaataaaaaactggattgggttagcaacgagcaactttccgaattaaccgggatattgccgcacaagtgttctgctgcaaaaagtgttctggtaaagcgtgggatttttattcagagcgggcggaataccggcattaataatgtggtcagtgaatggtcaacattacccgaatcaggtaagaaaaataaagtttacctgaaagaggtaaatttacctgaatcaggtaaaaaaagtttacccaaatcaggtaaaggcgtttacccgaatcaggtaaacacaaaagacactaacaaaagacaatataaaacctttttcgtccgagaattctggcgaatcctctga

SEQ ID NO: 37783 - DNA, 375 bp, Escherichia coli
gtggtgaaaccggatgctgcaattcagagcggcagcaagtgggggacagcagaagacctgaccgccgcagagtggatgtttgacatggtgaagaccatcgcgccatcagccagaaaaccgaattttgcagggtgggctaacgatatccgcctgatgcgtgaacgtgacggacgtaaccaccgcgacatgtgcgtgctgttccgctgggcatgccaggacaacttctggtccggtaacgtgctaagtccggccaaactccgcgacaagtggacccagctcgaaatcaaccgtaacaagcaacaggcaggcatgatagccagcaaaccaaaactcgacctgacaaacactgactggatttacggggtggatttatga

SEQ ID NO: 37784 - DNA, 591 bp, Escherichia coli
ttgaaagcgcaattaatttatcctgaatatgatcaagtcattgtttcaagagaacttgagaaagtagagcaagatattgaatcatcgaaagatatattgaaaggtattgttgatgcacttgatgataagaagcaattattaaaagagttaagtgatgaattatattcaatcagtgacagggaaaaatacttatcattactcattgaaagatttagtcttcttaaagaccaatactttatagatctacaaagaatagatgttgtatcacaggcgaatttctatttaaataattttgcagatatttattgtgagttctgtaatacaccgcaaaaaaaagaaaatgaaatatcatatgatgattgttttttgtcgtgtaatgcagaaaaattgaaaatcaaaagccagctgaaaggattaattgaatcaatcggatctaatgttcgcgaacatgaattaattatgttaagaaaaaatgatgttaatgaaatttatcaatcagaaaaaagtgattttaagacgttagaagataaaaatataaaacaatacattcatctcttgaatcactttatgaatataaagacaatcttttaa

SEQ ID NO: 37785 - DNA, 1662 bp, Escherichia coli
atgatacctgtgtggagcacggcctgcccggactgggcagagcgcctgaaaaaggggctgtcgattattccggctccgatttatccggaccaggctgcacatgcactggcgatttttaaacaactgcgaattgtggatgcaccgggtagcccgacattcggggagtcctgtgcaccgtgggtgtttgacctggtggcggccctgtttggctcctacgatgcgcagaccggtgttcgccatatcaaggaagtgtttatccttatccccaagaaaaactcgaagtccacgctggctgcggggatcatgatgacggcgctgttactgaactggcggcaggcggcgggctacaccattctggccccgaccgtggaggtggcggctaacgccttcaaccctgccagggatatggtacgacgggacgatgatctggatgacctctgtcaggtgcagacacatatccggaccatcacccacagggtgacggacaccaccctgaaggtggtggctgccgatccgaatacggtgtccggtatcaagtccgtggggactctgattgatgaactgtggctgtttggcaagcagtacaaggcggaagacatgctacgtgaagccatcggcgggcttgcctcccgtccggaagggtttgtggtgtatacgaccacccagtcgaatgaaccgcccgccggggtgttcagacagaaactgcagtatgcccgggatgtgcgcgacggcaaaattcatgatccgcactttctgccggtgatttttgagcatcctcctgaaatggtggaaagcggggctcacctgctgatggaaaacctcgccatggttaacccgaatctcggttattcggtggatgaggcctttctgtaccgggagtaccgtaaagcccgggaggctggtgaggaagcatttcgtggcttcatgtcaaaacacgccaatgtggaaatcggtcttgccctgcgttctgaccgctgggcgggcgcggatttctgggagcagcagggcaggcgcgtcagcctggacgatatcctgcagcgcgctgatgtggtgacggtggggattgacggcgggggcctggatgatctgctgggaatgtacgtgattggccgtgacagggaaacccgcgaatggctgggctggggccatgcctgggcgcatgaaaccgcggtggtccgacggaagagtgaggcatcccggtttcaggattttgtggcctgtggagacatgacgattgtccgtcgggtcggggatgacacggcggaagtggcggagtatgtgcgtcgcattcatgaggctgagttactggatcatatcggtattgacccgtcaggtgtggggcagattctggattcactggcggaagccgggatccccgatgagagtgtggtggggataagccagggctggaagctgggcggggccatcaaaaccaccgagcgcaaactggctgaaggggtgctgattcacggtgaccagcccctgatggcctggtgtgtcggcaatgcccgggtggagcctaaaggtaacgccattcttatcaccaaacaggccagtggacggggaaaaattgacccgctgatggcgctgttcaatgcggtctccctgatgtcccttaacccggaaccgaaaaagaaagaatatgcggtttttttcatataa

SEQ ID NO: 37786 - DNA, 348 bp, Escherichia coli
atggctaagcatataaatggttatcatgagaagaagattgtagatgttattaacacatggtctatagatgaaaaactaacctggaatgctttgtgcgataggttagtcagggttattgggaaaagaccatcaagacaatccttaagtagtcatgtaaggaacactgtaaaacctgctaatttaaaagtggcttctcaacgaattaaaagacttgaagcagaaaatgaagctttgaaggcattaaatgaacgctatttagagcagttcaaagtatggctttataatgctcaccttaaacaaataacgattgaagaacttaataatccgttacctgcaaaatacctttaa

SEQ ID NO: 37787 - DNA, 1545 bp, Escherichia coli; identical to SEQ ID NO: 37757

SEQ ID NO: 37788 - DNA, 450 bp, Escherichia coli
  misc_feature (435)..(444): n is a, c, g, or t
atgccaaaaggacagatagaagtccggcgaatagttaatgatgaggttttatttagcggtaaagttgtagttttaccagcagacttcgatattaatattatacctgagagtgctcagcaaggcattattatgctttctggtataacggatactagaattgataaatattcaaacaatgaaaaagtaacacttaagtccgattattcacaaaacgagtgtgctatttattataattcatcgctgatgctggaaaataccgttgatttacgggtctcctggaaagatggttctaatcttaaactattattacctaagccggttagcggtggccgatttgtaactaatgatggttctgttcattttgatggtgtggcatctatagcacatttgcatggaatagatgctgagttattaaccatatcatgtgctggaagnnnnnnnnnntcttaa

SEQ ID NO: 37789 - DNA, 570 bp, Escherichia coli; identical to SEQ ID NO: 37228

SEQ ID NO: 37790 - DNA, 273 bp, Escherichia coli; identical to SEQ ID NO: 37729

SEQ ID NO: 37791 - DNA, 537 bp, Escherichia coli
atgccgggattccgccgtcagatgaacgaaggctggtaccagatacgtattcgcggtgaggacacggcaccggaggcggtgtacgcccgtcttcacgaacctctgggtgagggggcggtcatccatattgtgccgcgactggccggagccggaaagggtggactgcagattgtgctgggggcggcagccatcgtgggctctttcttcaccgccggcgcaacgatggcgttgtggggttcagccctggcagccggtggtttttctgccaccacgatgctgttctcactgggggccagcatgatactgggcggtgtggcccagatgctggcaccgaaggcaaaaacaccggattaccgcgcaacggataacggtaaacagaacacgtatttttcgtcactggataacatgattgcccaggggaacccgatgccggtgccttatggtgaaatgctggttggttcacgacggatatcccaggacatcagcacccgtgatgagggcggagacgggaaagtggtggttatcgggcggggatga

SEQ ID NO: 37792 - DNA, 546 bp, Escherichia coli
atgattggccaccgatgcgccaaagcagcacagcaggatatcgccaggctgtgcggaaggcagggaaatcctgtaaaaaccagtcgcctccatattgtccaggtacaggttctgaccattgcgccaccagtcatcctcacgctcaaaatccggcatatcaattcccgccagatggtatgcatcccggaacagcgtgtaacagtccgtcaccccgtgctcaaagcgccgtcctgtcagatgtggcacacagcggaatttatgaatttccccccggcagaccagccaccaggacagtgcactttttatctgcagccgccggtcggcctcgctcagccagggcagaccaccgggatgactgtggaccagtgccacaatctccccctgcatctctgcccgcagccagtcttccggtgcaatacgaaaatacgcctccggctctgcagagatattcacacaagggatataccgctccccctccggcgttctcaccacgaagccgcacgactccgcaggcgcacaccgccgggcatgcgccagaatcgctga

SEQ ID NO: 37793 - DNA, 546 bp, Escherichia coli; identical to SEQ ID NO: 37475

SEQ ID NO: 37794 - DNA, 492 bp, Escherichia coli
gtgcagaggacaggggcacccggtaaaaaccagtcgccgccatattgtccaggtaaaggttctgaccgttgcgccaccagtcatcctcacgctcaaaatccggcatatccccgccagatggtatgcatcccggaacagggtgtaacagtccgtcaccccgtgctcaaaacgacgcccggtcaggtgcggcacacagcggaatttatgaatttccccccggcagaccagccaccagggcagggcactctttatctgcagccgccggtcggcctcgctcagccagggcagaccaccagggtggctgtgaaccagcgccacaatctccccctgcatctctgcctgcagccagtcttccggcgcaatacgaaaatacgcctccggctctgcggagatattcacgcagggctggtaccgttcgccctccggggtgcctatcacgaagccgcacgactccgcaggcgcacaccgccgggcatgcaccagaatcgctga

SEQ ID NO: 37795 - DNA, 309 bp, Escherichia coli
atgataccgccagtgttattccgcggtggtaagcatgagaatttcaacagtaataaccaacagtcatactggtattcaacctgccggttaagagtgacccgcaatggccaggagatttttaatcagtccacgacggatgctcagggcgtattttcctcagttatagatatgcctgccggacaggggacgctgacactgacattcaccgtatcttcatcaggagcgaataactggacaccaacaaccagtatcagcgatctgctggttgtggtgatgaaaaaatccacagcaggtatcagtatcagctga

SEQ ID NO: 37796 - DNA, 183 bp, Escherichia coli; identical to SEQ ID NO: 29889

SEQ ID NO: 37797 - DNA, 147 bp, Escherichia coli; identical to SEQ ID NO: 29858

SEQ ID NO: 37798 - DNA, 291 bp, Escherichia coli
atgcaggaaaacgatctgcatgaaaaacagattattctactgaccgggaatgatagcgagcgagaagcgcagattgagcaacagttacgcgaactaacgttactgccgctcaacattaaacatatgtcggtaaaggcatttttgcagacaggcgctccgcgtggcgcggcactgattattgctccttataccatgccgttaccgctcttttcaccaccgctgatctatacggacctgacactgacaacacatcaacaggagcagatccgcaaaatgctcgaatcagcatga

SEQ ID NO: 37799 - DNA, 447 bp, Escherichia coli
atgcgaaacgcaaatgaaggagtatctctttcagagattgtaactaaagccacattacgcaaatttggtattagaggtgtaaataaatacgagacatacacagtcataataataactgtagctttttttatccttgaatcagcagcaggaagggccaaagatacatttgctgtagctataaaagtattaagctacatgctcccctgtacggcaattatcatggctgtcatatggataatatttttcatcggcgatagacgagaaaagttaaaacatgcagagctggacgtgattaagataaaagctcgtcaaaaaatctacgatcgcctgcgttacgttgaaaatgagcatatcgttttcgacccggttacaggtcgggaagttccggcagaacggacttgtatcaatgaacttgttgaagctctcgcgatggaagcaacaacgtga

SEQ ID NO: 37800 - DNA, 249 bp, Escherichia coli
atgcattcttcttttggtttgccatatcctgctggtcactggttttattctttacaggacttactcgacaatcctgtatttatggtttctttctttgttttctgggtggcaacgggtcaatttttattaacaactgcacacagaaaatttaatatatctgaaacagttgagatggttatcatcgctttattaatgatactaatgactctttctttttatctttgtgcaatattaaaggcttctttttaa

SEQ ID NO: 37801 - DNA, 201 bp, Escherichia coli
atgaaactgaaattattatctgcaattgcgttagtcagcacattcttaattacagggtgtgacggagaggacaagacagattgcaagaaagatccaacagcgaagggatgcccacactatagtggtaatatcacccattcagaaaataaaagctgggatatgaataaggaagaaaacagttcttataaagaggacaaataa

SEQ ID NO: 37802 - DNA, 492 bp, Escherichia coli
atgaaaaagatatatatcgcagcgtttttattaatttttacccctttaacttatgccaccggatttccatgtgctggctgtggaattgttgataatatgataaaaggaaacgctgatgaaacaccaataatggtgatgctagatactccgattgaaaaaaatgacattacgccgaaggaaataaacttaatatcacacgacgataaatgtatttactctggtgtacttacacagactctttcgaaaaataaagacagccgtattattgatgtcaataaaaaggtttgcggctcgaatactgaaaaggtgtcttactccgttttgagcattagttccagcgagcaatacagcaaaggcacaccgctaaagctgtatcatgtcgccgtaatgacttcggcaggcccgttgttcagcgctgatgtaatgagcgaaatgattaaagatattgcagatgcagtagaacaggctaaggcaaaaggactaactaagtga

SEQ ID NO: 37803 - DNA, 180 bp, Escherichia coli
atgttccggcgttgcagaacgatagatacagttgaacgcctttatgaacataagcgggacattgtttcttctgaacatcttagcgattttctgagtgcttatgatcatcgcaaggcagaaatttatcatggaaaaatctgggataaggttcctgcgtctgcctggcggaatgtgaaataa

SEQ ID NO: 37804 - DNA, 630 bp, Escherichia coli
  misc_feature (570)..(579): n is a, c, g, or t
atgacggatgaaaatggctcggttcggggcgttatgggggacattcttaatattattaccttgcaaacaggtttaaatttttctccgatcaccgtttcacacaatatccatgctggaacacagctgaatcccggcggatgggatatattacccggtgctatttatagtgaagatagagaaaataatgttttatttgctgaagccttcataacaacgccttacgtttttgtcatgcaaaaagcgcctgacagtgaacaaacattaaaaaaaggaatgaaagttgccattccatattattatgagcttcattcgcaattaaaagagatgtatccggaggtagagtggataaaagtcgataacgccagcgctgcatttcacaaggtcaaggaaggcgaacttgatgctctggtcgcgacacagttaaattcacgttacatgatcgaccattactatcctaatgaactgtatcattttcttattcccggcgttccgaatgcatcgctttcgttcgcttttcctcgcggagaaccggaacttaaggatattattaataaagcactgaatgcaatnnnnnnnnnngaatgcaatccccccaagcgaagttctgcgcctgaccgaaaaatggattaa

SEQ ID NO: 37805 - DNA, 270 bp, Escherichia coli; identical to SEQ ID NO: 29818

SEQ ID NO: 37806 - DNA, 279 bp, Escherichia coli; identical to SEQ ID NO: 37604

SEQ ID NO: 37807 - DNA, 1272 bp, Escherichia coli; identical to SEQ ID NO: 37369

SEQ ID NO: 37808 - DNA, 342 bp, Escherichia coli; identical to SEQ ID NO: 24027

SEQ ID NO: 37809 - DNA, 279 bp, Escherichia coli; identical to SEQ ID NO: 37606

SEQ ID NO: 37810 - DNA, 303 bp, Escherichia coli
  misc_feature (198)..(207): n is a, c, g, or t
atgttacaacaggagcaacccgaagattttgtgattgcaacaggagtccaatactcagtccgtcagtttgtcgaaatggcagcagcacaacttggtattaagatgagctttgttggtaaaggaatcgaagaaaaaggcattgtagattcggttgaaggacaggatgctccaggtgtgaaaccaggtgatgtcattgtnnnnnnnnnnatttccgaccagctgaagttgatactttgcttggagatccgagcaaagctaatctcaaacttggttggagaccagaaattactcttgctgaaatga

SEQ ID NO: 37811 - DNA, 450 bp, Escherichia coli
gtgagtgccctgccggctccgcaggacgggcgtgatgccacggcactggaaatactccccgccattgacgatcaaaaatcctttccccggggcacgtatgccacacaccagggcggactctggcgggcgtatgaaaaaacgcacgggatgcggggatgggaatgcctggttgacggggtggcggatattgacgtcagcatgacgggtgagcggttgttctctgtggtggtccggcagagcagtggccagcgtacggaaaaaacattttccctgccggtgatgctctaccgcggtgtgttcagagccggtgaaacctaccaccccggcgatacggtgacgtgggggggctcgctgtggcactgcaacagtatgaccgaagataaacccggagaagctcattcatcagcctggaccctggctgcaaaacgtgggcgggatgcaggaggctga

SEQ ID NO: 37812 - DNA, 372 bp, Escherichia coli
gtgctggatgcgctggagcaggcgttgtgggcccgtcgtccgtctggcaccatccatcacagcgataaaggctctcagtatgtgtcactagcctatacggagcgactaaaagaagccggattactggcatcaacagggagtacaggcgactcgtatgacaacgcgatggctgagagcatcaatggtctttacaaagcggaggtaatacaccgtaagagctggaaaaaccgtgcagaagtggaactggccacactaacgtgggtggactggtataacaatcgacgattgctgggaaggctgggccatactcctccggcagaagcagaaaaagcttattatgcttccatcggaaacgatgatctggcagcctga

SEQ ID NO: 37813 - DNA, 279 bp, Escherichia coli; identical to SEQ ID NO: 37620

SEQ ID NO: 37814 - DNA, 1095 bp, Escherichia coli; identical to SEQ ID NO: 23540

SEQ ID NO: 37815 - DNA, 156 bp, Escherichia coli
atgattttcacgtcaagttgctgcgataatttatcaatagatgagattatcgaacgtgctgaaaaaggcgattgcgaggctcaatatattgttgggttttattataatcgcgatagcgcaattgactctccggacgacgaaaaggccttttactag

SEQ ID NO: 37816 - DNA, 453 bp, Escherichia coli
atgaaaacatgttggcaaatcctcgaaattgaaagcacgacgcaaatagacattatccgccaggcttatcttgctcgcttaccgttatgtcatcccgaaaccgatccgcaagggtttaaagcattacgccaggcctatgaagaggccctgcgactggcggtaaatcctgtcgaggaagcagatgatgaagaaaaagatgatgccactgagcatgaaatactacgtgtattcagggcattactggattcagaaagtgatcgttttcagccctccgcctggcagaaatttattcagcaattaaatacctggaacatggaggatgtcgatcaattacgctggccgctgtgtgcaatcgctatagaagcgcgatatctttcattaaattgtgcttctttgctggcagagcgtttgaactggcattcgtttaatgacagcgaaggaatagatgagtaa

SEQ ID NO: 37817 - DNA, 144 bp, Escherichia coli
atgcataacagcagggttatgtccggtgaatctgacagacagccgggctgtattcgcggcaggataaagaaaaaccgggagatgactctcccggtccgtcttatcgctaatcccctgagcagggcatgtatgacttatctatga

SEQ ID NO: 37818 - DNA, 369 bp, Escherichia coli
atgaaaaaaatattactggtggcagccattacgggaatgttcgttcagggggtatgggcaaaatcagatcagcaaatccgggatgaggctaaaaataatgtgatcactgtttctcaggtgagtgacatgacggaggggaccggtgtgacgctgaatggtcagatagtgaagcaactggcagccgaagaggatcattttgaactcagtgatgcatcaggaagtattgtcattgatgtcgatgatgaagtatggcgcccgctggccctgaaagccggagataaagttcaggttgtgggagaagtggatatttctgatgagggaaaccggaaagccacggtggatgtactgactcttgagcgtcttcgctga

SEQ ID NO: 37819 - DNA, 492 bp, Escherichia coli
atgaaaaatttagctcatattgctctgataacggtgatacagctcattgcctgttatctggctgattgggggagcgctgaaacagtttttatcctgtgctttattgtactatggcagggattgtttatatggttgttttctcaaatacgaaaaaaacggcatgtgtcggatgagtttaaattcagcaaaggcgtttggtatatactgatgccagtatcttccttattttctccgttattaagcctgatggtttttatcattggtacactatacgaattaaggcaagttagtgattgtataagcataaaagaatggggggggaatcaacttaaaaaccaatatgatgggggtgaaaagttagacttcgggttcgttgaatacaccccaactacctactataacccttcaaccggatatcctatgcatggaggatttgattcagcaggaaatacttttgggactcgttggcaggactatgatgataggcgataa

SEQ ID NO: 37820 - DNA, 393 bp, Escherichia coli
atgaaagaaaacaaaaagaatcaggaattcaaaatcagaaaaattaaacgggatattgagcgtggttgtgataatgccataaaacacttctggctttttgtggttttctttgttgccggattgcttttatggacagtaatgaatgttatttttgatgcctgtattgattcgtggaaggctgaccctgaattaaataacgtacgtgatatgtggaatatcctgatgtatgccattccgtgtacgttattggcgcttgcggcagggtttcttgttacattttttctgtccccaatgttcgaattaatattcgggaatatcatgatattcctgctgaaacgtcgtatgcgccgggagaacagtttcagggagggtaataacgatgcctcgcattaa

SEQ ID NO: 37821 - DNA, 192 bp, Escherichia coli
atgagtgcttactgcttcgaaggaaataatatcgactggtttatatgcctgtgcctctttcttgtggttatctgtgttgttaacgcactggctatgtttgttatccctgaaaaattcagtctgcgagtcaacataggtaacacattgattgttagtgtgcttatcggactatataaggccaagattaaatga

SEQ ID NO: 37822 - DNA, 690 bp, Escherichia coli
atgtatccgatggatcctattcaacaaaaacacgatcgtcaaatagaactgctggaaaacctgatcgttgttattaatcattttccaaatccagcgtgtatcagagataaaacaggaaaattcctcttctgcaatgcctggtttcatgaatcattcctgactcagactaaaagtgctgaaaagtggcttttgtcacaaacagacttttgtgagttaatttctgtcacagaaatggaagcatacaggaatgagaatacacatttgaatcttgttgaggatgtttttattcaggataaattctggaatatatcaatacaatcatttttaaataaaaatggggatgttattttatggcaattttacgatgcaacacatattcgccataaggataactataaccaaaaatattttgttagtgatgatataatgaaaattatcagaaggattaatgacgattcttctgtgtcatcatatgtaaatgatgttttttatctgtatggcacagggataagtcatagaactatagcaaaaattctaaacatatctatctcaacatccaaaaaacacgcatctataatatgtgattacttctccgtttctaataaggatgagttgattgttttactctacaataagaaatttattcattatttgtatgagaaggcaatgcgcataataaatatgcgttag

SEQ ID NO: 37823 - DNA, 219 bp, Escherichia coli
gtgcctacattattcagaaaagaatatccgcgaaaaagtagagcgacagaatttttgtttctcattctgtttatcgtgttgatgacaccgatatccccgctaatttttgtctgggcaatcgggaaaataattgagctagttattgagttgtataacgacgtggtatgggcgtcgttcaacacactgcacaataaaattaacccatataaggaaaactga

SEQ ID NO: 37824 - DNA, 315 bp, Escherichia coli; identical to SEQ ID NO: 23639

SEQ ID NO: 37825 - DNA, 243 bp, Escherichia coli
gtgggacgtaaatgggccaatattgttgctaaaaaaacggctaaagacggtgcaacgtctaaaatttatgcaaaattcggtgtagaaatctatgctgccgctaaacaaggtgaacccgatccagaattaaacacatctttaaaattcgttattgaacgtgcaaagcaggcacaagttccaaagcacgttattgataaagcaattgataaagccaaaggcggcggagatgaaacatttctttaa

SEQ ID NO: 37826 - DNA, 471 bp, Escherichia coli
atgggtaaaacaatcagtataaaggtcctgttcggtatttatcttctattaatggcaggcaaagtttttgccttcagttgtaatgtcgatggcgggtcaagtattggagctggtacaacctctgtttatgttaatctcgaccctgtaatacagccgggccagaatctggttgtagacttgtctcagcatataagttgctggaatgattacggcggctggtacgacactgatcatataaacctggtacaaggctcagctttcgcaggctctctacagtcatataaaggatcgctgtactggaataatgtgacctaccccttcccgttgacgacaaataccaacgtattggatattggtgataagacaccgatgccattaccgttaaaactctatattaccccagtcggggcggccggtggagttgtcataaaagccggggaagtattcatatgtataaaattgccacgttag

SEQ ID NO: 37827 - DNA, 510 bp, Escherichia coli
atgcaaaaagtaaaactgaataacggtattgaaatgcccctgctgggctttggtgtatttcagatgaccgatgccgccgaatgcgaaagagcggtcattgacgctattaacaccggttatcgactgattgacaccgccgcctcctatcaaacgaaactctggttgcaggataccagttacgaaggggccaaagcccagttcgaacgctctctgaatcgactgcaacttgattacgttgacctgtatttgattcatcagccttacggtgatgtccacggtgcctggcgtgccatggaagagctgcaacaggccggtaaaattcgcgctattggcgtcagtaacttccatcctgaccgactggctgaccttatcgcctttaataacgtcgttccagcggtaaaccaggttgaagttaaccctttcaatcagcagctacacgccgttccgtggatgcaaagccgtggtattcagccagaagcctgggcaccgtttgcagttacagggcggtaa

SEQ ID NO: 37828 - DNA, 4254 bp, Escherichia coli
atgtcacgttataaaacaggtcataaacaaccacgatttcgttattcagttctggcccgctgcgtggcgtgggcaaatatctctgttcaggttctttttccactcgctgtcacctttaccccagtaatggcggcacgtgcgcagcatgcggttcagccacggttgagcatgggaaatactacggtaactgctgataataacgtggagaaaaatgtcgcgtcgtttgccgcaaatgccgggacatttttaagcagtcagccagatagcgatgcgacacgtaattttattaccggaatggccaccgctaaagctaaccaggaaatacaggagtggctcgggaaatatggtacagcgcgcgtcaaactgaatgtcgataaagatttctcgctgaaggattcttcgctggaaatgctttatccgatttatgatacgccgacaaatatgttgttcactcagggggcaatacatcgtacagacgatcgtactcagtcaaatattggttttggctggcgtcatttttcaggaaatgactggatggcgggggtgaacacctttatcgaccatgatttatcccgtagtcatacccgcattggtgttggtgcggaatactggcgcgattatctgaaactgagcgccaatggttatattcgggcttctggctggaaaaaatcgccggatattgaggattatcaggaacgcccggcgaatggttgggatatccgcgcagagggctatttacctgcctggccgcagcttggcgcaagcctgatgtatgaacagtattatggcgatgaagtcgggctgtttggtaaagataagcgccagaaagacccgcatgctatttctgccgaggtgacctatacgccagtgcctcttctgacactgagcgccgggcataagcagggcaagagcggtgagaatgacactcgctttggcctggaagttaactaccgaattggcgaacctttggcgaaacaactcgatacggatagcattcgcgagcgtcgggtactggcaggcagccgctatgacctggttgagcgtaataacaacatcgttcttgagtaccgcaaatctgaagtgatccgtattgctctgcctgagcgtattgaaggtaagggcggtcagacactttccctggggcttgtggtcagcaaagcaactcacggactgaaaaatgtgcagtgggaagcgccgtcattactggctgaaggtggcaaaattaccggtcagggtagtcagtggcaagtaacgctcccggcttatcgtccaggcaaagacaattattatgcgatttcagcagttgcctacgataacaaaggcaatacctcaaaacgcgtgcagacagaggtggtcattaccggagctggtatgagcgccgatcgcacggcgttaacgcttgacggtcagagccgtattcaaatgcttgctaacggtaatgagcaaaaaccgctggtgctgtctctgcgcgacgccgagggccagccagtcacgggcatgaaagatcagatcaagactgaactaactttcaaaccggctggaaatattgtgactcgttccctgaaggccactaaatcacaggcaaagccaacactgggtgagttcaccgaaactgaagcaggggtgtatcagtctgtctttactaccggaacgcagtcaggtgaggcaacgattactgttagcgttgatggcatgagcaaaaccgtcactgcagaactgcgggccacgatgatggatgtggcaaactccaccctgagcgctaacgagccgtcaggtgacgtggttgctgatggtcagcaagcctatacgttgacgttgactgcggtggactccgagggtaatccggtgacgggagaagccagccgcttgcgatttgttccgcaagacactaatggtgtaaccgttggtgccatttcggaaataaaaccaggcgtttacagcgccgcggtttcttcgacccgtgccggaaacgttgttgtgcgtgctttcagcgagcagtatcagctgggcacattacaacaaacgctgaagtttgttgccgggccgcttgatgcagcacattcgtccatcaccctgaatcctgataaaccggtggttggggggacagttacggcaatctggacggtaaaagatgcctatgacaaccctgtgaccagcctcacgccggaagcgccgtcattagcgggtgccgctgctgaaggttctacggcatcgggctggacaaataatggtgatgggacgtggactgcgcagattactctcggctctacggcgggggaattagaagttatgccgaagctaaatggacagaatgcggcagcaaatgcggcaaaagtaaccgtggtggctgatgcgttatcttcaaaccagtcgaaagtctctgtcgcagaagatcacgtaaaagccggcgaaagcacaaccgtgacgctggtggcgaaagatgcgcatggcaacgctatcagtggtcttgcgttgtcggcaagtttgacggggaccgcctctgaaggggcgaccgtttccagttggaccgaaaaaggtaacggttcctatgttgctacgttgactacaggtggaaagacgggcgagcttcgcgtcatgcctctcttcaacggccagccagcagccaccgaagccgcgcagttgacggtcatcgccggagagatgtcatcagcgaactctacgcttgttgcggacaataaggctccgaccgtcaaaacgacgacggaactcaccttcaccgtgaaggatgcgtacgggaacccggtcaccgggctgaagccagatgcaccagtgtttagcggtgccgccagcacggggagtgagcgtccttcagcaggaaactggacagagaaaggtaatggggtctacgtgtcgaccttaacgctgggatctgccgcgggtcagttgtctgtgatgccgcgagtgaacggccaaaatgccgttgctcagccactggtgctgaacgttgcaggtgacgcatctaaggctgagattcgtgatatgacagtgaaggttaataaccaactggctaatggacagtctgctaaccagataaccctgaccgttgtggacacctatggtaacccgttgcaggggcaggaagttacgctgactttaccgcagggtgtgaccagcaagacggggaatacagtaacaactaatgcggcaggtaaagcggacattgagcttatgtcaacggttgcgggagaacacaatatttccgcttcggtgaatggtgctcagaagacggtcacggtgaaattcaacgcggatgccagcaccggtcaggcaaacctgcaggtagacgccgctgctcaaaaagtggcaaacggcaaagatgcctttacgctgacggcgaacgttgaggataaaaatggtaaccctgttccagggagcctggtgacctttaatctgccccggggtgtcaagccgcttacaggcgataatgtctgggtgaaagccaacgatgaggggaaagcagagttgcaggtggtttcagtgactgccggaacgtatgagatcacggcatcggcagggaatagccagccttcgaatacgcagactataacgtttgtagccgataaggctaccgcaaccgtctccggtattgaggtgattggcaactatgcactggcggacggcaatgccaaacagacgtataaagttacggtgactgatgccaataacaacctgttgaaagatagcgaagtgacgctgactgccagcccggcaaatttagttctgactcccaatgggacggcgaaaactaatgagcaaggacaggctattttcaccgccacgaccactgtcgcagcgaaatatacactcacggcgaaagtgagtcaggccgacggtcaggaatcgacgaaaactgccgaatctaaattcgtcgcggatgatacaaatgcagtactcaccgcatcatctgatgtgacttctctggtggcggatgggatatcgactgcgaagctggaggtgacactgatgtcggcaaataaccccgttggggggaatatgtgggtcgacattaagacgccagaaggggtgacggagaaggattatcagttcctgccgtcgaaaaatgaccatttcgtgagcggaaaaatcacgcgtacatttagtaccagcaagcctggtgtctatacgttcacatttaacgccctgacgtatggcgggtacgaaatgaagccagtgacggtgaccattaccgcggtggatgccgatacggcaaagggcgaggaggcgatgaactaa

SEQ ID NO: 37829 - DNA, 774 bp, Escherichia coli; identical to SEQ ID NO: 23849

SEQ ID NO: 37830 - DNA, 552 bp, Escherichia coli
  misc_feature (524)..(533): n is a, c, g, or t
atgattactcatggttgttatacccggacccggcacaagcataagctaaaaaaaacattgattatgcttagtgctggtttaggattgtttttttatgttaatcagaattcatttgcaaatggtgaaaaatattttaaattgggttcggattcaaaactgttaactcatgatagctatcagaatcgccttttttatacgttgaaaactggtgaaactgttgccgatctttctaaatcgcaagatattaatttatcgacgatttggtcgttgaataagcatttatacagttctgaaagcgaaatgatgaaggccgcgcctggtcagcagatcattttgccactcaaaaaacttccctttgaatacagtgcactaccacttttaggttcggcacctcttgttgctgcaggtggtgttgctggtcacacgaataaactgactaaaatgtccccggacgtgaccaaaagcaacatgaccgatgacaaggcattaaattatgcggcacaacaggcggcgagtctcggtannnnnnnnnncttcagtcgcgatctctga

SEQ ID NO: 37831 - DNA, 270 bp, Escherichia coli; identical to SEQ ID NO: 23612

SEQ ID NO: 37832 - DNA, 264 bp, Escherichia coli; identical to SEQ ID NO: 23930

SEQ ID NO: 37833 - DNA, 279 bp, Escherichia coli; identical to SEQ ID NO: 37604

SEQ ID NO: 37834 - DNA, 468 bp, Escherichia coli
ttgtcgttaaacaatggttatgaggagagcaataccggtgataaccaggtggtttataacggtaatcttgtctcttacgatagcgttccagtggcagattttaataacccattaaagatctccttaaacatggatttcacgcatcaaccgagcgggttggtgtgggcgaatacgctggcctggcaagaagcgcgtaaagctcgcattatcctgggtaagacaaatgcgcaatacatcagcgaatattcagattacaagcagtatgttgacgaaaaactggatagcagcctgacctgggacacccgcttgtcctggacgccacaatttctgaaacaacaaaacctgacgatcagtgccgatattctcaatgtactggatagcaaaaccgcggttgatacaacgaataccggtgtggcgacctacgccagtggccgtactttctggcttgatgtcagcatgaaattttaa

SEQ ID NO: 37835 - DNA, 606 bp, Escherichia coli
atggctaaaccagcgcgaaggaaatgcaaaatatgcaaggaatggtttcacccggcattctcaaatcagtggtggtgctgcccggaacacggaactcaattagcactcgaacgacgaagtaaagaacgcgaaaaagcggaaaaagcagcagagaagaaacgacgacgagaggagcagaaacagaaagataaactgaagattcgaaaactcgccttaaagccccgcagttactggattaaacaagcccaacaagccgtaaacgccttcatcagagaaagagaccgcgacttaccatgtatctcgtgcggaacgctcacgtctgctcagtgggatgccggacattaccggacaactgctgcggcacctcaactccgatttgatgaacgcaatattcacaagcaatgcgtggtgtgcaaccagcacaaaagcggaaatctcgttccgtatcgcgtcgaactgattaaccgcatcgggcaggaagcagtagacgaaatcgaatcgaaccataaccgccatcgctggactgtcgaagaatgcagggcgatcaaggcgaagtatcagcagaaacttaaagacctgcgaaacagcagaagtgaggccgcatga

SEQ ID NO: 37836 - DNA, 195 bp, Escherichia coli; identical to SEQ ID NO: 37504

SEQ ID NO: 37837 - DNA, 273 bp, Escherichia coli; identical to SEQ ID NO: 37703

SEQ ID NO: 37838 - DNA, 438 bp, Escherichia coli
atgcaggacattcatgaagaaagtctgaacgagtcggttaaatcagagcagtcaccgcgggtggtgctctgggaaattgacctgacggtgcagggcggtgagcggtattttttctgtaatgagctgaatgaaaaaggggaggcggtcacctggcaggggcgggaatatcaggcatacccgattgacggcagcggttttgagatgaacgggaagggcagcagtgcccgcccgtcactgacggtgtccaatctgttcggtctggtcaccggaatggcggaggacctgcagagcctggtgggggccacggtggtccgccgccgggtgtatgcccgttttctggatgcggtgaattttgtggcgggcggtcgtggttatcgggcggcagaggtaaaaagaataaaaaaatcccgcagagttgcggggacagacaaagattaa

SEQ ID NO: 37839 - DNA, 432 bp, Escherichia coli; identical to SEQ ID NO: 24031

SEQ ID NO: 37840 - DNA, 432 bp, Escherichia coli
atgtttggtatcttcaaaaagaaaacccgcagagcggcaacggaaattaaaaagtttgaaaaacgcgatctggcacaggtggtgattaacgccgcatacctggtggcctgtgcagatggtgaatgtgaggcatccgagaaagcgaagatcgaacaggtactgcgtaatcagcctgcgctgtacgcgtttacgtcagaaattaatgcgattagcgcaaccattatcggtcagctggatacgaactttaaaactggtcgtcgtgcggcgttacgtgagatcgaggatgtgaaacacgatacgcgtgaagcggaagatgtgctggatgtggcggtggccattgcggaggcagacggcgaaattgagccggaagagcgcaaggtgctggaagagattgccggtgttctgggtcttcgtctggagaattacctgtga

SEQ ID NO: 37841 - DNA, 195 bp, Escherichia coli; identical to SEQ ID NO: 37317

SEQ ID NO: 37842 - DNA, 291 bp, Escherichia coli; identical to SEQ ID NO: 37384

SEQ ID NO: 37843 - DNA, 606 bp, Escherichia coli
atggctaaaccagcgcgaaggaaatgcaaaatatgcaaggaatggtttcacccggcattctcaaatcagtggtggtgctgcccggaacacggaactcaattagcactcgaacgacgaagtaaagaacgcgaaaaagcggaaaaagcagcagagaagaaacgacgacgagaggagcagaaacagaaagataaactgaagattcgaaaactcgccttaaagccccgcagttactggattaaacaagcccaacaagccgtaaacgccttcatcagagaaagagaccgcgacttaccatgtatctcgtgcggaacgctcacgtctgctcagtgggatgccggacattaccggacaactgctgcggcacctcaactccgatttgatgaacgcaatattcacaagcaatgcgtggtgtgcaaccagcacaaaagcggaaatctcgttccgtatcgcgtcgaactgattaaccgcatcgggcaggaagcagtagacgaaatcgaatcaaaccataaccgccatcgctggactatcgaagagtgcagggccatcaaggcgaagtatcagcagaaacttaaagacctgcgaaacagcagaagtgaggccgcatga

SEQ ID NO: 37844 - DNA, 195 bp, Escherichia coli; identical to SEQ ID NO: 23944

SEQ ID NO: 37845 - DNA, 522 bp, Escherichia coli
atgaaaatgtcctacttccacaccctgctggctgaggtttgcaccggtgtggctccggaagttaacgctaaggcgctggcctggggaaaacagtacgagaacgacgccagaaccctgtttgagttcacttccggcgtgaatgttactgaatccccgatcatctatcgcgacgaaagtatgcgcaccgcctgctctcccgatggtttatgcagtgacggcaacggccttgagctgaaatgcccgtttacctcccgggatttcatgaagttccggctcggtggtttcgaggccataaagtcggcttacatggcccaggtgcagtacagcatgtgggtgacacgaaaagatgcctggtactttgccaactatgacccgcgtatgaagcgtgaaggcctgcattatgtcgtggttgagcgggatgaaaagtacatggcgagttttgacgagatggtgccggagttcatcgaaaaaatggacgaggcactggctgaaattggttttgtatatggggagcaatggtaa

SEQ ID NO: 37846 - DNA, 180 bp, Escherichia coli; identical to SEQ ID NO: 23969

SEQ ID NO: 37847 - DNA, 183 bp, Escherichia coli; identical to SEQ ID NO: 29889

SEQ ID NO: 37848 - DNA, 189 bp, Escherichia coli
atgaaaaaccgtaaagcaaagattctgttagttcgtagaaacgctcctggcgtctggcagtgggtgagactcagcaaccgacggatggggttgatgaaatattacgggatgatggattgtggtttttgcaaaaagcccagcgcggagcaaaaccgctggaaaaaccacttgcgcactaaaggagagtga

SEQ ID NO: 37849 - DNA, 1437 bp, Escherichia coli
atggcgcagtcgaaactctatccagttgtgatggcaggtggctccggtagccgcttatggccgctttcccgcgtactttatcccaagcagtttttatgcctgaaaggcgatctcaccatgctgcaaaccaccatctgccgcctgaacggcgtggagtgcgaaagccctgtggtgatttgcaatgagcagcaccgctttattgttgcggaacaactgcgtcaactgaacaaactcactgagaacattattctcgaaccggcagggcgtaacacagcaccggccattgcgctggcggcgctggcggcaaaacgtcatagcccggagaacgacccattaatgctggtgctggcggcggatcatgtgattgccgatgaagacgcattccgcgccgccgtgcgtaacgctatgccgtatgccgaagcgggcaagctggtgaccttcggcattgtgccggatctacctgaaaccggatatggctatattcgtcgcggtgaagtgtcggcgggtgagcaggatacggtggcctttgaagtggcgcagtttgtcgaaaaaccaaatctggaaaccgcgcaggcctatgtggcaagcggcgaatattactggaacagcggtatgttcctgttccgtgccggacgctatctcgaagaactgaaaaaatatcgcccggatattctcgacgcctgtgaaaaagcgatgagcgccgtcgatccggatctcgattttattcgcgtggatgaagacgcgtttctggcctgcccggaagagtcggtggattacgcggtcatggaacgtacggcagatgccgttgtggtgccgatggatgcgggctggagcgatgtcggctcctggtcctcattatgggagatcagcgcccacaccgccgagggcaacgtttgccacggcgatgtgattaatcacaaaactgaaaacagctatgtgtatgccgaatctggcctggtcaccaccgtcggggtgaaagatttggtggtagtgcagaccaaagatgcggtgctgattgccgaccgtaacgcggtgcaggatgtgaaaaaagtggtcgagcagatcaaagccgatggtcgccatgagcatcgggtgcatcgcgaagtctatcgcccgtggggcaaatatgactctatcgacgcgggcgaccgctaccaggtgaaacgcatcaccgtgaaaccgggcgaaggcttgtcggtacagatgcaccatcaccgcgcggaacactgggtggttgtcgcgggaacggcaaaagtcaccattgacggtgatatcaaactgcttggtgaaaacgagtcgatttatattccgctgggggcgacgcactgcctggaaaacccggggaaaattccgctcgatttaattgaagtgcgctccggctcttatctcgaagaggatgatgtggtgcgcttcgcggatcgctacggacgggtgtaa

SEQ ID NO: 37850 - DNA, 819 bp, Escherichia coli
atgagcactaatcttgcttttcgttatgcaagtgttgaaactttttttaaaatgattgaaaaccaagaattatggtttaccgatcttcggaatatgaatgatccggaagaatactcggctggctatgaaatagtcaagagaataataaatgaggaatttccagattgcattagactattagaagaagtatcacctaataagatagacgaaaattttaagatattaatttgttgtttctgttctgatggagatcgttccaacatgtggagcgagtatggtgataatggcaaaggcgttgctattggttatgataagaatattataacccaaaatcatattttggctcggtttgaagaacattttcaacctattagtggtagagttgtctttcatcctgttatctattcagaagaactgtttcgagaatatgtaagaaacgcattgcatgattatattaatcgctcaagtttaaatattaaatatgcacgtggcatacttcatgcacatcttatcagactatgttcattatataagagagagagttttgaatgtgaaaatgaggtccgaggacttattgaagtagatgaacgtacattcccaccatacaaacttgaaaaacgtagtactgattacggaattgcgtattatactaaggtgaaatttacctgtaacaatattacggcaattagagagattgtgttggggcctttatttgaacaatctgatgaacagcttcggtcaaaattagatgatctagggttaaagaatataaaaattagacgttccatatgtacctacaatgatgtggttaatctgtaa

SEQ ID NO: 37851 - DNA, 201 bp, Escherichia coli
atgattgctgccgccaccaaagatgcacgcaacgccgcactacaatttgcaacggactcaggtagccaggtggggtcaattagcgatgcctcacaaggcgtattccagatctttgccagtggcagtgatgaagatgatcctacggcgattaataaaacggtacgcgtagtcacgaccgtaacctatgcgttgcaggattaa

SEQ ID NO: 37852 - DNA, 291 bp, Escherichia coli; identical to SEQ ID NO: 37645

SEQ ID NO: 37853 - DNA, 555 bp, Escherichia coli
atgcttattggctatgtacgtgtgtcaacaaatgaccagaacacagatctacaacgtaatgcgctgaactgtgcaggatgcgagctgatttttgaagacaagataagcggtacaaagtccgaaaggccgggactgaaaaaactgctcaggacattatcggcaggtgacactctggttgtctggaaactggatcggctggggcgcagtatgcggcatctggtcattctggttgaggagttgcgcgaacgtggcgttaattttcgcagcctgacggatgctattgataccagtaccccaatggggcgctttttctttcatgtgatgggggccctggctgaaatggaacgagaactgattgttgaacgaacaaaagctggactggaagctgctcgcgcacagggacgaattggtggacgtcgtcccaaacttacaccagaacaatgggcgcaggccggacgattaattgcagcaggaattcctcgccagaaggtagcgatcatctatgatgttggtgtatcgacactgtataagaagtttccggccggagataaatga

SEQ ID NO: 37854 - DNA, 774 bp, Escherichia coli
atggatattactgagtttccttctggagtaattgaacaccttggctggtatgtataccgattgattgatcctagggacggaagcaccttctatgtagggaaaggcaaaggtaaccgcgtatttgcccatatgcgcggtgaagtggcagcggctgatgatgacgacttactgagcaacaagctaaagcaaatcagagaaataagattagcgggacttgaagttatccatgtcatccatcgacatggaatgactgatgaaaagacggcgtacgaagttgaagcagcacttattgatgcctaccctgggttaacgaatatcatgaatggtgctggcagcaatgaattcggcgccgcgcatgtcaaagagttgatagcaacatatcaacccgaaaccataacatttcatcataaagcattaatgatttccgttaacagaagtgcaaaagattcagagctttatgatgcggttcgatttagctggcgcattaatgtctcgcgcgccagtaaagcagaagtcattcttgctactgtaagggggatcgttcgaggagttttcattgctgataaatggctaaaatcaacgcgtgaacattttcctacgatgaaatactgggacgaagaccctgactttgaggcaacacaaagctctcgctatggttttgaaggtcgagaagccccacctgaaatagcaaacctttatcttgggaaaaaaataccagatgaattaagaaaaaaaggagctatgtctccagttcgttactcacctaatttttga

SEQ ID NO: 37855 - DNA, 531 bp, Escherichia coli; identical to SEQ ID NO: 23763

SEQ ID NO: 37856 - DNA, 672 bp, Escherichia coli; identical to SEQ ID NO: 23764

SEQ ID NO: 37857 - DNA, 636 bp, Escherichia coli; identical to SEQ ID NO: 23765

SEQ ID NO: 37858 - DNA, 1005 bp, Escherichia coli; identical to SEQ ID NO: 23766

SEQ ID NO: 37859 - DNA, 414 bp, Escherichia coli; identical to SEQ ID NO: 23767

SEQ ID NO: 37860 - DNA, 783 bp, Escherichia coli; identical to SEQ ID NO: 23768

SEQ ID NO: 37861 - DNA, 1359 bp, Escherichia coli; identical to SEQ ID NO: 23769

SEQ ID NO: 37862 - DNA, 852 bp, Escherichia coli; identical to SEQ ID NO: 23770

SEQ ID NO: 37863 - DNA, 576 bp, Escherichia coli; identical to SEQ ID NO: 23771

SEQ ID NO: 37864 - DNA, 645 bp, Escherichia coli; identical to SEQ ID NO: 23772

SEQ ID NO: 37865 - DNA, 696 bp, Escherichia coli; identical to SEQ ID NO: 23773

SEQ ID NO: 37866 - DNA, 1419 bp, Escherichia coli; identical to SEQ ID NO: 23774

SEQ ID NO: 37867 - DNA, 471 bp, Escherichia coli; identical to SEQ ID NO: 23775

SEQ ID NO: 37868 - DNA, 921 bp, Escherichia coli; identical to SEQ ID NO: 23776

SEQ ID NO: 37869 - DNA, 918 bp, Escherichia coli; identical to SEQ ID NO: 23777

SEQ ID NO: 37870 - DNA, 183 bp, Escherichia coli; identical to SEQ ID NO: 23778

SEQ ID NO: 37871 - DNA, 1695 bp, Escherichia coli; identical to SEQ ID NO: 23779

SEQ ID NO: 37872 - DNA, 816 bp, Escherichia coli; identical to SEQ ID NO: 23780

SEQ ID NO: 37873 - DNA, 228 bp, Escherichia coli; identical to SEQ ID NO: 1612

SEQ ID NO: 37874 - DNA, 189 bp, Escherichia coli; identical to SEQ ID NO: 23782

SEQ ID NO: 37875 - DNA, 624 bp, Escherichia coli; identical to SEQ ID NO: 23783

SEQ ID NO: 37876 - DNA, 786 bp, Escherichia coli; identical to SEQ ID NO: 23784

SEQ ID NO: 37877 - DNA, 270 bp, Escherichia coli; identical to SEQ ID NO: 23785

SEQ ID NO: 37878 - DNA, 738 bp, Escherichia coli
atgcgtcgtttattgtctgtcgcacctgtccttctctggctgattacgcccctcgccttcgcgcaactgccgggtatcaccagccagccgctgcctggcggtggacaaagctggtcgctcccggtgcagacgctggtgttcatcacctcgttgacgtttattccggcaattttactgatgatgaccagtttcacccgcatcatcattgtttttggtttattgcgtaacgcgctgggaacaccctccgcgccacctaaccaggtattgctggggctggcactgtttttgaccttttttattatgtcaccggtgatcgacaaaatttatgtcgatgcgtaccagccattcagcgaagagaaaatatcaatgcaggaggcgctggaaaaaggggcgcagccgctgcgtgagtttatgctgcgtcagacccgtgaggcagatttagggttgtttgccagactggcgaataccggcccgttacagggacctgaagccgtgccgatgcgcattttgctcccggcctacgtgaccagcgagttgaaaaccgcatttcagataggcttcacgattttcatcccttttttgattatcgacctggtgatagccagcgtgttgatggcattggggatgatgatggttccccccgccaccattgctctgccctttaaactgatgctgtttgtactggtggatggctggcaattgctggtcggttcgctggcgcagagcttttacagctag

SEQ ID NO: 37879 - DNA, 366 bp, Escherichia coli; identical to SEQ ID NO: 23787

SEQ ID NO: 37880 - DNA, 414 bp, Escherichia coli; identical to SEQ ID NO: 23788

SEQ ID NO: 37881 - DNA, 465 bp, Escherichia coli; identical to SEQ ID NO: 23790

SEQ ID NO: 37882 - DNA, 1128 bp, Escherichia coli
atgattcgcttagcgcccttgattaccgccgacgttgacaccaccacattgcctggcggcaaagccagcgatgctgcacaagattttctcgcgttgttgagcgaagcattagcaggcgagacaactaccgacaaagcggccccccagttgctggtggcaacagataagcccacgacaaaaggcgagccgctgatcagcgatattgtttccgacgcgcaacaagctaatttactgatccctgtggatgaaacaccgcctgtcatcaacgacgaacaatccacatcaacaccgttaaccaccgctcagacgatggcgttggctgcggtggctgacaaaaatacgacaaaagacgaaaaagcggatgatctgaatgaagacgtcaccgcaagcctgagcgccctttttgcgatgttgccgggttttgacaatacgcccaaagtgactgatgtgccgtcaaccgtgttaccggcagagaaaccaacgctcttcacaaaactgacttctgcgcaactcacaacagcacagcctgatgatgcccccggcacaccagctcagccattaacaccgcaggtagcagaagcccagagtaaagcggaagtcatcagcacgccttcgccggtgactgctgccgccagcccgctaatcactccacaccagacacagccactgcccaccgtcgccgcgcctgttttgagtgcaccgctgggttctcacgaatggcaacaatcattaagccagcatatttcgctgttcacccgccaggggcaacaaagtgcagagttgcgtctgcacccgcaggatttaggtgaagtgcaaatctccctcaaagtggatgataaccaggcgcaaatccagatggtttcatcgcatcagcatgtacgcgccgccctggaagcagcgctgccggtactgcgtacgcagctggccgaaagtggcattcagttagggcaaagcaacatcagtgacgaaagctttagtggtcagcagcaggccgcttcccaacaacagcaaagccaacgcacagtaaaccatgaacctctggcgggggaagacgacgatacgcttccggttcccgtctctttacaagggcgcgtaacaggcaacagcggcgttgatattttcgcctaa

SEQ ID NO: 37883 - DNA, 444 bp, Escherichia coli; identical to SEQ ID NO: 23792

SEQ ID NO: 37884 - DNA, 1374 bp, Escherichia coli; identical to SEQ ID NO: 23793

SEQ ID NO: 37885 - DNA, 687 bp, Escherichia coli; identical to SEQ ID NO: 23794

SEQ ID NO: 37886 - DNA, 996 bp, Escherichia coli; identical to SEQ ID NO: 23795

SEQ ID NO: 37887 - DNA, 1659 bp, Escherichia coli; identical to SEQ ID NO: 23796

SEQ ID NO: 37888 - DNA, 315 bp, Escherichia coli; identical to SEQ ID NO: 23797

SEQ ID NO: 37889 - DNA, 603 bp, Escherichia coli; identical to SEQ ID NO: 37717

SEQ ID NO: 37890 - DNA, 315 bp, Escherichia coli
atgggtaaaccaacatttagatcattttacgatgtggtccgggagcttgaggatgtatatggccataaagagctatggctgtattcaggagcggcatacgcaacgccaacagaaatgattaacgccagacataactggaaatcgccaaaaatcctgaaacgtaacggaagaatggttgcagaacgaatggataactcggactcatggcaactggttggtgactacaaaaaaccgctgttccaacattgtgctccgccctggcaatcctgtcagatagatgactattttaaaggctattacattatcgccccctga

SEQ ID NO: 37891 - DNA, 780 bp, Escherichia coli
atgggaagtatgaaagaactgctgtttgaaatgcaggaggaacggcgtgacgaatggattgcggaaaattatccggatgctgaggaaggaactcctgaatgggatgcggcagcgcaggaatacagctggtttcaggactggatggaagaggcggctgagcagcaatattttgaggcttcgcttgccagtattcctgaccgcctgcaggatgcaaaggctgaactggatgagttagagagcctgatgcagttcaaccaacccaggatcgtagagcggatggcttacgttcattgcgtgagtgtactggacagctttctgatgtacagcgcaagagcacttcttagtcatcccccgcatttacagaagttcctgcacgaggctgattcgttggttcctaataaggaagacagaagaaaattacttgcttccaaatgggtcgagcaggagccggataaagacactcctgagaaggtttatacctggcgagctcagtctcttgtagcgaagaagacatttcagagccacaaagtgataggttggtatttttcaaggatgctgacaacgccacatgagtggccattggaggagattaagggtgtaatcaagatccgaaacgcactggtacaccgtaatggagttaccgaatctcttgaacccgtgtatatcagttcggggagtgtgcagaatgctatctgcacggtacgagcatttattaccgtggcggctgaaacccttctgcaggaagatgcactatacaggacggatgatggcatattctga

SEQ ID NO: 37892 - DNA, 1968 bp, Escherichia coli
atgaagaaaaaaatcatattagtggtttttttgttgcttattctcgttgcttgtcttattggcggtaattatcttgggggatatgcagcattaaaatattcagggttgagtattgacatgttgcaatggaatacatttaataatgtcattacacaatttagcggaaaacctgaatataaaaaattggtcgcggttacatgggctggatttgccgcaccatgtgcaatctttattggttttgttgttattgtcatagtcggactgatgccaaaaaaagttatttatggcaatgctcgtcttgctactgatatggacttggctaaatcaaccttttttccaacagataaagagttaaaagaagcaagattaaagaacagtaaaccatattgctttccatctattcttattggtaaacagtttaaaggaaggtttaaaaacaaatatatatatttctttgggcaacagtttttaatcctttatgctcctacgcgttctggtaaaggtgttggtattgttatacctaactgtgtgaattacccggattcgatggttgttctcgatataaaactcgaaaactggtttttgtctgccggatacagacagaatgtgttggggcaggaatgtttcctgtttgcccctgcggggtatgcagaaaatcaacaggaggcgaaaaaaggtaatatcagatcacatcgctggaatcctctggactgcgttaatcgttctgatattcagcgttctggagatttggaaaagattgccgctatgttgattccggcaagtgatgatcctatctggtctgattctgcgcggaagctcttttgtgggcttgctttatatcttctggataaggaacgcttccatcttcagcaaaagaaaaagggtgttgctgatgtaccagatgttctggtttccatgtcggctattatgaaactctctgtcccagaaagtggtcagaagttatcagcctggatggggacggaaatagaccagaaagaatacctgagcgatgaaacaaagagtctgtttcgtgaatttatggcagcgccggagaagacacaaggaagtattattaccaacttctcgtctccattgagtatttttaagaacccaatcacagcagcagctactgatgcaagtgattttgatgtgcgaatggtcaggaaaaagcctatgtcgatatatcttgggctgactcctgatgcattaattactcactcacggcttgtgaatctatttttctctatgctagtgaatgagaatacaaaggagcttccagaacagaatcctgagttgaaatatcagtgtcttgtccttcttgatgaatttacatcaatgggtaagtccgaaattattgaaaaaggtgttggctttaccgctggttttaacctgcgattcgttattattttgcagaacgaagggcagggtaaaaaagatgatatgtatggcactcacggttgggaaactttcgttgaaaactcggctgtagttctttattacccgccaaaggctaaaaatgaactggcgaaaaagatctctgaggaaatcggagtcagagatatgaaaattatcaagaaatctgactcacggagtggtggcaaaggtggtagttctcgttcccgaaatcatgaaatagtcagccgtgctgtattactgccagaagagattgtcgagcttcgggattataaaaataaaatgggtaatatggctgttcgtgaaatcgtaatgagtgaatacactcgcccatttgtagctaataaaataatctggtttgaagaggaggagtttaaaaaacgagtagatatagctaaagaaaatccggtagaaatgcctgtattgttcgatgaagaaatgagaaatcagattctggaacaggcaaaaatatattcagatgatattagtatgttttctgatgttatgactaaaccagatcttgagacacacgatctggaggatgtttctgaataa

SEQ ID NO: 37893 - DNA, 129 bp, Escherichia coli
atggaaatgaaattttttgaagtgaaagaaggttattatactcttacaacagaagaggttgtacacttaaatgctgtggatgctatacgtctgaaagtgtttttagcaaagtatttaaacacccaataa

SEQ ID NO: 37894 - DNA, 279 bp, Escherichia coli
atgtctgggcctctacagatatcttttgattatgaagtaaatataggaggggaaataatcaaagatttttataaggaaatcattccgggaataaaaaaagaagattttaatgaggatttatcacgcaatcttattaaggaaaaagttaacgaaataattcgttcaattggtaaacgtaatccaaatctatttcctgatggtgagcataaagtacattttgaaataaacaatcctgaatacaaatttctctgtgtagatattaacgtcgaatccaaataa

SEQ ID NO: 37895 - DNA, 213 bp, Escherichia coli
atgctcacccattttttgtttgtacccaatatcagcccctggcagggatggctttttcttactgtcgcagtaataaccattgctgccggatgtatttccatctacgaaaacagaactcacttctcatggacagatgcggttatggttctgatttattgtggtctggcagtttttttagctgtttgcggtatacgggcgcttgggcttatctga

SEQ ID NO: 37896 - DNA, 1425 bp, Escherichia coli
atgtgtataagagacagagctaaaggtgttttagtttataagaaaataaccactcttgaacgactggatgatatgtatgctgcgggacgtagttttatcaaccagtatcataaagactggaatgaggataaaaatgctatgaaagcaattgataaactcaaaaattatcttaataaagaaaatgaaaacagcatttctggggcggaaattgagctatcactggaaaaagctgttcaggcacaaaagcgattgcaggaactgcaacaaacaaataccaggttgaaagatcttgtaatggataaacaagaaagcaagattgtttatcgtgaccaaaaaacagagtcccccgtatttactgataagggtgattttgttgttgccggaaagaatccttctaaagaagagatcggcatcatgctggagtattcgaaagagaagtttggcggtgtgctcaaacttaccggaagcgaagagtttaagaaagaatgtgctcttgtagcggcagaacgggatatgaatattattctgcgccctgagaaataccaacagatgcttctggagcataaagcggagcttgagtctaaagcaatgcagcagactgaacaggaatcccagcaacaaacccaggttgataatgaaatcagcaaggcagatgttcatcagaaccaggcgccagcggaagaggctaaacaagaaatttatctggtcagccatacaaacgtacacgaacagaacgaaggggtcattttccattcaaaagaggctgcttacagctactttgaagaagacaagaaaatggcaatcgagaaatacgaagcgaacccatatttgggaaatggatttgaaggtgcgttgcttgtttccaagaccatagcggccagcgagctgtcctcttatccagaaaaactgacagcagaatttgataaaccctacgaaatcctggctgattcatacaaggaatacacccgtacacctgtatatgttgtttcgttcccgaaagatgaactcaaccagcctgttaagaagttcgaatcactttctgaagctattgagtataaaaataatactgcaatgcttcatgatctggataaaagggaagttattgttaaatctgtaaccagagaagaattagggatgatgggagagcaacttgccattaaagaagcggaacctgttccacgacatgaacttgaaaaagcacaaggtcgtgatgtcaatgagcaggatggtttgatactggatgccattgatcgctatcaggctaaatttgaagctgagggattagcatttaaccgtcaggagactgaggccgaactgttacatcacgatttcactcgcgaagtagcagaagatcgtcttgaacaacagttcgtacaggaaaaagcagaacagcaaaatcagcagcaatctgaacaggaacgataa

SEQ ID NO: 37897 - DNA, 315 bp, Escherichia coli
atgaaagtggaagatttacaccaccatttgagttcttacaaaaagagcattgctgaattttcaaaaaacacaaagccatttagtaaaagtacagcaatagcattatgtgtagcctgcaccattggaatttcagccgctttttctggtgcgttctggtatgttgcgcaatcacagaaagaacatgcgctacagttctatgcatccggctacatggatatgcaaaaactaacaaaagaaacgatctctctactacctaaagaacagcaaaaaattgcaaccgctaagttaaatgcactggaaagccgcagtaggtaa

SEQ ID NO: 37898 - DNA, 438 bp, Escherichia coli
atgtttttttctgtgggtgtcgaaacaccgaaagatgaccatacggcatatggtataaccgttccggcttttgatcgttttgattttggctgtgtctctgctgccgatactcaatcagaaattcctgtgatggcgcgagaagcgatattggctatcgtggaagaaatggttttaagtggttcttattctgttgatgatattcatgatgacggctgtttaacatatgccgcaaatcaggactatagtcactgcgatagctggtttgtaattgatgttgatttgtctgaaattgaaggtaaacaacaacgtattaatattgcgttgcctgatgtgttgattcgtcgtattgatggatttgtcagagaaagtggcggtgtttacagagatcgtagccattttcttgctcaggccgcgcggcatgaactttcatataaatga

SEQ ID NO: 37899 - DNA, 279 bp, Escherichia coli
atgcattttacaacttttctgaaaaaacatttcgatatagaaaaaattgttggcacttctgattctggaaatgataccgaatctatttatgtttatgaaaaaggaaatgattgcgaaccgttgtttattctgcgtgagtcatggataaatgcagaaattaagaagtgtgggatatggactgttggtaacatatattccacgttggaacatggaaaggagtacaccgaatctgaattaagagaaatgattaagaaaggaaaggtaactagcaaatactaa

SEQ ID NO: 37900 - DNA, 330 bp, Escherichia coli
gtggaaacattaacttttaataacggcactgtttctgttggtgatgtgtttgtatcttcatggggatatgagcaaactaacgttaatttctaccaggttatttctgttcacggtaaaaaaactgtcaccgtccaggaggttcgcgcttctgttcttctgactcgttcaatgagtggatataagaccccattgcttaatgatttctgtggggagccattaaagcgccgtgtgcgtgattgttacagcgtacctgcaatagagattgaatcatttgagatggcctataaaactcagccagaagagaagcacgaatttacatcatattactaa

SEQ ID NO: 37901 - DNA, 258 bp, Escherichia coli
atgaacgagaaaaaaatgttaactgaaaatacaccagaaaacattaaacgtctgcggcaaaaaattggcctgacgcaaagagaatgtgctgaaatattcagcatgaacccgcgaacctggcgtcgcaaggaagaacctgccggaactgcaagcggtacagcacttacaccagtagagtttaaatatcttcagcttttagctggggaacatcctgaatacgtcctgcgcaaaagggataaacctaaatgtagtgaatga

SEQ ID NO: 37902 - DNA, 267 bp, Escherichia coli
atgaaggtacgaaaaggtgacaggcaatattatttgaataaagaaggtgatacgtttcatctggtgaagcgagtaaaaactttttctaagtctgcgactttagggaaaacaaaagcgacagtgataactgttgccgatctgatttttcatgaagatgcattcgacactatcgactttaccagaggcgggttaagagagaacgacaaagaagttgtttctatgatgattcaggaaatgaacaatgaacgagaaaaaaatgttaactga

SEQ ID NO: 37903 - DNA, 225 bp, Escherichia coli
atgaaaaaatcaacttttcctgttatcgtttctacgactggtcatgcgttttctgttgcgcgtgtgacgctttgcactatctgcctgaaacatgaaaaaacaggcaaggattatgttgttattttcacggatagcaataatatccgcgattataaaacgggagtagtcccgtgttttggagagctttaccaggaagatgtcgatttgattactggaaaaagttaa

SEQ ID NO: 37904 - DNA, 225 bp, Escherichia coli
atgaaagttcttattggtaatatcaatattcgtaatcatcatatgcttcttgaattagctggaattgcaggatttgccgggagcgttgaatatacaagtgaaatatccgcaagtattgaccttatggatgattcttttagaagtaaagttggtataagcgatagtgaaatattaaagatgttagaggcatttgttgaaaataaattttcaataaaactcgtttaa

SEQ ID NO: 37905 - DNA, 324 bp, Escherichia coli
atggaaaactacgctaaatttgttgctactgaaattcttaatcagcttggcggaaatcgcttcattgctatgactggcgcaaagaactttgcctattttgatgaagatggtgaatgtggtcttagttttcgtcttccttcaaaatttgcaatgaatggaattaatttagtaaaaatcaaattaaccttttccgatacataccaggtgaccttttctcgtgttcgaggagcaatggttaaagaagtatcgacatttgataatgtttattgtgatcagttggaatgtttgtttaacgaacaaaccggacttgcaaccagattgtaa

SEQ ID NO: 37906 - DNA, 258 bp, Escherichia coli
atggttcttggcgtttttatctggggacaaatttatggtcaaagagggacagatttatggtcaaaaggggacagatttagtgtggataacttttttatacacaggttgtggataacttttaagagattcgatctggattcattattaatccgaattggattagtgatttacatcacattttctgttttttggattgatgtgcttttggggatggacagccatctgatttaccacttacctaccttaattgggtggtag

SEQ ID NO: 37907 - DNA, 1005 bp, Escherichia coli
atggctttaagaaataataaaagaaacgattgtaatgatgttcaaagtttattgacacagggaaaccagttattggaaggggcgtatgatataacattaattgagatgcgccttctgtatttggcactcactaagattgatagccgtaaaccacagcctgcaagtgaatatacactgtttgcaaaggaatatagagacgcattttctttggattcgaaaaattgctatgagcagttaaaatctgccgcaagttctttaggttcaaaaccaatagttacttatgagtggaatgaaaccaaaaaaagaattgatgccgttaaacgattttggttttcttcaataagatatggtgttggaaatagtgaaagcgatataaccttgcgtttctctgattcggttagccaatatctttatgaactgaaaagcgaatttacgcagatgaatcttgagcatatggtgaaacttgatacaccattttcatttaggctttactcgtggttgtataagtataaaaacctaagtagaaataaaaaagagagtggtgttatatcgactgatccaataactatcgagtggatgaaagaacgtacagggctaacaggaaaatatcctgtatataaggactttaagaaaagagttcttgatcctgctgttgatattattaatgccaatacaaatttaagcgtaacatatgaaggtattaaatctggcaagaggatagaatctgttgtattcacatatcttgttgagaacgaaactacgcatggtaaaaaaatggcagttaagcctttgcgtcctagaatgccatctaggccacgggtagttaaaggaagtctggctgaagctacttgggcaagaaactgtcttaatgttatgagagggtatcttgttgctttaaaagaatatgatcatacattaaagctatcaagcagtgatgtagccaaagttgtggtgtggtgtgaaataattggagagccgtttgatgaagatttctggaaaaaataa

SEQ ID NO: 37908 - DNA, 339 bp, Escherichia coli
atgatcccaaaaagactaaaagaagcacgagaagctgcaaatttttcacaggaaaaacttgctcaactagttgatattgaatcagtaaacagtcgttcaagaatatcgaattatgaaagtggaagatttacaccaccatttgagttcatacaaaaagtagctaaggttttagattatccagaaggctatttctatacatcagatgatgattttgcagaactgctcctactaattcatagaggccattcatataatgaactaaaaagatcgataaaagtcataaatgaagcaaaaatattagtggaaaaattacaagattgcttaaatacaaataattaa

SEQ ID NO: 37909 - DNA, 288 bp, Escherichia coli
atggcctattacgagaatatgcgttatgacttgcttaataaaatttttcctggcttaaccccagtgcaagcacagtgtgtattaatgtattcctttgggatgagttcacttgaaatatcagggtgcgttggtgtttctcgccaaatgattgataagaacttacatgcggcagcgaaaaaaatgaatgttaataatcttattgcacttaaacctgccgttgtaattggtattttacttgaggtattagcatctttgcctgtgaaagatgatttgactaatgaagattaa

SEQ ID NO: 37910 - DNA, 234 bp, Escherichia coli
atgaatatgaagaaaacaatgctaatcccgttaactgcattgatattcattttaaccggatgtaacgaaaaggtttacgatgttgattattatgttaataacatcaaagaagcagagcagatgcaaaaaaaatgtgagagtggagaagtagcaaaccagaattgtgaaaatgcaagaaatgcattaaaacaaataaacagaaagaaaaccatctcaagcatgtttgctcactaa

SEQ ID NO: 37911 - DNA, 603 bp, Escherichia coli
ttgtttatcacacacaatgcaattgctgcaattcctgttgtcgatccggcatcaatcgcaaaaacagttgaagaaggtgtaactagagcaaaagaagcagcggcaaacttacaacagttgaaagaacaatatgagcaaaccattaaatatgcagaggaacaaaagagacgcttagaaggatttactgattttagtaatggttttgatagtgctgaaagttatatgaaaacaagactttcagatctaactgaccactcaaaagaaaacgtgaactctttaagagataaatacaatctgaaatctgaaagcaacttagctcaaaccagatatgatagtatattaaaacaaattgatttctatgaaaaattcaataaatctttactagaaagagctaacaggatgcagaatttacagaattctttttctcatgcaaatacaccacaacaaaaggcagatctggctaatcaactgaatacagaaaagttgacattggaaatgcaaatcaaacaatatgacattgcagaacgtcaattggcatctcaagcagccgctgagtatgagcaaaacagacaatccacaataagtgccatgttcaaacattaa

SEQ ID NO: 37912 - DNA, 246 bp, Escherichia coli
atgatatgctgtgaatctcttctggcacttcgtgccgctctgtatcgccgtgccatagcccgcgagctggaagggttctatctgcgccagcatgggcagcaaagagggctggaaattgcctgcgcgttgctttcggatctgatggagtcggggccgcttaaagcctgtccggttctctcactgctcggaatgacggtcatggatgaactttgttcccgtcacctcaacaaaccagcgctgcactaa

SEQ ID NO: 37913 - DNA, 1470 bp, Escherichia coli
gtggtgaccaaagactacacctttaaacgccccggctgggccggacgttttgaccaggaaggccagcaccaggattaccagcgcacacagtatgaagtgtatgactatcccggacgtttcaagggcgcccacgggcagaactttgcccgctggcagatggacggctggcgaaacaacgcagaagtggcgcgcggaacaagccgttcgccggagatatggccgggacggcgaattgtgctgacggggcatccgcaggcgaacctgaaccgggaatggcaggtggtggcaagtgaactgcacggtgagcagccgcaggcggtgccgggacgcaggggttcaggcaccacgctggataaccattttgcggtaataccggcagacagaacatggcgaccacagccgttgctgaaaccgctggtggacggcccgcagagcgccgtcgtgacgggaccggcaggcgaggaaatcttctgtgatgaacatggccgcgtgcgggtgaaatttaactgggaccgctataacccgtcaaaccaggacagttcatgctggatccgtgtggcacaggcgtgggcaggcaccgggtttggtaacctggcgataccgcgtgtgggtcaggaggtcattgtggacttcctcaacggcgatccggaccagccgatcattatggggcgtacctaccaccaggaaaaccgcacacccggtagcctgccggggacgaagacgcagatgaccattcgttcgaaaacctataagggcagcgggtttaatgaactgaagtttgacgatgcgacagggaaagaacaggtctacatccacgcgcagaagaacatgaacaccgaggtgctgaataaccgcaccacggatgtgataaacaaccatgccgaaaaaataggtaacaaccaggcgatcaccgttaccaataaccagatcctgaacattggcgttaatcagatacagacggttggtgtcaaccaggtggaaacggtaggcagtaaccagattatcaaagtgggatcaaaccaggttgaaaaggtggggatcattcgtgcgctgacggtgggtgtggcgtatcagacgacggtaggcggcattatgaatacctcggtggcgttgttgcagtcctcacaggtagggctgcataaatcactgatggtgggaatgggctacagcgtcaatgtagggaataacgtcaccttctcggtgggcaagacgatgaaggaaaacaccggacaaacagcagtttattctgccggtgagcatcttgaactctgctgtggtaaggcaaggctggtgctgacgaaggacggaagcatatttcttaatggtacgcacattcatctggaaggggagtcggatgtgaacggtgatgcgccggtgattaactggaactgtggtgccacacaacctgtaccggatgcgcctgtgccgaaagatttaccccccggaatgccggatatgcggcaattttga

SEQ ID NO: 37914 - DNA, 135 bp, Escherichia coli
atgagagcaactattgcactcttattaatctgttttctttcttcttgttcatcaccgcctcaacctaaacaagcggagggcggatggtatgaattgaatacaacaattcaggatgtgaaagcgaggacgatgtaa

SEQ ID NO: 37915 - DNA, 2373 bp, Escherichia coli
atgcaggttgcacaattaaaagatagcaagaataaaaatgtggcatccatgtatcctgagtacatgtaccatatttctgatagtgttgtttatacacttgacagaaaaatgttggctacaattgctattcaggggattccctttgaatttgcatcagattcttttcttgaaaactctttcaatggtatcaaggactatcttgtcggggttggcaaagaaggtgatgtgtatttgtggacacattttataaaagagaagatttatcttgatgaatcttatgagttttccagtaaattcttaaatttatttgcggagaaatatatttctttgttcaagggggatgatttctttaagtccacctggtacatcacgttcggtgtttcttataatgatgttgataaggggcttgagcgcctcgaagatattatttctcaggctatggttgttcttaaacctttttcagcctggttgctcaaggtagacaaaaactatgtgagtgaaacagcggattatttgtcatgcttaattaataaaaagcatacgattattcctgtatcatcaacaccattatatgaatcaatcgcagatagtgactggtattttggtaatgatacgctagaactgcgtaataatgagtctgatgataaaaaatttgccacaaattatgttttaaaagatttccctatgtttaccactcctggtcaatgggatttcctgttaaaactaccgtatgaatttatcattacgcaatcatttttgtttgaggctccagctaaaaccgtgcgaaaaatagactcccaacttaataaaatggggtcaactggtgatgctgctaaatctcaacaagaagaactgatagcagggaaagattttgttaccagcggtactaatctttttggttcatatcattgcgtactaacagtatttggcgatacggcagaagctgcccgtaagaatggtatcaaagtatccagtgagtttattacgacgggtaaaggattccgtttttctcgtgcaaccagtgccgcaccttatgtgtttttcagtcatctgccaatgaataaaacaagaccactgagtacgcgaagaacggcagccaatcttgcctgtacgttttcactgcataattattcttcgggcaagaaatctggaaatccgattggtgacggttcagctttaatgccgttaaaaacagtttctgatggtttgtattattttaatacgcactacagcgaccctaataaaaacgtcaccggacagagaattgccggacacgcaatgattcttggagccacaggtactggtaaaacgacttttgaaggagccgcggctggttttttacagcgttttgatccttacatgttcgttattgactataaccgctctacagaattatttgttcgtgcgtatggtggtagttattttgctctacaggaaggtgtttttactggtcttaatccgtggcagcttgcggaagatgaatcatcaccaatctggaagcgtttgttagcgtttctgaaatcgcttgcaaaggcatttgttcgggacaacatggggaacccctgttctgaccaacaggcaatagaaatggatgcggcagtagagagtcttatgactatgcctgtccagttgcgccgaacgtcagcattgctccagatagttaacgatagtgaactgcgtatcagacttgctaaatggtgtaaaaatggtgcgtattcctgggcaacagattcgccagagaacacttttaatccgatggattataaaaaggtaggttttgacacaaccgttatccttgaaaaggtaaatggtgaaacgcatccggcgtgcgaacctctgctggcgattttatttttctataaaacgcttatgcaacgtgacggaaagctaatgcttactattgtcgaggagttctggatgcctgcgaacttccctctgactcaggatatgatcaaatctgcgttaaaagctggacgtctgaaaaatgaaatgatgtggctaacgagtcagtcgccagaggatgcggttaactgtgcaatttttgcggctcttgttcagcaaacagccacaaagattttgttgcctaatccagatgctgaatttgatggttataaaaaaattggtcttgttgaaaaagaatttaagaaattaaaatctttatcaaaagaatccagaacgatgttaataaaacagtctggttcatcggcatttgcaaaaatggatttgtacggttttgatgactttcttcctgttatatcaggaacgacggaagggattgttctgtgtgaacaagtaagggaagaacttggtacagatgaacccgatatctggattcctgaatttattaaacgtattaaggagcaaaagaaatga

SEQ ID NO: 37916 - DNA, 321 bp, Escherichia coli
atgaatgatacagagaaaccaaaggtcgtctttctttcctataacggcctgaatcggcctgcgatggttatgggtgttccattgatgctttttttgtctatgggatttcttgccgtgtttggtggttttggatgcatgtttatgtggggagtttctggactcatatttcctgcattatgcttcttgtttctgttcattgttcgcatcatttgtgaaaatgacccaaacgctcttagtgttatgaatctccagttgaaggggtattttcttaaagtgatgcacagagactcaattattggtttttcctctgtggagcgttga

SEQ ID NO: 37917 - DNA, 315 bp, Escherichia coli
atgtttttggagattattcgaatgaataagtttgctaacgtaaatcgttttgtttttgcattatttttcatggtgttttcagggtttgcggctgcggcaggtggccttgattcagctactaatgctcttacgaacgtgaaaacctggctttttacctttgttggtattggtgctcttgtttatatgctttattgcatcctgatggcctttatggaacgtaaaagctggggggatgttggtatggctcttggctattgtgctcttgcaggcggtgcagtagtcggcggtacgtgggcgctggaattgttccagtaa

SEQ ID NO: 37918 - DNA, 612 bp, Escherichia coli
atgattctttcaaccgtcgctctgatgatgttatttagccaatgtgctccaacggtatcgccagtaacgctaaatgctattgtgcaaacagagtcaagcggaaatccttatatagttgcaaatatatctgatggcatatctaaatcctttagcaataaaggatcggcggtagcgtacttgaatgctcttgcaaagagtgggaaacatttcagcgcaggactgatgcaaatctatagcaagaattttaaagcacttggtcttgataatgaaaatgttttcgacccttgtaaaaatattaaggcaggggcagaaattctgacaaaaaactatcttgctaaaaaaggaggaaatgaacaagagaaccttttgaagtctttgtccgagtattattcggggaatagcacaagaggtttcaagaaagaagctcaatttaataatacgagttatgtcgaacgagttatgaagaacgcttatgttgttcctgagttgcgagtagataaacctgaaaatgcgaaagcaacaaaagaacagagtgttcaggaaaaaggtaatcaaagttttgtttcacactcccaggactgggatgtttttggagattattcgaatgaataa

SEQ ID NO: 37919 - DNA, 762 bp, Escherichia coli
atgaatacttcaatcaattttatattgcaaggtaaaggcggtgtaggtaaatcttttgccacatcaatactgtctcaatattttattgatgaaaaaaaacttgaaaatgttgttgtcgctgatacagacccggtaaacacaactacagcaaaagtaaaacgccttaatgctgaaattatcaagattgtagaaaataacaacattgtgcaatcaaaatttgatagcatgtttgaatctattcttgaaggcggaaacattaatttcgttattgataatggtgcttctacgttcttgccattacttcagtatttcgatgataactgtgtaatggatatgttcaatgaagttgaacaggatgtttatatccatactattattgttggtggtcaggcacaagcggacacaatagaaggttttgaaaatatcgttaaacttgtaaaaggtacgaaagttaaaataatcgtatggattaatgagttccagggcgaaccgatactttcagggaagcatataactgaaacaaacttttttgaaaaaaataaagacgttattgctggcgcaatattgatcaaagatcgcaaaagcgatgcttttgatactgacataaaaaaattaacagccaattcaatgacactgactgaggcgcttgaatcgaaagagtttggattaatggctaaatcccgcctcaagcgtgtttttaacgatgtatatgtacagcttgatgcaatctatgaccctgaaagtgtagaggccaatgcatga

SEQ ID NO: 37920 - DNA, 408 bp, Escherichia coli
atgcaaagcatcgacgcgttcttatcaccactttgtgaagcgataagaaatgaaaaactaaaatcaaaacaagctgcattcaatctgtaccttcaagagatacttgaagccaagaaaacatatacctgggagcagatatgcacatatataaatcagaatactgattcgacgctggctgtacgtgcttatagaaatatggttgaacgagcaaaaaagaaacgcttgtcacaggaaaagaaaaataacgaatctggagttgcaaacaagttgccgcctcaaggtgacaaatcgactcaaacaacaaaagaaccagcgataaaaggttttttctctcaaagagaaaaagagagaaaactggaatatgatgcttcggcaacaatggcaaaatttgaagacaaatacaaataa

SEQ ID NO: 37921 - DNA, 336 bp, Escherichia coli
atggcgatagaaagaaaaaacgttatatcaatccggttaaccgatgaagaataccagccgttcaaggatctgctggagcatacagacattggcaaatccgagttttttcgcgcactgattctgaatcgtattagtgaattgccagtgaagccaaagccaacgacagattacaagcgttgtctttttcttatgaacaaaacaagcaataatcttaatcagattgcacatcgtttaaatctggatcataacaagggaattatatcatcttcattgtatgaaagggcgctcaataccttgataaatatccgtgatttattgcagggcgcactaaaatga

SEQ ID NO: 37922 - DNA, 303 bp, Escherichia coli
atgacaaaagatacaaacttaacacaaaaaattctgaaagaacgcaaggacggtcttgtggtaacaagttcagtattgaatcaacttccagattcagtagaactaaaacaagagtcggcgtgccacgtttgccccaacgcggtttggtttacggaatccacgggagaggaaaaccgcccgaatctgtccgtattttgcaggataatgaacagcgtaatctggcaaacagaatggaaaacagatcgcattctgattcagcaatgcgacggaatgctgatagacgattctcagaacgaggaataa

SEQ ID NO: 37923 - DNA, 204 bp, Escherichia coli
atggtttggatgattcgggagcgtcatctcgtggacatcttcaattgttgcatagcgccgttcaggaggaaacaaatccgcaatggctttacctactgttgttttgccggaaccagtaccaccaacaatcaggaaattcaggcgatcattgaccgcctcacgaataaatttagcaatacttgcggcatcacccttacgcgataa

SEQ ID NO: 37924 - DNA, 1143 bp, Escherichia coli
atgaaaaatgaaagccgcagcaataatgatgtgggtaatcgtggtgttatcgaggttaaatcaaagaaatcctccaagaagatatttatcttgctggcaagtatctttggtatttttgttgtcgctgccatgattattaaaatgcttccctcgaaggaggtggagcaaactggccttgaaccaaaaaacgagacgttaatatctaattctcaggatggggcaagccttaattctgtgatgaaaacaatcatgcagaataagcagcgtgaggaaactgaacgcaagcaacgggaagaacaggcagaaaaagaaaagaaacaaaaaacagaaataaattctgataatgatagcactatgcaagcaatggcgatgcaggggcaatccagcagccattcttcatcgcagtctggcaatggacaggagaaagaaaggccattgactaaggctgaacgtcagattacaggagatactctggttaaaattgaaaccagaaatgaggataaacgttcggaaaaagagaaggattctctgcaaggggaaacttatgctgatggtacagtgagttttgccagtaacagacgttatttgctggctgcgggtacttcgctttcatgcgttttacaaacaaaaatagttacgtcctaccctggaataacgttgtgtcaactgactaaagatctctattcagataatggtgaaacattactggctcgccgtggcgctatgctgatgggagagcagaataaagtaatgacgcaaggagtggctcgtgtatttgttaactggactaatttaaaagatggcaatgttaacgtaaaaattggtgctcttggcactgatggacttggtgcatctggcctgccagcctggattgataatcatatattccagagatattcaggtgcgattatgttgtcattgcttggtgatggtatggatattctgaaaaacaccacacaaaaatcggggaataacagcaatattacctatgataatacatctgatacggcgcaggagttggctaaaacaacacttgagaacacgattaatattcctccaactgcatatattaatcagggaactgttttatcagtgattgttccgaggaatattgacttttctgtggtttacggagtgcagtaa

SEQ ID NO: 37925 - DNA, 780 bp, Escherichia coli
atgattaaaaagtcgggtcttatcggttgcttatctttactggctgtttgtgcatctccggcaacaattgcggcaacatatggtcaggggtcagcatttgactccaggattcaaagtgttgtttttaatgaaaacgatgttgttaatgtaagagtaaagaaaggtgctgtttcggtagttcaaatcgccaaagatgaaacgattaaagatgttggcctaggtgatcccgctgcatggaaggtgtccgttcgtgaacatactgtcttctttcgtccggcagtagaagacaatccaagtacgaacgttactattgtaacggataaacacacgtactcattgtaccttacggaagtgtccagtaatccgacatacgttttgcgatatgattatcctaaacctgtaacagccaaagtatttacggagaaaaaatatccctgcactgatggtggtgtaattaatggacactatcaattaaaagggagtaagagcattttcccttaccaggtctgggacgacggtacattcacctgtatgcgctggaacagtaaacaggatttacccgtaccttatcgtgttgatgctgatggcaatgaaaaccttgttaataagcatatggaaaacaacacaatggtattgcatgaagtgtctgataattttcgcctgagaataggcgatcaagttgttgatgtaagaacatcttcgacggttcctaaaatgtggaataaaaaaggcactacaaatggaaaggtgagggtggagaaatttaattatgaaaaatga

SEQ ID NO: 37926 - DNA, 486 bp, Escherichia coli
gtggataacaatacgggctatacagatattgcaccgcaattatcaggagcaaagcaaacctatcaggaagcggaaacaaaatataatcttgcgaagtttgttattaactatgagtcatacgactggcagactatccaggaaatgctggatacggtaaatgtcatgtctaataacaaagtgttctcacagtacaatacagctattcgtgcagataactcgccgctgaatgtactgaaagacagttataagattaaaacgaaaattaagtccgtcactttactgaagcctgatgttgcgcaggtcagattctcaaaaatgattctggactcttccggctctttggctcccgaatacagagttacagactggattgcaacggtcgcttttgattttaataaagatgttaagacggaagaacaacggcttattaatcctctcggatttgaagctgtcagctatcgtgtagacgcggaggctattaaatga

SEQ ID NO: 37927 - DNA, 345 bp, Escherichia coli
atgaagaaaaaatacgaactgggtgttaaagggataaataattacccggataagattactgttactgtggcaccggaaattggtgggtatccgtcactgttgttgccagatgtggcgattagtcttgaccgtactgaaggtgccacgctggagttttacgaagctgaggcgaaaaagcaggcgaagcagtttttcatggatgttgctgccgggttatgtgaaggggatggtccgttgccggaaaagcgccccgtaattttagaggcgcaggatgtgttgataacctacagaggaaaactaccgggaataattacgggttctctgaagactccaccgctggcctga

SEQ ID NO: 37928 - DNA, 585 bp, Escherichia coli; identical to SEQ ID NO: 23897

SEQ ID NO: 37929 - DNA, 159 bp, Escherichia coli
atgggaaataatttgttatcagcaaaagcgacactccctgtttatgatcgtaataacctggccccaagaattgttcatttaggctttggtgcatttcaccgtgcgcatcagggcgtgtatgccgatattcttgctacagaacatttcagtgactggtga

SEQ ID NO: 37930 - DNA, 1284 bp, Escherichia coli
atggatttccagttatattcgctcggcgcagcgttagtgtttcatgaaatattttttcctgaatcatcaacggcaatggcgttaattctggcaatgggaacctacggtgcaggttatgtggcgcgtattgtcggagcatttattttcggcaaaatgggcgacagaatagggcgtaaaaaagtgctctttattaccatcaccatgatggggatctgtaccaccttaattggagtgttaccgacctatgcacagattggtgtttttgcccccatcttgctggtgacgctgcgtattattcagggattgggtgcaggtgcggaaatttccggtgccggtacgatgctggcggaatatgcgccaaaaggtaagcgcggaattatctcctcatttgtggctatgggaactaactgcggaaccttgagcgcaacggcaatctgggcctttatgttcttcattctcagtaaagaggaactgctggcgtggggatggcgtataccgttcctggcgagcgttgtcgtgatggtctttgctatctggttgcgtatgaatctgaaagaaagcccggtctttgagaaggttaacgacagcaaccaaccgacagcaaaacctgcacctgctggtagcatattccagagcaaatccttctggctggcaacagggctgcgttttggtcaggcaggtaactccgggttaattcagactttccttgcaggctatttagtacagacgttattgtttaacaaagcaattccaacagatgcattgatgatcagttcgattcccggctttatgaccattccgttccttggttggttatccgataaaattggtcgccggatcccgtatattattatgaatacctccgcgattgtgctggcatggccaatgctttctatcatcgtagataaaagctatgccccgagcaccattatggttgcactgattgtgattcataactgtgcggtgctgggattatttgctctggaaaacattaccatggcagaaatgttcggctgtaaaaaccgctttacccggatggctatttctaaagaaattggtggtcttatcgcttccggttttggtcctatcctggcgggtattttctgcaccatgacggaatcctggtatccgatcgccattatgatcatggcatattcagtgattggtttaatctctgcgctgaaaatgccagaagtgaaagaccgtgatttaagtgcgctggaagacgctgcggaagatcaaccgcgtgttgtaagagctgcgcaaccttccagaagtctgtaa

SEQ ID NO: 37931 - DNA, 891 bp, Escherichia coli
atgattggttttggtcactgggaatatgattttaaaggctataacgatgaagccaacggctcgcgcgacaacaagacccgtctggcctatgctggtttaaaaattagtgaatttggctctctggactatggccgtaactacggtgtcggctatgacattggttcatggactgatatgttgccagaatttggtggcgatacctggagtcagaaagatgtcttcatgacataccgtaccaccggtgtagcaacctatcgcaactacgatttctttggcttaattgaagggctgaactttgccgcgcaatatcaaggcaaaaatgaacgtactgacaacagtcatctttatggtgctgactacacgcgtgccaacggtgacggtttcggtatctcctcaacttatgtttatgatggctttggtatcggagcggtgtataccaaatccgatcggacaaatgcgcaggaaagagccgctgctaatcctctcaatgcctccggtaagaatgcagaactgtgggctacaggtataaaatatgatgccaacaacatctactttgcagctaattacgctgaaacattaaacatgaccacctatggcgatggttatatttctaacaaagcacaaagttttgaagtggtggcgcaatatcaattcgacttcggcttgcgcccctcactcgcttacctgaaatcgaaaggcatagatctgggccgctacggcgatcaggacatgattgagtatatcgacgttggtgcgacgtatttcttcaacaaaaatatgtcgacctatgttgattataaaatcaacctgattgatgaaagcgactttacccgtgccgtagatattcgcaccgataacatcgtcgctacgggcattacctatcagttctaa

SEQ ID NO: 37932 - DNA, 546 bp, Escherichia coli
atgattggccaccgatgcgccaaagcagcacagcagaatatcgccaggctgtgcggaaggcagggaaatcctgtaaaaaccagtcgcctccatattgtccaggtacaggttctgaccattgcgccaccagtcatcctcacgctcaaaatccggcatatcaattcccgccagatggtatgcatcccggaacagcgtgtaacagtccgtcaccccgtgctcaaagcgccgtcctgtcagatgtggcacacagcggaatttatgaatttccccccggcagaccagccaccaggacagtgcactttttatctgcagccgccggtcggcctcgctcagccagggcagaccaccgggatgactgtggaccagtgccacaatctccccctgcatctctgcccgcagccagtcttccggtgcaatacgaaaatacgcctccggctctgcagagatattcacacaagggatataccgctccccctccggcgttctcaccacgaagccgcacgactccgctggcgcacaccgccgggcatgcgccagaatcgctga

SEQ ID NO: 37933 - DNA, 315 bp, Escherichia coli; identical to SEQ ID NO: 24016

SEQ ID NO: 37934 - DNA, 447 bp, Escherichia coli
atgcagtactggactgcagtaagaaatataattgatgacactaatgaagtgaccattgatttatcttataatctggcaatcacaaatatcgataccagtgatgaacatcttgtagaagtaagcgataattcagaaggtaattatataaaagacaatgactcaatgtctattcgttatagatcaaaatattattccagagattccgccttaatagaagaagaaacaatattttctgacgcagaactaaaagctattctgcctatgcgtcgcatgtacggggttagtgactataagtcaaattcctcttctctatcctcacactcgggactcaaggacccaacgggcacacccgtctgttattatattcataatgagagtaaaccttccttaggttatggtccaacatccaataattggttaagccaatcctttacaacagagttataa

SEQ ID NO: 37935 - DNA, 330 bp, Escherichia coli; identical to SEQ ID NO: 24045

SEQ ID NO: 37936 - DNA, 366 bp, Escherichia coli; identical to SEQ ID NO: 24026

SEQ ID NO: 37937 - DNA, 342 bp, Escherichia coli; identical to SEQ ID NO: 24027

SEQ ID NO: 37938 - DNA, 465 bp, Escherichia coli
atgactaaagtcgctcttattacaggtgtaactggacaagatggatcttatctagctgagtttttgcttgataaagggtatgaagttcatggtatcaaacgccgagcctcatcttttaatacagaacgcatagaccatatttatcaagatccacatggttctaacccaaattttcacttgcactatggagatctgactgattcatctaacctcactagaattctaaaggaggtacagccagatgaagtatataatttagctgctatgagtcacgtagcagtttcttttgagtctccagaatatacagccgatgtcgatgcaattggtacattacgtttactggaagcaattcgctttttaggattggaaaacaaaacgcgtttctatcaagcttcaacctcagaattttttatcctcgttccccttatgcagttgcaaaactttacgcatattggatcacggtaa

SEQ ID NO: 37939 - DNA, 546 bp, Escherichia coli; identical to SEQ ID NO: 37475

SEQ ID NO: 37940 - DNA, 309 bp, Escherichia coli; identical to SEQ ID NO: 24051

SEQ ID NO: 37941 - DNA, 309 bp, Escherichia coli; identical to SEQ ID NO: 37795

SEQ ID NO: 37942 - DNA, 309 bp, Escherichia coli; identical to SEQ ID NO: 24051

SEQ ID NO: 37943 - DNA, 249 bp, Escherichia coli; identical to SEQ ID NO: 37349

SEQ ID NO: 37944 - DNA, 372 bp, Escherichia coli
atgttatcttcattaaatgtccttcaatccagcttcagaggaaagacagctttatcaaatagtacacttctccagaaagtttcttttgctggaaaagaatatcctctggaacctattgatgaaaaaacccctattctttttcagtggtttgaagcaaggccagagcgatacgaaaaaggagaagtaccaatattgaataccaaagaacatccgtatttgagcaatattataaatgctgcaaaaatagaaaatgagcgtataatcggtgtgctggtatcagcatgtatgataaaaaactatctgatatttaccttgaaaatatccataaacaagaatcataccctgccagtgagagggataattatctgttag

SEQ ID NO: 37945 - DNA, 828 bp, Escherichia coli; identical to SEQ ID NO: 29807

SEQ ID NO: 37946 - DNA, 570 bp, Escherichia coli; identical to SEQ ID NO: 37228

SEQ ID NO: 37947 - DNA, 366 bp, Escherichia coli; identical to SEQ ID NO: 24029

SEQ ID NO: 37948 - DNA, 699 bp, Escherichia coli
atgagcttctccgggtttatcttcggtcatactgttgcagtgccacagcgagcccccccacgtcaccgtatcaccggggtggtaggtttcaccggctctgaacacaccgcggtagagcatcaccggcagggaaaatgttttttccgtacgctggccactgctctgccggaccaccacagtgaacgaccgttcgccggtcatgctgacgtcaatatcggccaccccgtcaaccaggcattcccatccccgcatcccgtgcgttttttcatacgcccgccagagtccgccctggtgtgtggcatacgtgccccggggaaaggatttttgatcgtcaatggcggggattatttccagtgccgtggcatcacgcccgtcctgcggagccggcagggctctcaccgcatccagaacagccttctgcagaacatcgggatcatagtcacgaccatcacgcggaacaggaatatggcttacagcctctttcaccatctgctcaagcatcggacgcacatcatcgggggtgatacttttgccgtccgccggtaccggaatattcgcaaccgcatcattcaccgcctgctgcagtacatccggatcataatcacgaccatcacgcggtaccggaatggtccccacagcgtcatccaccatcgcctgcagaaccggatgtacctcatccaccgtcacatgcttctgtaa

SEQ ID NO: 37949 - DNA, 1686 bp, Escherichia coli
gtggataacggggcgcactttgacggcgaccagagcggcaccctgaacagcgtcatccctccggcagtgcagcacctgacggtggaggtgagtgcagctgacagccagtatctgacgcaggcgaaatgggacacgccgcgggtggtgaagggcgtgcgcttcagtctgcgcctgaccagtggaagcggtcaggacagccgtctggtgaccaccgccatcactgcggatacagagcatcgtttcagtggtctgccgctcggggaatacaccctgacagtcagggcaattaacagttatggccagcagggggaaccggccatcaccaccttccggattaacgcgccagcaaaacccgccaccattgaactgacgccggggtattttcagataacggcggtaccggtgctggcggtgtatgacccgacggtgcagtttgagttctggttttcggaaaaacgcatcacgaacacggcacaggtggaaaaatctgcccgttatctggggagcggcagtcagtggactgtccagggaagccggattaagccggggacggatttctggttttacgtgcgcagcgtcaacctggtggggaaatctgcgtttgtggaagtcagcgggcagcccagcaatgatggtgaagggtatctggaatttttccgggaaaaaataggaaaactgcatctggctcaggggctatgggagctgatagacaacagccagcttgcggatgagatggcggagatgaagaccaccatcacggaaacccgcaatgaaatcacacagacggtcagtaaaacgctggagaaccagagcgccactatacagcagatacagcgcgtgcagaaggacacaaatgatgacctggctgcgctgtacatgctgaaggttcaaaaaacgaaagacggcattccctatgtggccgggattggtgcagggattgaggatactgatggccagccactgagcaacatactgctgctggctgaccgtatcgcgatgataaatccggagagcggcaacagcacgccgttatttgtggcgcaggggaatcagctgttcatgaacgacgtgttcctgaagcgactgtttgcggtgagtatcacctcgtccggcaatcccccgacgttttccctgacgccggacgggcgactgacggcgaaaaatgcggatatcagtggcagtgtgaatgcgaactcagggacgctcaacaacgtcacgattaatgagaactgtcagattaaggggaaactgtcagccaaccagattgaaggcgatattgtcaaaacggtcagcaagtctttcccccgcacgagcacttatgccagtggcaccatcacggtaagaatcagtgatgatcagaaatttgaccggcaggtcatgataccgccagtgttattccgcggtggtaagcatgagaatttcaacagtaataaccaacagtcatactggtattcaacctgccggttaagagtgacccgcaatggtcaggagatttttaatcagtccacgacggatgctcagggcgtattttcctcagttatagatatgcctgccggacaggggacgctgacactgacattcaccgtatcttcatcaggagcgaataactggacaccaacaaccagtatcagcgatctgctggttgtggtgatgaaaaaatccacagcaggtatcagtatcagctga

SEQ ID NO: 37950 - DNA, 1266 bp, Escherichia coli
atgggcagtgaatattaccggaccctgcagaatggcgggcgtcaggccgctgcggcagcccgggagcagcgacgtgccctggcagaactgaacagccagttgacggaaattcgcggttctgctgtcggaatggctggcgcatttgccggtgcctttgcctccggacacctgatttcactggcggatgagtggagttccgtaaatgcccgtctgaaacaggcatcacagtcatccgatgaatttgcgtcatcacagaaagtgctgatggatatcagccagcggacaggcacggcattttcggataatgcggccctgtttgcccgttcggctgcctcgatgcgtgaatatggttacagtgccggtgatgtactgaaggtgacggaggccatttccacggggctgaaaatctccggtgccagtacggctgaggcgggttcggtgatcacccagttcagtcaggcgctggcacagggtgtgttgcgcggtgaggaatttaattcggtcaatgaaagtggtgaccggatcgtacgtgcactggctgcgggtatgggcgtggcccgtaaagatctgaaggcgatggcggatgacggaaaactgacagcggataaagtggtccccgcgttaatcagccagctggggatattacgtgatgaatatgcggccatgccggaaacggtttccagtagtatcacgaaggtggaaaacgcctttatggcctgggtgggtggtgcgaatgaggccagcggggtgacgaaaacgctctccggcgtgctgaacggtgttgccggacagattgataatgtggcaacagccgtgggcgcgctggttgccgtcggggttgcccggtactttggcaatatggcctccggagcgatgtctgccacggcaggacttgtgacggctgcacgtaatgaagttgcactggcggaagcacagttcaggggaacgcagattgccacggcgcgggcaagggcagccgtgtaccgtgctcagcaggccgtggcggcagcccgcgggacggagatgcagattgctgcagaggcccgtctggcggccacacaggaacgcctgaacagaaatattgctgccagaagcgccgcccagaatgcgctgaacagtacaacggcggtgggctcacgtctgatgagcggtgcgctggggctggttggtggcgtacccggactggtgatgctggggctgcagcatggtacacgctgtaccagaatcaggagcaggccagggagtctgcgcgccagtatgcactga

SEQ ID NO: 37951 - DNA, 168 bp, Escherichia coli; identical to SEQ ID NO: 29866

SEQ ID NO: 37952 - DNA, 147 bp, Escherichia coli
atgccatggactctgacagggatctgctatgaaatatcgcagcgaaaatatattgttacgaatccagccgattatgataaatattccgatatggttaaaaagcatgtaatagatggtgaggaactcataattaaatattttatgtaa

SEQ ID NO: 37953 - DNA, 270 bp, Escherichia coli; identical to SEQ ID NO: 24012

SEQ ID NO: 37954 - DNA, 639 bp, Escherichia coli
gtggtactctgggaaatcgacctgacggtgcagggtggtgagcggtattttttctgcaatgagctgaatgaaaaaggggaggcggttacctggcaggggcgggaatatcaggcatacccgattgacggcagcggttttgagatgaacgggaagggcagcagtgcccgcccgtcgctgacggtgtcgaatctgttcggtctggtcaccggaatggcggaggacctgcagagcctggtgggggccacggtggtccgccgccgggtgtatgcccgttttctggatgcggtgaattttgtggcaggcaatccggaagcggacccggagcaggagctgagcgaccgctgggtggtggagcagatgtcagagctgacggccatgacagcctcgtttgtgctggcaacaccgacggagacggacggagcgctgtttcccggtcgcattatgctggcgaatacctgtatgtgggcctaccgctctgatgagtgtggttacacgggcggggctgtggcggatgagttcgacaaccccaccacggatatccgtaaggacagatgcagcaagtgcatgcgcgggtgtgagatgcgcggcatggtggctaattttggcggtttcctttccatcaataaactttcgcagtaa

SEQ ID NO: 37955 - DNA, 639 bp, Escherichia coli
gtggtactctgggaaatcgacctgacggcgcagggcggtgagcggtattttttctgcaatgagctgaatgaaaaaggggaggcggttacctggcaggggcggcaatatcaggcatacccgattgacggcagtggctttgagatgaacgggaagggcagcagtgccagaccgtcgctgacggtgtccaatctgtttggtctggtcaccgggatggcggaggacctgcagagcctggtgggggccacggtggtccgccgccgggtgtatgcccgttttctggatgcggtgaattttgtggcaggcaatccggaagcggacccggagcaggagctgagcgaccgctgggtggtggagcagatgtcagagctgacggccatgacagcctcgtttgtgctggcaacaccgacggagacggacggagcgctgtttcccggtcgcattatgctggcgaatacctgtatgtggacctaccgctctgatgagtgtggttacacgggcggggctgtggcggatgagttcgacaaccccaccacggatatccgtaaggacagatgcagcaagtgcatgcgcgggtgtgagatgcgcggcatggtggctaattttggcggtttcctttccatcaataaactttcgcagtaa

SEQ ID NO: 37956 - DNA, 717 bp, Escherichia coli
atgtctgctttgtatgaacgctcacagctgacgcaggtgatgatttcatctgccccggcgactgctgaaactatggataaggcggaatatctgcgcctggactgcaccatcaaggaagtccagttcaccgccggtcagaaacaggatattgatgtgaccacgctctgctccacagagcaggagaacatcaacggtctgggggcgtcgtccgagatttccatgtcgggtaatttttatctgaatcaggcccagaacgccctgcgtgatgcctatgacaatgacacggtgtatgcgtttaaggtgcagtttccgtccggtaagggctttaagttcctggcggaagtgcgtcagcacacctggtcatccggtaccaacggcgtggtggctgcaacgttttcacttcgcctgaagggtaaaccggtgtcctatgtggtaccgctggcgtttgtgaaaaatccggagaagacacttaccgtgaataccggtgcgctgctgacaatgtcagtcagtgtcaacgggggaacgccgccttataaacacgcctggaagaaggatggtcagccggtcgagggacagactactgacactttcagtaaagccaatgcgcagtcaggtgataagggggcttatacctgcatggtaatggattctgcagaacagccgcagagcattacctctgatgcgtgtacggtaacggttaatggtgcgggcggataa

SEQ ID NO: 37957 - DNA, 315 bp, Escherichia coli; identical to SEQ ID NO: 24011

SEQ ID NO: 37958 - DNA, 189 bp, Escherichia coli; identical to SEQ ID NO: 24042

SEQ ID NO: 37959 - DNA, 309 bp, Escherichia coli; identical to SEQ ID NO: 37795

SEQ ID NO: 37960 - DNA, 366 bp, Escherichia coli
atgactcaacgacgtgatttacaagcacttatcgatgctgctccggtcggcaagatgcagtggcgcgttatcatctgctgttttctggtggtaatgctcgatggttttgacaccgcggctatcggatttatcgcccctgatattcgcactcactggcaactcaccgcaggcgatctcgccccgctttttggcgcgggtctgctaggattaaccgcaggcgcactgctttgtggcccgttgtccgatcgctttggtcgcaagcgggtgattgagctgtgcgtctttttgtttggcgcgttaagcctcgcctcggctttctcaccggcctgggtctgggcggcgcgatgccgaacaccatcaccatga

SEQ ID NO: 37961 - DNA, 402 bp, Escherichia coli
  misc_feature (368)..(377): n is a, c, g, or t
atggcggaactgaacctaagtaacctgacggaagcagacatcattaccaaatgcgttatgccagccattctcaatgcaggctgggacaacacaacgcaaatcagacaggaggtcaaactccgggacggtaaagtcatcgtacgtggtaaagttgcggcacgcagaacggtaaaatctgctgacatcgtgctgtatcacaaacctggcattcccttagccgtgattgaagcaaaagccaacaaacatgaaattggcaaagggatgcaacagggcattgaatatgcgcgcctgctggacgttccttttgtttttgccaccaacggtgatggctttatcttccgcgatgccaccgcagccgaaggtgaatnnnnnnnnnnggtgaatgccttgaaaagcaaataa

SEQ ID NO: 37962 - DNA, 171 bp, Escherichia coli; identical to SEQ ID NO: 23816

SEQ ID NO: 37963 - DNA, 474 bp, Escherichia coli
atggctaatgcctggctcagattgtggcatgacatgccaaatgatcccaaatggcgaaccattgccagggtctcaggacagccaatcgcaacagtgatggcggtgtatatccaccttctggtgagtgcgtcacgaaatgtcacgaaatgtcacggcgagtcactacgtggtcacattgatgtcacgacggaagatttagcaagtgcgcttgatgtgacggaagacgtgattgattcaattttgcatgcaatgcaggggcgagttctggatggcgatcttatttccggatgggaaaaacgccaggtgatgaaggaggataacggtaatgtttcgcaaaccgcaaaatccccggcagagcgcaagagagcgcagcgggagcgggaaagactgcggaagcagaacactgattgtcacgatgagtcacgcatatgtcacgacaaatcacgacagatacagatacagataaagaattaa

SEQ ID NO: 37964 - DNA, 507 bp, Escherichia coli
atgatccttgaccaagaatggatccttgccagtgacttgttgggggttggaggtcttccttcatctctggctgggcttcataaacgagcaaaaaatgaaggatgggaaaaacgttcggtaactacacctggtatcagagggagagcatttgcctaccgtttaagcgacttacctgcacatgttgtttccatcattacaggtagtgcagaaataaaacaccagccccctcaaaagaacggtggcaatagcgagttgctcgaactcatcgacactttgagccaagaagagcaagaattagttatttacaccttgagaaggaaaggggtagaaaaattgctggaattctgcaatcaagagaatcaagagttgatcgctttaacaggtattcgacgcctggcagcattgagccttaataatttatcagatcaaaaggttagagagattttcgagggagatgaaaccaaggatcatcatttcaatttaacccataaagaagccaaagcgtaa

SEQ ID NO: 37965 - DNA, 384 bp, Escherichia coli
atgtcatggcaaacgctgtctgaacagctggttggcagtgtggaccttgccgatagaatgagaggcagttttaaagaattgtctgggcttgatcttactaaacaacagtttgcagatttttgtttatacagcgagtttggtcgccgccctaaaaatgcctggaccctcgaaagtctgggtctggtagccattcactatccattcattgataaagttacaacctgcccgcaggactggaagacattattacccgatcccgataagcaattagcggaatggcgtaatttattgaagattactcttgatttctttatccgtgaaaacagtgccgttttttacgaaaacgagcaataccctcgctggatggggcacgtttcccggtaa

SEQ ID NO: 37966 - DNA, 309 bp, Escherichia coli
atgtttcatgctgtccgcatggagcacatttttaccgctcatcgccagcaggcgggccggtggcgttcccgtccggctttccaccgcctgcgcaatgctttcggtcataaagcccagcgtgcggatatcgttaccgcctcgccgggttttcatgatgttttttgcccagatgcggaacgccagctgccgctccgggctgttgttcatctcctgcactaccatttcccgcagcgccgggcttttcacctcgatcagtttacggatcaacgcctggtctgtgccgaacgccgccgagccggggttatatga

SEQ ID NO: 37967 - DNA, 1590 bp, Escherichia coli
gtgggacgcataattgatcttgacggaaaacctttctcctttgacccggagatgcagagtgccgtgctggatattccgcagattgccagccgttatattgaacatccggcctcgggtatcaccccgaaccgggcggcacagtgccttcgcggggctgaacgtggcgatctgattgcccagtccgatctggccgctgacattgaagaaaaggatacccacctttttgcagagctgggcaagcgacgccttgccattcagggggtgccctggagtattgagccgcccccgaacgccagcgcgaatgagaaaaaggacgcggaaatgctcgacgaatatctgcattccgccgactggtttgatgccatgctgtttgatgccaccgatgccatcctgaaaggctattcctgcatggagattgagcacgggatgctcggtaaaatgcacatcatccgcgccatccgctggcgtgacagcgggcatttctgccttaacccggatgatttgagcgaactgcggctgcgtgacggcagccatgccggggtggcgtttcagccctttggctggatagtgcatcagtcgcgttcacgcactggctacggtggtgcgacggggcttgtcagaacgcttatctggccgttcattttcaaaaactattccgtgcgcgatctggctgaatttctggaggtgtacggcctgccgatgaaggtcggtaaatacccgtccggggcaacaccggagcagaaaagcgccctgatgcgggcggtgatggatatcgggcgacgtacaggcgggatcatcccggccgggatgtcgctggagtttcaggcggcagcgaacggtcaggccgatccgtttgaaaccatgatttcgtggggggagcgttccatctccaaagctatcctcggcggcacgctgaccacggaagccggagacaagggcgcacgttcgctgggtgaagtgcataacgaggtgcgccgggaaatcagggattctgatttacgtcagctggccgccacgctgaaccgcgatctggtgtatccgctgtatgccctgaacaccgcccacgccattgatatccgtcgcctgccgcgtatctgtttccagacaaaagagccgggggatatcaccaaaatcaccagtgcggtgatgcagctcagtacggggatggatattcctgatccctgggtgcgggagcagaccggtattccacagcctgcccccggtgaagccatcttccgtgtccgtcagagtggcaatgaacctgctcagacagacaaagagatgccaccggaaaaacaggagaagacagagcagacagcgctggctgccagactgccggaagcgaagagcagcccccgagatgaactggacgacatgggggatgcggtgcctgcccgccggttacaggaggccatcgacccggtactggagccggtcattgaagccatcagaacgcgggggctggcggaggcactggcagacctgcctgccctttaccgtgaaatggatgattcccgcctgatgacgctgctcagtgatgccatgtttgctgcggaaatgaaggggatgctggatggcacaggggattga

SEQ ID NO: 37968 - DNA, 1665 bp, Escherichia coli
atgaataacgccgaagaactctcccccttactgacgaataccgtctccacccgcaaaattgatctggccggtgaaaaagccctgctgggcgtggatgtgccggacagccttgatttgcccggtgatatgccggtgtttctggattatcaggcccgctggtttgaggatgaaagcgaggtctgcatcgcggaaaaatcccgccgcaccgggcttacctgggcggaagccgggcgtaacgtcattaccgccgcaaagcctaagcggcgtggtggccgcaatgtgttttatgtggggtcaaagcaggagatggcgctggaatatatttctgcctgcgcactgttctcccgtgcctttaaccagctggcagatgctgatgtgtatgagcagaccttctgggatcgggataaaaaagaagaaattctgacctacatgatccgctttccgaacagtggattcaaaattcaggcactgtcttcccgtccgtcaaacctgcgcggccttcagggggatgtggtgattgatgaagccgcgttccacgagtcactggatgagcttctcaaggcggcaatggcgctcaccatgtggggcgcgcgcgtgcgtattatctccacgcataacggcgtcgataatctgtttaatcagtacattcaggaagcccgcgaggggcgcaaggattacagcgtccaccgcattaccctggatgatgccattgcggacgggctgtaccgtcgtatctgttatgtcaccggccgcgaatggtcaccggaaagcgagcagaagtggcgtgatgatctctacaaaaacgccccgacccgtgaggatgccgacgaggaatacggctgtatcccgaaaaaatccggcggtgcctatattcctcacgcgcttattgaaatggcgatgatccgcgacatcccgattctgacgtttgaagccccggacgacttcatcagccgtgccgcatggctgcgtgaatcggaggttttaacctggtgtgaagaacatttaaaaccgcttttagaggcgttaaatccccgttcccgcttcagcttcggggaagactttgcccgcaccggtgacctctcctgctttgtgctgctggaaatcactgaatccctggcaaaacgcgaggtgtttcgcgtggagctgcgcaacctgccgtatgcccagcaggagcaggtgatgatgtacatcctgacccgcgttccggcgctggtcggtgcggcgttcgacgccaccggtaacggcggctatctggccgaagccgcgctgctggcctttggcccggacatcatcgactgcgtgatgttatcgccgaagtggtacggcgagtggatgccaaaactgaaggccgagtttgaggatcagaatatcctcgtcgcccgccatcagaccacgcttgatgatttgcgccatgtgaaggtggtgaacggtatcccgcaaatcgacaaggggcgtacgaaggaccagaacgcaacggctgtgaacgcccgccgccatggtgattttgccgtggcgctctgtatggcaaaccgggcgtcatacatggagggcttcatcctggatgaatcagcctgtcaggcgctgccggagcggtcgcgggccatggagggcggttatcgtgatgacgatgaggcatatcatgaatttgatcgggggtgctggtag

SEQ ID NO: 37969 - DNA, 543 bp, Escherichia coli
ttgctccccgacagcatccgtaagccactgctggaaatgctgcgtgaaaaacgtctgacgcaggtccagatccgcgaggaaatcaaccgtctgatccgtgaggcgggcctgccggaagagcagcagctttcaccggcggccatcagccgggaagcctcccgtaatgagctgattgcccgtaacctgcgtgatttacgcgagcagacaaaagccatgatggccgaactgggggacaagccaaccggtgaaaccactgcattgatcctggagatgtcccgcgccctgatgtaccgccgtctgcgtgccgcgaccgaatccctgaacagtgacagcgacgtggatatgcgtcttattaaggacatcctcctgtcagcacagcgtgcggaaagtgccgccgagcgcagcattaagcgtgaaaaagaaatccgggccgcatttgctgaagagatggcaaacgccgtcaccgacgagctgcgcggcgtggacgggatgagtgaacagcttgagtcccgtattaaggggattctgttgggtaaagcctga

SEQ ID NO: 37970 - DNA, 402 bp, Escherichia coli; identical to SEQ ID NO: 23802

SEQ ID NO: 37971 - DNA, 510 bp, Escherichia coli; identical to SEQ ID NO: 23615

SEQ ID NO: 37972 - DNA, 297 bp, Escherichia coli
atggacagtagttcgcagttgttctggtatttatatatcacatcctttttcggtgcattcgtcattacacgatggctgtgccggaaagttatcagtatttttcataaaaaatacctgattgggcaggctgcgacttctctgattaatgcactggccagatatcataagggggaatgctactcaagaataaaaactgatgatggttttaatatttttgtgattcctccggagtatcgggttcagctcgatcgggaaaataatacctatcatatccgcaggagtgttgatacagcatga

SEQ ID NO: 37973 - DNA, 198 bp, Escherichia coli
atgaatagtctacccgctggatgggcgcggccactaatggccaggaagcatcatttttttaaaacaggcgaaaatatcagtatatgtggacggtggttatatctggctcataatcgcgagccggatacatttgaaagccctgatgactgtgccgaatgccgcagaagactgaataaggagaaagataatggacagtag

SEQ ID NO: 37974 - DNA, 333 bp, Escherichia coli
atgagtattgaattaagatcgtcttatgaatatcgtaaaattctcatcgccggaggcatgaaaccggaagatgcagaaaaaatcgtttcttttatggataaagaatgtgacaaacgggatatgccagaaattattatggatgacatgattctgcattcagccgtagcgttaagcccattatggattgtgcattctcttgctgaaattgccaaaggcaccgataaacaggcagctgttgctgcccttcagacgcttaatgaaatgcgtatatctccacgcccgacattaatacatatgattctgtccagcatggaggataaagcaaatgaatag

SEQ ID NO: 37975 - DNA, 351 bp, Escherichia coli
gtgagaagttatattgataatgaaaaactgaagacaatcagcgactgtcttagcttgctggcaaaaataaaagaaaccattgaagagattaaatttcagcttgaatacgaaccctgtggcgatgatacattgcgtaactctgccagaaaagcactggctgtctttcagaaacaacgccggactgttgaataccgccttgctgtattgcgccaggaggaaaaggaaagaaatataagacgtcatgaactcgttaatgattttcttgttcgtgaattaaaggagcgtgtgccggagtcggtattttttgagtgtgaggctgttgcccgtagcaaagcactggaaactgattaa

SEQ ID NO: 37976 - DNA, 546 bp, Escherichia coli; identical to SEQ ID NO: 37608

SEQ ID NO: 37977 - DNA, 183 bp, Escherichia coli
atggaacagactggcaggctctttaaacaacgtcgactctcgactacgtggctgaaaagccagatcacccaaccacataagctgtgggatgcaatgccgaagcaaccgtctcaggaggagcttcgagattgcatcgccaaagtttattcgggaggaatctatgtccagaaaaacagaatttaa

SEQ ID NO: 37978 - DNA, 402 bp, Escherichia coli
  misc_feature (351)..(360): n is a, c, g, or t
atgatgaaaatagagccttcaattttgccttctcttgcctggtttgcgctgattgttcgtgccggcagtttttccagagccgtttctgaaatgggtattacgctggccgcattgtcccagaatttaaaatctcttgaggaacgtcttaacaccaagctgatataccgtacgacccgcaatatctcgcttactgaggaaggacagcgtctgtatgaagtgctggtgtcggctttggggcaaattgatgatgctttgaaagatgttggtgatacccaacttgaacctacaggcctgttgagaataaattcctcccgtgttgcagcacggatgcttgttgagcctcatattggnnnnnnnnnnatattggcgagtttcttactcgttaccccaaaacaaagatag

SEQ ID NO: 37979 - DNA, 648 bp, Escherichia coli
ttgttgatcgtcgccaaccagtacggccttaatccgtggacgaaagaaatttacgccttccctgataagcagaacggcatcgttccggtggtgggcgttgatggctggtcccgcatcatcaacgaaaaccagcagtttgatggcatggactttgagcaggacaatgaatcctgcacatgccggatttaccgcaaggaccgtaatcatccgatctgcgttaccgagtggatggatgaatgccgccgcgaaccattcaaaacccgcgaaggcagagaaatcacggggccgtggcagtcgcatcccaaacggatgttacgtcataaagccatgattcagtgtgcccgtctcgccttcggatttgctggtatctatgacaaggatgaagccgagcgcattgtcgaaaataccgcatacactgcagaacgtcagccggaacgcgacatcactccggttaacgatgaaaccatgcaggaaattaacactctgctgatcgccctggataaaacatgggatgacgacttattgccgctctgttcccagatatttcgccgcgacattcgtgcatcgtcagaactgacacaggccgaagcagtaaaagctcttggattcctgaaacaaaaagccactgaacagaaggtggcagcatga

SEQ ID NO: 37980 - DNA, 477 bp, Escherichia coli; identical to SEQ ID NO: 37297

SEQ ID NO: 37981 - DNA, 327 bp, Escherichia coli; identical to SEQ ID NO: 37483

SEQ ID NO: 37982 - DNA, 279 bp, Escherichia coli
gtgggggcaaccggacctcagggaccgaagggcgacccgggggagacacaaatccgttttcgtctggggccggcgagcattattgagacaaacagccatggctggttcccgggtacagatggtgcgctcatcaccggactgacctttcttgcccccaaagatgccacacgggttcaggttttttttcagcatttgcaggtcaggtttggtgacgggccgtggcaggatgtcaaggggctggatgaagtgggcagtgatacaggcagaacaggagaatga

SEQ ID NO: 37983 - DNA, 270 bp, Escherichia coli; identical to SEQ ID NO: 24012

SEQ ID NO: 37984 - DNA, 534 bp, Escherichia coli
atggggcgaaaaggtcaggcacctgctcatgtccgtgcgtggacacctgaagaagatgcgctgctgattgcgctttatccatccaccccggttaaggatattgctgtcagggtaaaaagaagtttctggggtgtacataaccggattgttttattacgcggtacttacccggagttgctcaaatgcaaacgtccaagatttaaacatgatgaagataaatttatccgaaaaaatgccagaacgatgaccggtaagcaaataggagaatatctggggcgagaccgggattctgtccacaatcgggcgcgatatattggcgtaagcatgaaaaaatacggagaattgctgcccttcacccgtatacctgacgatgatgttcatcttattcgtgaattacgggatgctgaatcaccacgacgtcttaccttccgggaaataggcgagaaatttgaattatccgagagtacggtgaattttatttatcaccatcgccggactgccgaggacgctgtattacgggagttaacgccatga

SEQ ID NO: 37985 - DNA, 546 bp, Escherichia coli
atgattggccaccgatgcgccaaagcagcacagcaggatatcgccaggctgtgcggaaggcagggaaatcctgtaaaaaccagtcgcctccatattgtccaggtacaggttctgaccattgcgccaccagtcatcctcacgctcaaaatccggcatatcaattcccgccagatggtatgcatcccggaacagcgtgtaacagtccgtcaccccgtgctcaaagagccgtcctgtcagatgtggcacacagcggaatttatgaatttccccccggcagaccagccaccaggacagtgcactttttatctgcagccgccggtcggcctcgctcagccagggcagaccaccgggatgactgtggaccagtgccacaatctccccctgcatctctgcccgcagccagtcttccggtgcaatacgaaaatacgcctccggctctgcagagatattcacacaagggatataccgctccccctccggcgttctcaccacgaagccgcacgactccgctggcgcacaccgccgggcatgcgccagaatcgctga

SEQ ID NO: 37986 - DNA, 297 bp, Escherichia coli
atggacaatagttctctgttgttctggtgcttatatatcacatcctttttcggcgcatttgttattacccggtggttatgtcgaaaaatcatctgcttttttgataaaagacatccggttgaacgggcggctgatgcgctcattcagcaggccattgtgttatataacggtgaatttttctgccgaataacaagcagagatggctggcacataatgattattccgccaacacaccatgcccggtgggatgaggcagaaaaggctttccatgtccgtaaaaaggtaaatacggtatga

SEQ ID NO: 37987 - DNA, 291 bp, Escherichia coli
atgagtgatttcattactgaagatcagcgtcttgtcattctgcggtcgctggcggattacaacggcgaactgggtgaatccgtgctccaggactgtctggatgattacggtcaccgcgtgtcccgcgacaccgttcatactcatattgcctggcttgccgagcaggggctggtgcgtaagcgcacgctcgttaatggttatttcatcgctgaactgaccggccggggtcaggatgtggcggaaggccgcgccaccgttccgggtgtgaagaaaccacgcgcaagggggtag

SEQ ID NO: 37988 - DNA, 333 bp, Escherichia coli
atggcgctgggcgtggaagacaaagtgactgttccgctgtttgaaggcgtacagaaaacccagaccattcgttcagcatctgatatccgcgatgtatttatcaacgcaggtattaaaggtgaagagtacgacgcggcgtggaacagcttcgtggtgaaatctctggtcgctcagcaggaaaaagctgcagctgacgtgcaattgcgtggtgttccggcgatgtttgttaacggtaaatatcagctgaatccgcagggtatggataccagcaatatggatgtttttgttcagcagtatgctgatacagtgaaatatctgtccgagaaaaaataa

SEQ ID NO: 37989 - DNA, 204 bp, Escherichia coli; identical to SEQ ID NO: 37655

SEQ ID NO: 37990 - DNA, 201 bp, Escherichia coli; identical to SEQ ID NO: 37851

SEQ ID NO: 37991 - DNA, 888 bp, Escherichia coli
atgttccatgttgataataattccggcgtggcgaatatgcctgcgctggcaccggcgcagagtaataccaccacctggtttaccgaaggtgacggacaaaaaggtatcagctggattggtcaggactggctgaatattctccaggccgaactgctgaatattctggctgaagccagtattcagccggataaggcgcagttaaaccagcttacgctgtccattaaagccattatcgctgcgaatgccttttcccggaaaaacaacctgaaagaaattgctgatgccggtgcggaagcccagcgtcttgcccgtggttatcttggtcttggggcgcttgccacaaaaaacagtcttggtcccggtgacgttaatgctctggcgaaggatcagaaccttgccgacctggagaatgcgggaaccgcccgtaataatctggatgtttacagcaaaagcgaaggtgataaccgttacctgcgcagggagcagaacggcgcagacattccggataaaggcgcttttatcgataacgttggtttacgggatactgtaaacagggccgcgaatgccctgccatcgaacggagcggctgttgcagcgaataaactcgccactccaagaaatattaatggtgtcccatttgacggaacgcaggatataaatattacatcggggatgacgcagtctgtggctgactcacgttatgttcaaagcattcgaagaggttcaaggtcaacgattggaatgcaatataatatttttgaggttcctgacggatgcgtacttacagggcttgatgtcgctggtgatggtaatgcaacggtaaccgcatattatcgacctgttcagtttctgatagatggttcgtggaaaacagcttccagcgcataa

SEQ ID NO: 37992 - DNA, 186 bp, Escherichia coli
atggaaatgaaattttttgaagtgaaagaaggttattatattaatataaattatatagtgtcaatatattatgacaaggctgatgttgctactgttactcttacaacagaagaggttgtacacttaaatgctgtggatgctatacgtctgaaagtgtttttagcaaagtatttaaacacccaataa

SEQ ID NO: 37993 - DNA, 1032 bp, Escherichia coli
  misc_feature (342)..(351): n is a, c, g, or t
atgagtgaagaacatattatcgctcgtcaatttctggtgcaaacagggattcaggaattactggatatggatgatgttaccgaaatcgccgtaaatcagcctggcaggatatggtttgaaggtcgtgatggttggtgctttcgtgatacagataaggtcagttataaggcattaatggggctggcctatgcgctgtgtaacataagtgggctggaagatgccctgaaaccacataacccgattgcgtcggttgttcttcctggtggtgaacgtggtcagattatagttcctcctgcaaccgaggataattgtgttgttctctcaattcgtaaaccatcactnnnnnnnnnnctaacgcgtttttcacttgatgattacgttaattcagggcgttttgaccgagttaaaattgctaaaaaacacacagcagtgttaactgagcggcagaaatatttattcgagttatcgcgtaagggtgatgccgcaagtattgctaaatttattcgtgaggcggtcaatgatcgcctgaatttcctgattgttggtggtactggttccggcaaaacaacagtaggtaaagccattgcggatttgtttcctcctgaacggcgctatgcaacaattgaagatgtccacgagatgacgctcccgaatcatccaaaccatattcacctgttttataaaaagggaattgtggatgccaagtcgattattgaagcctgtatgcgccttaaaccagatcatatctttctggctgagttaaggggggatgaagcatggagttatcttgaagctcttaacacagggcatgaaggctcaataagtacgatccatgctaacaatacatatgcgtcgttctcgcggctggcgagcattgttaaacaatcatctgttggtatgacagttgatatggatttgattatgagaacgattaagacatctatagatgtcatattattttttaaccatacatatatgacggaactatattacgaccccgaagaaaaaaatcgtctacttagcacaatgtaa

SEQ ID NO: 37994 - DNA, 135 bp, Escherichia coli
atgtcagtgtgcgaaatgatagagcttgccaaccggattgtaaacggggaacaagtcaaaaccccagcaatagaagcatggattattagcgaaatcatttggtgggcgcataaccgggataatgctttagtttga

SEQ ID NO: 37995 - DNA, 315 bp, Escherichia coli; identical to SEQ ID NO: 24011

SEQ ID NO: 37996 - DNA, 432 bp, Escherichia coli; identical to SEQ ID NO: 24031

SEQ ID NO: 37997 - DNA, 366 bp, Escherichia coli; identical to SEQ ID NO: 23997

SEQ ID NO: 37998 - DNA, 867 bp, Escherichia coli
atgaaacaggatcgtggggggaatagatatagtgcagtagatcttaactcttctaagtatgggtattatgagaaagttggcggtggtttttatagatatatagaatcctttaaccccatatcttcagagacaccaaataaaatagtctacaagggggaatcagtagatttaactaaggagccaaattcggaattatattcaggtaggtattctataaataacaaacaggttaatgtttatttctttcgtgacgctgatggtacattttataaatcagaaggtcttcatggtgggggagttattagatacatagataaaccgtattctcagttaagagaaggagatattgggtatgatgaggatttgttggatatatacgatgattctccggtgcttgaagacacgttgcctgctttatcttctgaaatagtaccaactccagaacatagtattaaacaaatttattcgaaaattaaggaggggcacatagaactgtccgattcagacatcatattgtgtcgcggcacaaccggtattcaagctgaaaatatcgttgaatataaaactgctggagggcttcctgattcaaatccaaatgtaaaagcaccagatgaatatatggcacaacagcaggtacgtattggaagaatattgcctgaatacacatcggatcttagcgttgctgatcggtttagtcgtgagcattatctaatagttgttaaagtaaaggcaaaatatatcacacgaggaagtgttacagagagtggttgggttatagataagaccgcacctgttgaaccacttgcgataattgatagaacttttggtatgaaggaaaatatctcaatggtaaatgcatcgaaatag

SEQ ID NO: 37999 - DNA, 342 bp, Escherichia coli; identical to SEQ ID NO: 37224

SEQ ID NO: 38000 - DNA, 144 bp, Escherichia coli; identical to SEQ ID NO: 23988

SEQ ID NO: 38001 - DNA, 555 bp, Escherichia coli; identical to SEQ ID NO: 23965

SEQ ID NO: 38002 - DNA, 327 bp, Escherichia coli; identical to SEQ ID NO: 37483

SEQ ID NO: 38003 - DNA, 330 bp, Escherichia coli
atgaaaacctttcgctggaaagtgaagccggatatggaggtgaactcgcagccatcggtgcgtgaagtgcgttttggtgacgggtattcgcagcgtatggcggcggggctgaatgctgacctgaaaacataccgtgtgacgctttccgtgacccgggaggaggcccggcatctggaagcgttcctggcagagcacggtggctggaaggcgtttctgtggacgccaccctatgcataccggcagataaaggtgacctgtgccgcctggtcatcgcgggtcgggatgttgcgcgttgagttcagcgcggagtttaagcaggtggtgaactga

SEQ ID NO: 38004 - DNA, 183 bp, Escherichia coli; identical to SEQ ID NO: 37241

SEQ ID NO: 38005 - DNA, 156 bp, Escherichia coli; identical to SEQ ID NO: 37815

SEQ ID NO: 38006 - DNA, 453 bp, Escherichia coli; identical to SEQ ID NO: 37816

SEQ ID NO: 38007 - DNA, 390 bp, Escherichia coli
atgaaacgttatttacgctggattgtggcggcagaatttctgttcgccgcagggaatcttcacgccgttgaggtagaagtcccgggattgttaactgaccatactgtttcatctattggccatgatttttaccgagcctttagtgataaatgggaaagtgactatacgggtaacttaacgattaatgaaaggcccagtgcacgatggggaagctggatcacaataacggtcaatcaggacgttattttccagacttttttattcccgttgaaaagagacttcgaaaaaactgtcgtctttgcactgattcaaactgaagaagcactaaatcgtcgccagataaatcaggcgttattaagtacgggcgatttggcgcatgatgaattctaa

SEQ ID NO: 38008 - DNA, 141 bp, Escherichia coli
atgccgcaaaaaacgatcatagtcagcattttatgcataactattttggtgattgtctggatgatacacaactcacactgtgagttcaggcttaacatcatgtggtcacaatttgcggcgttcttgcagtgtaaacagtaa

SEQ ID NO: 38009 - DNA, 285 bp, Escherichia coli
atgaccagtcaacgcatccccgtattcaacggcactatcgccaacgaaaccactcttctcgttaatgcccgtgatttacatacttttcttggggtaggtaaacgctttgcgtcttggattacagaacgcattgctgaatatggtttcgttgaaaatcaagattttgttattgcttgccaaaattggcaagcaaaaggtagaggcggtcacaaccgcaaggaataccacctcaccctcgacacagccaaagagcttgcgatggttgacgactgcgtccaatactga

SEQ ID NO: 38010 - DNA, 486 bp, Escherichia coli
atgcccgacagggcatggaaggggcgaaagaaaataccagggagcagcggggccacatcgccccgaagcgcggcgcagccgctgacgaacataccaggatgcacagggccatcccttcaccctgcaaagcccaacggactgacaggccatgatcatgctgatttgcgccgcagaatgccgcagttagcgcgagcgccagcgagtttacgccgtcctggtgcattgcagcagggcggggcgctgtactgcgcgtgtgagcgtcagcgagctacgggcgcaattgctcattgttcaatgcaactggggctattaagtccagccataaattcagttatgttttttgtagcttattccgtgatttcgtcatacgttaattctattttcatcttaatattccttaattacttccagaatcagaattctttttattccttttacaaagtacataatcagggtgttctccagctaaaagcagaagaaatttaa

SEQ ID NO: 38011 - DNA, 261 bp, Escherichia coli
atgcattttatctctttccttaaaagatatttcggaattgaatacgtccaggactgtggggcagagtttcttttcgtatatgaaaagggagaatttagcgagcctttatttatactgcgtgaatattctttaaatcctgaagttcagagaaaaagttggattgtaggtaatgtatattccacattagaacacggaaaagaatattctgaacaggaattaagaaaaatgattaaggagggtaaagtaatcagcaaatactaa

SEQ ID NO: 38012 - DNA, 300 bp, Escherichia coli; identical to SEQ ID NO: 23732

SEQ ID NO: 38013 - DNA, 486 bp, Escherichia coli; identical to SEQ ID NO: 38010

SEQ ID NO: 38014 - DNA, 261 bp, Escherichia coli; identical to SEQ ID NO: 38011

SEQ ID NO: 38015 - DNA, 135 bp, Escherichia coli; identical to SEQ ID NO: 22628

SEQ ID NO: 38016 - DNA, 327 bp, Escherichia coli; identical to SEQ ID NO: 31578

SEQ ID NO: 38017 - DNA, 531 bp, Escherichia coli
atgtctggacaatacattccctatcacttaaggcataataagtctattgatagagagatttttctcgaaagcctaaacctcttaagcaaaagactaaatattcaagaatatacatatataggttttggtggtccgatgcttgaagattttagaatcatgcataatcgtatcgctctttctgatatgatttctctcgaagaacaagagtctactcacatcagacaaaaatataatttgccttataattgtattgattgtaagctaatatcagctcatgactttattcttgattatagtttttctaaaccatcaataacatggttagactatgcctccccgaaaaaaatacaaacggatctagatgatatacacttactaagtactaaagtaagctcttttgatattttgaaggtcaccttccccataaatcctagttcttattaccaacgtagagttggagaaagtttagatatttttaaagaagcatatcaaatgcagatctttcagatcgtaagattaaagctcttttaa

SEQ ID NO: 38018 - DNA, 285 bp, Escherichia coli
atgttgacaatatcaggttttttctcctcagaacaagaatatatagagttatctaaggcatgcgacctttctaactggcaattttattcaacaaattgggaagacgtgcaagaaatagcaataccaacactaacaattaaagaaaagataaatttagatagtaaactgcctgataaagaagcatatcaggcagccgctgaagagttctctttaaacgaaaatgaacgggataactattataaatactataggttataccctaacttccaaagaattatggtttaa

SEQ ID NO: 38019 - DNA, 708 bp, Escherichia coli
atggtgttgtgctggcactgcgacaaccagctgcgggagcagacatctgattcactggatcaacttgctcaacagaatctggccgcctggatgattgacatcatccgtcacgcaatgaatggcgcacaggagcgtgaattatctctggctgaattatcctggtgggcggtccgcaatcaggtggcggacgcgctaccggaagcggtattacgtcgttcgctggggttgcgtgcggaaaaaatccgctccgtataccgtgaaagcgacatcataccgggagaacagaccgccaccagcatactgaagcagcgcacaaaaaatattgcgctaccgcctcacacccaccagcaacagaacccaccacaggaaaagacggtggtcagcattgccgttgatccggagtctccggaatccttcatgaaacgacctaaacgtcgccgctgggtaaatgagaaatacacacgctgggtaaagacacagccgtgtgcgtgttgtggtaagccagcggacgatcctcatcatctgattggtcatggtcagggcggaatgggaacaaaatcccacgatattttcacgctaccgctgtgtcgggagcatcacaacgagcttcatgcggatccgctggcgttcgaagaaaagcatggttcccaggttgatttaatttttcgttttcttgatcacgcctttgcaaccggcgtgctcgggtaa

SEQ ID NO: 38020 - DNA, 555 bp, Escherichia coli
atgatatacccggaaattacaggcaaaagcggtgagcatttacgcctgaaaacgctggaaagtgtctggatccaggggaaactgcgtatgtgggggcgttggtcgtatattggcgacggtaagacgggaaatatgttcaaccaattactgacctctaaaaagctgacaaaaacggcaattaacgaggcgctccggaggatgaaaaaagcgggtctggacaaacctgaacttgaggcttttttgcgggatatgatcaacggcaatcaaaaaagctggctggcacattgtaccgattcagaggcgttaataatcgacagggttattggtgaagtactggcaggttatcccgggctgctcaatgttctgagtcagcgttatgtggggcgggggatgactaagcgcaaaatggctgaattgctgaatgatgcacatccggaatggagtttaagaacctgtgaaagacgcattgagcattggctaaaggtggcagaatttattttgtacaaaccaatggttatggcttttggtatagagaaaaaagttattgctttttga

SEQ ID NO: 38021 - DNA, 588 bp, Escherichia coli; identical to SEQ ID NO: 23934

SEQ ID NO: 38022 - DNA, 669 bp, Escherichia coli
gtgggaactcaaaaaaatggcgttgttgataaaacgggtcacacctggtttctggctgtcgaaggtgaagccggggtaaccgaagggcaggcactacaacctgaagcgccggatgtggtaaccgaagaggtcgctccaaaagttaccgcagacatgatggttgagtttatcggtcaggatggtgctaaaacgtgtgaggaactggcgggtaagttcggcgtcagtactcgcaaggttgcttccacgctggcggtggtaaccgcaacggggcggctggcacgcgttaatcagaacggtaaatttcgttactgcatgtcggggggtaatttaccagcagatccgaaagccgcgccggtaacgaaaaatgatggtaaggcctttcctcagccagcaggtgctgcgttaccagtccgggaagccgcaacacaggaagaaattaaaacagaaactgtggcggacattgtgcagccgttgccatcgtttaccgaaacgcaagcagatgagctgatttttccgtccctgcgcagggcaaacctggcgctgcgcagggcgaaaagtgatgttcagaagtgggagcgagtctgcgccgcgctgcgggagctgaacaagcaccgggatattgttcgacagattactgattcttcccgccgtgttgtatcggaaaagtga

SEQ ID NO: 38023 - DNA, 510 bp, Escherichia coli
gtgcagaacgacggtcagcgccatgctctgagccaggcgaaatccattgccgatgaattgatgaccggatgtacaaacttcgtgttcagcggtaaacctggtaccggtaaaaatcacctggcagcagcgattggcaatcggctgatggcgaaggggagaagcgtgattatcgtcaccgtgtccgatgtcatgagcgtgttgcatgacggctacgacaacggccagtccggggaaaaatttttacaggagctttgtggagttgaccttctggtccttgatgaaattggcatgcagcgggatacgcgcaacgagcaggtcacgctgaaccagatagtcgaccgcagaacggcttcgatgcgtagtgtcggaatgctgacgaacctgaatcacgcagcgatgagcacactcctcggagatcgggtgatggaccgtatgaccatgaatggtggtcgttgggtgaattttaactgggagagctggcggtcaaacgttggacgtcagggtatgtga

SEQ ID NO: 38024 - DNA, 183 bp, Escherichia coli; identical to SEQ ID NO: 37977

SEQ ID NO: 38025 - DNA, 363 bp, Escherichia coli
gtggatggtaagcctgttattcctggcatgaagctgtcgaaggaaaaatgcgaccgggttaacgccattgagcgtgataaggcgctggcatgggtggagaaaaacatcagagtgccactgaccgaaccccagaaagcggggattgcgtcattctgtccgtacaacattggccccggtaagtgtttcccgtcgacgttttataaacgaattaatgcaggagatcgaaaaggtgcctgcgaagcgattcgctggtggattaaggacggtggcagagactgccgtattcgctcaaataactgttatggtcaggtatcccgtcgtgaccaggagagcgcgctggcgtgctggggaatcgacagataa

SEQ ID NO: 38026 - DNA, 315 bp, Escherichia coli; identical to SEQ ID NO: 24016

SEQ ID NO: 38027 - DNA, 309 bp, Escherichia coli
atgcagcagcgccagcgtgatgtcgctgcacttgatgccagatactcgagggaattagctgatgcgagagctgaaaatgaaactctgcgtgctgatgttgccgctggtcgtaagcgcctgcggatcaacgccacctgctccggtaccgtgcgtgaagccaccggcacctccggcgtggataatgcaaccggtccccgactggcagaagccgctgaacgggattatttcatcctcagagaacggctgatggcaatgcagaagcaactggaaggagcacaggaatatatccgtacccagtgtataccgtga

SEQ ID NO: 38028 - DNA, 342 bp, Escherichia coli; identical to SEQ ID NO: 37224

SEQ ID NO: 38029 - DNA, 144 bp, Escherichia coli; identical to SEQ ID NO: 23988

SEQ ID NO: 38030 - DNA, 498 bp, Escherichia coli
atgaacgggaagggcagcagtgcccgcccgtcactgacggtgtccaatctgtttggccttgtcaccgggatggcggaggacctgcagagtctggtgggggccacggtggtccgccgccgggtgtatgcccgttttctggatgcggtgaatttcgttgcgggcaatccggaggcggacccggagcaggagctgagtgaccgctgggtggtggagcagatgtcgcagctgacagccatgacggcctcgtttgtgctggctacaccgaccgagacggatggggcgctgtttcccggtcgcatcatgctggcgaatacctgtatgtggacctaccgctctgatgagtgtggttacacgggcggggctgtggcggatgagttcgacaaccccaccacggatatccgtaaggacagatgcagcaagtgcatgcgcgggtgtgagatgcgcggcatggcggttaattttggcggtttcctttccatcaataaactttcgcagtaa

SEQ ID NO: 38031 - DNA, 612 bp, Escherichia coli
atgcagcatcttgcagagcatggcattcaaccagcccggaatatggctgaacatattcctccggcacctaactggcctgcgccaacgccgccagtacaaaatgaacaatcaagacctttgcctgatgtggctcagcgtctgatgcagcatcttgcagagcatggcattcaaccagcccggaatatggctgaacatattcctccggcacctaactggcctgcgccaacgccgccagtacaaaatgaacaatcaagacctttgcctgatgtggctcagcgtctgatgcagcatcttgcagagcatggcattcaaccagcccggaatatggctgaacatattcctccggcacctaactggcctgcgccaacgccgccagtacaaaatgaacaatcaagacctttgcctgatgtggctcagcgtctgatgcagcatcttgcagagcatggcattcaaccagcccggaatatggctgaacatattcctccggcacctaactggcctgcgccaacgccgccagtacaaaatgaacaatcaagacctttgcctgatgtggctcagcgtctgatgcagcatcttgcagagcatggcattaatacatctaagcgctcgtga

SEQ ID NO: 38032 - DNA, 582 bp, Escherichia coli
gtgaagcagttcaccgttgccgcagtatatggcggcatgattggccaccgatgcgccaaagcagcacagcaggatatcgccaggctgtgcggaaggcagggaaatcctgtaaaaaccagtcgcctccatattgtccaggtacaggttctgaccattgcgccaccagtcatcctcacgctcaaaatccggcatatcaattcccgccagatggtatgcatcccggaacagcgtgtaacagtccgtcaccccgtgctcaaagagccgtcctgtcagatgtggcacacagcggaatttatgaatttccccccggcagaccagccaccaggacagtgcactttttatctgcagccgccggtcggcctcgctcagccagggcagaccaccgggatgactgtggaccagtgccacaatctccccctgcatctctgcccgcagccagtcttccggtgcaatacgaaaatacgcctccggctctgcagagatattcacacaagggatataccgctccccctccggcgttctcaccacgaagccgcacgactccgcaggcgcacaccgccgggcatgcgccagaatcgctga

SEQ ID NO: 38033 - DNA, 534 bp, Escherichia coli
atgagcaggaaactccgctatggtttatcggctgccgttctggcgctgattgccgcaggtgcttctgcgcctgaaatcctcgaccagtttctggatgaaaaggaaggtaaccacaccacagcataccgtgatggtgcgggtatctggaccatctgccgtggagccacccgggtggatggtaagcctgttattcctggcatgaagctgtcgaaggaaaaatgcgaccgggttaacgccattgagcgtgataaggcgctggcatgggtggagaaaaacatcaaagtgccgctgaccgaaccccagaaagcggggatcgcgtcattctgtccgtacaacattggtcccggtaagtgtttcccgtcgacgttttacagacgaattaatgcaggtgatcgaaaaggtgcctgcgaagctattcgctggtggattaaggacggtggcagagactgccgtattcgttcaaacaactgttacggtcaggtatcccgtcgtgaccaggagagcgcgctggcgtgctggggaatcgacagataa

SEQ ID NO: 38034 - DNA, 822 bp, Escherichia coli
ttgcccccaccgggccagccgcacctgtttctcctttcggtccctgtgggcctgccgggcctgctgccccggtgtctccctttggaccctgtggacctgcatttcccgtcagaccggtctctccccgctctcccctgtcacctttcggcccctgcggccctgccggaccagcatcacctgccggtccccgttcgccggttgcccctgccgggccggtgtctccacgctctcctttatctcccttcggcccctgaggacccgcgggacccggttccccctttggcccgggaggtcccaccacggtggggattcggtttacggcttcttccgccgctatcctgctttgttccgctgactgtgcgctttctgctgactcccgggctttttctgttgcggtcgttgcatccctggctgcattaccggctgcactttctgccgtctttcttgacaattcagcatctgctgcactttgtgatgactcactggctttttgagcggccgcagaagccgaggacgaggacgcctcctctgactgctttgcagcggctgcactttctgccgcctgccgggctgactccgatgcatcccctgctgaagtgtcagcatttgccgcgttctcttctgcctgactggctgatatgccggcattcctcgcggacgtctccgcctctccggcattcttcttcgcctcctcagcgtgacgcgccgcttcttccaccatcagttcaaaacgacgcagtgcctccggccggacgtcatcctccgacatggcaccgagaaaatcattcagcgtaccgggttgagaatcttcatacacggtga

SEQ ID NO: 38035 - DNA, 378 bp, Escherichia coli
gtggtgctctgggaaattgacctgacggtgcagggcggtgagcggtattttttctgtaatgagctgaatgaaaaaggggaggcggtcacctggcaggggcgggaatatcaggcatacccgattgacggcagcggttttgagatgaacgggaagggcagcagtgcccgcccgtcactgacggtgtccaatctgttcggtctggtcaccggaatggcggaggacctgcagagcctggtgggggccacggtggtccgccgccgggtgtatgcccgttttctggatgcggtgaattttgtggcgggcggtcgtggttatcgggcggcagaggtaaaaagaataaaaaaatcccgcagagttgcggggacagacaaagattaa

SEQ ID NO: 38036 - DNA, 240 bp, Escherichia coli
atgcgcggctatgcggaaggtggttatgtgggtggtgccggaagtccggcgcagatgcggcgggcggaaggtattaattttaatcagaacaatcacgtggtgattcagaacgacggcaccaacggacaggcggggccgcagctgatgaaggcggtgtatgacatggcccgcaagggggcgcaggatgagctccggctgcagttgcgtgatggcggtatgttatcggggagcgggcgatga

SEQ ID NO: 38037 - DNA, 339 bp, Escherichia coli
atgcctcctccttttttccacacaccggattggcactggcctccgtgccaatccggtacgtggagaagggcatcaggtagcactgttctgacaggaaaaatagcaaatggacaacagatcccattgccatctggtttttctgccagccagtgtacctggagtgtcagtaatgcagaaaatccgcacgggtggaagccgaattattttgcggggtcagttgcaacctatgatgccaatcgaattgtgaaatgcggcttctatgacgaatacaacttttatggcggtactcaccgaactgacctgtcggggaaatgtagttacatcgtggtttgccagtga

SEQ ID NO: 38038 - DNA, 396 bp, Escherichia coli; identical to SEQ ID NO: 24033

SEQ ID NO: 38039 - DNA, 366 bp, Escherichia coli
atgacctgtggttttgaagatcaatccatcgacactggactatttgtactgtctcgtatcaataatgaaaattatcagtttcatcatataagatttgactgcatccagggcgagcaaggtgaattagtttttgaacccagtgacgttgaatattactttgaaccagtgacgatacaggagtcaggaaccagcatattaaaaaatgagttagaaaacagtgaggacggtgcgggttactactcttttcagcatccccatgaaggaagtaatcagattcctctatttattcgcccgcgtacatatggaaacaatgtctcaagcgggcaaataatgagccgagtcaaaatcgtggtaatgtacaactaa

SEQ ID NO: 38040 - DNA, 333 bp, Escherichia coli
atggaaaagaaattaagcagtaaatacattcatatttatatgagtatatccttggtgctcattcgtttgatcagcaaaacattaaaactgtttccttttgcactggtgatggtattcacagtgttgttttattttatacctgaaaatgttatcagtgacattatcagtgaatggcagaaaagtgatgtgtcagacagactcagaattatcagattatgtctggaaataacttttttgtgcgctttgacggctgttttttttgaatttctttgctctgatgagtttctgccgcgaaagaaagttaaccaaaatgaagaagtgaataacagataa

SEQ ID NO: 38041 - DNA, 234 bp, Escherichia coli
atggctgaaagcgggtatggtctggcagggctggggatgggtaaggtgaaatctgtcaatccgtaccggcttacgccgggcttcggcggttttactccggtatcacatgtaaccacagtgtgccgccttacatgccgctgtcgcggcatatgttggtggctgtgtctgaaaggttatatactctgcataaaacctgacaacacgcagattaccaagcgaatatcaatactctga

SEQ ID NO: 38042 - DNA, 2601 bp, Escherichia coli
atggcgtttactaaaagacaaaaaaaacaaaatgtgacagaaagtcccgatttactttttagagagcttcctagacgaacggttcccgacgttcttcctcatcaacgagatatgatgagacgatatgcagaagacggtcaaaataaagcagatgttgctttgcaacttccaacagggagcggtaagactttagttggccttttaattgctgagtggcgaagaagaaaaaataatgagaaaatcgtatttctctgccctaccaagcagttggtgaatcaagttgttgaacaagctgagaataaatatggtttgagtgtgctgggttttactgggagtaaaaataattatgatcctgtatcagtagcaaaatataaacaaggacaatctatagcaataaccacctatagtagtgtattcaatgtaaatcctttctttttagacccggatgttattattgttgatgatgcccatgcggcagagaactatatatctaaactatggtctttcgaagtttctaggtttgatgatgagcataaatctttatggagtgtattatctgagttaataaaaccttatcttgatggtgctagttattcgaaattgaatggaaattgggatagcccagatgcttctgtatgggtagataaattaccaacacctacttttttagctatccaaaatgacttggttgaaataatagatgaatatactcaaggaacttcattacgatactcttggtcaatgattagagaatatttacatgcgtgtcatttttattattcatcaaagggaatgttgattagaccgctattacctcctacgtggactcataaaaatttttctgacgcaactcagcggatatttatgtccgccacattgggtgaaggcggagatttggaacgcttaactgggagaaagaaaatttatagactatcaacccctgatggctgggatacccagggagttggtcgtcgtttctttatttttcctactctatcattgactgagtccgatgcggataaattaactacgaaattgatagataaaagtgaacgttcagttgtattggttcctaatgataaacatgcagataaaataaagagtttattatctgaaaataaaaaaatagatatttttgatgctaaagatattgaagattcgaaagatttatttataaaaagtaataatgccgctgcggtgatcgtaaatcgatatgatggtatagatttctctaaagatgaatgtcgtctattaattatagaagggttaccaaaagcagttaatttgcaagaacaatttttgatgtcaagaattggagcaaatgcattattcaatgagcgagttcaaactagggttattcaagctattggtcgttgcacaagatctcttgaggactattctgcggttgttgtgaaaggtaccgagcttgtggattttttatcaaacaggaagagaagagaatattttcaccctgaactacaagctgaattagaattcggtgttgaacagtcagttaatgccggtgaacttgacgaattcttggaaaattatgatatatttattgataacggcgaagactgggaggatattaataaagatatcatcgagataagatctgaaaagaaacagaaaaaattggcaggtatcgttgaacttgaaacagtggttggccttgagattgattatgtaagggctctttgggactcagattttgagacggctgttggtaaaactgaagatattttagctcatctaacatcatctgatttaaaaggatatagagctctatgggaatatctggcaggttcaagtgcttaccaatcaacaaaattaacaggttttgatctgacaatgaaggcacaagagcattttcttcgagccaaaaaagctgctagcggtatcccatggctatcaaatttatatcgatttgcatctgataaaacggtaactactgaagaggagaatgatcgtgttattatgaagcaaatagaaggtatagaggtggttttttcgagtattggtattgcttcctctcggaaattcctacaagaagagcgatttattattgatggtttgaattcagaaaatcattttgaggaagctcatcgtaggatcggtcgattactaggatttgaaacaggaaaagtggaaactgatgcatcccctgatccttggtggcaactagaaaatctatgttttgtttttgaagatcatgcaaatgctaagaataatatactggatgcaacaaaagctcgacaggcaagttctcaccctaattggatgcgagaacatattataagttgcaaaggagaacatattaaaattattcctgtattattatctccagtccgttttatgacagagggagctgctgctcaggttaattcattgatgtactggaatctcaatgattttaaaaaatgggtacaaaaggcgttatctgctctaaaggatattagacgaacattccaggaacctggggatattgtatggcgtgcggaagcagcagcaaaactatctgaggctaaagttgatatagctagtttgaatgagttaataaaatcctcatcttgtaaagataatctggagataagtaggtga

SEQ ID NO: 38043 - DNA, 894 bp, Escherichia coli
atgagtgacaatttagttgttggccacgaggagttggttacgctgatcaatatgcctctttctattctagatcctaatcattctgcaattagccctgaaatgcgtaaaaaaattctaagagaacgttataagaaccaattaatagcagatggattagaaactggtcatcttaaagaatttagaggtaatatttattttgcctccaaattatcacttgaatcgtttgctgggcttgtttttgaatcctatttggttagcctttttaatcgtaataaaaatatgggtagggctgctcttacgtggtgctcatgtcggcaacgacaggttatgactaatatttatgaaaaatataaagctataggtacagggtttattaccactaaagcgctctacccccatttgtacgctcctcaaagtagatctgatattatttttatccgtaacaatcctatatcaggtcaacctgagcctgcaacagaaaaccctacgactaatattgctggtattcaggtaaaagcaattcgttcaaatttcaaatctaaaataattgatcctattgtattaggtgaatactcacatgtaataactctgctgaatgatcaatatgggacaccttccagaacaacatgtcttcgtgaattagatattttggctaataatggaagtattcatccatcaatgagagaatttgtcacagagaggattaaaggacctgaattcttaggaataagtcaaagagatgtcgaagattattatgattatattaaggattttttttatggaagtccaattaggagcaccgagaatattaatgatgcaatgggtgctgaaattaaacgttataaatataaacatgggctattagttcctgagaacattgataacaataattaa

SEQ ID NO: 38044 - DNA, 462 bp, Escherichia coli
atgctcaatacaatcgctgaccagatacatttccaccgccgaaaaacgtgcgccccggttcaggatggcatcgagcaccacgggcaggttttcgtcgtcctcatcgagccagcaggggtgatcgctttccttcacaaccagacgaaagcggcgcgtctggcgggtcagcaacgtctgaccggtggtagtcagcgccgcccggatacgccgcgcatcgtctgccacctggtaacagatgcttcgtactgcattgcgcaccgcatcaaaaactgccctgatttcttcctccgtcagccattcaccggcatacgggaaagacacctgcgttccgtctgccggaagtaccggcagcgcctgccactgactgccggacagtacaagttccgctccggttccggtcagtttctgaatggcggaggccaggtgcggcggcagcacgccatcgtggcggttaacgagtaa

SEQ ID NO: 38045 - DNA, 588 bp, Escherichia coli
  misc_feature (469)..(478): n is a, c, g, or t
atgggtaaaacaatcagtataaaggtcctgttcggtatttatcttctattaatggcaggcaaagtttttgccttcagttgtaatgtcgatggcgggtcaagtattggagctggtacaacctctgtttatgttaatctcgaccctgtaatacagccgggccagaatctggttgtagacttgtctcagcatataagttgctggaatgattacggcggctggtacgacactgatcatataaacctggtacaaggctcagctttcgcaggctctctacagtcatataaaggatcgctgtactggaataatgtgacctaccccttcccgttgacgacaaataccaacgtattggatattggtgataagacaccgatgccattaccgttaaaactctatattaccccagtcggggcggccggtggagttgtcataaaagccggggaagttattgcccgtattcatatgtataaannnnnnnnnngttccctggcttgcgtttccattcaccgtgatagctcttgccttaagtggaaactgtgcattacgagtgatctcatcaacaataaccgttttgctatcgccattttttaa

SEQ ID NO: 38046 - DNA, 561 bp, Escherichia coli
atgacagagcagaagcgaccggtactgacactgaagcggaaaacagaaggggagacgcctgtccgcagccggaaaactatcatcaatgtcaccacgccaccaaagtggaaggtgaaaaagcagaagctggccgagaaagcagcccgggaagcagagctggcggcaaaaaaagcgcaggccagacaggcgctgtccatttatctgaacctgcccacactggatgaggccgtgaataccctgaagccctggtggccggggttatttgacggtgacaccccccggcttctggcctgcggtatccgggaggtgttactggaagatgtatcgcggcggaatatcccgctttcgcataaaaaactgcgcagggcgctgaaggctgttacccgttcagaaagctatcttggcgcaatgaaggccggtgcctgccgctatgacgcggaagggtatgtgacggaacatatttctcaggaggaggaagcgtatgcggcagagcgtctggataaaatccgccgccagaaccggataaaggcagaacttcaggccgtgcttgatgagaaataa

SEQ ID NO: 38047 - DNA, 624 bp, Escherichia coli
atgatggctaaaccagcgcgaagacgatgtaaaaacgatgaatgtcgggaatggtttcaccctgcattcgctaatcagtggtggtgctctccagagtgtggaaccaagatagcactcgaacgacgaagcaaagaacgcgaaaaagcggaaaaggcagaaaaggcagcagagaagaaacgacgacgagaggagcagaaacagaaagataaacttaagattcaaaaactcgccttaaagccccgcagttactggattaaacaagcccaacaagccgtacacgccttcatcagagaaagagaccgcgacttaccatgtatctcgtgcggaacgctcacgtctgctcagtgggatgccggacattaccggacaactgctgcggcacctcaactccgatttgatgaacgcaatattcacaagcaatgcgtggtgtgcaaccagcacaaaagcggaaatctcgttccgtatcgcgtcgaactgattagccgcatcgggcaggaagcagtagaggaaatcgaatcaaaccataaccgctatcgctggactgtcgaagagtgcagggccatcaaggcggagtatcaacagaaacttaaaaaactgcgaaacagcagaagtgaggttgcatga

SEQ ID NO: 38048 - DNA, 363 bp, Escherichia coli
  misc_feature (321)..(330): n is a, c, g, or t
atgaccgataatttttatgcgccgccccatagcatcgaggcagagcaggcggtgattggtggattgcttctggatgatgacagcagtgagcgcgtccagaaagttctggcgatgctgaagcctgattcattttacagccgaccacacaaaatcattttcgaagaaataaccagaatgcaccgggagcaaaagccagtagatggcctgacgcttttcgatgaactggagcgtaaatcgttaacggcgtctgttggcggttttgcttatatcgctgagatcgcaaagaacacgccaagcgcagcaaacatcgttgcctatgcnnnnnnnnnnctcatttggcgaggtcatggaagactgggttag

SEQ ID NO: 38049 - DNA, 294 bp, Escherichia coli
  misc_feature (279)..(288): n is a, c, g, or t
atggctatgaaagtattggttacagcaaatcaaaaaggtggtgttggcaagacttccaccctggttcatctggcatttgatttttcagaacgaggcaagcgggttgctgtaatcgatatggatacccagggcaacgcctcttttaccctgaaacagttctcgtccggcattaaagcgaatgaaatgtggggcgagatcgagccaactcgctttacccaaatgcctgagatcggaatttctctcattgagtcagatattcaactggcaaacgtagaaaannnnnnnnnnctttga

SEQ ID NO: 38050 - DNA, 273 bp, Escherichia coli; identical to SEQ ID NO: 37703

SEQ ID NO: 38051 - DNA, 294 bp, Escherichia coli
atgcaggaatacggcgacgatacggcgcatcagcaaaacttagttcaggcactgagtgcggatatagtcctgtgccccttccagctgcttctgcattgtcatcaaccgttctctgaggatgaaataatcccgttcagcggtgtctgccagtcgggggccggttgcattatccacgccggaggtgccggtggcttcacgcacggtaccggagcaggtggcgttgatccgcaggcgcttacgaccagcggcaacatcagcacgcagagtttcattttcagctctcgcatcggctaa

SEQ ID NO: 38052 - DNA, 498 bp, Escherichia coli
atgaacgggaagggcagcagtgcccgcccgtcgctgacggtgtccaatctgttcggtcttgtcaccgggatggcggaggatttgcagagcctggtgggtgccacggtggtccgccgccgggtgtatgcccgttttctggatgcggtgaattttgtggcgggcaatccggaagcggacccggagcaggagctgagagaccgctgggtggtggagcagatgtcagagctgacggccatgacagcctcgtttgtgctggcaacaccgacggagacggacggagcgctgtttcccggtcgcattatgctggcgaatacctgtatgtgggattaccggggagatgaatgcgggtataacggtcctgcggtggcggatgagttcgacaaccccaccacggatatccgtaaggacagatgcagcaagtgcatgcgcgggtgtgagatgcgcagcatggtggctaattttggcggtttcctttccattaataaactttcgcagtaa

SEQ ID NO: 38053 - DNA, 378 bp, Escherichia coli; identical to SEQ ID NO: 38035

SEQ ID NO: 38054 - DNA, 294 bp, Escherichia coli; identical to SEQ ID NO: 38051

SEQ ID NO: 38055 - DNA, 330 bp, Escherichia coli
atgaaaacctttcgctggaaagtgaagccggatatggaggtgaactcgcagccatcggtgcgtgaagtgcgttttggtgacgggtactcacagcgtatggcggcagggctgaatgctgacctgaaaacataccgtgtgacgctttccgtgacccgggaggaggcccggcatctggaagcgttcctggcagagcacggtggctggaaggcgtttctgtggaagccaccctatgcataccggcagataaaggtgacctgtgccgcctggtcatcacgggttcgcatgctgcgggttgaattcagtgccgagtttaagcaggtggtgaactga

SEQ ID NO: 38056 - DNA, 330 bp, Escherichia coli
atgaaaacatttcgctggaaagtgaagccggatatggaggtgaactcgcagccatcggtgcgtgaagtgcgttttggtgacgggtactcacagcgtatggcggcagggctgaatgctgacctgaaaacataccgtgtgacgctttccgtgacccgggaggaggcccgacatctggaggcattcctggcagagcacggaggctggaaggcatttttgtggaagccaccctatgcataccggcagataaaggtgacctgtgccgggtggtctgcgcgggtcgggatgttgcgcgttgagttcagcgcggagtttaagcaggtggtgaactga

SEQ ID NO: 38057 - DNA, 636 bp, Escherichia coli
atggaagttcgccgccgcagcctgaatggccgtccccgtggaggcagacgcaccaccaccgaaagcaccgccaatggcgctgccgatacgcccgacaatgcccaccatggcctgtttaagcaggatttctgtcatcatggacagcaccgaacgggtgaatccccgccagtctgcctctgcaccggtcagcatcgccgccatattctgtgcaataccgtcaaaggtctgcgtggcagcacttttaacctgcgaaaaactgtccgtcgcactttccgcccactcgccccagccggacttcagcccggccatccagcttccacgaagctgctcctccgcagaccaggtgttcttcagtgccgatgtggccttcgccagcgcagccggattatcaccgtacacgtcccgaagacgctgcgcttcagactcccgctgcgcctgacggtcagtgagaccgcgggcttttgcgctgatggcggcctgcttcgcgctctgctgctcttcaaaccgcaccgcctgctgtgccagctcattcaggcgtttctggtattcaaccttgtcgcccagctcagccagctggcgtttgtactccagcgtctcgtctttatgcgccagcagggatttttcctgctcagataa

SEQ ID NO: 38058 - DNA, 285 bp, Escherichia coli; identical to SEQ ID NO: 38018

SEQ ID NO: 38059 - DNA, 141 bp, Escherichia coli
atgcatttggtggccagaacgactgagccgggcttaagtgacaacgtatccttttcaagaaaaatattaattggggagcaaaccatgataactgaacagacaacaaccattataattttactttcattagcaattggttag

SEQ ID NO: 38060 - DNA, 153 bp, Escherichia coli
atggatactatcgatcttggcaacaacgaatctctggtgtgcggcgtgtttcccaaccaggacggcacgttcaccgcgatgacgtataccaaaagcaaaacgtttaaaaccgaatctggcgcgcgtcgctggttagcaagaaactctgactaa

SEQ ID NO: 38061 - DNA, 396 bp, Escherichia coli; identical to SEQ ID NO: 24033

SEQ ID NO: 38062 - DNA, 345 bp, Escherichia coli
atgccggagaggcggagacgtccgcgaggaatgccggcatatcagccagtcaggcagaagagagcgcggcaaatgctgacacttcagcaggggatgcatcggagtcagcccggcaggcggcagaaagtgcagccgctgcaaagcagtcagaggaggcgtcctcgtcctcggcctctgcggccgctcaaaaagccagtgagtcatcacaaagtgcagcagatgctgagttgtcaaaaaagacggcagaaagtgcagccggtaatgcagccagggatgcaacgaccgcaacagaaaaagcccgggagtcagcagaaagcgcacagtcagcggaacaaagcaggatag

SEQ ID NO: 38063 - DNA, 207 bp, Escherichia coli; identical to SEQ ID NO: 37376

SEQ ID NO: 38064 - DNA, 453 bp, Escherichia coli
atgggggaggtgatactctatcagttgcatagtctactggctgctacagcgctcggtttttgccgattggcaccaactttctatttgttaccatttttcgccagtgggaatataccaacagtagtccgtcatccaataataatagtggtatcatgtgcattagttcagcattaccactatgaattatcgaccttaaatgaaatcgatatcgctttgttagctgcaagagaaattatcatagggctgttcattgcttgcttattagcatctccattttggattttccttgctataggtagctttatcgataaccaacgcggtgcaacgttaagtagtactttggatccggctacaggtgtcgatacctcggaattagcaagattatttaaccttttctctgcagcggtttatcttactaacggtggattgaactttattctggaaactctttag

SEQ ID NO: 38065 - DNA, 327 bp, Escherichia coli
atgactaaaaatactcgtttttcccccgaagtccgtcagcgggcgattcgtatggttctggaaagtcaggatgaatatgactcacagtgggcggcaatttgttccattgccccaaagattggctgtacgccggagactctgcgtgtctgggttcgccagcatgagcgggataccgggggcggtgatggtgggctcaccagcgctgaacgtcagcgtctgaaagagctggaacgtgaaaatcgtgaactgcgccgcagtaacgatatccttcgccaggcttccgcttattttgcgaaggcggagttcgaccgcctctggaaaaaatga

SEQ ID NO: 38066 - DNA, 426 bp, Escherichia coli; identical to SEQ ID NO: 37211

SEQ ID NO: 38067 - DNA, 996 bp, Escherichia coli
gtgtatgaagattctcaaccggggacgctgaatgattttctcggtgccatgtcggaggatgacgtccggccggaggcactgcgtcgttttgaactgatggtggaagaagcggcgcgtcacgctgaggaggcgaagaagaatgccggagaggcggagacgtccgcgaggaatgccggcatatcagccagtcaggcagaagagagcgcggcaaatgctgacacttcagcaggggatgcatcggagtcagcccggcaggcggcagaaagtgcagccgctgcaaagcagtcagaggaggcgtcctcgtcctcggcctctgcggccgctcaaaaagccagtgagtcatcacaaagtgcagcagatgctgagttgtcaaaaaagacggcagaaagtgcagccggtaatgcagccagggatgcaacgaccgcaacagaaaaagcccgggagtcagcagaaagcgcacagtcagcggaacaaagcaggatagcggcggaagaggccgtaaaccgaatccccacggtggtggggcctcccgggccaaagggggaaccgggtcccgcgggtcctcaggggccgaagggagataaaggagagcgtggagacaccggtccggcaggggcaaccggtgaaagggggccggcaggtgatgctggtccggcaggcccggcaggcccggcaggcccacagggaccgaaaggagaaacaggtgcggctggcccggtgggggcaaccggacctcaggggccgaagggcgacccgggggagacgcaaatacggttccgtctggggccgggaaacattattgagacaaacagccatggctggttcccggatacagatggcgcactcatcaccggactgacctttcttgaccccaaagatgccacacgggttcagggtttttttcagcatttgcaggtcaggtttggtgacgggccgtggcaggatgttaaggggctggatgaagtgggcagtgatacaggcagaacaggagaatga

SEQ ID NO: 38068 - DNA, 387 bp, Escherichia coli
atgcagcacctcacgccggttcaggctgtccgtgacggtgatgcggtcctgctcatactggtagcggtaactcaggcctgccgggttcagctgctccaccacccgcccggtatcgtcgtagcggtagcgcatctccggccttcccgcgtaacggtgcgccaccatccggcccggatgctgcgcgtcatacgtgaaagcgcgcacctgcgtattgctgcggtcatataccgccagcagttcaccggcttccgtatacgtgtaccgcgccagtggcgcaccgggcaggctttccgggtatgccgggtcgtgcgtcagccacaccgccgaaaggcggatacctctgtcgggaccgtattcggtaccgggcagtgtgtcggggaacgctga

SEQ ID NO: 38069 - DNA, 876 bp, Escherichia coli
gtgcggtttgaagagcagcagagcgcgaagcaggccgccatcagcgcaaaagcccgcggtctcactgaccgtcaggcgcagcgggagtctgaagcgcagcgtcttcgggacgtgtacggtgataatccggctgcgctggcgaaggccacatcggcactgaagaacacctggtctgcggaggagcagcttcgtggaagctggatggccgggctgaagtccggctggggcgagtgggcggaaagtgcgacggacagtttttcgcaggttaaaagtgctgccacgcagacctttgacggtattgcacagaatatggcggcgatgctgaccggtgcagaggcagactggcggggattcgcccgttcggtgctgtccatgatgacagaaatcctgcttaaacaggccatggtgggcattgtcgggcgtatcggcagcgccattggcggtgctttcggtggtggtgcgtctgcctccacggggacggccattcaggctgcggcggcgaacttccatttcgcgaccgggggatttacggggacggggggtaaatatgaacctgcgggaattgttcatcgcggggagtttgtcttcacgaaggaggcaaccagccggattggcgtcggcaacctgtaccgcctgatgcggggctatgcggaagggggttatgtgggcggtgccggaagtccggcgcagatgcggcggacggaaggcattaattttaatcagaacaatcacgtggtgattcagaacgacggcaccaacggacaggcggggccgcagctgatgaaggcggtgtatgacatggcccgcaagggggcgcaggatgagctccggctgcagttgcgtgatggcggtatgttatcggggagcaggcgatga

SEQ ID NO: 38070 - DNA, 369 bp, Escherichia coli; identical to SEQ ID NO: 29868

SEQ ID NO: 38071 - DNA, 720 bp, Escherichia coli
ttgtcaagaaagacggcagaaagtgcagccggtaatgcagccagggatgcaacgaccgcaacagaaaaagcccgggagtcagcagaaagcgcacagtcagcggaacaaagcaggatagcggcggaagaagccgtaaaccgaatccccaccgtggtggggcctcccgggccaaagggggaacaggggcccgcgggtcctcaggggccgaagggtgataagggagagcgcggtgacaccggccctgtcggggcaaccggcgaacggggaccggcaggtgatgctggtccggcaggcccgcaggggccgaaaggtgacaggggagagcggggagagaccggtctgacgggaaatgcaggtccacagggtccaaagggagataccggtgcggcaggcccggcaggcccacagggaccgaaaggagaaacaggtgcggctggcccggtgggggcaaccggacctcagggaccgaagggcgacccgggggagacacaaatccgttttcgtctggggccggcgagcattattgagacaaacagccatggctggttcccgggtacagatggtgcgctcatcaccggactgacctttcttgcccccaaagataccacacaggttcaggggctttttcggcatttgcaggtcaggtttggtgacgggccgtggcaggatgttaaggggctggatgaagtgggcagtgatacaggcagaacaggagaatga

SEQ ID NO: 38072 - DNA, 270 bp, Escherichia coli
atgaatatactaaaaaaacttatgcagcgtctgtgtggttgcggaaagcatgatggccgtgaacacggggagttacttacagcacagctgcgactggggccggcagacatcctggagtcagatgagaatggtattatcccggagcaggacagggtaatcacgcaggtggtgatactggatgcggataaaaagcagatacagtgtgtggtaagaccgctgcaaatcctgcgtgctgacgggacgtgggaaaatattggcgggatgaagtaa

SEQ ID NO: 38073 - DNA, 600 bp, Escherichia coli
atgcgtaaattatgtgctgttattttgtccgcagtagtctggcaggtcgccgctgctacgccagcgagtgcagcagaacatcagtccacgctgagcgcggggtatctccatgcctcgacgaacgttcccggtagtgatgatctgaacgggattaacgtgaaataccgttatgagtttatggacgcgctggggctgattacgtccttcagttatgccaatgctgaggatgagcaaaaaacgcgctacagcgatacccgctggcatgaagattccgtgcgtaaccgctggttcagcgtgatggcggggccgtctgtacgcgtgaatgaatggttcagcgcgtatgcgatggcgggtgtggcttacagccgtgtgtcgactttctccggggattatctccgcgtaactgacaacaaggggaaaacgcacgatgtgctgaccggaagtgatgacggtcgccacagcaacacgtctctggcgtggggagctggcgtgcagtttaacccgaccgaatccgtggccattgatattgcttatgaaggctccggcagtggcgactggcgcactgacggcttcatcgtgggtgtcggctataaattctga

SEQ ID NO: 38074 - DNA, 282 bp, Escherichia coli
  misc_feature (270)..(279): n is a, c, g, or t
atgcagttccctaatgataatgaaaaactaagcgtatatttaaaaaataaaatcccctttgaaaatatgataatcgatttatctgcactgaaaaaagatgttctggtatcgctaaaacagtgttgctttaaaaagatgacattcacaggtaatatatcttacgaaaatcttaatggcccagtatttgaaaattgtttttttgaggaatgtaatttcgagagtgtgtcccttgttggctttgataaagtgacctgtgaaagctatgacgtnnnnnnnnnntaa

SEQ ID NO: 38075 - DNA, 345 bp, Escherichia coli
atgaaaaaggtattgattgcagcacttatttctggtgtgtcttttggcgcttttgcacagcagggcggtttccaagggcctgaagcagagcgttcaacagtagcgcaggcaaaagaactgaaggatgatgcatgggttatccttgaagggagcatcgttaaaaaagtgggtgatgaacgttatgagtttcgtgacaatagcgggacaattgtcacggatattgatgacagcgtatgggccgggcagaatgtttctccgaaagacaaagtaagaattgagggtgaaattgataaagacctgagcagtgttgaagttgatgtaaaggcactgaaattattaaagtaa

SEQ ID NO: 38076 - DNA, 270 bp, Escherichia coli; identical to SEQ ID NO: 37368

SEQ ID NO: 38077 - DNA, 213 bp, Escherichia coli; identical to SEQ ID NO: 24046

SEQ ID NO: 38078 - DNA, 144 bp, Escherichia coli
atgtctgggtttttagtgatcttaatagctccgacaatattgttattagatagagtttcccttacaacttcattaagtaaatcatcccaattaattcttgatgatgtatctaaagaatgtaatgcattagtcagtgacaaatga

SEQ ID NO: 38079 - DNA, 162 bp, Escherichia coli
gtgcaaacccttcagcaagttgaaaactatacggcgttaagtgaacgtgccagcgaatatttattggccgtgatccgtagcaaaccggatgccgtgatttgcctggcgaccggagccacgccattactgacgtatcattatctggtagaaaaaatccactag

SEQ ID NO: 38080 - DNA, 1065 bp, Escherichia coli; identical to SEQ ID NO: 37262

SEQ ID NO: 38081 - DNA, 1983 bp, Escherichia coli
atgtatccgttgctggaagatgattcctgttattttctggcagttgattttgatgaagctgaatggcagaaggatgcatccgcattcatgcgatcctgtgatgagctgggtgtacctgctgcgctggaaatatcccgttcacgtcagggggcgcatgtctggatattttttgcctcacgagtttcggcccgcgaagctcgccgtctggggactgctattattagctatacgtgtagtcggacccgacagctgcgattggggtcttatgaccgattatttcctaatcaggatactatgccaaaagggggatttggtaatctcatagcgttacctctgcaaaaaagaccgcgtgaattggggggaagcgtttttgttgatatgaatctccagccttatcctgatcagtgggcttttcttgtatcggtgaccccgatgaatgtgcaggatattgaaccgacgatattacgggctacagggagtatccatcctctggatgtgaattttatcaacgaagaagacctgggtacgccgtgggaagagaaaaaatcatcaggaaacagactgaatatttctattgcagaaccgctgaaaatcacgctggcaaaccagatctatttcgaaaaagcgcaattacctcaggtgctgattaaccgacttattcggctggcagcatttccgaaccctgagttttataaggctcaggcaatgcgtatgtcagtctggaataagccccgtgttataggttgtgcggagaattacccgcaacacattgcgttgccccggggatgtctggacagcgtattatctttccttagggacaacaatattgctgcagaattaatcgataaacgatttgccgggacggaatgtaatgccgtttttatgggaaacctcagagcggagcaggaagaggccgtttcggcattactccgttatgacactggtgtgctttgtgcgccaacggcttttggtaagacagttaccgcagcggcagtgattgccaagcggaaagtgaatacactgatactggtacaccggactgaattgctgaagcagtggcaggagcgtctcgcggtgtttctgcaggccggtgacagtattggtattatcgggggaggtaaacataaaccctgtggcaatattgatattgcggtggtgcagtccatatccagacaaggagaagttgaacctctggtcaggaattatgggcaaatcattgtggatgagtgccatcatattggcgcggtttcattttctgcgattctgaaggaaacgaatgccagatatctgcttggcctgacggcaacaccaatccgacgggatggtctgcatcccattatttttatgtactgtggtgccattcgccatacagcggtccgcccgaaggaaagcccacataatctggaggtactgatccgttcccgttttacatctggtcatttaccatcggatgcgagaatccaggatattttcagagaaattgctctggatcatgacagaacggtggcgatagctgaagaagccatgaaagctttcgggcaggggcgaaaagttctggtactgactgaacgtacagatcatctggatgagatagcatcagtgatgaattcactgaaattgtctccctttattctccatggtcgactatcgaaaaaaaagcgtgcgatgctgatatccgggctgaatgctcttcctcccgattctcctcgaattttgttgtcaacaggcagacttattggtgagggatttgaccaccctccgctggatacgctgattcttgccatgcctgtgtcatggaaagggacattacagcagtatgcagggcgtcttcacagagagcataccggtaaaagcgatgtcaggatcattgattttgtggataccgcgtatcctgtgctgctcagaatgtgggataaacgtcagcggggttataaagcgatggggtacaggattatagctgacggcgatgaatcagtgatttaa

SEQ ID NO: 38082 - DNA, 342 bp, Escherichia coli; identical to SEQ ID NO: 29860

SEQ ID NO: 38083 - DNA, 213 bp, Escherichia coli; identical to SEQ ID NO: 37296

SEQ ID NO: 38084 - DNA, 258 bp, Escherichia coli; identical to SEQ ID NO: 23886

SEQ ID NO: 38085 - DNA, 183 bp, Escherichia coli; identical to SEQ ID NO: 37977

SEQ ID NO: 38086 - DNA, 540 bp, Escherichia coli
atgaaaggcttcccaattgcacatatttttcacccttcaatcccaccaatgcacgcagtggttaacaatcacaatagaaatattgattattggacggtaaaaagaaagtttgcagaaattgtctccaccaatgacgttaataaaatttacagtataagtaatgaactgcggagagtattatctgcaattactgcattgaatttctatcaaggcgatgttccttctgtcatgatccgaatccaaccggaaaatatgagtccattcatcatagatatttctacaggagaacatgacgattatatcatacaaacattagatgtaggcacttttgcaccttttggcgaaaaatgtacttgctcagccgtcaataaaaaagagctggaatgtattaaggagacgatttctaagtattgtgcaaaattcacccgaaaagaagccatcttaacaccccctgcgtactttaataaaaccagtattacttcagattgttggcaaattctctttttttcacccgatcattttaataatgatttttattga

SEQ ID NO: 38087 - DNA, 1056 bp, Escherichia coli
atgacggaacgggaactgtccattattcgtgcactgggcgaagaattctccacggtgctggcggatttacagcgcacatttgaggggaagatggccgcgcaggcacaagcgtttgaagagaaactggcttccctgtcggcggtattacagaagcatgtgacggtggatgaggtgcgtccggttctgcaggcgatggtggatgacgctgtggggaccattccggtaccgcgtgatggtcgtgattatgatccggatgtactgcagcaggcggtgaatgatgcggttgcgaatattccggtaccggcggacggcaaaagtatcacccccgatgatgtgcgtccgatgcttgagcagatggtgaaagaggctgtaagccatatccctgctccgcgtgacggtcgtgattatgatccggaagtactgaagcaggcggtgaatgatgcggttgcgaatattccggtaccggcggacggcaaaagtatcacccccgatgatgtgcgtccgatgcttgaacagatggtgaaggaggcggtaagccatattcctgttccgcgtgatggtcgtgactatgatcccgatgttctgcagaaggctgttctggatgcggtgagagccctgccggctccgcaggacgggcgtgatgccacggcactggaaataatccccgccattgacgatcaaaaatcctttccccggggcacgtatgccacacaccagggcggactctggcgggcgtatgaaaaaacgcacgggatgcggggatgggaatgcctggttgacggggtggccgatattgacgtcagcatgaccggcgaacggtcgttcactgtggtggtccggcagagcagtggccagcgtacggaaaaaacattttccctgccggtgatgctctaccgcggtgtgttcagagccggtgaaacctaccaccccggcgatacggtgacgtgggggggctcgctgtggcactgcaacagtatgaccgaagataaacccggagaagctcattcatcaggctggaccctggctgcaaaacgtgggcgggatgcaggaggctga

SEQ ID NO: 38088 - DNA, 351 bp, Escherichia coli
atggcaatatctgcaggtcgtctgacacagatgataagtgttctgaacccggtgttaacccgtaacgctgccggagaaatgacggaagaatgggtgtcatgcgggaaaattcatgcggatatccgtggcaggagcagccgggagcggatgcagtccggtgcggaaatggcgcaggcggaaatccgcatctgggtgcgcggtcagtccggccgggaaatcacggcagcgtcacgacttcatgtgctgagtggtccctggcgtgaccggatcctgaacgttgtcgggctgcccgtgccggatgtgaccggcggacgtctggaaattctctgtcggctgggaggggaaaaatga

SEQ ID NO: 38089 - DNA, 168 bp, Escherichia coli; identical to SEQ ID NO: 29866

SEQ ID NO: 38090 - DNA, 309 bp, Escherichia coli
atgctggaaaataccgttgatttacgggtctcctggaaagatggttctaatcttaaactattattacctaagccggttagcggtggccgatttgtaactaatgatggttctgttcattttgatggtgtggcatctatagcacatttgcatggaatagatgctgagttattaaccatatcatgtgctggaagaggatatcttaatatcgagttattggatgaaaatccagtagctgaaaaattcctcttttatcaggacgcaatgacaaattacaacaaatttcactttatgagaactataatttgctaa

SEQ ID NO: 38091 - DNA, 327 bp, Escherichia coli
atggcatgggatatggcgcttggctggattatctggtgtcaccgcgccgccatgcttcaggctggaaactttcgggaaaataagggttcgtcaaccaataattttcggataatctcggaaacgtcaaccaactctccggcaatccctgatgaggtgttgtccgcaatcctgaaggtcgccaggcttcgtgcagatttcgatgcttctgaagtggacaggcgaggtatcggtagttgtctggatgaggccgagcaagaacttatcgttaccattaacgaatacgccagtcagatcgcagtagaagcgacacagggggagaaccaatga

SEQ ID NO: 38092 - DNA, 279 bp, Escherichia coli; identical to SEQ ID NO: 37620

SEQ ID NO: 38093 - DNA, 825 bp, Escherichia coli
atgcgcggcgagcaatcaaaaaacgtattctcaccggagagtaaaaaagtgccctggttagggcaccatgtacatcctaatgtatgtacattaggtaattcacatttacttgcgttacttcgttttaagggggtgccacacgaaacacgtgataaagaaaccctaaatcgtgagtttaaaaggctggatcgctgtatcaaggcactagggaagcaagaaggtaaaaatttgatgcttcaaacgtacacatttaaaacaggtgtacgtctcgatgcgcattataaaatggagatacctatcttacaggattttgttgatgaatatactgcaccgttcaggtgcggggcatatcaacaagtagggtatggtatggggcttattctcaagcacagtgatcttgaggaaggtattgccagtatggtggaattactatccatatgccaggaaatgctcagtgattacagcgttgcggtcatggggatggaagagcgcaatggtaagttgtatagccaagtagggcgattctattcatttatttttaacggtgttgatcaagatgtcccggttacagatacccgacttggcgactcggttattaatggggaaacaggctttggtgcttacgattatgtagaatgccgcccatataatagtgctcctaggtttgctactacatatgatctgcgtgattacccagatgaaagtgaaccgggaatgtgggatcaggttcttgaggaacaatacgactttacattagttcaaacgttccatttcgaagaccggaacaaaatcaaaacaaagattaatgcacaaaaggtggattga

SEQ ID NO: 38094 - DNA, 363 bp, Escherichia coli
atgaaagctctaaaaatccagcttgatattctgaccaataaacttgcacaaccagctgtatattacgccttcatgttcgctatgttttcgatgttatctccagtttcggcggaagcggcctggtatgatcccatcgtaacctttgcgaaagactttaaaacgatgattattatcgttggggggatcgcagctgtcgcttcgatggtgtatatcggcgtgtgctggattatctcgcgtatgtccggtgatatgaaagtcactgcaatggactacttcaaccatgccgcagtaattggagccgttggtggtggtgttgctcttgctacctgggcttattcagtatggggaggaagcgtgtcttga

SEQ ID NO: 38095 - DNA, 690 bp, Escherichia coli
atgttatctgctgctacgttcgtttcgttagctatgcagtgtgctgtttcagttcacccggatacagcactggacgtagcaaaaacggaatcaggttttaatccatatgcaattgccgaaatcatccctaaaaaggagagaggtaaagatggtaaaagcgttattacgcacatgccaaagtctaagtcgagagcgattgaaataattaatagtattgagcagaaaaagcgacgctattcagtaggcttaatgcaaataactagcactaactttagtctatttaatgttacagctgaagatatgcttgatccatgttctaaccttaaggtgttcgaaaagataatctcggactgctataagggtgggggggatttacgaagcgctcttagctgttattactcaggagattatcaacgggggaaacggaaggagtcagagtttaataatacgagctatatacagcgaattggatatacaaccgcttcaaatcagtatgtcgtacctagtactaaagaagacagaaatgccgcaaaggagaaccctcagccacaatatacagcaccacctacttatgaatcatgggatgttttacgcgaatttccgcgaacatctaaccctaaagttcaacacagtaaaccttcaccagataataaggaactcattgatgaaagctctaaaaatccagcttga

SEQ ID NO: 38096 - DNA, 204 bp, Escherichia coli
atgaccgatgacaccaccaagaagaacactcaatcgcttgttgatctttctccagaagacaaccggcttttgactgaggcagccaaacgatgcggcagaagcaaaagaaaagaggcttctttacgtctggctgactctttaagaaatttcccagacattgccactgaaggtaagcgttttttaaatgacgggactaagggatag

SEQ ID NO: 38097 - DNA, 840 bp, Escherichia coli
atggaagaagagactaagagcgataactggttaggtgagatgctagctaaagcactcatcgtgaaggggataccaaaacagaagcatatcgcccacataggtagagttcttgagttaacaacagcggccgcccataaaaaacttacaggttctacaaaatgggaagtatcgcagctggtaaaggtagtccattcaatagggatggaaatgagcgagttttttgagctgtatagcccatcgcactcagaaactcacgaagcattatggagcgaaggtaatacaacgctaaaatgcaaaatctacctttcacctgaaacctccgatgaaaagacggaatattcagcagtgaaaatcaatgacgaatggtgcgtaattcacactgatgatattcgagatgaatacttagttgaatctaagagaaacatagaaagcattgttatacatcccaggaaaatagaaataggcaaaagtagcatagctatcctggatgatgataaaaacattgttgatagtatcaaagaaattataaacgatggccgatttatagttgatggattctactctattgatgacttatcacgtgcaattgataagtctgcttatgatgcttatattttggattgggttgttggagataaaaccgtattcgataccattaagaaaatcagacagtctcagaaaagaaactctatgatcttggtactaacagggcaattagaagggattattgatgaagaaatttcaatatctataaatgattatgatatcgtcggcccatttgaaaagccgattaaaggaagcttaataaaatccaatatcgataaattttttcctaagtag

SEQ ID NO: 38098 - DNA, 987 bp, Escherichia coli
atgaacaaacaacttttagagtttactggtagccttttacttgacagtaagtatattgtctcaccgtatggtatcagtaaaaaactacccaaaggagaaataacccctctaaactacgaggtaatacataacaattcaataagtaatatcactatagattacactacagtacaaaatcttactatagtgaatgggatgggcgttaccctgggtgactcaattattggcatatctgcattacataatataaagaaaataaatccaggaataaaaataagggtaatcagaccggagaattgcccagcttatgttaatgagctatatcacatagctaaaaatgtaatagatgaaatttattacatgccatatgatatttctcatttaaaagattctgatgtaatcattgatatgggaaaccaggtgtattgggaagatttcaatcgcttagaaatgcatgatttcttccttaaaagccttggccttaactacaactatttttcaccagaggagaagagtaaccgttggcttcaggattgcaatgtagaggaactagaccttggcgaatatgttttgtattgccctaatgcaagtacaaaaataagaagcatcccagcaaagtttcatcacaaaacaatcacccagcttacccaagcatacgggaaaaaagtatttggtttcattgacataaatcatgaaaactacactaacattgcagcaacatctaaaaatacagctgctttcatttcaataattaaaaattctaagtacatgtatacctgcgattcttcagctttgcatattgccgctggttttaatgtaccttccacttgtatttttaccacagtaaaaccggaactgcgcagcatttactataaagactgccattccatttatataggaaacaatttaactgaaggaattcataacagtgaagatgaatttctcattaagctcattgaaaaagaatttgaggtttattatgcgtaa

SEQ ID NO: 38099 - DNA, 498 bp, Escherichia coli
atgcgtaaatttaaatatttccttctggttgtagttttatcttttgcaaccctgtcaaatgctaacgcaaaagtaggtgatatttatattaatggaaaaatagccaccacaaatacaaaaaatggttacatccttacaagtcaaaaatttaacgaacttcccaaaacaataataagaacaacaacatcatggacggcaaaagatcacccagttaactttgaaggtgtaaaaataaaagacatattacatctggtaaatgccaaaggaaaaacactaagaatgcatgccctgaatgactactgggttgatattcctatttctgacgtagaagatttcaatataatccttgcaaataaaatggatggaaaaccattagaaataaggaactttgggccatatttcgtaatttatccattagacagcaatccgactaaactcaactcacctatttatttatctcgttttatctggcaagtagacaaaatcacggtgctataa

SEQ ID NO: 38100 - DNA, 1704 bp, Escherichia coli
atgaataaaaaattgatgttaatctttgcaggaatagcattggcattagcctttgctatctcaacaattgtaaaatacaactcattactttctgacaaatctttatatgctattacaggaacacaagagaattacgcatgggcaactgcaaaattctcgattcagttagcggatttttacgctttagttagaagcaatgataaagatcttgagcaaatacgcttgaaattagatattttattctcacgagtttccgttattaaaaatgaaagtgaatcaaccattcctctctataaagaaaaggactataaagaaactatcgacaatatatataaaaaactagaaattgttgatcactatataaaacaaccgtccccagatatgagaaaagtggtttctctggtaaatgatatagagccagactctaagttattagttaatattgcagatcacgcagaagttcgccagcgtacaaatgcaaatgtcgatttcaaagaaacaaaaaaacagatacttatacttttatatataacgggaatcctaacaataacattaggtatttttatttgtgttttcttatggaagttaaataaattattggactcagaaaaaaaagcatttaataataaaaatgcttttttgggaattgttggtcatgagttacgaacgtccctacaagccatcatatccacgattgatgccatttcgcaaaagtataataaaaaccatgacgatccccaatttataagattagaaagtgctgttactaaaattgaaatgcaaatgaaagacctatctgaatttgcaaggatagataatggtaatatacaaataagtgcagcacagtttaatttaaaaaaaattattgatcttaccgttgacgattgcattagtgcattaaagaaagagaacgtaaaaataatcacagataaaattcaagacattaatataataggtgactcatcgagaataatgcaaatcgtcgagaaccttgttactaatgctattaaatacacacaaaaaggtaatgtaaatgttatagctgggttagattccaaaacaaaccttgtaataaaagttgaagatacagggcaaggaattccaaaagataagattaaatcaatatttagtccttttgagagacttaaaggaaacgaaaatggtattcctggctttgggatgggattggcaattgttaatggcttggttaaagcaatgaaaggccaaattattgttaaaagtgaagttggcgaaggaagttcatttacggtaaaaatccccgtatctttaggctccagctcacatgaattggaaaatatagataattccatatacgagcctcattttaatcatcttagaatcttattagttgatgataatgaaatgtcatgctcttcattagtctctatacttgaaagtgctgattataatgttgaattcacaaactcacctgttcgtgcattcgaaaaactgcaacgaaaaccttatgatcttgttcttagtgatctccaaatgccaattatgactggggatgagttatttcagaagataaaatctatagaaagtccgaacaaagaaacgcctttcatatttattagtgcttatgcgaatgaaagccctataccatcaataacaatgctgactaaacctgtaagaatcagggatataaataaagcaataaatagtgtaatggaatcaaaataa

SEQ ID NO: 38101 - DNA, 579 bp, Escherichia coli
gtggcaaccgaagccgggcgtatcaaaatcaaaaacgaacttcggcgtcgcattcggcacaacaagtattgggtcaacgaagcaaacaagtacggcattgaaactctgtgcgagctgatgctggccatctttgatgacctcgacttgaggtcgtgggaaacgcgcaataatcttgaaacgctggccgaacgtgctgggttggtaacgcgcagtgatttagggcataagtcaatttcccgcgccagccggggatgtgatcgcctctcctggcttaatgcaattatttcggaaaaagcaccttttaatccttatgactcccgttgttcctgtaagaacattgaggtaacagaggatttctttgccattctcggcgttccgttaaaacaggtttaccgggaacgagccaggttacttaaggctgatccgaatgagatcatatcctccggcgatgtccgcctgatcgctattaaggtcgagggctggactcgcaaagcagctgctgggcttgccaggatgaaagcaaagcgtgacgcagctcgccagcgcaaacaggaatactactccccaacctttgcctga

SEQ ID NO: 38102 - DNA, 240 bp, Escherichia coli
atgactgatggcgttatgttaacgaaatgtgaccgtacacccaaaagcaatgctcaaaaacaaagagaactaaaacagcgaagaaagcatacgcatactgagttgaaaacatctattcgtaatgatgtaaaggcagatttggtttttttatcagagctttacaacatgactcaaaccgcagtgcttgaagagctaataacagaagccagaaggaattgcgggtttaacgacgtaaaatga

SEQ ID NO: 38103 - DNA, 3012 bp, Escherichia coli
atgttgattagagtcagtggctataataatggcggtaaagaatatttggaagaggggcgaaaaaacggtagggagttaagccgtgatgaattagatgaaagggttattcttgatggtgatttgggattaacacaaatggtctatcaacaaatccctgataagggacaggagcgttatgctacctttactttatcatttcgtgaggatgaaatcccaaatgaaacattacttgaaatcacgaaggaatttaaacagtttttaatgtacgcatatgaagaagatgagtataatttctatgcggaggcacatctcccaaaaataaaagaaaccattgataaaaagactggtgaaaaggttgaaagaaaacctcatgttcacatttttgttccgcgaaaaaatttactgacgggtaaagaaatgaatccccgaggaatgtttgactcgaacgtaaaatactttgaggctttccaggaatacattaatcagaagtataaccttgcttcacctcgcgaacatgttcgagtaaaccctaccaatgttgctgatgttttatctcgttataaaggcgatgatttcagaaccaaaaaccaatcttttaaaaagcaattggtcgcagatattattgaaaaggatattatcactcgcgaaagcttttatgctcatgtatctacttttggcgaaaccaagattaggaataaagggaaagcaaatgagtacatagctgttaagctcccagatgataaaaaatttacgaacctcaaagagacaatatttcatgacgattttatcgtcaatcgtgaaataaaaaaaccaccattggataaagctgttatcagtgcgcggtttgcagagtggcctcagcgtgcaaaagaaattaagtatgttagtaaagctacgccaaaattcaggcagctttataaggatgctagcgctgaacaaaagataacgatgttggcacaaagacaaaatgaattttatgaaaaaaatagggggcgatatgagttacaccctgccaaatggcaaagaagtaatcagcgaagtgctgatgaaactggacgaatcggatttaccaaatctcccgatggcttgcaaagtttgtccggcggcgatgtggcaactgacaggaactatcgcgaagccgagcgttcggtgctactgccgggcgatgcacacattcacatgggacaacaaaatccaggaagagatcctcgattgcgacatgatctatcaggaagacgaggaagacgaaacactggcgaatacgacttcgacaagcatgcccgcgttcatggcatcccaagcctcaccagtttcgcccaacgacgcggataccgactacgaggaggtttcggaggattagacgctgagtcgatcaatttaccgcctcatgcccttaatcccaaaaaaatagcaagtgttgaagacattcaaaaaagagctgtaaggctttttggtaaatcgaatgtaaaagactctacaaatagagtaagtcctattcgtagagttatgcctaaacaagataaaaatgcttcttttgttgctgcttattttttacgaaaaatggaggagaattcaatacaaccatcattgcgtcgtgaaatgcgcgaaattgataaaaagttttatgatacccgtcgatttattgcgactgatgaaaggttaacaagaactgagaaaaaacaaatcatctcagtattaacgtttgaacggattaaagcacatcatgcgctcaaacatcctaatgaatatttcgagttggagaatgataatatgggtagtgaagatattcgtaaattagtcaaaggaaaacgtattcctgataattctatcactaagggtgaagccgcagctgaaccgcaaaacgcaaaagctcgtttcgctcgtattatcaagaacgttaatgagcatgttgcagagcaacgcgctcgtgagcggcagagaacaatcacggctaatgatctgtataccaagcgagctaaacttagccagaatattcactatctcgataagaagactgaccggacgatgtttgtcgatacaggccgggctattgctttgcgcaaaagtggtatgactgcctcagctgtagtggttgctcttgaattagcgaaagaaaagtttggtagcacactaactattaatggtagtaagcagtttaaagagcaggtgatagaggctgtcgcaaagaacaatctggatattcatttcaccgataaggctatgaacaaacgtctggctgaaaggaaggaagaactcgcgattgagcgaagcggcaatagtgttgaaatgccagagcctacgattaacgcagtacgtgagatgaaagatatcagcccggaagcggtatcttccgtcaatgcaagcatattacaggattcgcttcctggtacggctggtgttaagcatgatgctgaaacaaaccagtatgaagtgttagttgcgtctaaagaggaaggggaggttttccgctttgctatgtcaccaagcgaagaaactgccacccggattgcaactttaatcaatgatcatgacccggagcatttagcttcagcaatgcgtaatgagctttcgcaggaattggaatcagagacggccacacagccagctcaaacttcgcagcctgaaaaatcctcagaatccatctatgaaggtgaattagtcgaacatggtgccgcgccatataaatttaaacccgacatggctaaaccagaaggagagcgtaatgatagttactacgttactctacgtcacgctgatggtagtgagcgtactttgtggggcgttgggcttgaagatgccgtacagcaattcaatgttggcgagaagatcaagcttgaagacaagggggtagtgcctgttaaatggactgagactcttaaagatggttccactgtggaaaaatcaggccagcgccggacttgggaaggttcaccagttgggcgggaacgcgatcaaaatgacagcgtgaactatcagaatcatgaagattatgatggccctggagttgcctaa

SEQ ID NO: 38104 - DNA, 351 bp, Escherichia coli
atggcagaaaagaaaaacaaggataaggttgtcgcctttaggttatcccaggaagacttcgtacaatttgaagaaaagctggcttcttcaaatatgaaaaagtctgagttttttcgtgaagtttttctaaatgccaacgttaatattacattaaaagcagctccatctaaagatctcgaacgccttactttcttgtttaataaggctagtaataatctaaaccaattagcgcatcaagttaatgccgctcacctcgaagggaaggtatctgaacgactttataaatctattaataactctcttgttgatatccgacatttattaatgacgggggtgtctgatgttgattag

SEQ ID NO: 38105 - DNA, 489 bp, Escherichia coli
atgatagagttcagccaatctaacaatgaggctttgatcatgtcagactggcgaaacaaccctagaacggggaaaagcacattcatgccgctgctgaatgatatcgatgcgcggttaaagctgggcgaaacactcaagcaaatatacgagtctttcaaagacagtaaggcgcttgaaatgagttaccctcaattcacacggtatgtgaaaaaatattgtaatggagggcaaaatgtcccaactccgaaacctaacgaaaaattaaaagtcaatgcacaggtaaacgcttcagaggatgcacaagatgaaaacccccatcagattacagatgatctactgagtcagtacatggaggtttgttatcgtcaggaaaggatagccaaaagagctatcgaaaaaggtgtacctcttgagcaaattaaagaatggaacgcgcctaataaagttagattaggcaccctaattacaaattatgaagttaaaaactaa

SEQ ID NO: 38106 - DNA, 702 bp, Escherichia coli
atgtacctgaaaattgcagttctcaataacagcgggaatgttggtaaatctactatctgccaaactgttcttaaacctcggcttccagaatctgagatcatcagagtagagaccatcaatagtgatggcacaaatgatgagagattatcagcaaaagattatgatgaaataattaaacgaattgatgatgtagattgtacaatcattgatgtaggctcatctaatattgagcaatttatggttcagatgcaagaatatcaaggaagtcatgatttgattgattacttcattgttcctgttaccgttcaagacaaacaacaaagagattctattgcaacaataaacaacctgttagatatgggggtagaagaagatagaattaaagtaatttacaactttgctgataaggacacatctattgaaaaacaatactccatattcttatcagataagaccagcaaaaaaatagcgggaaaaaaccctgctgtcgtttataacagtaatatatttaatctcttaacgaaatctggcttaaaatacgatgatgtttatagcgatgatcgcgatttccgtagcttaatccgagcagctgcgtcgaaggaagaaagacaggagctatctaatctgcgagcagtcaaaatgttgatgaatggattcaattcagatcttgatatcgcatttgataatttaaagttggcataa

SEQ ID NO: 38107 - DNA, 480 bp, Escherichia coli
atggctaaatcattgtctgaagaattaaaagacctgaaaattcaggcattacttgaagactatgtgaaccttgaagaaaaaatcaaggaaatccctgatattttgagtgaacatcttcaggaagttagaaaagcaatcaaagatatgccaggtgaactggaagttggtattgaaaaactcgcagctgcggtagaagaggctgaatcgagttataaatacattgctgaaaaacatagggctgtgttaaataatcaacttgacgaagccaagcttgaattaaggcagcatatcagcgcggcaatatctgataatatcaatgatgttaatagcaaattaaaccagctatctaataaggtagaaaacataaaagggaacagtacatttatcagtcaaaagagcttaatcgcaatgatcctcatgtctgggattacatttctttccctaattgtctgcatagtgcagataatgactcgaatttaa

SEQ ID NO: 38108 - DNA, 321 bp, Escherichia coli
atgagtaaacgcaccacaaaactgaaaatcagccccgcgctacaaaatatcgacgaaaataaaacgctgcgggagctggttagtgaaaccagccaccgcccgacatcgggcagcgtgatcactagggtgaattttccgttactggaagaggatattgcaaagtttgaccagtacagtgaggaaaatcatgcgatgcgtgtcagtgtgctccgggcaggattacgggcgctggaaatgctgggagaggaacaacggtctgatcttatccgggaagccgagtttaaccgacctaagaccgggcgtaaaccagttaaaaaataa

SEQ ID NO: 38109 - DNA, 666 bp, Escherichia coli
atgatcattctcgttggaagccataagggcggtgtaggaaaatccactatctacatccatatactgatgtgcctgattcttcgcagtggtaagcgcgttgctgcactggagtgtgatgatcagcatagtgtaaaagactggcttgaagaccgcagggcgcaaggaatacaaccggatgtggattactacgagtgttaccatgatatcccggcgatggctcggaagcttgataaaaaatatgacattgtactgctcgatgcaccagggcgtagatcgccggagttcagtaaatgccttgcggtggctgatctgtttatctctctggttaacccttcagctcagattgaaatcaacacgctcggcctgatggttgccgatgtgttccagtatcaggcatcggtcaacaaaggtctgaaagcggtactggttatgaacaagtgcgatactcatccgtcagatattgatgcttctagtttccgtaaagatatcgaggccgatcaggagaactggattcctgttgcccggcagcgtctttatcaacgtaaatcctattatcgttcctacaatgaagggttatctgtacatgagttcaatgaccgcaaagggaaccaggcgcggggggaaattgagatgttactgagagagcttgaattgctggccgcttaa

SEQ ID NO: 38110 - DNA, 765 bp, Escherichia coli
ttgagcacacatcccgccgaactgagccagatttcacacaacgcgatcagccgcatcgccaccccccggattgattttgcgctggcgcttgccgttcgtcagctggcgaaccgtcaggccgacaaaccaaagtacctgctggagccggaaatcaccgttctgctcgcccagggctttagcgatctgcgtaaacgaatgttctttgatgtgttgtggaataccggcgctcgactgagtgaagcgctggccgtcaccccggacaatattcacaccggggagcgctggccgtcacgcccgttcgtgtccctgatgaccctcaagcaacagggtaaacccggacggccaccgaaggacagttaccgcgatgtgccgctgtttgatgaaggttttacgctgcggcttcgcgatcacctggacacgttctgtaaattcaggactaagcgcgtctggcaggtcacggacgacacgatccgtaactggctgagtgacgcggtcacgcgctgtgaaagtgagggaatacgtttttctgtccccgtcactccgcacacgttccggcacagctacgcgatgcacctgctttactgcggtatcgagccgctgacactgaagaaactgctcggccaccggagttttaaaagcacgcaggtgtaccttgatgtgctggcactggaggccgatgttgccgggcgctatgctgtccgtttcggcatggacagggaagaagccgccgccctgctttataatgcgaaaaatattggtgtgtaa

SEQ ID NO: 38111 - DNA, 459 bp, Escherichia coli
atgagcgtcatgtttaaaatgaaaaacccgatatttaacgcacatgatctgtatgtcatgatacgcctgagcatgattaaatattttccctatgatacgactgatattgaaccgggtgaaatcctgtctatttttctgcaaaaagcacaggggctggatattgaaattgagaacgagccggacgtgagggggctgacgttccggggaaaaagttacgatatatataaagatttggagaaagaagaaaaggggccatttcattctccagcctggtatgtcgcacaggtggcaaaatggcatcagcaggatttaggtgcgctggacactgatatagatcggatgcgaggctggctgaaacagaatgattacgtaaaagacaacctgccaacggataaatttttacagcaggaatttttgataattgccgatgttgcagcggaaagaaaaagcagccgttaa

SEQ ID NO: 38112 - DNA, 123 bp, Escherichia coli
atggattttaacgagaaagagttgggctgggtgcttgcgctggggagtgtctgcgtcgttctgtgtgtgttgttagggctggtcatgctcgcacaacagctgtttcccggagtcttcgggtga

SEQ ID NO: 38113 - DNA, 306 bp, Escherichia coli
atgaaattcatagctatattaacgatgactttatcggcaagttttactgcgtcagcgacgggtattccgctgattaatccaggcgcacccattaaggtatctgaaaccaatagctatcgttgtggagcggatggtaaggggtatattctggatgatggaaagttgcaacctcttatttattctggcgttgctgtcacatgccatgatgataatctatggtttgaagggcgctcgttaagttttatggatattgtcgctttggatgcgaaagatattactgcggccaaagaagaactatcaaaataa

SEQ ID NO: 38114 - DNA, 396 bp, Escherichia coli
gtgaaacaaatattgtatgttgttacagtggctttgttagtctccgggtgtgaccaggtaaaaggtgcgattgataacgtgatgaaggattacggccaagaacctgctatagcaatatcaccgggatatgagataaataatcacggacacaaaagtaaagtgtatggcttcagcgagtgcccgcaatccgttttaagaagccttattagggaaacaggttgtatcatcgttaatccagatgaccaagccgtatcagtgtttattggcgaaggggaagtaccacaccaaacagctacaaatgaaatttggattgtagaacgtcacggtgaatttcctaataattccattcgattcaaacgaccggataactcctatgtcattccctttgagaaataa

SEQ ID NO: 38115 - DNA, 198 bp, Escherichia coli
atgaatgctgatgaaaaagtgagtttaacactggaattagacacagaagtagcctgggcgctggcgcagttctgcaagcgtacatctcattcggattgtgctgaacgctccacctcagaaaatgaggcatatctgatgatggatggtgtgaatgctgtcatgcgcgggctggctgagtccgggattaatccccggtag

SEQ ID NO: 38116 - DNA, 249 bp, Escherichia coli
atgaaaatactctcaattattttttgcgtcgcgcctgtggcttgttttgcttcaaacaaaaatgttgaccatgtttttataaacgcttttcaggccgctattgcaacatcattatgttcagatgtagctacagcaaccaatgatagccacttttctaaagacttcgaaactctcatacaactgtgcaaagagcaaggtgatcagcgtcgggctattcttgatgcttatactaacgcagaacatatttga

SEQ ID NO: 38117 - DNA, 549 bp, Escherichia coli
atgaatgagcaccattacaatcgtaatctctaccttgttatgcgtacagctttgattgccttggttccatgtctgttggcgattggcggcatcgcgattttctatagcgcaaaaggtgtaatttataatcctgtttttcggcttcctgcttggatatgcaatattgctctcgggaaaaccattatcccgtcatcgactactgaatttacacggctaaatagcattcctaattattatactttcggggatactattattggtgttttatatttatttatagctactgttatcacattttattttgtttgtttttttatagtctatatctatgcgcggataggtcattattgtcttgtgtataagttaggagctgaaggagcgcgtgcttacgagaaagaacagcaaaaaaaattgcaacaccaaactgaaagcgctagatctttatctgctctagaatcagcacagcatgaacattgggttcaatggaaaaagttctataaaagtgagctagattatgaagagtggaaagaaaaaataattaataagtaa

SEQ ID NO: 38118 - DNA, 270 bp, Escherichia coli
atgactgaaataaaaatttatactcctgaaacatggtctggaaaattagtttctgagcaagatatttgttcaatttcagatctggtaaaagcaacaatgcgccatgctccagaggcaatatcaataggtgaaaataatatccccggccaatgtcctgctttttatagttgggctatgaaattgaataacggtgaaaaactcccaagaggtaaatattttagtcggttgcagttaacaaaaaaatattgcacatatttaaatattaagtga

SEQ ID NO: 38119 - DNA, 138 bp, Escherichia coli
atgtattatgtttatttgacaatttctatgatcggtgtacttacatgtatgaatacagatgggaaaatttgtaccaccgccgctattttaacactgttttcatgtatgatgatgtggtatgaatccttgtcattatag

SEQ ID NO: 38120 - DNA, 318 bp, Escherichia coli
gtgaaacagtttgcagtttacaaaaataaatcccggaacaaacaggcatacccgtattttattgatgtgcaggcagatatgcttgcacaccttaatactcgcctggttatgcctttaacgcagaaagctaactctaattcgcaggtaaaagcgttaacgccaattattacaatcgatcagatcgattatgtagtgctggcaaccatgataacgacaacggatgtaaaaaatctgaaagctgaagatgcagttatggatgcttcacatttacgcgatcaattggtttctgcgattgatatgatgattttaggtatttaa

SEQ ID NO: 38121 - DNA, 174 bp, Escherichia coli
atggaattaacagcgcttgcctcgttgaaacgtaatgttaagttttggactgaacaatgtggttgtaatgaaaagcaaatcattgcaaatattaaaggttggtataatttcgcttattcaccaagcgaacaagagaaagcaaaggaggaaattctaaaaggctttatgaaataa

SEQ ID NO: 38122 - DNA, 189 bp, Escherichia coli
atgaactcttttgaataccttcgcctctctcgtttcgatgttgtatttcttgccaaaaattgcaataacgaaactatccaatgtcatttccatacgaatgctcttaatgagtgtgatgctgcttttatatttggtcagcataaccaaaacaatgattatgcaatccttcgggttgagcaactcaattaa

SEQ ID NO: 38123 - DNA, 504 bp, Escherichia coli
atggatctgaaagctgattacagaggcgaacttgcgcagcgtgcgcgggtgtttctgaactacacacaaaaagaaatggctgctttgttcgggctatcccttcgatcctggcaggataaagaacagaatactaatcgcgtatcggtcagtgaaacatatatgcttttactgctactgaatgagcatcctgactatcaattgctgcctcgcatcgatgatgttaagacccctgctcagcatgcagcaaaaattgccgttgagctggcgcaatgcctgactgagcgtgtaccacttccaacaaaagtagtagagctggaaaatgctctgaatgcggcaatcctggcgtttcgggaggattttgtagccgatatggataacggacaaggtgacttatctccgctggccgtgttgtctaaagagcttgaaaaggccagaaatcaaatcatttctctggagtcagataacagcaaactgcggactgaactgtctaaaaaagcttgttaa

SEQ ID NO: 38124 - DNA, 297 bp, Escherichia coli
atgaaagatctgttttttgtgaggcgtcggggcgaaacgtcccggattactcagtcgctggctgtgcaaagtgacggtatcaagtaccggcttcaatatctggtgcttgatcggacgaacccgacgaaagcagaacgagcatctggggcaaaagaggagcgtatcgaggtacttaatcaggaatttttccttaatgttggtgactttatccgggtaagcgactttccgttaccaaaacttacacgagaatttattcgttttctaaaggagtctcaggaacatggatctgaaagctga

SEQ ID NO: 38125 - DNA, 564 bp, Escherichia coli
atggaaaaaaccttttttgcccgttatgaagctgtatttaaccgggtttgtacgttcctgggcgatggctggaagatagacagacgtacaaaagatgcataccggataaatttggtaaatccggccttacggcattactccatcggcgcacgtcttgaaaaagatagaattcacttgattggaggagtccggtctgtgcgtagttctggcggttactccgcttgtacggtgtcccccatgcgcgaaccttggggaattgctcaggacatccgccgtaaaattttgcctgatgctgaaaagcaaatcgcttatttcgaagctgaccgcgccggggcgcaaaaaattaaggatgaacggcagattttaatcaacctggtcgggcagctggtcgaggtgcaaaactatggtggttactatgatgtgctgtgccatatcaaaacccccgaagggattacaggggatgtgtgtgagatgtacggtgaagcatatcggcttaagctgagcgatctcagcaaagaccagttaatcaaagtgattggatttttatcaacactggagcgttga

SEQ ID NO: 38126 - DNA, 525 bp, Escherichia coli
atgaatatccaggaagcattaaatgtatttggtttatccggtgaattaaccaaagaagaaattaagaaagcctacaaaaaagcctcgctgaaacatcacccggatcggaacaaagataatccgattgctgcggaaatcatgaaggcaattaatgcggcatttgattttttgatggctaatttcgaaaaggttaatcaataccagtcaactgatgataatgcacgttatgactatggcgaggagctggaacgagtattaacagaattaaataatcttccagacattatttttgaggttattggtaactgggtttggatctctggcgataccaaaacacataaagaagcattaaaagcgttaggatgtaaatgggcgtcgcagaaaaagcagtggttttatcgcccggaagaacataaatccatccgcaaccgtaaagagcattcaatggatgaaatccgtgaaatgtatggcacttatggtcaacgtaaagctgatgggtgcaaatctgtagagcgccgcgcctga

SEQ ID NO: 38127 - DNA, 216 bp, Escherichia coli
atgtctattaattctttcgtcccaactattgaaattaaatatcatcgccgacgctggcgtattatggttgggtgttcttgcttaggctcatttcgttctgaagaggccgcacaagagagcctagagaaaaacagagtattttatgaatactggtcagggtctgcctcggttcaggcagaaaacaccgctccagtggtcgtggaggttaaatattag

SEQ ID NO: 38128 - DNA, 330 bp, Escherichia coli
atgtcttctctgcaatttgctaacggttccgtttctgtgggggatattttcgcttcctcctggggatatgagcagacaaacgttagtttttaccaagtggttagcattcatgggaaagctacggtttgtgttcgcccagtggattctgaagtaacatatattaatatgcaggggtatgttatacctaagcctaatatttttgtgggcgaagatattataaaaagaagaattaaagattatgcatcctgcccattaattgtaattgaagagtacgaacgggcttataaaactgatccaacagaaaaacatgagttttcatcttattgctga

SEQ ID NO: 38129 - DNA, 711 bp, Escherichia coli
atgaaatcttacgatagtgaaattaaagcatggtgtgagcgtaaatatcaggatgttgtaagcgtattcggtacggataacgttgatatccacattcacgcttacactcgtggtaatgaatggatagtgtgtgacattttcgctcatggtgacaaaagtaaagttgcagataccacattttcattcggcgatgatacgattttagatgatttgtattcaccgcaagtaaaggatgttatcaccctgtttgaacttctcgaaatgctggaaaaacagtttaaaagcagaattcattttggaatgccacaaccaacaacgtgcacaacaacaagtaagtcggattgttgggatatattgcggaatcaatatctggatagttgtcaaaataacgaaccgaagtacgatacgcttgaagttgaagactacatgacggatgaatcagtaggccgtcaggttactgaatacagaaaacacacaaatggcaggtctttactgattgttttcccggaatacgatgacataaacgaccactccaatatcagcaaggacgatgacaatgaagatgcttttgcattagcagggtatgttagtgatcagctatcaataataattaacgcatttgataaagataatgcgaaagaaattattgctgcggcagcgggagaaattcaatctttagtacaaaaagattgtgttgacaggagatattaa

SEQ ID NO: 38130 - DNA, 537 bp, Escherichia coli
atgaatgtaatgttgaaatcttatagcttattgttccaatcaatctttactggcgctcttctgtttatcagctctgcacctgcatatagcttaggcatcccggatgcttttcagatgtgggtaactccaaaaatacagggtgaagtaattcgagttttagatggtgatactatcgaagtattacagaacaaaacacgtgtcagggttcgtctcctgaatatcgatgccccagaaaagaaacaaccttttgggcgctggtcaaccaatcaacttaaagccctgctggcagggcaatccgttaccgtcatttatacgcagagtgaccgctacgggagagtgttagggcgtgtgctgacctctgacggaaccgaggcaaaccgacaacaggtaatatcgggggctgcatgggtgtacgacagatacaacacagataagtcattaccgactctgcaacaggaagcaaaagagcataagcgcggcctgtgggttgacgataaccctatgcccccgtgggaatggcgtcataaaaagaactga

SEQ ID NO: 38131 - DNA, 459 bp, Escherichia coli
atgaatgcaatgaatgggataaatgcagcaaaagccacattaaaaaacataaaagcacatggcaatattcttgttactggcgtaactggatcaggtaaaagtgagttgttatgtaatatttcattgccagattctaaatattatgatttttgtgctttatgtaaatcttcaatttatccaaatctacatgagttatgtgaggaaaatgcggatatatatttagatgatcttttaaattcgcaagaaagtattttgttacttgatagtgttgctttccctaaatcttttgataactcaaaggttgttaatttcataaaagcagccaggaaaaatggtaagcatttagtgatagttgcctggccttcacaggtggaaagaatacagtggctatttggggctgttattacgcttactaaagaagttggacataggtatgaatgtaatgttgaaatcttatag

SEQ ID NO: 38132 - DNA, 525 bp, Escherichia coli
atgaattttcgccatatggtgatgcttatcatcgtctgtattttaggagggatatctcagcctgttctggctggcccatcccaaaatgaatgtgctatttggttatgtatgccagcaggttttccagggagcgattgtaaatcgcctcataaggcaatgatcaagcgtattaaaaaaggtaagtcgccacttccatcattatcaagttgcatggttgatggttctgcatcggtgccggggttgcctgattctggtagtcagaatattaaaacaaacgaaggacgggcagcctattattataatcgatatcaatgcaatcgtgaaaaccatgatggacgctgcattggttataaaaagctaccgaataaaatcgtgatggacaattggtgtaaaaaagagccacaaaaagatgcatataaatcagattgtaaatcaatccgatatatggaagctgttattgatggcaaatcgtatggaacaccacttttttatgatgataacgggaatacctacgagctgaattga

SEQ ID NO: 38133 - DNA, 1611 bp, Escherichia coli
atgataatgaaaccaaaactccctaaaggctgggaaataagggatggaaaggcattacaaaagcgaatagaaaaatatccagctatattgatgggtaaagatccctacagtaataactttctcgcgacatacggacaaacttacctcatgctcgcagctccgccgggaagcggaaagggggttggtattgttgttcctaatttattgcagtacccacattcggttgtagtgaatgactgtaaatttgaaaatttccatttgactgctggatttcgtcgggcgtgtggtcaaaaggtaaaaaggttctccccggaacttctggaaacgcaccactggaaccctttgcgggttatcaatcaagatccattgtacaggctaggtgaggttcgtaccttagcatcatcactatatgtgcctgacaatatgaaaaatgccagttggttttccaaggctgctgacgtttttatagcgatatgtctgtaccttatagaaacaccagaattaccgttctcattacctcagtgctatgaaattgcatctcagggaactcagttaggcagttgggcgcaacgagttattgatgagcgcggaaactcggataaaccgctgagtgatgaaacagtacgtgagttaggggtcattgtctcagagtctaaaggtagagagttctctacattaatgtcctttgtgacaggccgcttaagcctatatggtgagaagcttgtagctttagcattaactgaaagtgatgatgatgacgagaatatagacttcagtaaattgcgagaggagccaacaagtatttatttttgtgtgactgaagggtcgttaaaaaaattcggtccattaatgaatctgtttttctctcaggctattcgagaaaatagcaaggtattaccggagcagggaggatactgtgaggatggttcccttagacttaaatatcaagtcctctatgtaatggatgaatttgctgtaatggggaggatttcagtaatggaaacagccccagctttaacaaggggagccggattacgctacttaattatttttcagaataaaaatcaagtttgctctgatgaatgctatgggagtgagggtggtcaggctgtaatgaaaccattccatgtcgaagttgtatatgcaccgggcgatattaaagtgtctgaggaatatagtaaacgactgggcacaaaaacggttcgagtaccctcagataaccatggtgtatctgatggacagcggcgttcaagggggaggacatttacattacaacccagaccactaatgctaccgcaggaagtagatgaattgccatatggagaagagttgattttcatgcagccatctaaaaagactcccgcaatgaaaataagagctaaaaaaatcttctggtatgaagatgaagtattaaaatcacgtgttgatgacaggaggtatccattacccgcaattccaaaaggggatgctgataaagctaaaacacttgttgtgccaatgggacaatctactaaatctgtttcaatggctagccctcatggtgacgctatgagagaagagagtaatcgccgccgagtagatgtgtcaggtgttatcaaaacatcagattaa

SEQ ID NO: 38134 - DNA, 351 bp, Escherichia coli
atggttaagctaaaaatatttttcgcaatagcaggtctaacctttatttgttttattatcggcttatatgcgggaggatgggcgtggtatgccttaacaggatatccagataaaataccttccttaatgactctttttgatttgggtgaaatatcattaaccgataaaagtaaaattatgttgccgtgggcttgggcggtgacagcagttataacatttttacctacaggcataaccttgtttatttttttaggcggaggggataaggggcttcgaagtttacacggtaatgctcgattcgcaaataaaagagagttgaaaaaaatttggtatacggagcctgaaaaatga

SEQ ID NO: 38135 - DNA, 723 bp, Escherichia coli
atgactttccgtaaaccatcgcttcagcgctttactttagaagattatgcgaatagtgggcgttttgataaaacaaataaagaacaacacaatcagacagaactatttgaatggcaacttgagcttaaacaatatgtaaagcaaagagactatgtgaagtttttcaaactagccgtagctaaaaaacttaatattataatttttggtggtactggttcaggtaagacaacttttgcaaaatcagttgtcgatatatatccccataactgccgtttgttaacaattgaggagttgaatgagatgaaattgccttatcatctcaatcatgttcatcttctttatggcgattatgtaactccaaaagatttagtttcttgctgtatgcgtatgaaaggggatcacattttgcttgcggagctaacaggcgatgaagcatgggattttatggagttacttaataccgggcacccaggaactataactacagcacatgctaacggtagcctcgaaggttatgcgcgtatagctggcttaattaagcaatcggctgtgggagctggccttgactacgactacattgataggcgtgtcagaacttcatttgatgccgttttatacatggaggagacggaaattctggatgtaacttaccaaccagaaacgaaacttgcgcttctaaatggtgcttcaatgaaagaagcgttatccatgtatgaggagtga

SEQ ID NO: 38136 - DNA, 207 bp, Escherichia coli
atgtttatcacaacacgacaagctgcattgctattacaggtgaatgaaggtgagttaatatttgaattggaatggacagggctatttaagggatgtcaattaaatatgtttgataaccgtaaaggcagaactagaaagttttcttatgaggatgttatggcagttaaaaggaaattgcattctgataagaaagtcaaaggacattaa

SEQ ID NO: 38137 - DNA, 393 bp, Escherichia coli
gtggaggttaaagctggtcaaagtagcgttgcaacagtctggacagagttagacacgtcgccaggtgttcgtgcttctttaaatggattgggggttgatcctatgggacgaagcgggacagatgccgaaatggataaccactatggtaaacggtttggcggtgctgtaatgctgtcgctggtacaagatgttttttcatctatcagtaatgcgacgcaaaataataatggtatgactatgaataattctacgcaaaatgcggaagatatggcgagtaaggcgcttgaaaatagcattaacattcctccaacagcctatgtcaaacccggcactgtaattaacgtaattgttaatcaggatattgacttctccagcgtatttacaacgcgctag

SEQ ID NO: 38138 - DNA, 306 bp, Escherichia coli
atgaagaagctatctggtgcgtgtttgttatcactgtttattctatttaccttcagccctgtagcctcagcggctgatgcatgcaaaaccgtgttatgtctttatggtaaagctgtaggcagtggcggaggtagtgaatgcagaagtgctgaaaaagacttttttaatattctgaaaaagaaaaaagggagtattcgctggagtaaaacatttgacgcccgcaaggcatttctgaatcagtgctcaacggctgatcctgctgctatatcgaaaatcatgagtaagtttggtcgtgtcagaggttaa

SEQ ID NO: 38139 - DNA, 249 bp, Escherichia coli
atgtcgaaactaccgtcgccaaagattaatatcagaaacctgaatcctgatatctattctgttcttaaaaaagaagccgaaaaaaactgtcgctcacttgagggagaagtaaggtttgctcttggtctttatgcagagtttcttataaaaaataaaaatcaggaggacagatattcgaagatattatctgaactttctgatatcaaaagtgcaatgggtatatctgaacttattaaggagaaaatatga

SEQ ID NO: 38140 - DNA, 537 bp, Escherichia coli
atgaagaaaaagattttagctgacgctgtttcagaggctatcggacgaggtaagggatttgaatgggatgatttgattactaatcagccgttaaaaaaagagagtaaaaagacttcagccaaacagtcattttctccaggctggctggcaggaggcatttttatagtagcgttgatgatattcctttctggatgttcatccccgccccctccaacaccgattgaatgggacacaacacagtctctgaatacgggtattcctgaatggcgtgaaaacaaccttgtcattccatccgatactgtttctggtcgctggatgaagatactgaataactttaaaggtgatgaaggaaattatgatatttcagtttattacgcaatagcacattcccctgttatcgtggtgcatacttctggcggtgcattttttaaagctaaagaatggctcaggaaacacggtgcgaaaggagtaatccaatatcatcctgtcactgattgtatgctatgcacgaatacaagtatttatttctcacgataa

SEQ ID NO: 38141 - DNA, 1833 bp, Escherichia coli
atgaaaacttttaattcgggacagttgattttcttgctcatcgtgacaatcccactggcatgggtgattgctaccgtagttgtttatccgatgaatggacttggcctgaaagcgacctggaaaacgtatcagttcggtatgctttggcaggtcttgtttgcagataacatacgtagtgatatcagattcagtggtattaaggctattggcgctggtttttgtggcgcagttatgattttagtgatgatgtttcttgcagctaaacaaagtaagacatcaatttatggtgatgcaaaatttgccagtgatgccgatatacgaaaatccagacaagtaacgtggggagataaaagtaaaggcggtataattattggtagttataaaggtaagttattacgttacacacagcctgattttatctctatgggggcgggaacgcgtgcgggtaaaggtgccggaattgttataccaaatcttcttgattatgaaggttctatgatggtgctcgatcctaaacaggagtgttatacgataacaagtaaatacaggcagaagatattagggagtgaggtttatctctttgaccccttttccagaaaaacacatggttttaatgctctggcctatgttgatttgagcacagaacagggtgtaacagaccttttaagtcttggggaaacaatttataccactgacgggaaaagtggagccgaaaagcattttaacggcgaatctcagcttatgtttgtcgggtgtgcagaattactctggtttcttatgacttatcgtgcagccgacttgagaagttttggcattaaacattgtttttcgattggtactattcttgagctattcaaccgaattccaatggaggatgttcttgcaaacagagaagtatatcttgaaacaacagatgatcctcatgtccttttcattatcaaagatgcacttgataagttcagacattacgttgagcttggcgacgagcctaaatcttctgtcagtgggacgtttacggaaaaactgaaactctttacgttaccgcttttcagggctgcaactgacagaaatgattttgatatacgcgatatgcggcgtaaaaaaatgtcggtttatcttggcataatggctactgaggttgacattgcaaataatcttcttaacctgttttttaactttgcgataaaagtcagtatgcgggaaaaccctgattttgttcgtgacctgaaatatgacgtccttttcttattagatgaatttccggctattggttatatgccatatataaaaaaggcagcaggttttattgctggctacaagctaaagttgctaacgatttatcagaatatctcacagcttaatgaaatttacgggattcagggggcattgtcattacttgctaaccatccatgtaagatcatctatgcaaccagtgaaaaagaagatgctgataaattttctgcacaattaggttatacaactattaagactaaggggaaaagcaggaacacaagtaaaggtggtacatcgaggggggaatcagagagcgatacgcagcgtgcgctcgttttacctcaggagctttcaacgctgaaatttgatgaggaatttattctgcttaaaggtgaaaatccgattaaatgtaagaaagctttttattttaatgatcactactttatggacaagctggtttctgtttctccaaaactggaggcggcagttaaagagcttaataagggggtggctatgggtaaacctggactcaggtatccaccgaaggaaatcatgttgtcttatggcgaacttgaagcagatttagatctggcagcataa

SEQ ID NO: 38142 - DNA, 1035 bp, Escherichia coli
atgacagataataatattagtcttaattatatccgtgatacttactttggagcgtttttaaaaactgaagggctaactgaagttgcagtgaatcgtccaaatgaagtatttactaaaatttatggaaaatgggaatgtcatgaagttgatttttctctcgatgttgcacagaagttcgctaggcagctagcaacttatcataaggataacatcagtgatgtaaaacctattttatcagccacattacctacaggagaacgtgggcaggtggttttacctcctgcctgtgaaagtaacaccgtatcaattacattgcgcaaaccttcgtctgtccagataccgcatcaaacgtatattgataatggtttttatgatcgtattgctggtaaggagaagggaaacagcagaaatgatgaattattacgattatataaaaataagcttttccccgagtttatggaaaagtgtatagaatacggaaaaacaatggtctttgttggtgaaacaggatcaggaaaaacaacttaccttaaaactcttattgattatattcctctgcacttaaggatagtgaccatagaggataacccagaggttaagttttatcgtcatcagaattatgtgcatttattttatcctagtgaggccggaaacagtgataaggcgataatcacgccagcatcacttatcagagcgaactaccgtatgaacccggacagaatactgataacagaagtcagggggggtgaggcatgggattttctgaagattgtctcatccgggcatgagggggcgataacgagtctccatgctggttcaccttatgaagcaataatggggctggtagaacgctgttatcagaatacagagtgttcacggctgccttacagcgttttactcagcaaggttctcagcagtattgatgtaatcgcaagtattaaacttgagggtgacgttcgccggatcggcgaaatttattataaggatgctgatttagagtcgtacagaaagaggttccgcgatgaaaacttttaa

SEQ ID NO: 38143 - DNA, 1284 bp, Escherichia coli
atggaaaataaaacgccagatgaaattgaaaaagaaatgatggagcatgaacaattacatgatgatgaaataaacgaaaatattaataaggaatcaacaaggaaaattaaaacagttgctgaaatagaacaggagattcgtgaaaaagaagcagcaaaacttgccgaagaatctcatgatgttaccgagaagcatcaacctgaagtgacaaagttaaagaaatctgcaaaagataacttcctgaagaagattctctttgttgctgtcgctgtcattatcgttgctatagctggcctgaaaatttaccagaaatataaggctccccctaaagaagaaacagacaagacaatcaaaacaaaagaagccacgatgaacaagcggaacaatctggggcaggaggtagatccgtttcggacagaagaaccggaacaacctacagtggaggacagaggcaatgataacccctttgcatcgtctggtactggaacaacgccacagacggctcctgtggctttctctcgcgcccttgcggtgacggctgaaggtggacaggccggaagcaataccaggacccggaaagaagagaaagcgtttggtactgtcagttctgagtcatcactgacacagacaaaggatgaagcgggaaatgactctgagtcagaggtgacggcagttaaacgcattccctataaccctgacctgtacataccagaaaacacgccaatatcctgtgcccttacccggcgttttgtctcagacgtggcaggtaaactccagtgtgtattgactgatgatgtatacagcgccagtaagaaaacccgcttactggataaagggagtacggcttcactggtctataaaacgggtatgttaaatcacggacaggctcgtgtgtttgtgatggccacaaaaattcgtacacagcagccgccttttatggatatcccccttgttgatactgatgctgccggggaactgggagaggccggggttgatggatggattgatactcactttaaagaccgctttttaggtgcggcaatgcttgggatgatccccgatatagccaatgctgctacggacaatgttgcaagtacagacagaaataccgactacacccaaaacagccgggaagcatttgctgaactggcaaaaacagcctttgaaaacagtgtaaatattccaccaactatctacaaaaatcagggcgagattatcactttgattacaggcagagatattgatttttcaaagatctatacgcttaaatacagagggaagtaa

SEQ ID NO: 38144 - DNA, 909 bp, Escherichia coli
atgaatagagtagcttttatcggcggcttacttctgttttctgctcaggtaaatagtgccgtgaccccgcaaggaagccgctacgacagcagaatgcaaactgtttcttataatgcagcgaataccacagtcataaccgctggcgtgggctatttgtccacgcttctgtttgatgatgaggaaaccgtactcgatgccagaccgggtatggaaaaggggtggaatattcagaaggacgcaaacagggtttatattcgtgccgttccggtcactcagcctgtaatggatgaggaaggtaaacaggtcagtcaggtttttgaacctaatgctaaggactggcctaccaacctgtttgttgtcacgacaaaacgctattacagcattgatttacgtgtggtggatgcttcagcaccacaggataaggtttcgtatgttgtcagctatcgctatccacaggatgaaagagaaaaatcctccaggatggagcttgcccgtctacaggaacttaaacagcagcaggagaacaagcgtattgctaaagcacttgatgatgctcaggcaccccgtaactggcttttctcgatgagcatagggaaagacagcaatatgattaaacctgattttgcttatgacgacggtcgctttacctatattggtttttctccgatcaaaaaaataccagcggtgatgctgtactccaatggtaaggagattgctacatcaccgggtattaaacagattggtaattttaaaacgcttgtcgtggataaaacaaatccggcatttgttcttcgatatggtaatgcagttataggtcttgttaatcagggatatggaaaagtgacggtgaaagatggctctactgtttcccctgatgtagaacgtgttgaggtcaatgatggaaaataa

SEQ ID NO: 38145 - DNA, 690 bp, Escherichia coli
atgtcggataaagtcaaaaaggaaattgaagtagcaagatcctttgaagaacataatttaaagcgtgatgagagagataagaaagtaggcttttttatcggtggtacagggttgtttattgcaatattgagtattgttgctcttattgttatgttaccactgaaacataccattgttgatctgtatgttctggataaaacggcaggtattatttacaaagtaagccaattcacagaagaagctatatcaacagaacaggcaactgataaggtacttgttgcctcttatcttgaattacgcgagcgttataattatttctctcttcaggatgattatactcgtgttcaggcttataactcagatgatgttaatcgtgaatatcttgcattctggaacagcaaacaggctccagatgttgtctggagaaaagcagagcatactgtacgaataaaaattcttactcagtttattacagcggctacagacccggataaactttcaacgattcgatatcaacgtattatccgtaatgtaaagacaggcaatgaaagaactgaggtatggaatgcccgtattacttatcgttatgttccaaccgaaacactggataaagaacagcgcgaaattaacggtatgggattgattatcaccagttttgaaaaagcagaagagagcggggatgtgaaatga

SEQ ID NO: 38146 - DNA, 1065 bp, Escherichia coli
atgggttctgatttctttcaatcctcacatagatatatagagaaattacttcaagaagccactgatggaaaaatggcaacttatggaagtatgatttcgttaattatatattcatctgtggttctctatatgcttgttagaggataccagattatggcgggtaaaggccaaagacccgtagaggatttagggtatgatgttgttaagatggctattatctgtacattcattaataatgccgatgggtatttagatatgtgtattgaggcaataaatggtctaaaacaagggtttagtggaagtaacgatatttgggcgcttttagatcaaatatgggggagtgctcagaaaatagcatcgactcttttagagttagacccctctagttatgtaaaaatggatggcggtttaggagcgttatttacttttattggagtagctattgcattgcttataacaacgtttgtttttatgtctgcggaaatagggttgcttttactaaccaccactgcaccaatattcattttctgcttgatgttcggttttttaagacaaatgtttaataactggttgcaatcagttttttcttcaatacttacaatattattttcaacgttagcattaagtgcagcaataacctatttaacaaaaatactggataaaatgtctgctttagcagcggaatccaatttgatgacgttgggattgatggctggattagcaggagcattttgtggattagtagtattgatatcagcgaaaattgcaacacagcttgctggcgtgggggtggaaggtgctgttcaaggtgcaatggcaatgggggttatgggggggacttttactgctgcgaaaactttatctggatctactggattagcaaaaaatatggggataggggcttatgaaggagggaagggaaaaaactggagcgatagagaatccagtggtgtagctgcggctgttgcgtatggttcaggtcgtataggcagggctgcgattcaaaaagtgatatcaaaaaataattcctcttcaggaaatatacccacttcaaaaatttcatag

SEQ ID NO: 38147 - DNA, 264 bp, Escherichia coli
atgtcaaagtggatggtagttcttctttcaagtgcttttatattagctggatgtgatgagaagccaaaaagtgttgattggtatatggaacatcctaccgagttaaagggagtatttgaagcttgtaaagcatctggtgatgatactcaaaattgtaggaacgcgaaggatgcaatattccgtataaaacaacgtgacgctaaaattccaagctttggagatctttctaaagatgaaaatccatctaatgatttaaataaataa

SEQ ID NO: 38148 - DNA, 714 bp, Escherichia coli
atgaaactaaataaatatgttttagcaatagcaattgcctattcatcttcagttttttctgccgggattcctgtagttgatgctgttggtaatgcgcaggaactggcgcactggacggaaaaactgaaacagtggacagagaccgtacagcattacaagagtcagttacaggcttacaaagaccagttagccaccgctactggtatcagagatattcaggggcttgttgcacaaggtaagagtctgaagaatgacataacgaatcttcaaaagcagggtatcagccttgatgatcttcttacatcgggtaatgcgccaacgggggcactcgattcgctttataaccggttcaaagattttgatgtgtgtgatgcgcgccaggctgcctcttacattaacctttgtaagcaggagacagtgaataaagcgtgggcgctggagcaaaccacggaagtacaggaaaaaatcagtgatgccctgaatgatatttcaaaccttactgaccgtatggcgaatgctaaggacattaaggaaagccaggatcttgctaatgctgttcaggcaaagagtatccagctaaatgttctctcgcaacagtgggaaatgaacatgcgagcgtccgaacagcgtgataagcttttgtctcagaagcgtgaaaaagcgtttcgacagcagcaaactaatgcaaatccccctagttttggagaattgtaa

SEQ ID NO: 38149 - DNA, 2736 bp, Escherichia coli
atggcatcggtcttcagagcactgaccagaccgccgctgttagtgggggtgcctgtcgcccccgcgcttttgtcattttttgcattattcatgtcgggattactggtttcaaagttcatatggtttttgattccactcgtccacgtactgatgaagcgtaaagcaaataaggatgagcaatatttttcacttctttatttgtggttaaagacaagaggtaatgcggctattaatcgcttttataatgttaacactatcagttgtcagaattatgatggggtggacgtttcggagtttattgaatctatgaaacttaatcaaaggatgccacttgaaaagcgcattccctattcgacgcatgttgatgactatattattaaaaacagagattcttctttagtcgcaacctggcttgttgatggggaaccattcgaaagccagactcatgatgcactggaaatgctcaccactcatttaaaccagtcaatcgtaggtttttcaggagaaccagttacgttctacactcaccggataagatatcaatacaccgatgagtttacgtcgcgttctggaaactattatgcagatgaaattgctgaacgatattataaggggattaagaaaaaacctttctttaaaacggtaatatatgtttctctctgcttcttaccatataccaaggaagaaaaggctgaaagaaaaacaaagggtgctgcgtttctcgataaaacccagaaggatgctattctgcgtatgaatgaacttcgtggaacagttgagtcgatgcttcagcattaccgccctgaaagattggggatgtacgaagataacggtgttgtattttcgtcacaattaagtttttataattatctcctcacaggtcagtggcagaaagtacgtgttccacgtatgccctattacagcttgcttggaaatctagatatatttttaagcacagatacagctcagttttctaatcagcgttttttccgttcgctggagattaaaggctattccagatatacaggtactggacttcttgatgttcttcagtatttgcccgttgagtatgttcttactcagtccttcacttctatgtcaaaaaatgaggctcttgcggcgataaaagacaaacaaaaacgtctgaagggttctggtgatgatgcgaaagaggaacaggaggatttgaacgttgcgcgtagtatggtgacatcaggagatatcagcatgggttactatcattactctttgatagtttatgctgattcccctgaacaacttataaaggattccaatactgtacaggccgcgcttacagatcttgggatgattataacgctctccacgctttcactggctgctgcatatcttgctcagttacccggcgtttataacttgcgtccacgcctgacgatgctgaacagccagaattttgtagatttaaacgccctgcattctattcagtccgggaagcgagataaattgccctggggggaagctatagcgattgcgaggacaaatagtcatagcccttattatcttggtttacacaattcgcgtattggttctgacgatttcaacaaaaaaccacctggtaattttaaaattattggtactaccggttcaggtaaaacaataatgcttaccttcattcaggacatgcttcagaaatacggaaatccggcatcgttcgcaccacaaactaagataaaacgacaaacaaccgtattttttgacaaagacaggggcgcggaaatgaatattcgtgctcttggcggtgagtattatcgtgtactggctggcgttgaaacaggctggaacccgtttcggctggaggcaaacaagcggaaccgtcgtttcgttaaacagttgatgaaaatcctggtgacaggccgtggggagaaattaacagcacgccaggaactcgatctctttcgtgccaccgatgacgtgatggatttgcccctggagttgagaacgttcggtatcagtcgtttgctcgaaaacttgccggaagatacaaccgttgaagctcaggaaaatggtcttcgtttgcggctcagtcagtggaaaaaagggggggattttggttggatatttgataacgaagaagatacgtttgatatttcaaaggttgataacttcggtattgatggaacagagttcctggatgacccggatatctgtggtcctatcactttctatctcctgtatcgggtaacatcgctgctggatggtcgtcggcttgttattttcttcgatgagttctggaaatggttaggaacagaagcgtttgctgattttgtctacaacatgcttaaggttatccgaaaactaaatggtgttgtagggatggctactcagtctcttgacgaagcactcaagaataaagtagcaaaagctattattgaacttaccgcgacagatttctatcttgctaatcctaatgcagattataaagactatgttgaaggtgccaaagtatcccccgaacacttcgagataatcaggaacattgaccctgaatcacgacaattacttgttgttaaaaatccggtcagaaagggtgatgttaagaagtttgcttctctaatttctctggatttatcaggtcttggtgattatacgaaggtaatgagtggtagcgaagataatctggaaatatttgattcaatatataaaccaggaatgaagccgcaagactggatcaatacatatctttcccaggctctttaa

SEQ ID NO: 38150 - DNA, 288 bp, Escherichia coli
atgaaatatatcagtaaaaatctggctcacttttacacagccctgtgtttattctttgttctttctgcaacagcaaacgccgatggcttcgttaaggtgaatgcaatgctgaacaatgtcattacaggtctgcataccgtggcgattgcaacagcaacgcttgcgggcttatgggtgggatttaaagttctcttccggggcgaggccttaatggagatgaagaatgttatcatcggagcggcaatcattatcggtattgctgaatttgtcgctatggttattacctga

SEQ ID NO: 38151 - DNA, 603 bp, Escherichia coli
atgttaagcacttcggctttattatcacttgctgtgcagtgtgcggtatctgtacatcctgataccgtatcagccatagcacaaacagaatctggatttagaccattagcaataggcgttgttggtcaatctaagggtatctatcctgcaaatatcaatgatgcactggcacatgttgcgcgattaaaagcagaggggaaaaactattcaatagggttgatgcaaataaataaaagtaacttttccagatttaacgtcactgaagaacaactctttaatccatgcgaaaaccttaaggttttcgaaaaaatattttctaattgttttataggaggagggactcttataagagcattgagttgttattactcaggggattatgaaagaggaagtataaaagaaagtaagtttaataatacaagttatatagaacgaataggttatcactcgaaagtaaaatacctggttccgagtattaaggaggacatatcgaagactgattcagggagtaatatcaatcctagacacaaaattgtaatcatttatccatctcgcctgattcgaggcgatttacaagataatttaatacaggaatctcaatga

SEQ ID NO: 38152 - DNA, 450 bp, Escherichia coli
atgacgggaaaagccgtcggtacgacaaaaggtacaacaatcagtgtgagaagaaagctgtatgagaaaattttctctatcgtctcagaagtaaattttaagtgtggttttattgatggtaagagtttacagcaatcggatgtttttgaatgtctcaccgtaaaatttactcataaactgatgggtttgactgaaagtggattcaatactcatcttcaggaacgtattggttcggatggaaaaaaaacaacaatttatataaatggcagaaccttacttgcactggacaaattaacacaagcaataaatctacttttgaagccaccatcttcatttataactcgtacagatgtgcttgaaatacttattttgcattgtgctgatgatgttcgtgattattatctgtcgttatgtgatgaaaaaagacaaaacagtttcagagatacctga

SEQ ID NO: 38153 - DNA, 1155 bp, Escherichia coli
atggcaagaaataatgataaagactatcggatcaggaaagcgaaagggcagaatgaaaaaagtgctaaactgcctcttgcgcataagttgcgtaatggtggaaaagattacgttaagaaggtgcaatccagaatcaacacaagaggtgcaagccgtgaagtaatggttaaaattactggtagctcaaagactaaacgaggaattaaaaactctattaactatattacgcgtgaaggtgagattaccttacgtgataatgatggtaaagagtaccagttagattgtgatagggagcgttcagatgcttataagtatctgtcagatcctgaagacagattgatgtacaaagatgagaaagcacctaatcttgtacataacattgttttttcttctcctaagattgcaggcgttagcgagaaagatgctcttgattctgtggaaaaactcctgaaagaaaagtacccggataacagattcttccttgcatatcatacagacaaggaacatcatccacatgttcacgctttactccgtattcctgataataatgggaaaaggatcaatatacgtaaaaacgatttgcgggatatgcgtgatggtttttgtaagaatctccagctaaagggttatgatgtgaaagccacacatcgctatcaacaaggactcaagcagaagcttagaaaagagcctgacagattgcgtaacctgtatgaagtcgtcgagtttggcagaacaaactatcaatttgatcccgtaaaaaaacagcaaaacttcttaagagtgaaaactcttaagaacaatactgaaatggttgtctggggggctaatcttgcagatgaactctcaagggaaggagtaaaaccaggtagcattatcaggctgaagaaagaaggccagacaatggtcaaagtaccaaaactggatcgtgatggtaagcctgtgggctggatggagactcatcgtaacaactggcgtgttgagaaccaggggatgttaggtatcaagaaggagccttttggcaaagagataatcaaagattcagtcgagcagattaagttgaatcagaaaggttttagcctttttcgtgaaaatcgaactgccttgcagactgatacgaattctaaaacaatcaaatttgggatttttaagttctga

SEQ ID NO: 38154 - DNA, 543 bp, Escherichia coli
atgaagtatgtgagttttagagtaagtaatgatgattatgaaaaattatttacagccattaaagacgtttcaaataaaacgcctgcgaaattttttgctgatttagctaaaaagattatatcaaaaaatacaggttttgataagagtagggttgatgatgacggaaccgatttaaatcatgtaaaacaagttcgtttgtcaacagcaatgatgagtgttattaaggaacaggccttaaaaaatggatggtctgaatctaaagaaattcgttttcgcttaaatcaaacaatttcgaatgaacctgttttactcgatcgtgagattgcagaattgcgaggagctagaaacgctgtagacagaataggacaaaatattttttatattatcgcaaaacggcaattgcttgaagttaatgatcctgcattttgggatgatattaaaaaattaaatcagagtatagatgatgttaaaaagttagttaacaaaatcactctggcacgacagaatgttatcaatgttaaatctgccagaaaacaggggtaa

SEQ ID NO: 38155 - DNA, 222 bp, Escherichia coli
atgaataaacaggactttatcagtaaagtaaacgcagaaaagcaatctggtggcgtcaggtttaacgttattcaggtaaaaaatgaggtgcttatgtgttggactaacggacagggagaacgacactacgaaccactttttgtattaaagacaaatcaaagaaatgaggtgataaggcaaaaaattaaaaaatatcgtcgttggttaaagccagagacttga

SEQ ID NO: 38156 - DNA, 840 bp, Escherichia coli
atgaatttacttaaagtaacacccaagacgaaaatcaggcacaggaatgaaataaacaacacattttctgctttgcctttgtcagcaagaagaattctgtttatggcaatggcacagatagattcacgtcaggagctttctaagggagaggtttttagaataacagcaaaagaatatgcttttattgctgatatagatacttctgttgcatataaacaattaaaagagggggctgaagaactacaggttagtgttattcgtattcctaaaaataagcttattacatctgttcaggacaacgaatcagaaacggtttcgaagaaacgaaaaattccatcagatgcggtgcgtgttatgaaccttacctctttttgtgactatgtggaaagtgaaggatatgttgagattggtttctcaaatgtcattgagccttatatcacgatgcttaaagattcttacactacgcaggtgttgttatcctctgtcagacttacagaccaaaatgcaaatatcttatatcaatatataaggaagcagatcagcaacgggaaaaataaatcttttgatgtctatatattagatttaaaggatgagttagaactgtataaaatcgaagatggtgaaaaagtttatttgtatcaaaattacaaagatttcaataaagcatttttaaataaaaacattgaaaaaataaatcaattcacagaaattaaaaaactttctgtgacaataattgaacgagttgctagaaaggctacaaaactacgtttttcttatcaggtagacaaagaaagtgaagggcaggattatcgaatcccaaaagggttcaggggggcataa

SEQ ID NO: 38157 - DNA, 453 bp, Escherichia coli
atgaaggataacatttatcagtttcccgtaggtgagcaaaagaatgcatttaaaaatgctgttagcaccaaaagacggaaagaacaacgcaataaggccatttctaaaactggtgcactattacgacggtttcttgattggtcattcttcctgctgcgcttaggtctggctaccgggctgcacattgtgatctgtctgccgttcgcggcgttgattgctctcaggaagccaattttctggattggtggcttgatttgtgtgatcacatactatcatcttgaccatcaattttattctgacaaaaactacacgatccctttcctcgtttcagcctggatactgagttttgtcagcttgcctgtgctcgcatttctgaataccagaatgccctttcatcacctgctaggcctggagtctacggaagaaaagagccataccgagaccgagtgctaa

SEQ ID NO: 38158 - DNA, 378 bp, Escherichia coli
atggataccaagttacgtcagttaatgagtgatgaagaattagagttctttagccatctgacaagattatgtcctgaaggtatgattcctcttgccagagttaaattgacagagtttgtttttcctcttgcggaatatggtactgatttattttaccatgattttaaagagttaaataaaataactgtgccttttttgatttattcttttagaaaaaagaagccagtatgtgttatttattatttgcaagataatgatacgccttctattgatgcactcgaaagttggctaaagaattgtcagattgaactattcaaattttactcggtgaaagatctttatctgaacgatgattttatggatgcaataaaacgatga

SEQ ID NO: 38159 - DNA, 432 bp, Escherichia coli
atgactctatcaaaaatactcaccgatatttttcgcaccgcaaacaacctaactcactgtaaaacaacaaatcagctttacgccggtgacgcatcgatcgcgctggccagcgcgatcctcagctgcgaccgttacagtatttttgaacaagattaccctcgctccggtttaattcggcaggcagttagacatacaggtcattctgtccatacctcattagttacaacattcacatgctctgttcctttatccggtgccctgttccggtatatgtgcccatatcctgggttattcaggataaccgcttccttttcgccctgccctgtcgttcatatccctctggacaaaaatgcattatcggaaaaaatgtccaaaattttttttggtgatcggaatttttgttgtcggacgcacctctgcttcaggtcataa

SEQ ID NO: 38160 - DNA, 417 bp, Escherichia coli
atgattctgtcgccctccttttctctggagggcgttatcctttataattccagggggaaatatgtcgtcatgtataagcaaagtttaggggggaaaatgaaattttttcttttaaagaaggataaagatagcacaattgctaaaaacgacactgttttccctgttaacaatttctttgtcgttttaactcttgtttcttccctggttaactctgtcggaatatttttccccatgatatctcattctggtaatattattgagatgtgttttttcgtaatgttttcagtattactggctgcattcagttttgtaagtacaatggggcttgcgaacgcagcagcacccattaaaaatgtgtttccgcttttgttgttggttattgtcttaattactaattataatatttacttccgataa

SEQ ID NO: 38161 - DNA, 207 bp, Escherichia coli
atgaacaaaatccggtttataactccgtcattccgacttgtaactctgacatctgacattaacaatattaaagaaatttattctgatgatgatttaaccagttttctgaaacttgtaaatcagaattgcccgaccagaattatgttgcgtagcgttgggaagaggaaagattctgttgaaggaatattagaggataaagatatctga

SEQ ID NO: 38162 - DNA, 1230 bp, Escherichia coli
  misc_feature (1215)..(1224): n is a, c, g, or t
atgattcatcctggctcttctttagataaagcaattaacaatacaagagttaaaaatgttagtactgatgttaaacatggccaaattcaagagagaaaaaggaactttatctataaaaaaaatgatgatatctcatccagatttaaactttacagttcgctcgtaaagcagaaaaatgcgacagaagatgttgttttaataggcaaaatgattttagatgaagttagaagttacagaactatacataatgatcgaaatatcgtaagtaactcaggaaactggaaaacatcttttttatgtaatcttgctagactactatatagcatatttaatggtagtaactatttttgttcccgagagggtgaaaataattcatcccccagttctactctacttactatacatcagcctgaaaagcaggaactattacaacaaaagagtatcaaacatttaccaacaagtaataacatcgacggatacattaaaataagaaaaacaagaggcgctgaagatcaaacaacaactatcactcaaagtttgataattaatgagttgttaaatggagttgatagaaataccatcccttttcagaaaataagtgagctcaatgatatcatacattcatatgaaaatatgcaaattaaaaatagtcgaaaaggtatagaaatacttgttaagcagggagagctgttatcatcattaataaatgataataaaggaaataaacaattatcagacaatgcatctaaaataataaacttattgggtatagagtatcagtcacataaagtagacatagagccatttatacatgcagtatgggttgctggcgcacctcctgataatacattttcatatataacggcatttttaaatacatataaagattatacctacctgctctggattgatcctaatgcctttggtgcggccaagtttagtgggattttaaaaaatatagcgatgaattatgcaattatgcgtttgagaagaacgaatccacatttagcggaagaaatgaatgaagtgatattaaaaatacaaaacatacaaaatgaaactatagaatttaaggaaacaagagaaagattgaaggaacttgaaaatagatataaatcattaacgagtgaaactaaagaaaaattcaatgttttttttcttgagtcaatgataggtatgcaagacaactattttacatattgtatatcaaacggnnnnnnnnnntactga

SEQ ID NO: 38163 - DNA, 627 bp, Escherichia coli
atggctgcgaatgaggagcttagcccgacggacattcaggcacttaaaattattgagccgatggtgagttccttaagcacggagcatgctgaagcgatgcaaatacttcaggctaactctggcaatcagcagaagaaaaccatgtcatggcaaacgctgtctgaacagctggttggcagtgtggaccttgccgatagaatgagaggcagttttaaagaattgtctgggcttgatcttactaaacaacagtttgcagatttttgtttatacagcgagtttggtcgccgccctaaaaatgcctggaccctcgaaagtctgggtctggtagccattcactatccattcattgataaagttacaacctgcccgcaggactggaagacattattacccgatcccgataagcaattagcggaatggcgtaatttattgaagattactcttgatttctttatccgtgaaaacagtgccgttttttacgaaaacgagcaataccctcgctggatgggggcacgtttcccggtaaaatgctccaggggccagataaaaaaaacaaagggcagaaacgtgatcaactttggccacaaatacgcgatcgccattataaccgggtcattaagctattaa

SEQ ID NO: 38164 - DNA, 906 bp, Escherichia coli
gtgtctgctaaaaccgcggagatgacttcagcacttaatgccagtgcggttatattttttgatcaaaccaaggccagcattactgagattaaggctgataagacaactgcagtagcaaatggtaaggatgctattaaatatactgtaaaagttatgaaaaacggtcagccagttaataatcaatccgttacattctcaacaaactttgggatgttcaacggtaagtctcaaacgcaagcaaccacgggaaatgatggtcgtgcgacgataacactaacttccagttccgccggtaaagcgactgttagtgcgacagtcagtgatggggctgaggttaaagcgactgaggtcactttttttgatgaactgaaaattgacaacaaggttgatattattggtaacaatgtcagaggcgagttgcctaatatttggctgcaatatggtcagtttaaactgaaagcaagcggtggtgatggtacatattcatggtattcagaaaataccagtatcgcgactgtcgatgcatcagggaaagtcactttgaatggtaaaggcagtgtcgtaattaaagccacatctggtgataagcaaacagtaagttacactataaaagcaccgtcgtatatgataaaagtggataagcaagcctattatgctgatgctatgtccatttgcaaaaatttattaccatccacacagacggtattgtcagatatttatgactcatggggggctgcaaataaatatagccattatagttctatgaactcaataactgcttggattaaacagacatctagtgagcagcgttctggagtatcaagcacttataacctaataacacaaaaccctcttcctggggttaatgttaatactccaaatgtctatgcggtttgtgtagaataa

SEQ ID NO: 38165 - DNA, 1152 bp, Escherichia coli
atgattttcggtattgactataacaactcaatggagaatattcaccgggcactgaacgttaaatattattctattgagccgggtgtatatactggtattcagttattccaactcccggattcaaatgaactgaggcagcttttatttgataccgtaaaacaatgtgctggcggtgctgactctaatgaagaaactatcattaagtcagctattgatgctgtaatgaagcatagagtccatgaggagcgtcgtttctctcttctaatccaatcaatacctgatactggcggtaatggactcagagcaagattatcaaaatggtgtactgtcaacggcaagaaagggcaatacgcatgggtgctcgactccccacgaaaccttttttatcctgagaagtaccgtcgcttagctttcgattgcacacatattcttaagaaaagttatgttgctaatcatcctttagttgttgaggtaatgcttaatactttttatttccttaaaagtagtatgcatgcaaaagagccaggttgtctgatgattaatcagatctcggagtattgggttcagttagcttttgaaagtacagccgccaaaatcgaagagattttacttgctggtcgtatgaggggggaactgttgttattagatactcaaactcctgaatctgcgctaaatacaccgtcagctcctgcaatgattcaacaaattgttacacaggagtggatggcaaatgataaggcaaatcttgaaagctatagtaaattcggtgttacagcgagggagttcgaaaaaatatcagagttaaccccatacagtcgccaaatgatgattaaacaaggttctggcgctgttatggtttcattagctttaaatggccgtctcgaatattacattccactactatcagcaacgatgaaaaatctacccgttgctgaacgtgtgcggaaaaaattaggtactgatgatcctgctatatgggttcctcacttccttgatgagatggtcgcttttcaagtacgcgaagatcttaaaactgatgatgcgaaggtgtggtatccggcgttccttgcaaagatgaaggagtacgggagagatgtcgtctcatcacttgttacccatccaaacgaaaccgaatcagagagtacaatatga

SEQ ID NO: 38166 - DNA, 669 bp, Escherichia coli
atgaaattgaaaacgttaatggcggttagccttgctatggcgatcagtttgcccgtatatgcctccggtattcctaccgttgatgtggcgaacatcactcaacttgtggtgaatgcacagcaacaagctaaggaggcgctagcgcagctggataaggcgaaggaagccatatctcaggcaaagagccaatatgaccattacaaaagcatcatgcagggcaatgataaattgggtgattttttgaatgacccattactcaatgaactgctaccggttagcgactggcaggacatctacagccaagctaaagatctccctaatttgcgcactcgctacggcctaaccagtagcgacccgaaaattcaggccgcttttgataagcttctgtctcaggctgatacgcttgaaaagcagtatgatgcttcaaataaacgtatcaaaacggctgaggggttgcgtagccgcctgaactcagtggagacacctaaagatagggagcagttagggcttcgttaccagcaggaaatgcttgagctacaaaatcaacaagcgcagcttcaaaatacgcgctatttgatggagcagcagaacaagattgatgatgcaaaacgcgcccaggcgtttgaagactacatgcttggtaaaagcaaacagcggcctagctactag

SEQ ID NO: 38167 - DNA, 321 bp, Escherichia coli
atgttaaaaaaaatatctattttgctttgtattgcttttactttgtctgcctgtaaaggtgaacagggaaaagcttttatcggtcattggtatcaggttgataaggcaaaatatccagctgatattaatattacatatgatgatggtgtatttcatattgatgaaaacagcgcatcaattggcgtaacttcaatggaatattctattaccaaaagagaagctaaagctgaaagtgatactgtgctcgctggtcagaatttttccatgcggttagaaaacgaaaaattgcaatataacggccacacttatgtgaaaaaataa

SEQ ID NO: 38168 - DNA, 933 bp, Escherichia coli
atggacgtacaggttgcacaaactctgttcgatgccatcgataatgcagcaaaaacacaaatgaataatgtcacggctgttatggctgtgatgggggttgtttttggtgcattttggatgatatacatcttactacgttcgttggagtggtatttccaggggttaactcaagtaatacaagatgttttactgacgatatttaaagcatcgtgtattttgtttatggcttttagcgtttcttggtatgtcagtacgattgttccaacggtaacgcaattcccggtttggttggggaatacaatggcgggcgtgagtggtgataaaacaaatttggttgatgggctaataagctcgttctttgatgctgttgttaatacaatcgatgctatgaaatttgaaccaataagtaatttcaaagccacggtgttaggtatactagccttagttttgttgcttgtcggtggtatcccttttcttttggtcgcagtaggaacgttgattacgttaaaggcagcgtcaatgttattgctggtagttgggccgatatttatcgcattgtccttattccctgccactcggcaatatttttggggatgggttggtgtgttgggtggattcactttagctcaggctctttttgctgtcgtaatcggattggaaatgtctttcattaatgcaaatgtggttaaaggtggcgaaatagaaaccgatttaatgagttgccttagtatcctgttatattttggtgcatttaccttacttgctacagagataccaaactatgccgcatctgttatggggggatctccaagcggaggggtaactggtgtcggcggacttcttagcaaaggtacagggttaggggcagcgagtcgaatggggggtagagctgcgcggtatttaatgaaaagaaggggaaaccgaatttcctag

SEQ ID NO: 38169 - DNA, 150 bp, Escherichia coli
atgaaaaagattattattatctgcgctgtactatgtacagtgctggggttaactgcatgtggttcttcccctgagaaattaactcaacccaaaggtgattggattgatgctaatccaacggtaactaatcttactcagggggttaaataa

SEQ ID NO: 38170 - DNA, 804 bp, Escherichia coli
atgtttaagaaaaaaataaaagatgctgtagagcaggaaaaacatttgcactataacgatggccctcttcaagggaagcaaaaagaagtggggcaacaaattatggcctacacacaggcggccaaatggtttgaagatcgtgttgcagaggactatcgtaaaaaggcaaagagttcacgtaggctatctattttctttggtctattggcttttatgtctattctggcagtgatgatgttaaccccgttgaaaaccgttgttcctatgattcttcgggtagacaaaagcagtggttatgtagatgtagtaaaaccatctgatggtacggagaaaccagaggttgttgaggataagcattttattcatcaatatattctcgctcgtgaatcatataactggtcgtcacagcgcgcaaattatcgctttgtccaattgacatcaagcccggatgtattcgagcaatacaaaaactttcagttatccagcaaaggttatgtagcaagattggggcagtcacaacaaattcaatccattgttgaatccattgttcttttgccgagtagcaatgaaagaaagttggaaagtgatacagggattaaaacctatcaggtgcgattaactgaatctcgccttttacctgatggtaaaccagtgccgcagacagtcccggttagctctattattttgatctctattgataataaaaatccggcaatcacagagggcgatcagtggcttaatcctctcggttatggtgtcaaaggttatagcaaaacaatggctattgtagggagtggctcatga

SEQ ID NO: 38171 - DNA, 825 bp, Escherichia coli
atgaaatgcttagtaactgcgttatcgttctgtgttgccgtgtcattcctgccagcggcaaaggctgaggtgtcaggacgtggaaacagctatgattcccgcattcagactgcgttatatagccctgacaacgtattccgtatatatgcaatgaaaaatcgctcaacagctatccagttggagcctggtgaaacaattaaccttgatgacgggattctgaatgttggtaagccaggagttcaggaatcgcctgaatggatggttggggcaaatcagaatggaagcatgatcattctgaagccaagcatgtatgctgaagaacctgaaaccaatatgattgttaaaaccaatcgtagaacatatatctttgagctgaagcttgcaaaaagtgtctcaaatatgacctatatgttccgcttccgttacccacagccacccaaagttggagaaactccatttaaagggcgtagcattaatcaaaacccttgctccggtacgattaatcgagattaccagaagaaaggggatatggtgctgtctccatatgaaatttgggataacggaacatttacatgtatgcgattcccgacaaacgcaccacggccagtagcatatgaggtgcttcctgatggaactgaaactatggtttcatcgcatcaggttaatgatattttagttcttcatgccgtcagcaaagagtttcgtctacgcctgaatgaattggttttagggttgcggactaaagcaaataatactggctggtataactataatggtactactactggtgaaatccgggaggttaaaaattatggaaaacaataa

SEQ ID NO: 38172 - DNA, 207 bp, Escherichia coli; identical to SEQ ID NO: 29825

SEQ ID NO: 38173 - DNA, 183 bp, Escherichia coli; identical to SEQ ID NO: 37977

SEQ ID NO: 38174 - DNA, 183 bp, Escherichia coli
atgggaaagtataaacgaattctgttgagattgactatgaaaaacggccttgaactgaaagcgcctgtaactgatgacgtcagcagagcgctggcttttgctattaagtgggtggcggtcggtattgctgtgtctccgatgctgtatgggctggcaaaactggtcattgcgttgaaatcgtga

SEQ ID NO: 38175 - DNA, 468 bp, Escherichia coli
atgaaccgtgttctgtgtgtggtgattattgtcctgctggtagcctgtggtgtgcttagtctggggctgaatcattaccgcgataacgccattacctacaaagcgcaacgcgataaaaaagccagtgagctgaagctggcgaacgtgacaattactgatatgcaggtacgccagcgtgatgtcgctgcacttgatgccagatactcgagggaattagccgatgcgagagctgaaaatgaaactctgcgtgctgatgttgccgctggtcgtaagcgcctgcgcatcaacgccaactgtccaggctccttgcgtaaagcccccatcacctccggcgtggataatgcaaccggtccccgactggcagaagccgctgaacgggattatttcatcctcagagaacggctgatggcaatgcagaagcaactggaaggagcacaggaatatatccgtacccagtgtataccgtga

SEQ ID NO: 38176 - DNA, 1551 bp, Escherichia coli
gtgagcttcctgcttcgcctgaccgtggcagcggatgacggcagtgagcggctggtcagcacggcccggacgacggaaaccacataccgcttcacgcaactggcgccggggaactacaggctgacagtccgggcggtaaatgcgtggggacagcagggcgatccggcatcggtatcgttccggattgccgcaccggcagcgccgtctcggattgagctgacaccgggctattttcagataaccgccacgccgcatcttgcggtttatgatccgacggtacagtttgagttctggttctcggaaaagcggattgcggatatcaggcaggttgaaaccgcagcccgctatcttggctcggcgctgtactggatagctgccagtatcaatatcaaaccgggccatgattattacttttatatccgcagtgtgaacaccgttggcaaatcggcatttgtagaggctgtcggtcagccgagtgatgatgcatcaggctatctggattttttcaaaggcgagatagggaaaacccatctggctcaggagctgtggacgcagattgataacggtcagcttgcgcctgacctgactgaaatcaggacgtccataacggatgtcagcaatgaaataacacagaccgtcaataagaaactggaagaccagagtgcagcgatccagcagatacagaaggttcaggttgatacaaataataacctgaacagcatgtgggcagtgaagctgcagcagatgcaggacggacgcctttatattgcgggtatcggtgccggtattgagaacacccctgacggcatgcagagtcaggtgctgctggcggcagacaggattgcgatgattaatcctgcgaatggcaacacaaagccgatgtttgttggtcagggcgatcagatattcatgaatgaagtgttcctgaaatatctgacggctcccaccattaccagcggcggtaatcctccggcattttccctgacaccagacgggcgactgacggcgaaaaatgcggatatcagtggcagtgtgaatgcgaactcaggagcgctcaacaatgtcacgattaaccagaactgtacgattaagggcatgctggaggcgacccaggtcagaggggatttcgttaaagctgtatcaaaagccttcccgaaaaaagtcggtacgtggggtaacacggaaacaccaaacggtacggttacagtcaccatcagcgatgatcataactttgaccgccagattattattccgcccattatttttaacggtatagcgtatgacgatccggggagcggaaataacccaggaggcacgcgatacacggggtatggttttgaagttcgcaaaaacggcgtattaatcgcatccagagaaactaaaggggccattcccggtagttacagtgcagttattgatatgcctagtggtggtggtagcgtcactctggagtttaagattttccagaaaggcaatcagggggcaggcaatatcaccgactgtacggtgattgtgaccaaaaaagctgcttccggcatcagtattcgttga

SEQ ID NO: 38177 - DNA, 699 bp, Escherichia coli; identical to SEQ ID NO: 37326

SEQ ID NO: 38178 - DNA, 648 bp, Escherichia coli
atgtgttttcccgatttctcctttgaaaaaatccaggtaaccttccgcatcatcgctcgcccgaccgacagcctccacgaatgccgatttgccaacagtattcacactgcggatataaaaataataatcatggcccggtttgatattgatactggcagctatccagtacagcgccgagccaagatagcgggctgcggtttcaacctgcctgatatccgcaatccgcttttccgagaaccagaactcaaactgtaccgtcgggtcataaacggcaagatgcggcgtggcggttatctgaaaatagcccggcgtcagctcaatccgcgacggtgctgccggtgcggcaatccggaaggtggtggtggcaggttcaccctgctggccatagctgtttatcgcccgcaccgtcagggtgtattccccgagcggcaggccgctgaaacggtgctccgtgtctgcggtgatggcggtggtcaccagtctggcatccgttcccttaccactggtcaggcgcagactgaagcgcacgcccttcaccacccgcggcgtgtcccatttagcctgcgccagatactggccgtcagctgcgctcacctccaccgtcaggtgctgcactgccggagggatgacgctgttcagggtgcctga

SEQ ID NO: 38179 - DNA, 246 bp, Escherichia coli
  misc_feature (223)..(232): n is a, c, g, or t
atgtcgttatcaggagcggtattcaagacatttctgacaagtgaacatgcgtcatggaacaggttcaacagaaggcttcatatacccaatgaagatatcgtagatgaaattcagcttaaagcccgaatgcaacaacgccatcatcgggtatatccagaaataggggattccaccattgtctcttttagaggcaaagactatgctgttcactttattaaagatnnnnnnnnnnggcccaaaagatga

SEQ ID NO: 38180 - DNA, 648 bp, Escherichia coli; identical to SEQ ID NO: 38178

SEQ ID NO: 38181 - DNA, 315 bp, Escherichia coli
atggcgttatggggttcagccctggcagccggtggtttttctgccaccacgatgctgttttcactgggggccagcatgatactgggcggtgtggcccagatgctggcaccgaaggcaaaaacaccggagtacagggcgacggataacggtaaacagaacacgtatttttcgtcactggataacatgattgcccaggggaacccgatgccggtgccttatggtgaaatgctggttggttcacgacggatatcccaggacatcagcacccgtgatgagggcggagacgggaaagtggtggttatcgggcggggatga

SEQ ID NO: 38182 - DNA, 678 bp, Escherichia coli
atgacaccggacattatcctgcagcgtactgggatcgacgtgagagctgtcgaacagggagatgatgcgtggcacaaattacggctcggcgtcatcacagcttcagaaattcacaacgtaatagcaaaaccccgatcaggaaagaagtggcctgacatgaaaatgtcctacttccacaccctgctggctgaggtttgcaccggtgtggctccggaagttaacgctaaggctctggcctggggaaaacagtacgagaacgacgccagaaccctctttgagttcacttccggcgtgaatgttactgaatccccgatcatctatcgcgacgaaagtatgcgcaccgcctgctctcccgatggtttatgcagtgacggcaacggccttgagctgaaatgcccgtttacctcccgggatttcatgaagttccggctcggtggtttcgaggccataaaatcggcttacatggcccaggtgcagtacagcatgtgggtgacacgaaaagatgcctggtactttgccaactatgacccgcgcatgaagcgtgaaggcctgcattatgtcgtgattgagcggaatgaaaagtacatggcaagttttgacgagatggtgccggagttcatcgaaaaaatggacgaggcactggctgaaattggttttgtatatggggagcaatggtaa

SEQ ID NO: 38183 - DNA, 681 bp, Escherichia coli
atgacaccggacattatcctgcagcgtaccgggatcgacgtgagagctgtcgaacagggggatgatgcatggcacaaattacggctcggcgtcatcaccgcttcagaagttcacaacgtgatagcaaagccccgctcaggaaagaagtggcctgacatgaaaatgtcctacttccacaccctgcttgccgaggtttgcaccggtgtggctccggaagttaatgctaaagcactggcctggggaaaacagtacgagaacgacgccagaaccctgtttgaattcacttccggcgtgaatgttattgaatccccgatcatctatcgcgacgaaagtatgcgtaccgcctgctctcccgatggtttatgcagtgacggcaatggccttgagctgaaatgcccgtttacctcccgggatttcatgaagttcaggctcggtggtttcgaggccataaagtcggcttacatggcccaggtgcagtacagcatgtgggtgacacgaaaagatgcctggtactttgccaactatgacccacgtatgaagcgtgaaggcctgcattatgtcgtggttgagcgggatgaaaagtacatggcgagttttgacgagatggtgccggagttcatcgaaaaaatggacgaggcactggctgaaattggttttgtatttggggagcaatggcgatga

SEQ ID NO: 38184 - DNA, 486 bp, Escherichia coli
gtggctcagcgtctggtgcagcatcttgcagagcatggcattcaaccagcccggaatatggctgaacatattcctccggcacctaactggcctgcgccaccactgccagtacaaaatgaacaatcaagacctctgcctgatgtggctcagcgtctggtgcagcatcttgcagagcatggcattcaaccagcccggagtatggctgaacatattcctccggcacctaactggcctgcgccaccaccgccagtacaaaatgaacaatcaagacctctgcctgatgtggctcagcgtctgatgcagcatcttgcagagcatggcattcaaccagcccggaatatggctgaacatattcctccggcacctaactggcctgcgccaacgccgccagtacaaaatgaacaatcaagacctttgcctgatgtggctcagcgtctgatgcagcatcttgcagagcatggcattaatacatctaagcgctcgtga

SEQ ID NO: 38185 - DNA, 429 bp, Escherichia coli; identical to SEQ ID NO: 37288

SEQ ID NO: 38186 - DNA, 429 bp, Escherichia coli; identical to SEQ ID NO: 37516

SEQ ID NO: 38187 - DNA, 285 bp, Escherichia coli; identical to SEQ ID NO: 38018

SEQ ID NO: 38188 - DNA, 546 bp, Escherichia coli
atgattggccaccgatgcgccaaagcagcacagcagaatatcgccaggctgtgcggaaggcagggaaatcctgtaaaaaccagtcgcctccatattgtccaggtacaggttctgaccattgcgccaccagtcatcctcacgctcaaaatccggcatatcaattcccgccagatggtatgcatcccggaacagcgtgtaacagtccgtcaccccgtgctcaaagagccgtcctgtcagatgtggcacacagcggaatttatgaatttccccccggcagaccagccaccaggacagtgcactttttatctgcagccgccggtcggcctcgctcagccagggcagaccaccgggatgactgtggaccagtgccacaatctccccctgcatctctgcccgcagccagtcttccggtgcgatacgaaaatacgcctccggctctgcagaaatattcacacaagggatataccgctccccctccggcgttctcaccacgaagccgcacgactccgctggcgcacaccgccgggcatgcgccagaatcgctga

SEQ ID NO: 38189 - DNA, 300 bp, Escherichia coli
atgctattaaggaaccccgacagctttgggcgtatcagtatcttccctaaagaactttggtctagtgctattactccagagttaaaatctgtttttaataagctttggattgaagataaatatcactcacggcttgaaaaacgttttaatttgatgttagtcgcagcgctgttaacccaaaaagataataacctgatacatcaactgtctgcgctttttgaatttcactatcagcaagccccacagcaattaggggtaatctatcaatattattttgaacaagcaggagtatgtcattga

SEQ ID NO: 38190 - DNA, 168 bp, Escherichia coli; identical to SEQ ID NO: 23915

SEQ ID NO: 38191 - DNA, 603 bp, Escherichia coli
gtgaagcagttcaccgttgccgcagtatatggcggcatgattggccaccgatgcgccaaagcagcacagcaggatatcgcccgcctgtgcagaggacaggggcacccggtaaaagccggtgaccgccatattgtccaggtaaaggttctgaccgttgcgccaccagtcatcctcacgctcaaaatccggcatatcaattcccgccagatggtaggcatcccggaacagcgtgtaacagtccgtcaccccgtgctcaaagcgccgtcctgtcagatgtggcacacagcggaatttatgaatttccccccggcagaccagccaccaggacagtgcactttttatctgcagccgccggtcggcctcgctcagccagggcagaccaccggggtggctgtggaccagtgccacaatctccccctgcatttctgcccgcagccagtcctccggcgacatccggaaataatcttccggctcaccggagatattcacgcagggaaaatatctttccccttccggcgttctcaccacgaagccgcacgactccgctggtgcacatcgccgggcgtgcgccaatatattgctatagagcatgagaactcctga

SEQ ID NO: 38192 - DNA, 249 bp, Escherichia coli; identical to SEQ ID NO: 23611

SEQ ID NO: 38193 - DNA, 357 bp, Escherichia coli; identical to SEQ ID NO: 37290

SEQ ID NO: 38194 - DNA, 345 bp, Escherichia coli
atgccggagaggcggagacgtccgcgaggaatgccggcatatcagccagtcaggcagaagagaacgctgcaaatgctgacacttcagcaggggatgcatcggagtcagcccggcaggcggcagaaagtgcagccgctgcaaagcagtcagaggaggcgtcctcgtcctcggcctctgcggccgctcaaaaagccagtgagtcattacaaagtgcaacagatgctgagttgtcaagaaagacggcagaaagtgcagccggtaatgcagccagggatgcaacgaccgcagcagaaaaagcccgggagtcagcagaaagcgcacagtcagcggaacaaagcaggatag

SEQ ID NO: 38195 - DNA, 315 bp, Escherichia coli; identical to SEQ ID NO: 24016

SEQ ID NO: 38196 - DNA, 330 bp, Escherichia coli
atgaaaacctttcgctggaaagtgaagccggatatggaggtgaactcgcagccatcggtgcgtgaagtgcgttttggtgacgggtactcacagcgtatggcggcagggctgaatgctgacctgcaaacataccgtgtgacgctttccgtgacccgggaggaggcccggcatctggaagcgttcctggcagagcacggaggctggaaggcatttttgtggaagccaccctatgcataccggcagataaaggtgacctgtgccgcctggtcatcacgggttcgcatgctgcgggttgaattcagtgccgagtttaagcaggtggtgaactga

SEQ ID NO: 38197 - DNA, 648 bp, Escherichia coli
ttgttgatcgtcgccaaccagtacggccttaatccgtggacgaaagaaatttacgccttccctgataagcagaacggcatcgttccggtggtgggcgttgatggctggtcccgcatcatcaatgaaaaccagcagtttgatggcatggactttgagcaggacaatgaatcctgcacatgccggatttaccgcaaggaccgtaatcatccgatctgcgttaccgagtggatggatgaatgccgccgcgaaccattcaaaacccgcgaaggcagagaaatcacggggccgtggcagtcgcatcccaaacggatgttacggcataaagccatgattcagtgtgcccgtctggccttcggatttgctggtatctatgacaaggatgaagccgagcgcattgtcgaaaatactgcatacactgcagaacgccagccggaacgcgacatcactccggttaacgatgaaaccatgcaggagattaacactctgctgatcgccctggataaaacatgggatgacgacttattgccgctctgttcccagatatttcgccgcgacattcgcgcatcgtcagaactgacacaggccgaagcagtgaaagttcttggattcctgaaacagaaagcctctgagcagaaggtggctgcatga

SEQ ID NO: 38198 - DNA, 345 bp, Escherichia coli
atgccggagaggcggagacgtccgcgaggaatgccggcatatcagccagtcaggcagaagagagcgcggcaaatgctgacacttcagcaggggatgcattggagtcagcccggcaggcggcagaaagtgcagccgctgcaaagcagtcagaggatgcgtcctcgtcctcggcttctgcggccgctcaaaaagccagtgagtcatcacaaagtgcagcagaagctgaattgtcaagaaagacggcagaaagtgcagccggtaatgcagccagggatgcaacgaccgcaacagaaaaagcccgggagtcagcagaaagcgcacagtcagcggaacaaagcaggatag

SEQ ID NO: 38199 - DNA, 291 bp, Escherichia coli; identical to SEQ ID NO: 37384

SEQ ID NO: 38200 - DNA, 180 bp, Escherichia coli
atggcagattggaatggttatattatggacatcagcaaacaatttgatcagggcgttgatgatctgaaccagcaagttgaaaaagcgttggatgagtatacattatatcgaaatgcgcaatctaacgttgtaaaagcgtataaagatcttgattcggcaatcatacaaaacttccgctaa

SEQ ID NO: 38201 - DNA, 282 bp, Escherichia coli
atgatttatgaactggcatttgaccacagagcactgaaggaatggcaaaaactcggtcacactgttcgtgagcaattcaaaaagaaactgtcagaacgcctgataaatccacgcgtccccgcagccaagctacatggtcatactgaccgttacaaaattaagcttcgcgcatccggttacaggctcgtttatcaggtaattgatgagaaggtcgttttgcttgtgatttctgtgggaaaaagagaaggcagcgacgtctatcacatggcagatacccgctga

SEQ ID NO: 38202 - DNA, 294 bp, Escherichia coli
atgagcaaagtacgcgttatttttgaatttgaccacgtaatgcatgaagtaaagccagccggtaatgatagtgaggaaatcacggagggggttactgccacggtaaaaatcgaacgtgatacagagaacagaccggcaggaccctgtgatgtttatgcacaaattcttaaatatcacagccccacaatcattcagtttctgacagatgaactacagggttccatgcaggccatgggggtaagcagctccgttgaacgccgttctgttcagaacggaccagatacattgcaataa

SEQ ID NO: 38203 - DNA, 402 bp, Escherichia coli
atgggtaaaagcacactggtaatcggcagagagttgacaaaagatatggaattctcaggtcaatttttgttaaaaaaactcaagttacagaatttaactattgatgctgcaatgtggttttattacccagatctatcttggagatatattttagttatcagtgacttctcagaacgtgggccggcagaaatatatagaaaaatcagtgagataaatagaaatagcatatcaaaaaagtataagccgataccattagaagcaattgaggctaagggggattcagcttttgtttataaaatgttaaaaggatttgctagagtcaacgatggtaaagttcgcgtttctaattctatggtaaatggtttagaaatcgttgactgtctgatctatgagttaaaataa

SEQ ID NO: 38204 - DNA, 270 bp, Escherichia coli; identical to SEQ ID NO: 29818

SEQ ID NO: 38205 - DNA, 207 bp, Escherichia coli
atggaaaaaatcacaacaggtgtgtcatacaccacgtcagcggtggggacggaatactggttactgcagctgctggacaaagtctctccgtcccagtgggtggcaataggtgtgctgggaagtctgctgtttggcctgctgacgtatctgactaacctgtatttcaaaatcagagaggaccgtcgtaaggtggcgcggggagagtag

SEQ ID NO: 38206 - DNA, 1488 bp, Escherichia coli
atgacgcccacaaatatgtttgtccatgaaattaataatatatcatctgctcgctggatgtcaaaatcagaaaagaataataaacaaaaagaggcaatagaaaagttcaaaaaagaagtatcccatatgaatggcgggcagcagtttatttgggggtttgataaggttattcaagaaggcttaagtggattgattgagttaagtatcgatattaatgatagtacaaatcatcgtgataagtcttctctttctcctgatgggagagctgtgttacattttttaggtacaatttggaatatggcgatgggagctgtacctggttataatgcattgtctggtgtaagtagcattttacatagtgctatagtaaaagaatctagcaatatctgtgattatattcagggggctgtacgtattggaatggactttgttccaggcactcgctctgacttacatagccgttcgctgcagataaaatatgaggctttgaagcatatagaaaaaaacattaatgataatattatttatcatccgagtaataatgctaatttctattctgtaattgagtcaattgatggtaatgactttatatataacgaaaaacaatctaaaatattagaaatgaaacaggatcgtggggggaatagatatagtgcagtagatcttaactcttctaagtatgggtattatgagaaagttggcggtggtttttatagatatatagaatcctttaaccccatatcttcagagacaccaaataaaatagtctacaagggggaatcagtagatttaactaaggagccaaattcggaattatattcaggtaggtattctataaataacaaacaggttaatgtttatttctttcgtgacgctgatggtacattttataaatcagaaggtcttcatggtgggggagttattagatacatagataaaccgtattctcagttaagagaaggagatattgggtatgatgaggatttgttggatatatacgatgattctccggtgcttgaagacacgttgcctgctttatcttctgaaatagtaccaactccagaacatagtattaaacaaatttattcgaaaattaaggaggggcacatagaactgtccgattcagacatcatattgtgtcgcggcacaaccggtattcaagctgaaaatatcgttgaatataaaactgctggagggcttcctgattcaaatccaaatgtaaaagcaccagatgaatatatggcacaacagcaggtacgtattggaagaatattgcctgaatacacatcggatcttagcgttgctgatcggtttagtcgtgagcattatctaatagttgttaaagtaaaggcaaaatatatcacacgaggaagtgttacagagagtggttgggttatagataagaccgcacctgttgaaccacttgcgataattgatagaacttttggtatgaaggaaaatatctcaatggtaaatgcatcgaaatag

SEQ ID NO: 38207 - DNA, 519 bp, Escherichia coli
atgaacgaaggctggtaccagatacgtattgccggttatgacacggcaccggaggcggtgtacgcccgtcttcacgaacagctgggtgagggaacggtcatccatattgtgccgcgactggccggggccggaaagggtggactgcagattgtgctgggggcggcagccatcgtgggctctttcttcactgccggggcatcaatggcgttatggggttcagccctggcagccggtggtttttctgccaccacgatgctgttttcacttggagccagcatgattctgggcggtgtggcccagatgctggccccgaaggcaaaaacaccggattaccgcgcaacggataacggcagacagaacacgtacttttcctcgctggataacatgattgcccaggggaacccgatgccggtgccttacggggaaatgctggttggctcccgccgtatatcccaggacatcagcacccgtgatgaaggcgggggcggaacggtcgtggttgtcgggcgacagggataa

SEQ ID NO: 38208 - DNA, 570 bp, Escherichia coli; identical to SEQ ID NO: 37228

SEQ ID NO: 38209 - DNA, 270 bp, Escherichia coli; identical to SEQ ID NO: 23881

SEQ ID NO: 38210 - DNA, 216 bp, Escherichia coli; identical to SEQ ID NO: 23846

SEQ ID NO: 38211 - DNA, 216 bp, Escherichia coli
atgaaccagatggaaaaaatcacaacaggtgtgtcatacaccacgtcagcggtgggaacgggctactggttcctgcagttgctggacagggtttccccgtctcagtgggcggcaataggcgtgctggggagtctgctgtttgggctgctgacatatctgacgaacctgtatttcaagattaaagaagaccggcgtaaggcggcacggggagagtaa

SEQ ID NO: 38212 - DNA, 423 bp, Escherichia coli; identical to SEQ ID NO: 23947

SEQ ID NO: 38213 - DNA, 372 bp, Escherichia coli
atgaaaagcaaagtactggcacttttaattcctgccctgctcggcgcaggtgctgcacatgcagccgaagtttataataaagacggcaacaaattagatctgtatggcaaagttgatggcctgcattatttttctgataattcagcgaaagatggcgaccagagctatgcgcgtctgggttttaaaggcgaaacccaaattaacgatcaacttactggctacggtcaatgggaatacaatattcaggcaaacaacactgaatcttcaaaaaaccagtcatggacccgtctggcatttgccggactgaaattttcagattacggttctttcgattacggacgtaattatgggctggaccgatatgctgcctga

SEQ ID NO: 38214 - DNA, 351 bp, Escherichia coli
atgattaatcgtatcaagctggagcacatcctcgaatatgccaggcagcagaggcatattggtcagcattgtaaaattccaccaggagatatggttgaaatcatggagattgccatgcgcaaggctggcaactctccggtaactccggatggttggataagctgtagtgagcgaatgccggagaaatacgatttcgatatctgggtattctctccatccagaggtgttcttgacgggctacagtgggatggctcgatgtttactgatgatgaatatcagttcgttattcatgacgccacgcattggatgagaaaagtatatccagcagcaccgcagcaggatggtgaatga

SEQ ID NO: 38215 - DNA, 327 bp, Escherichia coli; identical to SEQ ID NO: 38065

SEQ ID NO: 38216 - DNA, 204 bp, Escherichia coli
atgaacggacaaatctcaattgttcgaccgggagcatgtgacgatcgcgagatacgaatgattattcgtctggcgatggggaaaacaataactgctctcattactccagaaaatctcgcattagcattaaccggaaagtcagacctgccagtagagctaaagctgcgaaatgttgagattaaggtgagtatcagcaatgaataa

SEQ ID NO: 38217 - DNA, 156 bp, Escherichia coli; identical to SEQ ID NO: 23896

SEQ ID NO: 38218 - DNA, 690 bp, Escherichia coli; identical to SEQ ID NO: 20091

SEQ ID NO: 38219 - DNA, 243 bp, Escherichia coli
atgcgcggagcccttcctaaagtatctgatgctgaacatctcatcttcatagctctctttaccctgaacagactgaatgtgatcatccagacgaatagtgatgttttcccggttgtcggggattggtttaccgctgaacaggtgcaacattctttccagatcggcgagtcggtcagcctgttgtccggtgataagatgaaatctatggtcacccccgtttttgcaacactgatttttgattaa

SEQ ID NO: 38220 - DNA, 831 bp, Escherichia coli
ttgcccctaccgggccagccacacctgtttctcctttcggtccctgtgggcctgccgggcctgccgggcctgccgcaccggtatctccctttggaccctgtggacctgcatttcccgtcagaccggtctctccccgctctcccctgtcacctttcggcccctgcgggcctgccggaccagcatcacctgccggtccccgttcgccggttgccccgacagggccggtgtcaccgcgctctcccttatcacccttcggcccctgaggacccgcgggcccctgttccccctttggcccgggaggtcccaccacggtggggattcggtttacggcctcttccgccgctatcctgctttgttccgctgactgtgcgctttctgctgactcccgggctttttctgttgcggtcgttgcatccctggctgcattaccggctgcactttctgccgtctttcttgacaattcagcttctgctgcactttgtgatgactcactggctttttgagcggccgcagaagccgaggacgaggacgcatcctctgactgctttgcagcggctgcactttctgccgcctgccgggctgactccaatgcatcccctgctgaagtgtcagcatttgcagcgttcgcttccgccttactggatgatatgccggcattcctcgctgatgtctccgcctctccggcattcttcttcgcctcctcagcgtgacgcgccgcttcttccaccatcagttcaaaacgacgcagtgcctccggccggacgtcatcctccgacatggcaccgagaaaatcattcagcgtccccggttgagaatcttcatacacggtga

SEQ ID NO: 38221 - DNA, 246 bp, Escherichia coli
atggcattcggtacagagcgtccagagattcgtctcctcattaccaccaccgaactgaagtgcaattcggtgatcgagttcactgtcacagaggtcaaccacacgaccacagagacagcactgcccggcatccctgagccagatatgacgcttgagggaaacacgtgcactgccactgacacgacgctgttcccccttcagaatattcacccgccgggtgttcagagttttgattctgcccggtaa

SEQ ID NO: 38222 - DNA, 435 bp, Escherichia coli
atggaggaaagaacggagaccgtcacccgtcgccgtcggcagagtggcgtatggggaaccgtttgtcgatggtttggcaccagtgacctgggctgggaaaactatgacgaggatgtgagtcgcagcgtgatcaatatcaacaaggccagagaggaagttatgtcactgacccgggcatatttcggggagctgcaggcatccattgagcaggatattaaccagcccgtccgccaggaaatcgatgcctttttctgcgcattcagggagaaagttgaacaactgcgtaacacgctgattcagagctctgaagatcataaacgcgatcagcaggcgcaggaacggcttaccgggcgacttcaggcattaaatgaaagggttcctgagctcattactgacagtaaggcgctgagggaagagctggagacaatgctgtga

SEQ ID NO: 38223 - DNA, 393 bp, Escherichia coli
gtggtccgccgccgggtgtatgcccgttttctggatgcggtgaattttgtggcgggcaatccggaagcggacccggagcaggagctgagcgaccgctgggtggtggagcagatgtcagagctgacggccatgacagcctcgtttgtgctggccacaccgacggagacggacggagcgctgtttcccggtcgcattatgctggcgaatacctgtatgtgggattaccggggagatgaatgcgggtataacggtcctgcggtggcggatgagttcgataaacccaccaccgatatccgtaaggacagatgcagcaagtgcatgcgcgggtgtgagatgcgcggcatggtggctaattttggcggtttcctttccattaataaactttcgcagtaa

SEQ ID NO: 38224 - DNA, 435 bp, Escherichia coli
atggaggaaagaacggagacagtaacccgtcgccgtcgacaggatggtgtctggggtacgctttgtcgatgggcaaacaccagtgactggggctggaaagagtacagtgtggatgtgagccgcagcgtgatcaatatgaacaaggtcaggaaggaagtgatgtcactgacccgggcatatttcggggagttgcaggcatccattgagcagaatattaaccagcccgtccgccaggagatcgatgattttttctgtacattcagggaaaaagtcgaacagctacgtaacacactcattcagagctcagaagatcataaacgcgatcagcaggcacaggagcatcttacggagcgccttcaggcattaaatgaaagggttcccgagctgattactgacagtaaggcgttaagggaagagctggagacaatgctgtga

SEQ ID NO: 38225 - DNA, 204 bp, Escherichia coli; identical to SEQ ID NO: 37655

SEQ ID NO: 38226 - DNA, 993 bp, Escherichia coli
ttggctacaatgaaagatgttgcccgcctggcgggcgtttctacctcaacagtttctcacgttatcaataaagatcgcttcgtcagtgaagcgattaccgccaaagttgaagcggcgattaaagaactcaattacgcgccatcagctctggcgcgtagcctcaaactcaatcaaacacataccattggcatgttgatcactgccagtaccaatcctttctattcagaactggtgcgtggcgttgaacgcagctgcttcgaacgcggttatagtctcgtcctttgcaataccgaaggcgatgaacagcggatgaatcgcaatctggaaacgctgatgcaaaaacgcgttgatggcttgctgttactgtgcaccgaaacgcatcaaccttcgcgtgaaatcatgcaacgttatccgacagtgcctactgtgatgatggactgggctccgttcgatggcgacagcgatcttattcaggataactcgttgctgggcggagacttagcaacgcaatatctgatcgataaaggtcatacccgtatcgcctgtattaccggcccgctggataaaactccggcgcgcctgcggttggaaggttatcgggcggcgatgaaacgtgcgggtctcaacattcctgatggctatgaagtcactggtgattttgaatttaacggcgggtttgacgctatgcgccaactgctatcacatccgctgcgtcctcaggccgtctttaccggaaatgacgctatggctgttggcgtttaccaggcgttatatcaggcagagttacaggttccgcaggatatcgcggtgattggctatgacgatatcgaactggcaagctttatgacgccaccattaaccacgatccatcaaccaaaagatgaactgggggagctggcgattgatgtactcatccatcggataacccagccgacccttcagcaacaacgattacaacttactccgattctgatggaacgtggttcggcttag

SEQ ID NO: 38227 - DNA, 837 bp, Escherichia coli
  misc_feature (5)..(41): n is a, c, g, or t
atgtnnnnnnnnnnnnnnnnnnnnnnnnnnnnnnnnnnnnnttatggtactttaattaaaaagtcaaatcttaataaagaagaattaatacatatattatctgcaagaactttggatggaaccatacctggtttatatcaggcccttcaaaatggacatgctcaagctattaagagttatggtaacttagttctggatactattaataaaaatatagatttagagtatttgctttcagcatttaaatatgaggcacatagctctaataaatatactcctggattattttctgcatttcaaaatggtcatgcagacgcaataaaggcatattgtggcgtacttggcaatagtaatttgaaaagaggtgagataatcaggatgcttgaggcgagaaattatgatggtgcaccaggattacttcttgcgtatcaaaatggagatattaatacgattcagtctttttttgactcactaataatgttagatatatcaaaggattttatcgaagagttattgactgcaaaacattatgattttacggggttatcattagcgatcagtcatagacatgatcatgttgtcaaattatacggaaagttatttaaaaaacttgataccagtccatataaaatgtcaattatcctagcattagcaattgattgcgagagaaataatgcaaacataattattgatagtgagtacaagtcaaataaggcagtaaaggaatatgtagaaattttaaaagaattcaatatatgcccagaaaaggtagcagaatacctaagcgagttcagcggaaaacatttcctcgatgtatataattattattccaattga

SEQ ID NO: 38228 - DNA, 702 bp, Escherichia coli; identical to SEQ ID NO: 37699

SEQ ID NO: 38229 - DNA, 759 bp, Escherichia coli
atgggaaccgtattgcatgcactgaaagcgatgggtaaagccaattctgttgaactggcggcgcggcttgatatcagccgtgaagaagttctcaacgaactgtgggaactcaaaaaaaatggcgttgttgataaaacgggtcacacctggtttctggctgtcgaaggtgaatccggggtaaccgaagggcaggcactacaacctgaagcgccggatgtggtaaccgaagaggtcgctccaaaagttagcgctgacatgatgattgagtttatcgctcaggagggggctaaaacctgtgaagaaatagcgggtaagttcggtgtcagtactcgcaaggttgcttccacgctggcggtggtaaccgcaacggggcggctggcacgcgttaatcagaacggtagatttcgttactgcatgccgggcgataatttaccagcagagccgaaagccgcgctggtaacggaaaatgatggtaaagcctttcctcagccagcaggtgttgcgttaccagtccgggaagcggaaacacaggaagaaatgaaaacagaaatcgtggaagacattgtgaagttacagccatcggtcaccgaaacgaaagcagatgacctgattctaccatcgctgcatgtggctaaccgagagctgcgccgggcgaaaagtgatgtgcagaagtgggggcgagtctgtgccgctctgcgggaactgaacaaacacagggatattctccgggatattaccgccaccagagagcagcagtga

SEQ ID NO: 38230 - DNA, 549 bp, Escherichia coli
atgactactcaaatctctgttgaaactcttgttgctattacttacaaccaaatccctgtaattaccactgagttgttggcgcatctttatggtgcagacgttaagaatattcaaaacaactttgcaaggaatgtagggcgctttcagattggaaaacacttttttaagatcgaaggtgaagagttacgtgaattgaagcacagaccatctttaagtgggtctgtgaaaatcgcccgtaacgttcgttccctcatcctctggacagaacgcggagcagcccgtcatgcaaaaatgctcgaaaccgatcaggcgtgggaagtattcgaaaaactcgaagacagttacttcaaccagtacgagaaagagcgggctatgggaaaaatgaatatcgattttcacctggcgatccgtgacgataaaaccgccttcatccgaagttatgcgcctggccagctggtgacggttgaagaagccctggctttgcttaaatcgcgcggatggctggtaatgccacgagatgaactggccggaaaattaatggagctttaa

SEQ ID NO: 38231 - DNA, 372 bp, Escherichia coli
atgcgaattttcaaaaacgcctggtttgaacgtttcgcccgaaaacatcggatttccgataaatcgctgcgcaaaatcgtggagcaggccgataaggggatcatatccgcaaatttgggtagtggtgtcattaaacaaagattagcccgaagtggtggcggaaaatcaggcggttaccggacaataattttttaccgcgttgcagaaaaagcctttttcatctacgcatacgcaaagaatgaacgagagaatatcactgctatagaggaaaatgcttttcgaaaagccgctccccatgtcctcaatcttactgatgaacagctggcacaattgattcaacaaggccagttcacggaggtacccaatgagtaa

SEQ ID NO: 38232 - DNA, 195 bp, Escherichia coli
gtgaaaatcccagccagtttgatcccggggttttatgagagcacgcgcccggttgttgtttacagaaacagtgatggttcttttcaatgtggttttgttatgcgaagtaatgaggttgttgtaagcctttctcttctttctgaggtaagagagttggcaggattacctgttgatgatattcagaagcagctataa

SEQ ID NO: 38233 - DNA, 270 bp, Escherichia coli
atggcgcacgatagcagattgcacaattctgccgcccttgccagtaggcaagggcggtgttcgcacgtatttaaaaccgactggttccagcatcccctatgcactgaagaacaggccgaatggctgatccagtgttaccgcaggcgcggatatgagtttgagaaaaccctcagcttcgatcgtcgtcactggataatctccgtcaggctcccttattccgaacgcccaccgcgtccgtcccgcacattccagcagcgcatctggaggtaa

SEQ ID NO: 38234 - DNA, 546 bp, Escherichia coli
atgcagatgccgggattccgccgtcagatgaacgaaggctggtaccagatacgtattgccggttatgacacggcaccggaggcggtgtacgcccgtcttcacgaacagctgggtgagggaacggtcatccatattgtgccgcgactggccggggccggaaagggtggactgcagattgtgctgggggcggcagccatcgtgggctctttcttcactgccggggcatcaatggcgttatggggttcagccctggcagccggtggtttttctgccaccacgatgctgttttcacttggagccagcatgattctgggcggtgtggcccagatgctggccccgaaggcaaaaacaccggattaccgcgcaacggataacggcagacagaacacgtacttttcctcgctggataacatgattgcccaggggaacccgatgccggtgccttacggggaaatgctggttggctcccgccgtatatcccaggacatcagcacccgtgatgaaggcgggggcggaacggtcgtggttgtcgggcgacagggataa

SEQ ID NO: 38235 - DNA, 216 bp, Escherichia coli
atgtaccagatggaaaaaatcacaacgggtgtgtcatacaccacgtcagcggtggggacgggatactggttactgcagctgctggacaaagtctctccgtcccagtgggtggcaataggtgtactggggagtctgctgtttggcctgctgacgtatctgactaacctgtatttcaaaatcagggaggaccgccgtaagacggcgcggggagactaa

SEQ ID NO: 38236 - DNA, 519 bp, Escherichia coli; identical to SEQ ID NO: 37222

SEQ ID NO: 38237 - DNA, 426 bp, Escherichia coli
ttggaatcttcaaaaaaaacccgcagagcggcaacggaaattaaaaagtttgaaaaacgcgatctggcacaggtggtgattaacgccgcatacctggtggcctgtgcagatggtgaatgtgaggcatccgagaaagcgaagatcgaacaggtactgcgtaatcagcctgcgctgtccgcgtttacgtcagaaattaatgcgattagcgcaaccattatcggtcagctggatacgaactttaaaactggtcgtcgtgcggcgttacgtgagattgaggatgtgaaacacgatacgcgtgaagcggaagatgtgctggatgtggcggtggccattgcggaggcagacggcgaaattgagccggaagagcgcaaggtgctggaagagattgccggtgttctgggtcttcgtctggagaatcacctgtga

SEQ ID NO: 38238 - DNA, 1119 bp, Escherichia coli
gtgcgcagcgtcaacctggtggggaaatctgcttttgtggaagccagtggccgggccagcaatgatgcagaagggtatctggggctgtttcgggaaaaaataggaaaactgcatctggctcaggggctgtgggagctgatagacaacagccagcttgcggatgagatggcggagatgaagaccaccatcacggaaacccgcaatgaaatcacacagacggtcagtaaaacgctggagaaccagagcgccactatacagcagatacagcgcgtgcagaaggacacaaatgatgacctggctgcgctgtacatgctgaaggttcaaaaaacgaaagacggcattccctatgtggccgggattggtgcagggattgaggatactgatggccagccactgagcaacatactgctgctggctgaccgtatcgcgatgataaatccggagagcggcaacagcacgccgttatttgtggcgcaggggaatcagctgttcatgaacgacgtgttcctgaagcgactgtttgcggtgagtatcacctcgtccggcaatcccccgacgttttccctgacgccggacgggcgactgacggcgaaaaatgcggatatcagtggcagtgtgaatgcgaactcagggacgctcaacaacgtcacgattaatgagaactgtcagattaaggggaaactgtcagccaaccagattgaaggcgatattgtcaaaacggtcagcaagtctttcccccgcacgagcacttatgccagtggcaccatcacggtaagaatcagtgatgatcagaagtttgaccggcaggtcatgataccgccagtgttattccgcggtggtaagcatgagaatttcaacagtaataaccaacagtcatactggtattcaacctgccggttaagagtgacccgcaatggtcaggagatttttaatcagtccacgacggatgctcagggcgtattttcctcagttatagatatgcctgccggacaggggacgctgacactgacattcaccgtatcttcatcaggagcgaataactggacaccaacaaccagtatcagcgatctgctggttgtggtgatgaaaaaatccacagcaggtatcagtatcagctga

SEQ ID NO: 38239 - DNA, 234 bp, Escherichia coli; identical to SEQ ID NO: 28326

SEQ ID NO: 38240 - DNA, 234 bp, Escherichia coli
atgagcgaatatttcagaatacttcagggactgcctgacggtccttttacccgcaaacatgccgaagccgttgccgcacagtaccggaacgtctttatcgagaatgaccacggcgaacagtttcgcctggttgtccgtaataacggtgcaatggtctggcgtacctggaattttgaggacggtgccgggtactggatgaaccatgtcatccgtgatttcgggattattaagtaa

SEQ ID NO: 38241 - DNA, 231 bp, Escherichia coli
atgaacgcaaaaatcagatacggcctgtcggctgccgttctggcgctgattggtgcaggggcgtctgcgcctgaaatcctcgaccagtttctggatgaaaaggaaggtaaccacaccacagcataccgtgatggtgcgggtatctggaccatctgccgtggagccacccgggtggatggtaagcctgtgattcctggcatgaagctgtcgaagggtaagcgtacagcctga

SEQ ID NO: 38242 - DNA, 195 bp, Escherichia coli; identical to SEQ ID NO: 37317

SEQ ID NO: 38243 - DNA, 186 bp, Escherichia coli
atggcgcaggcggaaatccgcatctgggtgcgcggtcagtccggccgggaaatcacggcagcgtcacgacttcatgtgctgagtggtccatggcgtgaccggatcctgaacgttgtcgggctgcccgtgccggatgtgaccggcgggcgtctggaaattctctgtcggctgggaggggaaaaatga

SEQ ID NO: 38244 - DNA, 432 bp, Escherichia coli
atgcaaactacgcgtaccccctactctatttcctttatggcgacagtgttacttttattgctctttgcttgccatagcaccgttgccaacgcagctgtcgcactgggtgcgacgcgggtaatttatccggcaaaccagaaacaggttttattgcctgtcacgaataatgatcctgccagtgtctatctcattcagtcatggatagaaaatgctggtgaccaaaaagacacccagtttgtcattaccccacctcttttttccatgcaaggtaaaaaagagaatacgctgcggataatcaacgccactaatcatcagttacccggcgaccgtgaaagcctgttctgggttaatgttaaagctattcctgctatggaaaaagaccagaagaatgagaatacattaccggcccacgaacctggcaatggcacctga

SEQ ID NO: 38245 - DNA, 255 bp, Escherichia coli
atggcacctgaagaagcgcctgcaatgcttcggtttcgtcgcagcggtagcaatctcactcttattaatccaacgccctacttcattaccgtaacaaatatgaaagcaggaaatagcaatctcccaaacaccatggtgccgccaaaaggtgaagtgtcggtggatatcccgcatgctgccaccggggatatcagttttcagacgatcaatgattacggcgcattaactccgcgtattaaggcaaccatgcagtaa

SEQ ID NO: 38246 - DNA, 246 bp, Escherichia coli
gtgggttgggatgcatttcatcttgcagaagtgctgttaactcaaccaataatggttgtggtgggcgatagagtgggcgcatttggtgcctaccgtgacggctgcgaaattattggccgcgctgcttcaaaacataaagagctggtcgtggttgaaggttattcacattacgacctgtatgataagccagaacctgtgaaacaggcactcgataaattaattcctttttataaaacacatttgtaa

SEQ ID NO: 38247 - DNA, 1065 bp, Escherichia coli; identical to SEQ ID NO: 37262

SEQ ID NO: 38248 - DNA, 744 bp, Escherichia coli
atgacacagactgaatcagcgattctggcgcatgcccggcggtgtgcgcctgcggagtcgtgcggcttcgtggtgagaacgccggagggggagtggtatatcccttgtgtgaatatttctgcagagccggaggcgtattttcgtatcgcaccggaagactggctgcgggcagagatgcagggggagattgtggcactggtccacagtcatcccggtgggctgccctggctgagcgaggctgaccggcggctgcagataaaaagtgcactgccctggtggctggtctgccggggggaaattcataaattccgctgtgtgccacatctgacaggacggctctttgagcacggggtgacggactgttacacgctgttccgggatgcttatcatctggcggggactgatatgccggattttgagcgtgaggatgactggtggcgcaatggtcagaacctgtacctggacaatatggaggcgactggtttttacaggatttccctgccttccgcacagcctggcgatattctgctgtgctgctttggcgcatcggtggccaatcatgccgccatttactgcggcaacggtgaactgcttcaccatctgcctgaacaactgagtaaacgggagaggtattccgaaaaatggcaacgacgaacgcattcagcctggcgtcaccgccactggcacgcatctgccttcacggggatttacaacgatttggccgccgcctcagcctgtatgtga

SEQ ID NO: 38249 - DNA, 1620 bp, Escherichia coli; identical to SEQ ID NO: 23986

SEQ ID NO: 38250 - DNA, 144 bp, Escherichia coli; identical to SEQ ID NO: 23988

SEQ ID NO: 38251 - DNA, 681 bp, Escherichia coli
atgacaccggacattatcctgcagcgtactgggatcgacgtgagagctgtcgaacagggagatgatgcgtggcacaaattacggctcggcgtcatcacagcttcagaaattcacaacgtaatagcaaaaccccgatcaggaaagaagtggcctgacatgaaaatgtcctacttccacaccctgctggctgaggtttgcaccggtgtggctccggaagttaacgctaaggctctggcctggggaaaacagtacgagaacgacgccagaaccctctttgagttcacttccggcgtgaatgttactgaatccccgatcatctatcgcgacgaaagtatgcgcaccgcctgctctcccgatggtttatgcagtgacggcaacggccttgagctgaaatgcccgtttacctcccgggatttcatgaagttccggctcggtggtttcgaggccataaaatcggcttacatggcccaggtgcagtacagcatgtgggtgacacgaaaagatgcctggtactttgccaactatgacccgcgcatgaagcgtgaaggcctgcattatgtcgtgattgagcggaatgaaaagtacatggcaagttttgacgagatggtgccggagttcatcgaaaaaatggacgaggcactggctgaaattggttttgtatatggggagcaatggcgatga

SEQ ID NO: 38252 - DNA, 648 bp, Escherichia coli; identical to SEQ ID NO: 37979

SEQ ID NO: 38253 - DNA, 681 bp, Escherichia coli
atgacaccggacattatcctgcagcgtaccgggatcgacgtgagagctgtcgaacagggggatgatgcatggcacaaattacggctcggcgtcatcaccgcttcagaagttcacaacgtgatagcaaagccccgctcaggaaagaagtggcctgacatgaaaatgtcctacttccacaccctgcttgccgaggtttgcaccggtgtggctccggaagttaatgctaaagcgctggcctggggaaaacagtacgagaacgacgccagaaccctgtttgaattcacttccggcgtgaatgttattgaatccccgatcatctatcgcgacgaaagtatgcgtaccgcctgctctcccgatggtttatgcagtgacggcaacggccttgagctgaaatgcccgtttacctcccgggatttcatgaagttcaggctcggtggtttcgaggccataaagtcggcttacatggcccaggtgcagtacagcatgtgggtgacacgaaaagatgcctggtactttgccaactatgacccacgtatgaagcgtgaaggcctgcattatgtcgtggttgagcgggatgaaaagtacatggcgagttttgacgagatggtgccggagttcatcgaaaaaatggacgaggcactggctgaaattggttttgtatttggggagcaatggcgatga

SEQ ID NO: 38254 - DNA, 648 bp, Escherichia coli
ttgttgatcgtcgccaaccagtacggccttaatccgtggacgaaagaaatttacgccttccctgataagcagaacggcatcgttccggtggtgggcgttgatggctggtcccgcatcatcaatgaaaaccagcagtttgatggcatggactttgagcaggacaatgaatcctgtacatgccggatttaccgcaaagaccgtaatcatccgatctgcgttaccgagtggatggatgaatgccgccgcgaaccattcaaaacccgcgaaggcagagaaatcaccggcccgtggcagtcgcatcccaaacggatgttacggcataaagctatgattcagtgtgcccgtctggccttcggatttgctggtatctatgacaaggatgaagccgagcgcattgtcgaaaatactgcatacactgcagaacgccagccggaacgcgacatcactccggttaacgatgaaaccatgcaggagattaacactctgctaatcgccctggataaaacatgggatgacgacttattgccgctctgttcccagatatttcgccgcgacattcgcgcatcgtcagaactgacacaggccgaagcagtgaaagctcttggattcctgaaacagaaagccactgagcagaaggtggcagcatga

SEQ ID NO: 38255 - DNA, 330 bp, Escherichia coli; identical to SEQ ID NO: 24045

SEQ ID NO: 38256 - DNA, 648 bp, Escherichia coli; identical to SEQ ID NO: 38178

SEQ ID NO: 38257 - DNA, 216 bp, Escherichia coli
atgagcaacctacgaaaatatcgagagtcactgaatatctctcaaacaacacttgctaaggcagttggatgcacacagggagctatcggacattgggaatctggtcgtcgcttcccagaccttaaaacatgccgtgctcttgttgcgtgtctaaacaagttaggcgcaaaagtaagtcttgatgacgtgttcccgccggagcacaaagccgcttaa

SEQ ID NO: 38258 - DNA, 207 bp, Escherichia coli
atggacaaaacaaatattaacttaatggaaaggtatcttctcaacaaagagcgtatgaagcatgtatgttcttcattgattaactttatagtcagtaatggtagccgaacagagaaagtctatgctaatgagaaaaggaaatatgaggcttcaactctaaaaagagaattatcgaaaaaggataaaaggaaaagatataggttgtag

SEQ ID NO: 38259 - DNA, 516 bp, Escherichia coli; identical to SEQ ID NO: 23832

SEQ ID NO: 38260 - DNA, 351 bp, Escherichia coli
atgcgcatgaatgttttcgaaatggaagggtttcttcgcgggaaatgtgtaccgcgagatctgaaagtgaatgaaacaaatgctgagtatctggtgcgtaaattcgatgaagtacgtgctgaggctcgcaacgagggtattaactataccgcaagccgtcttgctgctgctttcaatcacggatttatcaataagcctttggctgaagttttcgacgttacacgcatgattttgtcagcgaaagaagagttggctaatgaagcgcatccgattgatggcctgtctggtgaatatgcggagaaatcccttgaagaatgggcggaacagattcgcaaaggaagcagccagtga

SEQ ID NO: 38261 - DNA, 207 bp, Escherichia coli
atgcgagagctgaaaatgaaactctgcgtgctgatgttgccgctggtcgtaagcgcctgcggatcaacgccacctgccccggtaccgtgcgtgaagccaccggcacctccggcgtgggcaatgatgccgccgtcgaactctctccggttgctggacgaaacgttctcggtatcagagacggaatcatcagcgaccaggcagcattga

SEQ ID NO: 38262 - DNA, 234 bp, Escherichia coli; identical to SEQ ID NO: 37505

SEQ ID NO: 38263 - DNA, 1560 bp, Escherichia coli
  misc_feature (1542)..(1551): n is a, c, g, or t
atgtttaacaaagttttggtagggttaaggagtcatccagaattaataattcttggattaatggtgatgattatcgccatgctcataattccattgcccacctatttaatcgactttttgattgggcttaacttaacattggcaatacttgtatttttaggatcattctatgttgataggatcttaagcttttcttcatttccatcaatcctccttatcacaacgttatttcgtttggcgctggcgatcagtaccagtcgacttatacttcttgaggcggatgctggagaaattataacgagttttggtgagttcgttattggagatagcctggtagttggttttgttattttctccattgttactattgttcagtttatcgtgattactaaaggttcggaacgtgtggctgaagttgctgcccgcttttcgcttgacggtatgccaggtaaacaaatgagcattgacgccgatctacgcgccgggatcattgatgcagatttagcaaaagaacgtcgtagtgtattagaacgagagagccagttgtatggttcctttgatggtgcgatgaaatttatcaaaggtgatgctattgcaaacattattattatctttgttaatattatcggtgggctatcagtaggagtaggccaaaatggaatggatttctcaacagcgttgactgtctacacaattcttactgtcggtgatggtcttgtttctcaaattccagctttattaattgctattagcgcaggatttatcgttacgcgcgtaaatggcgatagtgataatatggggcaaaatataatgtcccagttattaagtaattcttttgtcattgttgtgacatgtgtcctcgcgctaagtattgggttgcttccaggttttccccttctagtgtttttatgtttggcagtaatcttaggaatttacttttactttaaattcaaaaagaaagggactgaagaaacggttgttgagggagatattaccgttgggttggaaccctataatcaagatgatgatatctcattaggtatcattaataaacttgatcaggttattaccgaaacggtacccttggtcttgattatgaatagtgtacaggctaaaaaatacactgaaatcaatcttgctgataggattcgtagtcagttttttattgagtatggtatccgcattcccggtattgtcattcgtgagggggaaggtcttaatgatgaagatgtcatattaatgctaaatgaagtcagagcttcacaatttaaaatttatcatgatcttgtcttgttggttgaatattcagatgaagtggtttcgactttgatcaagaaacctgtcattgtaaatagtaatggtgaacaatattattgggttacgaaaagtgatgctcaaaaattaacaaaaattggctgttatactcgcacggccatggatgaaatgtataatcatttatctgtctgtctggctcataatattaatgagtactttggtatacaagaaacaaaatatattcttgatcaattagagatgaagtannnnnnnnnngatatataa

SEQ ID NO: 38264 - DNA, 444 bp, Escherichia coli
  misc_feature (400)..(409): n is a, c, g, or t
atgttacaacaggagcaacccgaagattttgtgattgcaacaggagtccaatactcagtccgtcagtttgtcgaaatggcagcagcacaacttggtattaagatgagctttgttggtaaaggaatcgaagaaaaaggcattgtagattcggttgaaggacaggatgctccaggtgtgaaaccaggtgatgtcattgttgctgttgatcctcgttatttccgaccagctgaagttgatactttgcttggagatccgagcaaagctaatctcaaacttggttggagaccagaaattactcttgctgaaatgatttctgaaatggttgccaaagatcttgaagccgctaaaaaacattctcttttaaaatcgcatggtttttctgtaagcttagctctggaannnnnnnnnntgttgagttggttttacgtactcgggatgaattga

SEQ ID NO: 38265 - DNA, 1275 bp, Escherichia coli
gtgtatgacccgacggtacagtttgagttctggttttcggagacaaaaatcgcagacacatctcaggtggaaacctctgcccgttatctggggaccggcagtcagtggagtgtatccggcccgcacattaagcccgggaaggatttctggttttacgtgcgcagcgtcaacctggtggggaaatctgcgtttgtggaagtcagcgggcagcccagcaatgatggtgaagggtatctggaatttttccgggaaaaaataggaaaactgcatctggctcaggggctgtgggagctgatagacaacagccagcttgcggatgagatggcggagatgaagaccaccatcacggaaacccgcaatgaaatcacacagacggtcagtaaaacgctggaagaccagagcgccaccattcagcagatacagcgcgtgcagaaggacacaaatgatgacctggctgcgctgtacatgctgaaggttcaaaaaacgaaagacggcattccctatgtggccgggattggtgcagggattgaggatactgatggccagccactgagcaacatactgctgctggctgaccgtatcgcgatgataaatccggagagcggcaacagcacgccgttatttgtggcgcaggggaatcagctgttcatgaacgacgtgttcctgaagcgactgtttgcggtgagtatcacctcgtccggcaatcccccgacattttccctgacgccggacgggcgactgacggcgaaaaatgcggatatcagtggcagtgtgaatgcgaactcagggacgctcaacaacgtcacgattaatgagaactgtcagattaaggggaaactgtcagccaaccagattgaaggcgatattgtcaaaacggtcagcaagtctttcccccgcacgagcacttatgccagtggcaccatcacggtaagaatcagtgatgatcagaagtttgaccggcaggtcatgataccgccagtgttattccgcggtggtaagcatgagaatttcaacagtaataaccaacagtcatactggtattcaacctgccggttaagagtgacccgcaatggtcaggagatttttaatcagtccacgacggatgctcagggcgtattttcctcagttatagatatgcctgccggacaggggacgctgacactgacattcaccgtatcttcatcaggagcgaataactggacaccaacaaccagtatcagcgatctgctggttgtggtgatgaaaaaatccacagcaggtatcagtatcagctga

SEQ ID NO: 38266 - DNA, 591 bp, Escherichia coli
atgcttaacccacccgatggcatgcagcttaagctccggatacatggcgttaacttctggcattttcatcaacgcttcaacgatatgtccgtcgaatgttgccatgtcttcctgcaacaattcctgcgcgctaatcaccatatcaacggtgatgttttcacatgtgtcgaacttaaccatgacagcgttctgtacttcaggggccaggttgtcaaaagtgacgttcatcggatcggattcagtctcgaccgggacaaaggaagcagacgcctcatcccagcggttttcctgcatatattcagcatcccaggaatcgagggcagggcggggtataccgggtttatcctcgcaaacaagaaatttataagcgcagtcctgagcagccggataatgttccaggaattgccagtgaaattttgcgcgggcgcgacgttcatcaccggcttcaatggcagtggctacagcgacggcaccttcttcctttattgcctgttcgtccggaatggcggcgcaaataaagactttactcattttgttttacctcattacagatttaagggtgaacaaatccctgccattgctggcatataa

SEQ ID NO: 38267 - DNA, 132 bp, Escherichia coli; identical to SEQ ID NO: 24006

SEQ ID NO: 38268 - DNA, 270 bp, Escherichia coli
atgaacatattaaaaaaaattatgcagcgtctgtgcggttgcggaaagcatgatgactgtgaacacgggcagtcgcttacagtacaactgcgactgggaccggcagacattctggagtcagatgagaatggcattattccggagcaggacggggtaatcacgcaggtggtgatactggatgcagataaaaagcagatacagtgtgtggtaagaccgctgcaaattctgcgtgctgacgggaggtgggaaaatattggcggaatgaaatag

SEQ ID NO: 38269 - DNA, 195 bp, Escherichia coli; identical to SEQ ID NO: 37317

SEQ ID NO: 38270 - DNA, 195 bp, Escherichia coli; identical to SEQ ID NO: 37504

SEQ ID NO: 38271 - DNA, 255 bp, Escherichia coli
atggcgggtgtggcttacagccgtgtgtcgactttctccggggattatcttcgcgtaactgacaacaaggggaaaacgcacgatgtgctgaccggaagtgatgacggtcgccacagcaacacgtctctggcgtggggggctggcgtgcagtttaacccgaccgaatccgtggccattgatattgcttatgaaggctccggcagtggcgactggcgcactgacggtttcatcgtgggtgtcggttataagttctga

SEQ ID NO: 38272 - DNA, 195 bp, Escherichia coli
atgacgttcacagtaaaaaccattccagacatgctcgttgaggcatatgaaaatcagaccgaggtagccagaatactgaactgtagtcgcaacacggtcagaaaatacactggcgataaagaaggaaaaagacacgctattgtcaacggtgttcttatggttcatcgcggatggggtaaagatactgatgcgtga

SEQ ID NO: 38273 - DNA, 594 bp, Escherichia coli
  misc_feature (579)..(588): n is a, c, g, or t
atgaatgagagtgaatcgcagctaaaacttgttggtatggggtctgtgagttccaggctaaatgctctgtttatttcgctaccgaaaaatagccatttagatattagtggagaaggtgagtttgatatcccaaggttgctgaaaaacagtgaacgcagcttaactaaaataagtggagtatttagcgttgttttacatgatggtgctgtttgtacaattcgcacccagcaactttatgattctgcgattgaatattatattaaatcgacagaagttgaactggttaaatcggattatcctgtccatcgagcctggccgaagatcggttggaaaaaggatctgcaatatggcattcaaacaaagaggttaactgttctgtacgcattgtggccgggaatcggaaccgggcatcgcaataccaactgtcatcaacatcgacccagattctttcaacctgaagactacttgcactgcgtatttcagaagattgagaaagtaatcgccttacaatctctgcagcattcgcttcggggagaacgagtggaagttgaagatgccagtctggagagagcttacgtnnnnnnnnnnaggtaa

SEQ ID NO: 38274 - DNA, 636 bp, Escherichia coli
ttgcccctaccgggccagccgcacctgtttctcctttcggtccctgtgggcctgccgggcctgccgcaccggtatctccctttggaccctgtggacctgcatttcccgtcagaccggtctctccccgctctcccctgtcacctttcggcccctgcgggcctgccggaccagcatcacctgccggtccccgttcgccggttgccccgacagggccggtgtcaccgcgctctcccttatcacccttcggcccagccggacctgctggccccgtgtcccctttatctcctttcggaccgggaacaccacctcctgctgcagcctcttctgcctttgttttcgcttcatttgccacatccattgccgctttcaccgctttcggggtggcagccttcgtttcatcatcactgtccgttgcgctgcttaactgcacaattcccttctgtgccgtcgttgcatcagccacatttgcagcgctgcctgccggacctggctctccacgaggtccctgaggtccggtctctcctcgttcgcctctcggacctgcaggaccaggttcacctcgggggccagtctccccacgctcacctcgtgctcccatcggtccctgtggtccggcttctcctcgttcgcctttag

SEQ ID NO: 38275 - DNA, 234 bp, Escherichia coli
atgacagcgcttcccgaccatgccgccagtcccctgatgacccgactgcaggacgagctgcgcacggagtctgtccgctctcaggcccgtgaacagtttatcggtgcggtggaccggatatttgacacagcggagagcgtctgtgttgcctctgttgtccgtacggccctgcgcgctgttcgtgacaccgtggtctctgttgcccgcgcggtatggaaccggattttcttctga

SEQ ID NO: 38276 - DNA, 1785 bp, Escherichia coli
  misc_feature (1680)..(1689): n is a, c, g, or t
ttgaatttacagagtggcatcaacattggtagttggcgactacgcgataactcaacgtggagttataacagtgggagtagcaattcatctgacagcaataaatggcagcatatcaatacgtcggctgaacgtgacattattcccttacgctcacggttaacggtaggtgatagttataccgatggcgatatttttgatagtgtgaactttcgtggcctcaaaataaattcaacagaagcgatgttgcccgatagccaacatggtttcgctccggtgattcatggtattgcccgtggcaccgcacaagtgagtgtaaaacagaacggatacgatgtttatcagactactgttccacccggcccttttactattgatgatatcaactctgcggccaatggtggtgatctgcaagtaaccataaaagaggcagacggcagtattcagacattatatgttccttattcgtctgttccggttctccaacgtgctggatatacgcgttatgcgcttgccatgggggaatatcgtagtggaaataacctgcaaagctcccccaggttcatacaaggtagcttgatgcatggactggaaggaaactggacaccttatggcggaatgcaaattgcagaagattatcaggccttcaaccttggtattggtaaagatttaggactttttggtgccttttctttcgatatcacgcaggccaatacgacacttgcagatggcacccgtcacagcgggcaatcggttaaatccgtctacagcaaatccttctaccagacaggaaccaatatccaggtcgcaggatatcgctattctacgcaaggtttttataacttatccgacagtgcctacagtcgaatgagtggttacaccgtcaagcctcctaccggagacagcaatgagcagacacaatttattgattattttaatctgttctacagtaagcgtggtcaggaacaaataagcatctctcagcagcttggaaattacggtgcgacatttttcagtgccagtcgccaaagttactggaacacgtcacgcagcgaccagcaaatatcatttggattaaatgtgccgtttggtgatattacgacttcgctgaattacagctattccaataatatatggcaaaacgatcgggatcatttactcgcttttacgcttaatgttcccttcagtcattggatgcgtacagacagtcagtcggcatttcgtaattcaaacgccagttacagtatgtcaaacgatttgaaaggcggcatgaccaatctatcgggggtttatggcactctgctgccggataataacctgaattatagcgttcaggtcggtaacacccacggaggtaatacatcgtctggcaccagtggttacagtactcttaattatcgtggagcttacggcaatactaatgtcggttacagtcggagtggtgacagcagccagatttattacggaatgagtggtgggattattgctcatgctgatggcatcacctttggacagccgctgggcgacacaatggttctggttaaggctcctggcgctgataatgtcaaaatagagaaccagaccggaattcataccgactggcgtggctatgccatattaccatttgcgacagaatatagagaaaatcgtgtcgctcttaacgcgaattcccttgcagataannnnnnnnnnatgttgaactggatgaaaccgtggtcactgtcatcccaactcacggtgctattgccagagcaacatttaatgcacaaatcggcgggaaagtattaa

SEQ ID NO: 38277 - DNA, 240 bp, Escherichia coli
atgacgttgaagtacggtaataaaagcgttccattcggtgcaattgtcactcacggagagaataaaaatggcagcattgtcgcggaaaacggtcaggtttatctgactggacttccacagtcagggaaattacaggtttcatggggcaatgataaaaactcaaactgtattgtcgattacaagcttcctgaagtctctcctggaaccttgctgaaccagcagacagcaatctgtcgctaa

SEQ ID NO: 38278 - DNA, 180 bp, Escherichia coli; identical to SEQ ID NO: 23969

SEQ ID NO: 38279 - DNA, 600 bp, Escherichia coli
  misc_feature (579)..(592): n is a, c, g, or t
atgaatgagagtgaatcgcagctaaaacttgttggtatggggtctgtgagttccaggctaaatgctctgtttatttcgctaccgaaaaatagccatttagatattagtggagaaggtgagtttgatatcccaaggttgctgaaaaacagtgaacgcagcttaactaaaataagtggagtatttagcgttgttttacatgatggtgctgtttgtacaattcgcacccagcaactttatgattctgcgattgaatattatattaaatcgacagaagttgaactggttaaatcggattatcctgtccatcgagcctggccgaagatcggttggaaaaaggatctgcaatatggcattcaaacaaagaggttaactgttctgtacgcattgtggccgggaatcggaaccgggcatcgcaataccaactgtcatcaacatcgacccagattctttcaacctgaagactacttgcactgcgtatttcagaagattgagaaagtaatcgccttacaatctctgcagcattcgcttcggggagaacgagtggaagttgaagatgccagtctggagagagcttacgtnnnnnnnnnnnnnntcaaataa

SEQ ID NO: 38280 - DNA, 519 bp, Escherichia coli
atggcccggtttgatattgatactggcggctatccagtacagccccgtgccaagatagcgggctgtggtttcaacctgcctgatatcggtaatccgcgtttccgagaaccagaactcaaactgtaccgtcgggtcatacaccgcaagacgcgggaccgctgttatctgaaaatagcccggtgtcagctcaatcgtggcgggtaccgcaggtgcattaatcctgaacgtggtggtggccggttcgccctgctggccataactgttaatcgccctgaccgtcagggtgtattcccccggcggcagaccactggaacgatgctctgtatccgcagtgatggcggtggtcaccagacggctgccttctccgcttccgctggtcagtcgcagactgaagcgcacccccttcaccacccgcggcgtgtcccatttcacctgtgccagatactggccgtcagccgcgctcacctccaccgtgaggtgctgcactgccggagggatgacgctgttcagggtgcctga

SEQ ID NO: 38281 - DNA, 516 bp, Escherichia coli
atgaacgaaggctggtaccagatacgtattcgcggtgaggacacggcaccggaggcggtgtacgcccgtcttcacgaacctctgggtgagggggcggtcatccatattgtgccgcgactggccggggccggaaagggtggactgcagattgtgctgggggcggcagccatcgtgggctctttcttcacggccggggcatcaatggcgttatggggttcagccctggcagccggtggtttttctgccaccacgatgctgttttcactgggggccagcatgatactgggcggtgtggcccagatgctggcaccgaaggcaaaaacaccggattaccgcgcaacggataacggtaaacagaacacgtatttttcgtcactggataacatgattgcccaggggaacccgatgccggtgccttatggtgaaatgctggttggttcacgacggatatcccaggacatcagcacccgtgatgagggcggagacgggaaagtggtggttatcgggcggggatga

SEQ ID NO: 38282 - DNA, 168 bp, Escherichia coli; identical to SEQ ID NO: 29864

SEQ ID NO: 38283 - DNA, 426 bp, Escherichia coli
  misc_feature (403)..(412): n is a, c, g, or t
atggttattacaaaaggggccgagcgtgttgctgaagtgagtgctcgtttttcccttgatggtatgccaggaaagcaaatgagtattgatggtgatatgcgcgcaggcgttattgacccgcttgaggcaaaagttcttcgctcccgagtgcaaaaggaaagccagttttatggttcaatggacggggcgatgaagtttgtaaaaggggacgctattgctggtatcattattgttttagttaacctttttggtggcgtgctcattggtatgtggcaatttgacatgccatttagtgcggcacttagcctgttttctgtattgtctgtcggtgatgctttggttgcccagatccctgcgcttattatttctgtcaccgcaggcgtggttgttactcgtgtgcccnnnnnnnnnntgtctgaactataa

SEQ ID NO: 38284 - DNA, 612 bp, Escherichia coli
atgcagcatcttgcagagcatggcattcaaccagcccggaatatggctgaacatattcctccggcacctaactggcctgcgccaacgccgccagtacaaaatgaacaatcaagacctttgcctgatgtggctcagcgtctgatgcagcatcttgcagagcatggcattcaaccagcccggaatatggctgaacatattcctccggcacctaactggcctgcgccaacgccgccagtacaaaatgaacaatcaagacctttgcctgatgtggctcagcgtctgatgcagcatcttgcagagcatggcattcaaccagcccggaatatggctgaacatattcctccggcacctaactggcctgcgccaccaccgccagtacaaaatgaacaatcaagacctttgcctgatgtggctcagcgtctgatgcagcatcttgcagagcatggcattcaaccagcccggaatatggctgaacatattcctccggcacctaactggcctgcgccaacgccgccagtacaaaatgaacaatcaagacctttgcctgatgtggctcagcgtctgatgcagcatcttgcagagcatggcattaatacatctaagcgctcgtga

SEQ ID NO: 38285 - DNA, 612 bp, Escherichia coli; identical to SEQ ID NO: 38031

SEQ ID NO: 38286 - DNA, 564 bp, Escherichia coli
atgactccgctgaatgataccctgtaccgttacgtgatgaacacccgcaaggttcacactgacgacacaccagtaaaagtgctggcaccgggcagaaaaaaggcaaaaacaggacgcatctggacgtatgtccgggatgaccggaatgcgggctcatcagagccaccggcggtctggttcgcctactcaccagacaggcagggaaaacatccggtacaacaccttcgtcccttccggggtatcctgcaggcggatgcgttcagcggttacgatcggctgttcagtgccgaacgtgaaggtggtgcactgacagaagttgcgtgctgggcccatgcccgcaggggcttcgccgacctgtataaaatcagtaaagatccacgggctgccatagccgtgaagaaaatcgcggggttgtaccgtcttgagaagaagatcagtagccgccccgtggaaaaaatccgccagtggcgacagcgttatgcccgtccgatactggaagatctgtggtcatggcttgaagagcaggaaccgcaatgttctccgggaagtaagcgtacagcctga

SEQ ID NO: 38287 - DNA, 327 bp, Escherichia coli; identical to SEQ ID NO: 38065

SEQ ID NO: 38288 - DNA, 222 bp, Escherichia coli; identical to SEQ ID NO: 37595

SEQ ID NO: 38289 - DNA, 288 bp, Escherichia coli
atggaaaaagaaatcaaatttgcgcctaaagatatcgacgaagaactggctaaaatcggcatgcttgagcgtatgcgggacattatcgaatatgcgataaaagaaaatcttgcagccagagaagcccttttgataatggagcgggagattaacctgattaaggatgctgtatctctggataataaaatagcccgcgaggaatacgttcgccgcaggctcggtgttgatggttcagcaattcttacatctgaacattatgcaaaaatctttaatcttttttcgcggtaa

SEQ ID NO: 38290 - DNA, 240 bp, Escherichia coli
atgtcagatataaaaaatgcccttgatgttgccgcattcacaatggctggaaatcttatggtaaccctgttcgataagggggttatttcccgtgaggaggcaacacatattatcaatattgctcaaaaaagtgccgcaccccaaagcgcagagggacaccaggatggctcatatattaatacaaactggcatttcgacaatatccgagcctgcatgggcattaccgcgaaaaaagattaa

SEQ ID NO: 38291 - DNA, 1332 bp, Escherichia coli
atgacacaggggattgatctgggttatgccgccacgcttccctcaaaagaggcggtggcatacttccgtgccaaaggggcgcatatcagctggaactggttcgaaacagccgcggatgttcatgcccgctcattcacggcagcaaaagcggcacgcctggatgtggtgaccacgttacaggccgaagtgcagcgggccattgatgaaggtatttcacagaaagaatttatccgtacgctgacgccccgcctgcaaaagctgggatggtggggaaagcaggtggtggtggacagtgcagggaacgcggaagaagtgcaactgggcagtccccgtcgtctggcgctgatttacaacgtgaacacccgtgtggcttacaatgccgggcgttacacgcagatgatgaacaacacggacacgcatccgttctggcagtatgtggccgtcatagacagcagaacgaggccagaacacgcaaaactgcatctgctggtttttcgttttgatgatgtattctggcaaacgcattatccccctaatgactgggaatgccggtgccgtgttcgggctttatctgccgcccgcatgaaagccatgggactgacagtcagctatggcgcatcgtatatgcacacccatgaagtggatgccggtacagataaggcctcaggagaattgtttcgcaccacttccactacgtttgataatggacgagtgaaaatgacgccgggtgtgggctggtcatataaccccggctcggcggcgttcggcacagaccaggcgctgatccgcaagctgatcgaagtgaaaagcccggcgttacgggaaatggtggttcaggagatgaacaacagcccggagcggcaactggcgttccgcatctgggcaaaaaacatcatgaaaacccggcgaggcggtaacgatatccgcacgctgggctttatgaccgaaagcattgcgcaggcggtggaaagccggacgggaacgccaccggcccgcctgctggcgatgagcggtaaaaatgtgctccatgcggacagcatgaaacatcagaatgacggtatcgccctgacgccggaggatttcggtcgattaccggcaatgctggcaaagccaaaagcggtgctgtgggacaaacgccacaacaatctgatgtatatcgtggaaagtaaggatagcagtgtgcagattgccgttaatgcgccgtacagcctgaagcgtcagccggataaactggatgtgattgttaatgcttaccgggttatcaatatgggcaagctgaaatcggatatccggggcggaatgcttgaggtgctggaaggaggtattgattaa

SEQ ID NO: 38292 - DNA, 336 bp, Escherichia coli
atgttgagcgcatttgtcataggcgcatattctgcatattggctatggaataataatcaaccgaagccatttttcaaggattacaagactgttgcggaaattaatggctgccattttaatgtaacagaagatacaattgatgggttgaaagagttcgataaatataaaacacggatactggattcggggattaactgcaaaaaatatccgtggttatacttccctcttgcaaaatcctcaccggggatgattgttatggcatgcaataaaaactataaccaacatgaagtggcaggctgtttaaccctgtcttaccgtgaggttaatcgtggttga

SEQ ID NO: 38293 - DNA, 186 bp, Escherichia coli
atgtttaagtatgcagagatgttgatggcggaagaagatgataaagtatgtgaacttatttttaaacaacaagataatttgattttaaaaataaatgttagatttcccggtaaagtcgtatggctatggatattgccatttgttattgaatggttaattgtgtgtactttgggtgtaaacagttag

SEQ ID NO: 38294 - DNA, 177 bp, Escherichia coli
gtgactagttattcaaacttttccaatcaaataaaagaaaccatcaataataaattcgatcatgaaattcatgattgggacattataaaaaactcaatcacaactttaataaataaaaatatccatggtgcaggtagaaatatcgttgattttatagatttaggtaactgggaataa

SEQ ID NO: 38295 - DNA, 171 bp, Escherichia coli; identical to SEQ ID NO: 23816

SEQ ID NO: 38296 - DNA, 234 bp, Escherichia coli; identical to SEQ ID NO: 37505

SEQ ID NO: 38297 - DNA, 279 bp, Escherichia coli
gtgggggcaaccggacctcagggaccgaagggcgacccgggggagacacaaatccgttttcgtctggggccggcgagcattattgagacaaacagccatggctggttcccgggtacagatggtgcgctcatcaccggactgacctttcttgcccccaaagataccacacaggttcaggggctgtttcggcatttgcaggtcaggtttggtgacgggccgtggcaggatgttaaggggcttgatgaagtgggcagtgatacaggcagaacaggagaatga

SEQ ID NO: 38298 - DNA, 1224 bp, Escherichia coli
atgacggaacgggaactgtccattattcgtgcactgggcgaagaattctccacggtgctggcggatttacagcgcacatttgaggggaagatggccgcgcaggcacaagcgtttgaagagaaactggcttccctgtcggcggtattacagaagcatgtgacggtggatgaggtacatccggttctgcaggcgatggtggatgacgctgtggggaccattccggtaccgcgtgatggtcgtgattatgatccggatgtactgcagcaggcggtgaatgatgcggttgcgaatattccggtaccggcggacggcaaaagtatcacccccgatgatgtgcgtccgatgcttgagcagatggtgaaagaggctgtaagccatatccctgctccgcgtgacggtcgtgattatgatccggaagtactgaagcaggcggtgaatgatgcggttgcgaatattccggtaccggcggacggcaaaagtatcacccccgatgatgtgcgtccgatgcttgagcagatggtgaaagaggctgtaagccatatccctgctccgcgtgacggtcgtgattatgatccggaagtactgaagcaggcggtgaatgatgcggttgcgaatattccggtaccggcggacggcaaaagtattacccccgatgatgtgcgtccgatgcttgaacagatggtgaaagaggcggtaagccatattcctgttccgcgtgatggtcgtgactatgatcccgatgttctgcagaaggctgttctggatgcggtgagagccctgccggctccgcaggacgggcgtgatgccacggcactggaaataatccccgccattgacgatcaaaaatcctttccccggggcacgtatgccacacaccagggcggactctggcgggcgtatgaaaaaacgcacgggatgcggggatgggaatgcctggttgacggggtggccgatattgacgtcagcatgaccggcgaacggtcgttcactgtggtggtccggcagagcagtggccagcgtacggaaaaaacattttccctgccggtgatgctctaccgcggtgtgttcagagccggtgaaacctaccaccccggcgatacggtgacgtgggggggctcgctgtggcactgcaacagtatgaccggtgataaacccggagaagctcattcatcaggctggaccctggctgccaaacgtggacgggatgcaggaggcggaaaatga

SEQ ID NO: 38299 - DNA, 372 bp, Escherichia coli; identical to SEQ ID NO: 37701

SEQ ID NO: 38300 - DNA, 420 bp, Escherichia coli
  misc_feature (371)..(380): n is a, c, g, or t
atgaataagcaacgtatttttattgctggtcaccaaggaatggttggatcagctattacccgacgcctcaaacaacgtgatgatgttgagttggttttacgtactcgggatgaattgaacttgttggatagtagcgctgttttggattttttttcttcacagaaaatcgaccaggtttatttggcagcagcaaaagtcggaggtattttagctaacagttcttatcctgccgattttatatatgagaatataatgatagaggcgaatgtcattcatgctgcccacaaaaataatgtaaataaactgcttttcctcggttcgtcgtgtatttatcctaagttagcacaccaaccgattatggaagacgaatnnnnnnnnnntcttataaccgtcagtttgggcgtgattaccgttcagtaa

SEQ ID NO: 38301 - DNA, 429 bp, Escherichia coli; identical to SEQ ID NO: 37300

SEQ ID NO: 38302 - DNA, 288 bp, Escherichia coli
atgaataaaggcactatcatttctctagctttattctgtggcttgctaactggatgtgaggacaaaatctatgatgtctcttactataaagaacaccaggatgaagcccaaaagatatctgataaatgcaaagctggtgaaattacaaataataactgtaagaatgccaacgaagcactgtatgatatcaagagaaaagaaattataaatcagatgcttggacaatcctacaaggaaaaagaagagcacaagaagaaagtaaatgaattaatggaacgtctacaataa

SEQ ID NO: 38303 - DNA, 534 bp, Escherichia coli
atgagcaggaaactccgctatggtttatcagcggtagttctggcgctgattgccgcaggtgcttctgcgcctgaaatcctcgaccagtttctggatgaaaaggaaggtaaccacaccacagcataccgtgatggtgcgggtatctggaccatctgccgtggagccacccgggtggatggtaagcctgtgattcctggcatgaagctgtcgaaggaaaaatgcgaccgggttaacgctatcgaacgggataaggcgctggcgtgggtggagcgcaatattaaagtgccgctgactgaaccccagaaagcgggtattgcgtcattctgtccttacaacattggccccggtaagtgtttcccgtcgacgttttataaacgaattaatgcaggtgatcgaaaaggtgcctgcgaagcgattcgctggtggattaaggacggtggcagagactgccgtatccgctcaaataattgctacggtcaggtatcaagacgtgaccaggagagtgcgctgtcatgctggggtatcgacaggtaa

SEQ ID NO: 38304 - DNA, 222 bp, Escherichia coli; identical to SEQ ID NO: 7568

SEQ ID NO: 38305 - DNA, 1620 bp, Escherichia coli; identical to SEQ ID NO: 23986

SEQ ID NO: 38306 - DNA, 315 bp, Escherichia coli; identical to SEQ ID NO: 33595

SEQ ID NO: 38307 - DNA, 279 bp, Escherichia coli; identical to SEQ ID NO: 37620

SEQ ID NO: 38308 - DNA, 279 bp, Escherichia coli; identical to SEQ ID NO: 37446

SEQ ID NO: 38309 - DNA, 444 bp, Escherichia coli; identical to SEQ ID NO: 37638

SEQ ID NO: 38310 - DNA, 216 bp, Escherichia coli
gtgcggaaaaacggtgctgaaatttataaccgtaccgcgctggataatacgctgatttacagtggcgttattgatatgcctgccggtcacggtcacatgacgctggagttttcggtgtcagcatggctggtgaataactggtatcccacagcaagtatcagcgatttgctggttgtggtgatgaagaaagccaccgcaggcatcagtatcagctga

SEQ ID NO: 38311 - DNA, 147 bp, Escherichia coli; identical to SEQ ID NO: 29828

SEQ ID NO: 38312 - DNA, 240 bp, Escherichia coli
atgcaggctgccattatcgaatggcaggcaactggcgacgctaagagcggactagcatggatttataacacactgtttggccctggcgaattaccggacgaatctgagaaagatgctcaggcctactttaatcgcaaatatgcaccgattgacgaaaagcttatggcgcttcacaagtggttttgggaacaaagtgaagccgagcgcgccgctggcattcgcatcaaaagaggtgagtaa

SEQ ID NO: 38313 - DNA, 471 bp, Escherichia coli
atgacctcctttgaagttttagttagcaatcaccagttagtggctggtgatcgggtgtcaactagagccttcaaagatgctccgggcatattccccttgcgggtattgtattacgcctctccacccgacctttgtacggatgtgactatgccaaattgcaggcataaaaaagccgcaaagctatcgggtgcggatgaccgctttgaagttctagtgcggtcagtatgcgatagctctggcggatttgtcaaatcatgtaggccttatcttgctgtaagccgcgccattcgggcttttccccagatttgggggaaactatctgcgaagtattcacctttaacggcaagttgcaggttagccacgaccttcctcctttggcttgtgaatttgtatcgtcatgccgctttgagtggtgactacaacgacagaaccaggctgaaggctgttaagattgaatgcttcgtaaaatga

SEQ ID NO: 38314 - DNA, 624 bp, Escherichia coli
atgaccagtcaactcatccccgtattcaacggcactatcgacaacgaaacaattcttctagttaacgctcgtgatctacactcttttcttggtgtgggcagaatgttcgcgcactgggttaaagaacgcattgctgaatatggattcgttgaaagccaggactatattttgatttgccaaaatgggcaaaccaaagggcgaggaggtgatcgccgtagcaaggactaccacctaactctcgacacagccaaagaactggcgatggttgagcgtaacgaaaaaggccgccagatacgccgatacttcatcgagtgcgaaaagaaacttcgcagcatgcaaccagcacagcaattcacagacgaggaaatcatcctcctctgctacatgcaggtacagatggagaaagcacaggacatcagcaaacgcctgtatccgatattgaaggaactgaactcatcatacgcgagcaagctgtatgacatcgcgtttgagactttctacacggtgacgaaaaacagagacgcattgctcagggaggcaacacgaattgaccagacaagcgccattttcgaacgggcaagaccaatgttaaaaagccttcgggcgagacaattcgaattttaa

SEQ ID NO: 38315 - DNA, 234 bp, Escherichia coli; identical to SEQ ID NO: 37505

SEQ ID NO: 38316 - DNA, 837 bp, Escherichia coli
atgaatgcagagcggctgttcagtacggcgcgggagctgcgggacgtggtggccggccgtgccgttctccgtcaggcagggctggccgggggagacagtcctgcacggtttattgcacccgggcgcaaatatccgcagccgtatgtggcactgccggcttttgaccgtaacggcaagtcagctggtatctggctgaacccgctgaccacggatgacggaaacgggctgcggggcttcagtggtgaaggccgggtgaaaggcagcggggatgcgcagttcgtggccctgcagggcagccgtaacggagagagcctgctggctgataatatgcaggagggtgtccggattgcccgtgataatcctgacagcggtgtggtggtaagaatcgccggtgaaggtcgtccgtggaatcccggtaccatcaccggtggtcgcgtgtggggggatatcccggacaacagcgttcagccgggagccggaaatggcgaaccggtcacggcagaggtactggcacagcggcaggctgaagaggccatccgccgtgaaacggaacgccgtgcggatgaaattgtccgtaaaatggcagagaacaaacctgacctgccggacggcaaaacagagcaggctgtcagggatattgccgggctggagcgtgaccggtctgccatatctgaacgggaagccgcgctgccggagagtgtactgcgtgaaccacaacgggtgcgggaagcggtccgggaggttgcccgggaaaatctgctgcaggagcgactgcagcagatggagcgggatatggttcgtgacctgcagaaagagaaaaccctgggcggagactga

SEQ ID NO: 38317 - DNA, 234 bp, Escherichia coli
atgagcgaatatttcagaatacttcagggactgccggacggtccttttacccgcgaacatgccgaagccgttgccgcacagtaccggaacgtctttatcgaggatgaccacggggaacattttcgcctggttgtccgtaataacggaacaatggtctggcgtacctggaattttgaggacggtgccgggtactggatgaaccatgtcatccgggatttcggcattcttaagtaa

SEQ ID NO: 38318 - DNA, 1965 bp, Escherichia coli
atgtcagttacagagtctaagacaaaaacggagcgtaaatccagtcgtaaacctgcaaaaacgcaggaaacagtcctgtctgccctgctggcgcagacggaggaagtgagcgtgccgctggcctcactgattaaatcaccgctgaatgtgcgcacggtgccgtattctgcggagtccgtcagcgaactggctgagtccattaagggcgttggcctgttgcagaatctggtcgtgcataccctgcctggtgaccgttacggtgtcgccgcaggtggtcgccgactggctgcactcaacatgctggcagagcgtggcatccttacggctgactggcctgtacgcgtgaaggttattccgcaggaactggcgactgccgcatcaatgactgaaaacggtcatcgtcgggatatgcaccctgccgaacagattgccggattccgcgcaatggcgcaggaaggcaaaacacctgcgcagactggcgacctgctgggctattcaccccgccacgttcagcgaatgctgaaactggctgaccttgcgcctgtcatcctcgatgcgctggcagaagaccgcatcaccaccgagcactgtcaggcgctggcgctggagaacgacaccacgcgtcaggtgcaggtgtttgaagccgcctgtcagtcgggatggggcggtaaaccggatgtgcgggttatccgcaatctgattacggaaagtgaagtggcggtggcggggaacagtaaattccgcttcgtgggggctgatgctttctcacctgacgaactgcgtactgatttgttcagcgatgacggggacggttatgtggaccgtgtggcgctcgatgctgccctgctggaaaaactccaggctgtcgcagagtaccttcgggaagccgaaggctgggagtggtgcgccgggcgcatggagcctgtcggtgagtgtcgtgaggatgccggaacataccgctgtctgccggagccggaagcggtgctgacggaggcggaagaagaacgcctgaacgaactgatgacgcgttacgacgcgctggaaaatcagtgtgaggaatccgacctgctggaagcagaaatgaagctgatgcgctgcatggcgaaggtcagggcgtggacgccggagatacgtgccggaagcggtgtggtggtgtcctggtgttatggcaacgtatgtgtccagcgtggtgtgcagttgcgcagtgaggatgacgtggctgacgacgctgaccgcacggaacaggtgcaggagaaagcatcagtggaggaaatcagtctgccactgctgacgaaaatgtcttccgaatgcacgctggcagtccaggcggcactcatgcagcaaccggacaaatctctggcactgctggcatggacgctctgcctgaatgtgtttggcagcggggcgtacagtagtcccgccagaatttacctggaatgtgggcattactcactgaccagcgctgcgccgtcagggaaggaaggtaccgcattcatggcgctgatggcagagcactttcgccttgctgccctgctgccggatgaatgggaacgggacatgacgacgttcctgtcactcagccaggaggttctgttatccctgctcagtttctgcactgcatgcagcatccacggcgttcagacccgtgagtgtggtcacacgtcacgcagtccgctggactcgctggaaacggctatcggattccacatgcgcgactggtggcagccgacaaaagcaaacttcttcggacacctgaaaaagccgcagattatcgacgccctgaatgacgccggactgtccggtgctgcacgggacgcggagaagatgaataaaggggacgcggctgaacatgcagagcaccacatgaaagacaaccgctgggtgcctggctggatgtgtgcgccacgtccacaggcagagacggaaaccacggaataccgtgacaaccaggccgatgccgcctga

SEQ ID NO: 38319 - DNA, 594 bp, Escherichia coli
atggacattgaagattttctggaggcggaagacaatgatctgtctctgtggaatgatgatattttaagaattgactggttcgttattcttagagagctgttgaaatatcagagaagactaaatattacccattcagaattagttttgctggctaatttggtttcatttcaccagaatgtggattcgcaaatattaccgtcaatatctcttttggctaccagaatgcgcgcctcccgagccattatacaaggacgccttcaggaactggaggggaaaggaatgttgcagaagataagttacgctcaaatcggtcatgatgatgatttgcggaacgtctatgacatcaagccattaattcgtaagttaattggggtgcagaaaaccgagaatgataaaaagcacacttgccccgtctgtggaaaagtaggttcctctgatgaagaaattgagaaattttttggattcagaaaaagtggggattataaatggccgcaaagctggtgccgttcatgcagaagcacgaaacaacgccgactgaatacatcgctaattggtaaaaaaaggccccgcaaatccccaccagaggtggtgtga

SEQ ID NO: 38320 - DNA, 453 bp, Escherichia coli
atggcagttcgtggcattaacaaggtcatcctcgtaggacgcctgggaaaagatccggaagtccgttacatccccaacgggggcgcagtggcaaacctgcaggtggccacgtcagaaagctggcgtgacaaacagacgggggagatgcgggagcagacagaatggcatcgcgtggtgctgttcggcaagctcgcggaagtggcaggtgaatatctgcgcaagggcgcgcaggtctacatcgaaggtcagcttcgcacccgtagctgggaggataacggtatcacccgttacgtcaccgaaattcttgttaagaccacgggcaccatgcagatgctggtacgtgccgcaggtgctcagactcagccggaagaggggcaacagttcagcggtcagcctcagccgcaaccgccggagggtgacgattacgggttttcagacgatatcccgttctga

SEQ ID NO: 38321 - DNA, 453 bp, Escherichia coli; identical to SEQ ID NO: 38064

SEQ ID NO: 38322 - DNA, 1365 bp, Escherichia coli
atgtggaaccttttgcggcgaacccgaaaaaaccagaaatcaggacgtgacgtaagagaagtgggctggcggtccctgtttcaggcggtggctgagccttttgccggtgcctggcagcagggggtgaaagccgatccggaaaccgttttgtcctttcacgcggtgttttcatgcatttcgctgatatcccaggatattgccaaaatgcggcttcgcctgatgcagactgatgtacagggaatacgccgggaaaagcggcagggagatactgcccgtctctgtcgtcgtcctaatgcgcagcagaatcgcatccagttttttgaactgtggctgaattccaaattgcgtcacggcaatacggtggtgctgaaaatccgcaccccccgggggcagatcaaagaactgcgtattctggactggaaccgggttgaacctctggtggcggatgacggcgaggtgttctaccgcatcacgccggaccggaactgtgggatcacagagtcggtgacggtgcctgcccgggaggtgatccacgaccgttttaactgtttttttcatccgcttgtggggctgccgccggtgtatgccgcaggactggccgccatgcaggggcatcatattcaggcaaattcgacgtattttttcagaaatggcgggcgaccatcaggcgtgattgaggtccccggcagtattacggaagaaaacgcgaaaaaactgaaggggaactgggacagcggatatacgggcgaaaatgccgggaagacggccatactgagcaacggggcaaaatacagccccacgacgttttcaccggtggatgcgcagacggtggaacaactgaaaatgacggctgaaattgtctgttcggtgttccgtgtcccggcctacaagattggcgttggccacccgccttccagtgacaacgtggaggcgctggagcagcagtattattcccagtgcctgcagacgctgattgagtccattgagctgttactggatgaggcgctggaaacgggggaaaacgagagcacggagtttgacgtcaccacgctgctgagaatggacagcgaacggcgcatgaaaacactgggtgaatcggtgaaaaatacgcttctcacgcccaatgaggcccgtaaacgtgagaacctgccgccccttgccggcggtgatgcactgtatcttcagcagcagaactacagtctggaggcgctgtcccgtcgtgatgcccgtgaggacccgttcgcgtcggccgggaaaacagtttcagcacaactgcctgacggcgcatctgacggtaataaggcaatcagtgaaacagagcatgatgcagtgaaagcgatgttcagggggatactgagaaaatga

SEQ ID NO: 38323 - DNA, 861 bp, Escherichia coli
atgagcttctccgggtttatcaccggtcatactgttgcagtgccacagcgagcccccccacgtcaccgtatcaccggggtggtaggtttcaccggctctgaacacaccgcggtagagcatcaccggcagggaaaatgttttttccgtacgctggccactgctctgccggaccaccacagtgaacgaccgttcgccggtcatgctgacgtcaatatcggccaccccgtcaaccaggcattcccatccccgcatcccgtgcgttttttcatacgcccgccagagtccgccctggtgtgtggcatacgtgccccggggaaaggatttttgatcgtcaatggcggggattatttccagtgccgtggcatcacgcccgtcctgcggagccggcagggctctcaccgcatccagaacagccttctgcagaacatcgggatcatagtcacgaccatcacgcggaacaggaatatggcttaccgcctctttcaccatctgttcaagcatcggacgcacatcatcgggggtaatacttttgccgtccgccggtaccggaatattcgcaaccgcatcattcaccgcctgcttcagtacttccggatcataatcacgaccgtcacgcggagcagggatatggcttacagcctctttcaccatctgctcaagcatcggacgcacatcatcgggggtgatacttttgccgtccgccggtaccggaatattcgcaaccgcatcattcaccgcctgctgcagtacatccggatcataatcacgaccatcacgcggtaccggaatggtccccacagcgtcatccaccatcgcctgcagaaccggatgtacctcatccaccgtcacatgcttctgtaa

SEQ ID NO: 38324 - DNA, 399 bp, Escherichia coli
atggctaagcatataaatggttatcatgagaagaagattgtagatgttattaacacatggtctatagatgaaaaactaacctggaatgctttgtgcgataggttagtcagggttattgggaaaagaccatcaagacaatccttaagtagtcatgtaaggattgcggaaagcttcaatgtgaaaaaaaccacaatcaaatctggtgtaatacacactgtaaaacctgctaatttaaaagtggcttctcaacgaattaaaagacttgaagcagaaaatgaagctttgaaggcattaaatgaacgctatttagagcagttcaaagtatggctttataatgctcaccttaaacaaataacgattgaagaacttaataatccgttacctgcaaaatacctttaa

SEQ ID NO: 38325 - DNA, 366 bp, Escherichia coli; identical to SEQ ID NO: 37396

SEQ ID NO: 38326 - DNA, 279 bp, Escherichia coli; identical to SEQ ID NO: 29839

SEQ ID NO: 38327 - DNA, 279 bp, Escherichia coli
gtgggggcaaccggacctcagggaccgaagggcgacccgggggagacacaaatccgttttcgtctggggccgggaaacattattgagacaaacagccatggctggttcccggatacagatggcgcactcatcaccggactgacctttcttgaccccaaagatgccacacgggttcagggtttttttcagcatttgcaggtcaggtttggtgacgggccgtggcaggatgtcaaggggctggatgaagtgggcagtgatacaggcagaacaggagaatga

SEQ ID NO: 38328 - DNA, 315 bp, Escherichia coli; identical to SEQ ID NO: 38181

SEQ ID NO: 38329 - DNA, 279 bp, Escherichia coli
gtgggggcaaccggacctcagggaccgaagggcgacccgggggagacacaaatccgttttcgtctggggccggcgagcattattgagacaaacagcaatggctggttcccggatacagatggcgcactcatcaccggactgacctttcttgaccccaaagatgccacacaggttcaggggctgtttcggcatttgcaggtcaggtttggtgacgggccgtggcaggatgttaaggggctggatgaagtgggcagtgatacaggcagaacaggagaatga

SEQ ID NO: 38330 - DNA, 390 bp, Escherichia coli
atgccggattacgctgttcagcgactcgatggcgttggttgtgtagatgactttgcggatatctgccgggtaagcgaagaacatcgccaggttggtccagtttgcctgccagctccggcttatctgcgggtagcgactgtcccaggcgctggcgaacgcttccagcgcctgctggcctgcttcttctgtgggggcctggtagatggctttcaggtcgcgggtgacggctttgtagtccttccaggaaacgaaccgcaggctgttgcgcaccatatgcacgatgcacagctggatgcgggcttccggatacaccgtgttgatagcgtccgggaagcctttcagcccgtcgacacaggctatgagaatatcgttcaggccgcggttttttag

SEQ ID NO: 38331 - DNA, 279 bp, Escherichia coli; identical to SEQ ID NO: 37363

SEQ ID NO: 38332 - DNA, 417 bp, Escherichia coli
gtggctgttttcaacagtaatgaggcatcgtggcatctcgttgaagatcatcggggtaaaacggtttatgacgtggcttccggcgacgcgttatttatttctgaactcggtccgttaccggaaaatgttacctggttgtcgccggatggagagtgtcagaagtggaacggcacatcctgggcgaaagatgcagaagcagaaaaactgtttcgggtacgggaggcagaagaaacaaaaaacagcctgatgcaggtagccagtgagcatattgcgccacttcaggatgccgtagatttggatattgcgacggaggaagaggcatcgttactggctgcatggaagacatatcgggtattgttgaatcgtgttgatacaacagtagcagcggatgttgagtggccagtcgccccacaataa

SEQ ID NO: 38333 - DNA, 270 bp, Escherichia coli; identical to SEQ ID NO: 23612

SEQ ID NO: 38334 - DNA, 198 bp, Escherichia coli
gtgataaagattattgcagagccaccggataagcgccgtcgtgacctggacaatatcctgaaagcaccactggatgcgctgacgcatgccggacttctcatagacgacgagcagtttgatgaaatcaatattgtgcgcggtcagctcgttcctggtgggcggctgggcgtgaagatttacaaaattgaaagtgagtga

SEQ ID NO: 38335 - DNA, 555 bp, Escherichia coli; identical to SEQ ID NO: 23965

SEQ ID NO: 38336 - DNA, 672 bp, Escherichia coli
atgcataaaatctataataacctttattggtatagacattacgatgaaaatggaaatgaaaaaacatatcgtactgccaatccaaatggtaatagattttactttgattttgctggtttgcaagtactttactacgattatgagaataagaataagcctacaaaggagaaatttttggaaaagcaaaatctttttttaacggtgaaaaactttaaggcagaagaaaaaataaaccaagagaaatatatagaaaaaccagcaaatgtagcccatgaaattgcttcattctttgacattgaacaatatttattggggggcattgatagaaataataattatattaatgaaaatttcacttataaatttcaagatttagccaacctttctggcacaagagatgctcagctagaaagaaaggtttattttaatgagaagatgcttaatttaaatgataatgatgaaaaagtcaaaatcgaaaatgatataaagaaaatagataaaaaaattgaagaaatagataatgcaatccgggatctttcctctgaaacagagaggttcaagataaagtatcaacaagagaatacacttaatgatgtagttcaaaatatcaggacttggctaaaagaaaatcaaaatatggtgaaagctattaagaaaattgatactgaataa

SEQ ID NO: 38337 - DNA, 216 bp, Escherichia coli
atgtaccagatggaaaaaatcacaacgggtgtgtcatacaccacgtcagcggtagggacgggatactggttactgcaactgctggacaaagtctctccgtcccagtgggtggcgataggcgtactggggagtctgctgtttggcctgctgacgtatctgactaacctgtatttcaaaatcagggaggaccgccgtaagacggcgcggggagactaa

SEQ ID NO: 38338 - DNA, 315 bp, Escherichia coli; identical to SEQ ID NO: 37773

SEQ ID NO: 38339 - DNA, 183 bp, Escherichia coli; identical to SEQ ID NO: 37241

SEQ ID NO: 38340 - DNA, 183 bp, Escherichia coli
atgaagcatcctcacgataatatccgcgtaggcacgatcactttcgtctactccgttacgaagcgaggctgggtatttcccggcctttctgttatccaaaatccgctgaaagcccagcggctggctgaggagataaataataaacgggaggcgatatgcacaaagcatctcctgttgagttaa

SEQ ID NO: 38341 - DNA, 294 bp, Escherichia coli
atgggatacggtttactggatattgcaaatcagtcgcggcgtgaggcattacagggaataagcgaggcagacagacgacgtgaagaaattgaggcgtcaaacaagatgatggcggcgcagcagaaagctcagaaaaaacagaatatcgccacgggcattggtacgggggctgctgtgggtgcatctgtggcaggctccagcgctgcaatgggggccacgctcggagcatgggctggtcccgtcgggatagctgctggtgctgtgattggcggcattgcaggcgctttgttttaa

SEQ ID NO: 38342 - DNA, 189 bp, Escherichia coli
gtgaatcgaacaataatagtgacaactgtaatttcagtccctgccaatgccccgcatcaggatattgatgattttgttgaaagtaaattcgggcaagacaaagatatgaaaccggataatttatgttatggagatgctgccgaaataattagccatcattgggagtatggttcgcactacatgaattaa

SEQ ID NO: 38343 - DNA, 723 bp, Escherichia coli
atgaatgagctgataaatagcaatgccatcaaaatgacaagcattgaaatcgctgagttggtgggaagccaacacggtaatgtcagaatatcaatagaacgtctggcaaagcgtggggtgattcaacttccttcaatgcaaaaagttgaaaataaacaaacaattagccctaacaaattcacaagcgtgtatatattcgaaggcgaacaaggtaagcgagacagcattattgtcgtcgctcagttgtcgccggaattcaccgctcgtcttgttgaccgttggcgagagcttgaaggggcaaccgcgaaaataccacaaaccttttctgaggcattgcgccttgcggccgaccttgaagaccagaaggctgaactggagaaacagcttgctctcgcagcacctaaagttgattttgccgatcgagttggcgaggccagcggaattttgattggaaactttgcaaaggttgttggtattggtccaaacaaactgtttgcgtggatgcgcgatcacaaaatccttattgcttcaggtgcccggcgcaatgtgccaatgcaggaatatatggatcgcggctatttcacagtgaaagaaacagcggtcaatacaaatcacggaatacagatatcgttcaccacaaaaatcaccgggcgtggtcaacagtggctgacaagaaagctgctagataacggaatgcttaaagtaacaggggaggctgcttaa

SEQ ID NO: 38344 - DNA, 339 bp, Escherichia coli
atggtaaccgtaatctggaaagaatccaaaggtacggcaaaaagccgctataaagctcgcagggaagaacttattgcagagcggcgcagtagtgaaagactgacacggaagattgcgctaaagatctctggttgcgtcagagcagacaaagcagtatcactcagcagccttcgcaacaagaaggcagaagaagtcgagcgaaaaaacagaagtacttattacaaggattcaaacccattaggaaacaaaatacatgcagttcaaaaaataaaattgtacagtaaaccaccgtatggacttattgagtatgcttatggtgaaaaagactatttatgttaa

SEQ ID NO: 38345 - DNA, 192 bp, Escherichia coli
atgaacggacaaatctcaattgttcgaccgggagcatgtgacgatcgcgagatacgaatgattattcgtctggcgatggggaaaacaataactgctctcattactccagaaaatctcgcattagcattaaccggaaagtcagacctgccagtagagctaaagctgcgaaatgttgagattaaggtgaaatag

SEQ ID NO: 38346 - DNA, 1071 bp, Escherichia coli
atgagtacagaaatgaaaacggggctggtgctgtccggtggcggggcggtgggcgcttatcaggcgggagtggttaaggcactggcagagtgtggtacacagatcagcatggtttcaggggccagcattggcgcattcaatggtgccattatcgcggcctctcccgatctgtcagaagctgccgtacgcctggaggcgctctgggagcatctggggaataatcaggtgctgtcggtaaacagattggtttacttttcattgctgaaaaaattgttccaggcaatgaacctctgccagatccccggacgtgcaggagcactgcttacgacgcttcttcgccatatatcgacaatcaacgggtttgacaatctgatggctcagccgttgttgtcagatgagcccctgacagcgctgatggatcattatcttgatactgatgctctggcagacgggctaccgctgtatgtgtcgctgtaccccacagaagggggcatgcaggatattattgactgcattcgtgctgaactgggtgtcggaaccacgaaaaacgccgtttttcagcatatccagagcctgccccgcggacagcagaaagaggctctgcttgcgtcagccgcgctgcccctgctgttccgtccccgtgaggttcaggggacaatgttcggtgatggtggtatgggaggatggcgaaatatgcagggaaatacccctgtgacgcctctggtcgatgccggatgcaatatggtgattgtgacgcatctgagtgacggttctttatgggatcgccaggcttttccggacaccacaatccttgagatccgtccccggaaaaggctgaaatatgcaggtgatggtggcaacagcggcggtctgctcagttttacatcggcacataccgacgcctggtgtcagcagggctatgaagacacgatgctggcgatggagcatatccggaaaccgctggcagcacgtcaggcactgacccggtcagaggcggtattgcagaaaagcctggatataacggaagaggcagatttggcactgagaaacgcgatggcccggattaaataa

SEQ ID NO: 38347 - DNA, 144 bp, Escherichia coli; identical to SEQ ID NO: 23988

SEQ ID NO: 38348 - DNA, 1182 bp, Escherichia coli
gtgtttccgcatatcttcttcccgcagggcgatcctacggcagcaacgctacagtcgctcgccaccttcgccatcgccttcgtcgcgcgccccattggctctgccgtttttggtcattttggcgatcgcgttgggcgtaaagcgacgctggtcgcctcgttgctaacgatggggatttcgaccgtggtgattggtctgctgccaggctatgccacgattggtattttcgccccgctgctgctggcgctggctcgatttggtcagggtctgggcttaggtggtgaatggggcggcgcggcgctgctggcgactgaaaacgccccaccgcgcaaacgtgcattgtacggctccttcccgcagctgggcgcaccgattggcttcttctttgccaacggcactttcttgctgctttcctggctactgaccgacgagcagtttatgagctggggctggcgtgtgccatttatcttctcggcggtgctggtcattatcggcctgtatgttcgcgtgtcgctgcatgagtcgccggtgtttgagaaagtcgctaaagcgaaaaaacaggtgaagatcccgctgggtacgctgctgaccaaacatgttcgcgtaaccgtactgggtacgttcattatgctggcaacctatacgctgttttacatcatgacggtctactctatgacctttagtaccgccgccgcgccagttgggcttggcctgccgcgtaacgaagtgttgtggatgttgatgatggcagttattggttttggcgtgatggtgccagtcgctggattactggctgatgcctttggtcgccgtaaaagcatggtaatcatcaccacgctgatcatcctgttcgcgctgttcgcctttaacccactgctcggttctggcaacccgattctggtttttgccttcctgctgctggggttaagtctgatgggtctgaccttcgggccaatgggtgcgctgttaccagagctgtttccgacagaagtgcgttacaccggagcatcgttctcttacaacgtagcgtcgattctcggggcttccgttgcgccatatatcgcagcctggttgcagactaactacgggctaagtgcggtggggttatatctggcggcgatggctggcttgacgttaatcgccctgctgctgacccatgagacgcgacatcagtcgttgtaa

SEQ ID NO: 38349 - DNA, 315 bp, Escherichia coli; identical to SEQ ID NO: 24016

SEQ ID NO: 38350 - DNA, 729 bp, Escherichia coli
atgactcatgtctgctcggtgatcctcattcgtcgttcattcgatatttatcatgaacagcaaaaaatatcgctgcataacgagagtatcctgctgctggagaaaaatttggcagacgattttgcgttttgttcaccggatacgcgacgactggatatcgatgagctgacagtttgccattacttacaaaatattcgtcagctaccacgcaatttagggttacatagcaaagaccgtctgttaattaaccagtcaccccccatgccgctggtgacggcgatttttgatagcttcaatgaatccggggtaaattcaccgatactgagcaatatgctctacctttcctgtttatcgatgttttctcataagaaagaactgatccccttacttttcaatagcatcagcactgtttcaggaaaagttgaacgccttattagctttgatatcgccaaacgttggtatctgcgcgatatcgcggaaagaatgtataccagcgagagtctcatcaaaaaaaagttgcaggatgaaaacacctgtttcagtaaaatattactcgcctccaggatgtcgatggccagacgattactcgagttacgtcaaattcctctgcatactattgcggaaaaatgtggctatagcagtacgtcgtactttataaacacatttcgacaatattatggtgtaacgccacatcagtttgcgcaacattcgccaggtaccttttcctga

SEQ ID NO: 38351 - DNA, 240 bp, Escherichia coli
atgcagctctggatggaaaaagcacaacaactcagtaaacagctataccccgtcatgagagaactgaactctgattactatggaaagatgtttgatctgacctacgaaactcgtcatataaccaaccggactcgcgacacattgctccgcgaagcagcaaaacttgatcccgccaactatatggtgcatagggccagaagtatgctggcgcaactaagagcaagacaatttgaattctga

SEQ ID NO: 38352 - DNA, 285 bp, Escherichia coli
gtgagcatagacaccactataacgatcgatacgaccctcaacacaggtctggcgcttcttggttatttttacattatgttctgcgccgggcggtggctatcgctgttgttactgaaaaaatggaataaatgccgtaagcaggatcaacgccagaaggcaatgaatgcgttttccgaagccttcgggattgacagcatggagccaggagatccagctcgcgtaattagcagaggtgacgttgtaattcttgtataccggagcgaagagaaaaatgagcgagattaa

SEQ ID NO: 38353 - DNA, 402 bp, Escherichia coli; identical to SEQ ID NO: 37371

SEQ ID NO: 38354 - DNA, 270 bp, Escherichia coli; identical to SEQ ID NO: 37368

SEQ ID NO: 38355 - DNA, 396 bp, Escherichia coli
atgatcggaagcatgcctaactgtgatcgattcagatgccattttgcaaccactgtgcagggagtcttgccggttatcttcgcatgctcaccgacagctcagctgttagtcatcaaaacactctcaatggacatgaatgtaggctatataagggcaacgcgcatccacttacccaatgtggttgagcaaatagacttcgatcactttcatgtggcgaaacaactggtggaggtgatggataaaacccgccagaatgaacatccgcatcttcctgttgaaagtcgtcgtcaggcaaagggaacgcgcttctggtggcagtacagcgataaatggatgaccgaatccaggcaggaaaagttgatatggcagagtgcgcagatgaagctgacgagctag

SEQ ID NO: 38356 - DNA, 153 bp, Escherichia coli
atgaaatggcagggggtgtacaattatatctcgcgcaagtgtttcataaatattgaactcatgctctcggttattttttatgaaatctctaaaaaaaatgggttttctattatcacttcctatttcaaatctgtaataatgattctttattaa

SEQ ID NO: 38357 - DNA, 390 bp, Escherichia coli; identical to SEQ ID NO: 23924

SEQ ID NO: 38358 - DNA, 2211 bp, Escherichia coli; identical to SEQ ID NO: 23925

SEQ ID NO: 38359 - DNA, 423 bp, Escherichia coli
atgattaatcgcatcgtatcgttttttatattatgtctggtgttatgcatacccctatgcgtagcgtactttcactctggtgaactgatgatgaggttcgttttcttctggccgttttttatgtccattatgtggattgttggcggcgtctatttctgggtctatcgtgaacgccgctggccgtggggagaaaacgcaccagctccccagttgaaagataatccgtctatctccattatcattccctgttttaatgaggagaaaaacgttgaggaaaccatacacgccgctttagcacagcgttatgagaacattgaagttattgccgtaaatgacggttcaacagataaaacccgtgccatcctggatcgcatggctgcacaaattccccatttgcgggtcattcatctggcgcaaaactag

SEQ ID NO: 38360 - DNA, 249 bp, Escherichia coli; identical to SEQ ID NO: 23837

SEQ ID NO: 38361 - DNA, 1053 bp, Escherichia coli; identical to SEQ ID NO: 23847

SEQ ID NO: 38362 - DNA, 741 bp, Escherichia coli
atgctgaatcaggaaaccgcaaaggcagcacgaaccgattcaggttatatccttcgcgcaccgagacgaatgcgggttgctgatgccgttgctcagtatatgcgggtgcccatgggggccgggaactcagtcccgtgggatccgctggtggcaccgtatgttattgagccgatgaactgcctggcctcgcgtgaatacgacgcagtgatatttgttggcccggcacgaaccggcaagactatcggcctgattgacggctgggtgatttacaacgtgatttgcgatcctgcggatatgctgatcattcagatgacggaggaaaaagcccgcgaacactccaaaaaacgactcgccagaacgtttcgcgtcagcccggaagtggtcagtcgcctgagtccgaacaaaaatgacaacaacgtttatgacagaacattccttgctggcaactacctgaaaatcggctggccgtcagtcaatatcatgtcctcatcagattataaatgcgtggcgctgacggattatgaccgttttccggaagatattgatggcgagggggatgccttctctcttgcctcaaaacgtaccaccacatttatgtccagtggtatgacgctggtggagagttcccccggcagggatgtgaaggatgtgaaatggcgacggacttcaccgcatgaggctccaccaaccacggggatactgtcgctctataaccgtggcgatcgccgtcgctggtactga

SEQ ID NO: 38363 - DNA, 216 bp, Escherichia coli; identical to SEQ ID NO: 23846

SEQ ID NO: 38364 - DNA, 969 bp, Escherichia coli
atgaaaataaaattacgcattactattatattaatttcagtcttatgcatttttaatggattattgactcctggtgcatatgccgcagcagcgaatggatacgtagcaaataaagaaaatctacgtagtttttttgaaacggtttcatcatatgcgggtaagcctacaatagttagtaagcttgccatgaagaaacagatcagcggaaattttgatttaacagaaccctatgccttgattgaacgcctgtcggcacagatggggcttatttggtatgatgatggcaaagctatttatatctatgactcatcagagatgcgtaatgcattgattaatctgagaaaggtatcgacgaatgagtttaataatttcttaaaaaaatcgggtctgtataactctcgttatgaaattaaaggggacggcaatggtactttctatgtatcggggccaccggtttatgttgacctggtcgttaatgctgcgaaattaatggagcaaaacagcgatggcattgagatcggtcgaaataaagtaggaataattcatctggtcaacacattcgttaatgaccggacttatgagttacgtggcgaaaagatagttattcctggcatggcaaaagtactatcgacgttgttaaataataacattaagcaaagcacaggggtgaacgtactttctgaaatttcaagtcgtcaacaactaaaaaacgtatcacgtatgcctccttttcctggggctgaagaagatgatgacctacaagtagagaaaataatatcgacagcaggagcgccagagactgacgatatacaaattattgcatatcctgataccaacagtttacttgttaaaggaacagtatctcaggttgattttatcgagaagttagtagctacgcttgatattccaaagcgacacattgaattatctttatggataatagatattgctagaacagctaggtgctga

SEQ ID NO: 38365 - DNA, 1611 bp, Escherichia coli
atgaaattagctgtagaaaaacagttatcatgggcagaagcacactataaagcacaaaatcatattgagaatcatattcaggattgtgaattaccgggcctaatggatgtaaacaaaatgcttagagatactattacaggttttgtccatcagattagtgaaataacggaatctagttggatgtcatcagaagaacaacatgcaaaaaaaattcaggctctcgagatgttcaaaacaaagatatcatctatgaatggaggtcaagagtttgtttatggttttaataaagttatccaagaagggcttgggggactaatcgagttaagttttgatattgacgataccagacatcatcgtacattatcttcgcttagtcccgcatcaagaagtggccttcatctattaggcactatctggaatatagttatgagtgcagtaccaggatttaatgcattagcaggaaccagcagtatacttaatcatgcagttgttgaaaaatctacggatgtatgtagctatatgcaggatgtaatacgtattggcatggaagcaattccagcagccgaatctaaattcacacaaagatcctcaaatgccaaatacacaggccttcgttttgccgaggaaaaaataaataaaaatataattaatgaacctcagcaacgtggctcatcttatagagtgatagaatcgatagaaaacactgattttatttatcaaaaaagcacaaaaaaaatattggaattagcaagtatagaaggtaatgaactttatagcgccactggatttaataaagaaaactatggatactacaaacgttctggtgagggtttttatagaaaacaacactcataccaacctttatccaatgagatgccaaacaaaataaaatacaataatagagagttagaattaacaaaagaatcaaactctaacatttactcaggtacatttaccgataacggtaaaaattcattagtaaagttttataaagactctgatggtaacttttatcaagctgacggattaaaaggaggtggacttattcgacatacggataagccatattcagaactgaaagaaggcgatataggatatgatgaggagcttctcgatattactgatgactcacctgagttagaggaaacgttgccagcgatatcagaggacttatatcctagcgaagaagaaaatgtacaaaatatctacaaaaaattcaaaaacggtgatcatgatgcaggaatgacagaggtaacattatgccgaggaactattgcctctcaggctgaaaacattgtttcttatagtaccgcagggggagccgagattgcaaacccaaatgtaagtcctgtttctgaagatattgcaaaactgcaaataaaaagtggtagaattgaaccagaatacacaacagatattagcgttgctgaccgatttagccgtggacatcacttagttatcgtcaaagcaaaagttaaatatcttacaagaggcagtatcagtgaaagtggttggatcattcccaaaaatgcccccgtagaaccagtaggattaattgacaggacatttggccaatcagaaaacatacagcaagcgaatgcatcaaaataa

SEQ ID NO: 38366 - DNA, 882 bp, Escherichia coli
atggcttaccgcctccttcaccatctgttcaagcatcggatgcacatcatccggagtgatacttttaccgtctgccggtaccggtattttcgcgaccgcatcattcaccgccttctgcagaacatccggatcgtagtcacgaccatcacgcggaacaggaatatggcttaccgcctccttcaccatctgttcaagcatcggatgcacatcatccggagtgatacttttaccgtctgccggtaccggtattttcgcgaccgcatcattcaccgccttctgcagaacatccggatcgtagtcacgaccatcacgcggaacaggaatatggcttaccgcctccttcaccatctgttcaagcatcggatgcacatcatccggagtgatacttttaccgtctgccggtaccggtattttcgcgaccgcatcattcaccgccttctgcagaacatccggatcgtagtcacgaccatcacgcggaataggaatatggcttaccgcctccttcaccatctgttcaagcatcggatgcacatcatccggagtgatacttttaccgtctgccggtaccggtattttcgcgaccgcatcattcaccgccttctgcagaacatccggatcgtagtcacgaccgtcgcgcggaacaggaatatggctcactgcctctttcaccatctgctcaagcatcggacgcacatcatccggggtgatacttttgccgtctgccggtaccggaatattcgcaaccgcatcattcaccgccttctgcagaacatccggatcgtagtcacgaccgtcgcgcggaacaggaatatggctcactgcctctttcaccatctgctcaagcatcggacgcacatcatcacccgtcacgcacttctgtaa

SEQ ID NO: 38367 - DNA, 882 bp, Escherichia coli
atggcttaccgcctccttcaccatctgttcaagcatcggatgcacatcatccggagtgatacttttaccgtctgccggtaccggtattttcgcgaccgcatcattcaccgccttctgcagaacatccggatcgtagtcacgaccatcacgcggaacaggaatatggcttaccgcctccttcaccatctgttcaagcatcggatgcacatcatccggagtgatacttttaccgtctgccggtaccggtattttcgcgaccgcatcattcaccgccttctgcagaacatccggatcgtagtcacgaccatcacgcggaacaggaatatggcttaccgcctccttcaccatctgttcaagcatcggatgcacatcatccggagtgatacttttaccgtctgccggtaccggtattttcgcgaccgcatcattcaccgccttctgcagaacatccggatcgtagtcacgaccatcacgcggaacaggaatatggcttaccgcctccttcaccatctgttcaagcatcggatgcacatcatccggagtgatacttttaccgtctgccggtaccggtattttcgcgaccgcatcattcaccgccttctgcagaacatccggatcgtagtcacgaccgtcgcgcggaacaggaatatggctcactgcctctttcaccatctgctcaagcatcggacgcacatcatccggggtgatacttttgccgtctgccggtaccggaatattcgcaaccgcatcattcaccgccttctgcagaacatccggatcgtagtcacgaccgtcgcgcggaacaggaatatggctcactgcctctttcaccatctgctcaagcatcggacgcacatcatcacccgtcacgcacttctgtaa

SEQ ID NO: 38368 - DNA, 1773 bp, Escherichia coli
ttgattccaaattcaacttcaaataaaggttatgtatgcattgacatgcagtgttcgtcaacctctgaaccaacagcttctacctccagcaaccggagtattaaattagccgcttccacaaatgtatatccgataacaagaaacgactccgagctcactctgaacgattttcttgataatagctcttctacgtcatcattggactacattaatgaattgggttctcaactgacgttaaatgattttcttgacaacataaagacaaatgaggtggatagaacatgtacggatgtggtaattaatatcccacaagagatacaaacaaatacacaggaaaatgatttgttattatccgataaaaataattcaatatgcattgaaatcgatgaaagaattacaaaaatcctaacatgcaagcaaaaatatcaactggacagcatcattcatgaaattataccaaaagagaatgagagtgcagaaactgttctccatcttatgagagttctgaacgatcaatatcatcaggtatataatcagtcaggatgtttttataaagcctatatggccatacacaataaaatcgaacagatacttccatatgcgttcagagccggaggcggaatcagcattcacttgctcatacaggcattattttttaatggcgactataacaaatcaccttcacagtctcaacaaccatctttatatacatcaccttctccaacaataaatacagaagcattcttaagtaatgtattatcactagatataacccaggtacgcatacttggtgatttactatcagcaactttatttcatgcaccaacaatattctatcaatatcctaaactaatagatgaagttaagtattgtataagtaataaaaaaataacaggttcggttatagcacgatttactctatgtttaacaagtacattactaaccatgtcaccactgttaatgcttaatggagcagttaaaacaggtagcatagtaagaactataggtaggggagtgagttatgttgatataccattggccttagctatattaggtgactcgtggtataaagcttataaacatggttcttctgataacccaaattctgctcagaaatttatatcgcaagaagcggcctttaaaaccacccagcgggtattaacacaaggattaagtctgatgtcctctttatcgggagcaatcatgcgctctcttgagaaaggcacaccaccacaaatgatgtctttattcatcgtaaacatactaaatctattatttcatcaaaatccatatgaaggggcatcagcaagtgctaatgctttgaaaagatcaacttactcccataatccggacatactaaatactcaggcaatagctctttgtgttgacctccagcatacaaaaaatataaccatgccacttttcaaaacaaaagacaggatatcttacgcattcaatggacaaagaacatccccagaagaccaaaaacaaatactgaaagaagttataaactcctgtacccaaggagaaagagccattttaaatacatcacaatcagaaacatgcaaacataaaatcgatgagatttatgaaaaaagattctcagaaacagaactaaatacattaccaaacgaaatgaaaaatttcttgatatttttaaacaaaactcatgaaaaagatatttcgcgtttaagcatgggtaacgaagttaatgaaaaaataattgcagttatagtcaagacgttagcatatagagagtctatgttgtgttag

SEQ ID NO: 38369 - DNA, 237 bp, Escherichia coli
gtgaacggtatgatctctttgatgatcgtaagcgagaatacgcgggtttggtggcaccaggccgaactcaccgggaggcacccggcaccatgcagtattcagagattaggcatatatccaggctcctcatcgcaggagcctttttacatgcaaaaaaaaccgctcctgggaagagcggctggcaagaagaaacaatatgaacaattaattaacgatggtaataataccttagagtaa

SEQ ID NO: 38370 - DNA, 717 bp, Escherichia coli
atgactgaaggtgatggattcaaaatcaaacttcgtcaggggttttgccttaccctcacccacccagccggcagcaccgccggacacctgggcgtgcacacggatattgaatggcacctgacgaagtgcagggatcccgccctgaccaaatcgcccgataatggtctgcggacgcaggtaatcaataaagtcctgtgcgtattcctgatattcagacaggctgcctgcccactgcggatccgtggtggtccccgcgcccactgccgatttcaggacatgatgcagacgactgtcatccggatactgacgacgggccacttccagggcttcagatcggacgcctttagccgcagccagcgatttggcaaagcgggcgaagccaatccccttatccagtttctgctccacacggatcaccggcgcagaagccaccgcggccacattcccgttaccggcctgtttcaccggctgcgccgtggcggccttaccggcttccagttcacgcaggcgcttcaggtgcgcatccacctgacggatttccgctgcggtgttgtcgtaatgctcttcctcctccacatccagcgtgcgcccttcctctgcggctttggtcatgacctcctcaagggaggctgccagcgctgcacgcttgttttcaaaacttttaatctgttcgccaatattcattatggtcttttccttatgaaaaacggttgttga

SEQ ID NO: 38371 - DNA, 546 bp, Escherichia coli
atgaaggttaataaaaagaaacttgccgaaattttcaacgtggatccgcgaacgattgaacgctggcagtctcaggggctcccttgcgtctccggaggtggtaagggcgttgaatctgtatttgataccgccacggcaattcagtggtatgcgcagagggaagctgatatcgaaaatgaaaaactccgtaaagaggttgaggattacagggctgccagcgaggcagatctccagcctgggactattgagtacgaacgccatcgacttacgcgtgcgcaggctgacgcccaggagctgaagaatgccagagactccgcagaagtggtggaaaccgcattctgtactttcgtgctgtcacggatcgcaggtgaaattgccagtattcttgacgggatccctctctcagtacagcggcgttttccggaactggaaaaccgacatgttgatttcctgaaacgggatatcatcaaagccatgaacaaagcagccgcgctggatgaactgataccggggttgctgagtgaatatatcgaacagtcagattga

SEQ ID NO: 38372 - DNA, 282 bp, Escherichia coli
gtggaagattacttagtttttggtttaggttatgaaggcgatataaagaacgatgaagcagggcttgataagataagcgtggtaacgaaatcggtagtgcgttctaccaattccaatgaaccagtggtttaccaagtgactgagtttaaagaatttaatgttgtgagacatcaagcgtttgatagtgaatactacaacatagcattcgatgtcttaccatcccgcgtccgtattgatgctgcaatccgtaaatatcaccccaagaaatcctcctcagcttag

SEQ ID NO: 38373 - DNA, 249 bp, Escherichia coli
atgcacgaactatttgtgctggttttgagcacctgtgctagcctcagcaatatgtcaggttgttcagtggaagtagtgaatgtcaacaccacaaaagagccggtaaacgtcttttatagcaggaaagactgcgaagaaagcatgaaaaacattatgctaaatcatgctctataccatgaagtatcaggcagagagccatatatggcaaagtgcgaacaagtatttgtctcaaaaagtttaatgaaataa

SEQ ID NO: 38374 - DNA, 861 bp, Escherichia coli
gtgtctcccccgggtcgcccttcggtccctgaggtccggttgcccccaccgggccagccgcacctgtttctcctttcggtccctgtgggcctgccgggcctgccgcaccggtatctccctttggaccctgtggacctgcatttcccgtcagaccggtctctccccgctctcccctgtcacctttcggcccctgcggacctgccggacctgtatctcctctcggtccccgttcaccggttgccccgacagggccggtgtctccacgctctcctttatctcccttcggcccctgaggacccgcgggcccctgttccccctttggcccgggaggtcccaccacggtggggattctgtttacggcttcttccgccgctatcctgctttgttccgctgactgtgcgctttctgctgactcccgggctttttctgctgcggtcgttgcatccctggctgcattaccggctgcactttctgccgtcttttttgacaactcagcatctgttgcactttgtaatgactcactggctttttgagcggccgcagaggccgaggacgaggacgcctcctctgactgctttgcagcggctgcactttctgccgcctgccgggctgactccgatgcatcccctgctgaagtgtcagcatttgcagcgctctcttctgcctgactggctgatatgccggcattcctcgcggacgtctccgcctctccggcattcttcttcgcctcctcagcgtgacgcgccgcttcttccaccatcagttcaaaacggcgcagtgcctccggccggacgtcatcctccgacatggcaccgagaaaatcattcagcgtaccgggttgagaatcttcatacacggtga

SEQ ID NO: 38375 - DNA, 546 bp, Escherichia coli
atgattggccaccgatgcgccaaagcagcacagcaggatatcgccaggctgtgcggaaggcagggaaatcctgtaaaaaccagtcgcctccatattgtccaggtacaggttctgaccattgcgccaccagtcatcctcacgctcaaaatccggcatatcagtccccgccagatgataagcatcccggaacagcgtgtaacagtccgtcaccccgtgctcaaagcgccgtcctgtcagatgtggcacacagcggaatttatgaatttccccccggcagaccagccaccaggacagtgcactttttatctgcagccgccggtcggcctcgctcagccagggcaggccaccgggatggctgtggaccagtgccacaatctccccctgcatctctgcccgcagccagtcttccggtgcaatacgaaaatacgcctccggctctgcggaaatattcacacaagggatataccactccccctccggcgtgcttatcacgaagccgcacgactccgcaggcgcacaccgccgggcatgcgccagaatcgctga

SEQ ID NO: 38376 - DNA, 546 bp, Escherichia coli
atgattggccaccgatgcgccaaagcagcacagcaggatatcgccaggctgtgcggaaggcagggaaatcctgtaaaaaccagtcgcctccatattgtccaggtacaggttctgaccgttgcgccaccagtcatcctcacgcacaaaatccggcatatcaattcccgccagatggtatgcatcccggaacagggtgtaacagtccgtcaccccgtgctcaaagcgccgtcctgtcagatgtggcacacagcggaatttatgaatttccccccggcagaccagccaccaggacagtgcactttttatctgcagccgccggtcggcctcgctcagccagggcaggccaccgggatggctgtggaccagtgccacaatctccccctgcatctctgcccgcagccagtcttccggtgcaatacgaaaatacgcctccggctctgcagagatattcacacaagggatataccactccccctccggcgtgcttatcacgaagccgcacgactccgcaggcgcacaccgccgggcatgcgccagaatcgctga

SEQ ID NO: 38377 - DNA, 429 bp, Escherichia coli
atggcggaggacctgcagagcctggtgggggccacggtggtccgccgccgggtgtatgcccgttttctggatgcggtgaattttgtggcgggcaatccggaagcggacccggagcaggagctgagagaccgctgggtggtggagcagatgtcatcgctgacggccatgacggcctcgtttgtgctggccacaccgaccgagacggacggggcgctgtttcccggtcgcatcatgctggcgaacacctgtatgtgggattaccggggcgatgaatgcgggtataacggtcctgcggtggcggatgagttcgacaaccccaccacggatatccgtaaggacagatgcagcaagtgcatgcgcgggtgtgagatgcgcggcatggtggctaattttggcggtttcctttccattaataaactttcgcagtaa

SEQ ID NO: 38378 - DNA, 600 bp, Escherichia coli; identical to SEQ ID NO: 24018

SEQ ID NO: 38379 - DNA, 219 bp, Escherichia coli
atgctggcaccgaaggcaaaaacaccggattaccgcgcaacggataacggtaaacagaacacgtatttttcgtcactggataacatgattgcccaggggaacccgatgccggtgccttatggtgaaatgctggttggttcacgacggatatcccaggacatcagcacccgtgatgagggcggagacgggaaagtggtggttatcgggcggcaggggtaa

SEQ ID NO: 38380 - DNA, 219 bp, Escherichia coli
atgctggcaccgaaggcaaaaacaccggattaccgcgcaacggataacggcagacagaacacgtacttttcctcactggacaacatgattgctcaggggaacccgatgccggtgccttacggtgaaatgctggttggctcacggcgaatctcccaggacatcagtacccgtgatgaaggcggtgacgggaaggtggtggttatcgggcggcaggcataa

SEQ ID NO: 38381 - DNA, 579 bp, Escherichia coli
gtggcgcgtctggatacagactttgtggacccgaaaaaagcggcggtggcagatgtctcccctgcgtccatcacccatgatgtgaagggcacggcgtcaagcggtaatccggatgcggatgccgaggccgcgtttggccagtttgtgacggcaaatctgcagcccaccggtgcggtctggctgatgtccagcacgaatgccctggcgctgtccatgcgtaaaaatgcgctggggcagaaggaatatccggacatgaccctgctgggcgggaccttccaggggctgccggtgattgtctcccagtatgtgggtgaccagctggtactggtgaatgcgccggatatttatctggcggatgacggtggtgtggcggtggatatgtcccgtgaagcgtcactggagatgcagtctgaaccgaccagcgacagcagcacaccgtcaccggtggagctggtctccatgttccagaccggcagcgtggccatccgtgcggagcgctggatcaactggcgtcgtcgccgtaccgcggcggtggctgtgatcaccggtgtgaactacggaactgcgtccggcggctga

SEQ ID NO: 38382 - DNA, 309 bp, Escherichia coli; identical to SEQ ID NO: 24051

SEQ ID NO: 38383 - DNA, 255 bp, Escherichia coli
atgttgcgggttgttgttctgcgggtccggtttttcggtgacattttctttcctctggtgacaagctatatggcgaggattttacatggccgtgcttcgtacgttaccgggcagaatcaaaactctgaatacccggcgggtgaatgtcctgaagggggaacagcgtcgggtcagtggcagtgcccgggtttccctcaagcgtcgtatctggctgagggatgccggacagtgctgtctctgtgggcgtgtggttga

SEQ ID NO: 38384 - DNA, 1770 bp, Escherichia coli
atgagtaaagtctttatttgcgccgccattccggacgaacaggcaataaaagaagagggcgcagttgctgtagccactgccattgaagccggtgatgaacgccgcgcccgtgccaaatttacctggcaattcctggagcaatatcctgctgctcaggactgcgcttataaatttcttgtctgcgaagataaacccggcatgccccgccctgctatcgactcctgggataccgaatatatgcaggaaaaccgctgggatgaggaatccgcttcctttattccggtcgaaccagaatccgatcctattaacgtcaattttgacaagctgtcccttgaagtacagaacgcggtcctggttaagttcggtacatgtgaaaacatcaccgttgatatggcgattgacgcgcaggaattactgcaagaagacgtggctacctttgacgggcatatcgttgaagcactgatgaaaacgcctgaaattaaagctatgtatccggaacgcaaactgttcgctatcggatgggttaaacacaaatgtaagccgggtaccaaatggcccgaaattcaggctgaattacgtaactggaaaaaacggcaggacgcagagcgcaaagagactggaaaatacacgtctgttgttgatcttgcccgcgccaaagccaaccgacagcacactgaaaacccagcagaaaaaatccctcctgtaactgccgccattcatcgcgaatacaagcagacatggaaaaccctggacagggagctggcctactatctctggcctggtgatgcggatgccggaaacattgacggcagcatccttcgctgggctaaaaatgaagttatcgccagagatcgcgaagactggaagcgcatctccgcatcaatgcgcaaacaacctgatgcgcttcgctacagccgccagactatttttggccttgtccgtgaacgtccgatcgacattcacaaagaccctgtggcactgaacaaatacattactgaatacctgactacaaagggcgtgtttgaagatgaaggaagaaatcagagcgcaactgatactctctcgtcgccagtaccagaaactgatgcagtggaaacggcaattccggacaacgaaaaaaccgaatgcaaagtggaagtcgaaccatctgtagagcgtgaggggccgttctacttcctcttcaccgacaaggatggcgaaaaatacggtcgcgcaaacaaactttctggtctggacaaggcgctggctgccggggctactgaaatcacgaaagaagaatatcttgcccgcaaaaacggaacatacacggacttaccgcaaaatgtggataccgctgaagattccgtacaaccggagccggtaaaagttaccgctgacgaagtaaacaaaattatgcaggcagccaatatcagccagcctgacgccgataaattgcttgctgcatcacgtggtgaatttgttgaagggattagcgatccgaatgatccgaaatgggtgaaggggattgaaacctgcgattctgtgaaccagaaccagcaagaatcggaacagaacgaccagaaaacggaacaaaacagcccaaatgcgcaacaaaacgagccagaaacgaaacaggagccggaaaaagcctgcaccgcctgcggtcagaccggcggcggtagctgccccgattatctcaataggtgcaatatttttcgatccgcaaaccggagagatggggccagaattcagcaaaactatcgatctggaaactgctggcggagtcattga

SEQ ID NO: 38385 - DNA, 477 bp, Escherichia coli
atgaccatttctaccaaaaagcctctttatgctgaggttcacaatgttcctgataattatgagttcactgacgaggaactaaacagaattattgcaggtgatatgttcactcctcgtcaggacgcaataatggcacgggagatacagaaactccgcgccgccatgcttcatggtgccgaacttgtaagccagacttacaagttgaacgagctgtcgggcaactctacggtaactccggatggttggataagctgtagtgagcgaatgcctgaaaagaaccagaatgtgcttatttcggtgaatttcgatagatctctggtagaaccgctaatatgctccgcacgctatacaggaagcacctttcggcgtgggcagataacggttgcgcctggtaatggtattgatggtaatggtattgaacaggccacacactggatgccgctaccggaaccgccgcaggaggttaaccgtggctaa

SEQ ID NO: 38386 - DNA, 1095 bp, Escherichia coli; identical to SEQ ID NO: 23540

SEQ ID NO: 38387 - DNA, 618 bp, Escherichia coli
  misc_feature (589)..(598): n is a, c, g, or t
atgactgttgcttcagtggttaaaccatatgactttagcaatcttggtgccataaatagtatagataaatccgtttctgatgtgcctgcattgcatacaattgttgaacaagcaaaatataatttactttcatggaatgatttttataacactcatgcgtcaatatgggatacaatagcaagacagcataaaagtacaaatatcgaatttcacccacaaagtcttctttttgatagagattcgaaaggaaagtacggaggcggatatcaaaaactgaggcacaatattgacactgccagcacattatatcaaacaaaatacaatgacaatctaaaattatctaaccgtgatgatttctttttaagaaaaacacagcgtatcattacaatgtccaatgagttaggtaataacaggttaaaaaatgcacagttagaggttctggaattgaaagaccctatactaactgaaggcatattataccagcgtcgtatatcatctcttttaataacaacagaatatcattcacttgcattacaacaaatatcttctttttggagagtaactgatcctaattttggtcattgtgacnnnnnnnnnnttgtgactttcattccttag

SEQ ID NO: 38388 - DNA, 360 bp, Escherichia coli
atgctcatagatttggttttaccttacccgccgacggtgaacacctactggcgacgtcgtggcagcacatattttgtatcaaaagccggtgagcgttatcgccgggctgtggcgcttattgttcgccagcagcggctgaaattaagcctgtccggaaggctggcgataaagattattgccgagccaccggataagcgccgccgtgacctggacaatattctgaaagcgccgctggatgcgctgacgcatgcggggttgctaatggacgatgagcagtttgatgaaatcaatattgtgcgcggtcagctcgttcctggtgagcggctggggataaaaatcacagaactggagtgcgcatga

SEQ ID NO: 38389 - DNA, 318 bp, Escherichia coli
atggcagcctggggtgcagcgctgagtgccggcggtttttctgccaccacgatgctgttttcactgggtgccagcatgatactgggtggtgtggcacagatgctggccccgaagccaaaaacaccggaatacagggcaacggataacggtaaacagaacacgtacttttcgtcgctggacaacatgattgcccagggtaacccgatgccggtgccttacggggaaatgctggttggctcccgccgtatatcccaggacatcagtacccgtgatgaaggcgggggcggaaaggtcgtggttatcgggcggcaggcataa

SEQ ID NO: 38390 - DNA, 345 bp, Escherichia coli
atgccggagaggcggagacgtccgcgaggaatgccggcatatcagccagtcaggcagaagagaacgctgcaaatgctgacacttcagcaggggatgcattggagtcagcccggcaggcggcagaaagtgcagccgctgcaaagcagtcagaggatgcgtcctcgtcctcggcttctgcggccgctcaaaaagccagtgagtcatcacaaagtgcagcagaagctgaattgtcaagaaagacggcagaaagtgcagccggtaatgcagccagggatgcaacgaccgcaacagaaaaagcccgggagtcagcagaaagcgcacagtcagcggaacaaagcaggatag

SEQ ID NO: 38391 - DNA, 345 bp, Escherichia coli; identical to SEQ ID NO: 37479

SEQ ID NO: 38392 - DNA, 399 bp, Escherichia coli; identical to SEQ ID NO: 38324

SEQ ID NO: 38393 - DNA, 261 bp, Escherichia coli; identical to SEQ ID NO: 37675

SEQ ID NO: 38394 - DNA, 315 bp, Escherichia coli; identical to SEQ ID NO: 37485

SEQ ID NO: 38395 - DNA, 300 bp, Escherichia coli
atgaatcttttagttaaaagaaacgttgaagagtttttaagattattgggaaatgatttttatttatttgataataatgtttttgttacgtttgctttagagtataacgaaaacgcatttttctctttctttagtgcccttgctcctgagcgtacgcagggagtgattgaacatatttttgtctacgataataaattgtgcttaagttgtttgttaaccaatatcgatgttttttttctaatgaatacttttcaacagcatgtgcagattattgagcgcgttcgcaggatgacatcatga

SEQ ID NO: 38396 - DNA, 132 bp, Escherichia coli; identical to SEQ ID NO: 37496

SEQ ID NO: 38397 - DNA, 732 bp, Escherichia coli; identical to SEQ ID NO: 37765

SEQ ID NO: 38398 - DNA, 699 bp, Escherichia coli
atgcagaatattcatgaagaaagcctgaacgagtcggttaagtcagagcagtcaccgcgggtggtgctctgggaaatcgacctgacggtgcagggcggtgagcggtattttttctgtaatgagctgaatgaaaaaggggaggcggtcacctggcaggggcggcaatatcaggtatacccgattgacggcagtggctttgagatgaacgggaagggcagcagtgcccgcccgtcgctgacggtgtcgaatctgttcggtctggtcaccggaatggcggaggacctgcagagcctggtgggggccacggtggtccgccgccgggtgtatgcccgttttctggatgcggtgaattttgtggcgggcaatccggaagcggacccggagcaggagctgagagaccgctgggtggtggagcagatgtcagagctgacggccatgacagcctcgtttgtgctggcaacaccgacggagacggacggagcgctgtttcccggtcgcattatgctggcgaatacctgtatgtggacctaccgctctgatgagtgtggttacacgggcggggctgtggcggatgagttcgacaaccccaccacggatatccgtaaggacagatgcagcaagtgcatgcgcgggtgtgagatgcgcggcatggtggctaattttggcggtttcctttccattaataaactttcgcagtaa

SEQ ID NO: 38399 - DNA, 342 bp, Escherichia coli; identical to SEQ ID NO: 37503

SEQ ID NO: 38400 - DNA, 129 bp, Escherichia coli
atgattggcttattgtctgtaaatcagatgattacccgtggagcgaacgtttgggaggagctggagataaaggtagagacgttgttgctgtctcttatacacatctccgagcccacgagaccgtactag

SEQ ID NO: 38401 - DNA, 189 bp, Escherichia coli; identical to SEQ ID NO: 17045

SEQ ID NO: 38402 - DNA, 1902 bp, Escherichia coli
gtggaggcgctggagcagcagtattattcccagtgcctgcagacgctgattgagtccattgaactgttactggatgaggcgctggaaacgggggaaaacgagagtacagaatttgatgtcaccacgctgctgagaatggacagtgagcggcgcatgaaaacgctgggggatgcggtgaaaaatacgcttctcacgcccaatgaggcccgtaaacgggagaacctgccgcccctggccggcggtgatgcactgtatcttcagcagcagaactacagtctggaggcgctgtcccgtcgtgatgcccgtgaggatccgttcgcgtctgccgggaaaacagtttcatcacagctgcctgacggcgcatctgacggtaataaggcaatcagtgaaacagagcatgatgcggtgaaagcgatgttcaggggggatactgagaaaatgacggaacgggaactgtccattattcgtgcactgggagaagaattttccacagtgctggcggatttacagcgcacatttgaggagaaaatagccgcgcaggcacaaacgtttgaagaaaaactggcttctcagtctgtggtattacagaagtgcgtgacgggtgatgatgtgcgtccgatgcttgagcagatggtgaaagaggcagtgagccatattcctgttccgcgcgacggtcgtgactacgatccggatgttctgcagaaggcggtgaatgatgcggttgcgaatattccggtaccggcagacggcaaaagtatcaccccggatgatgtgcgtccgatgcttgagcagatggtgaaagaggcagtgagccatattcctgttccgcgcgacggtcgtgactacgatccggatgttctgcagaaggcggtgaatgatgcggttgcgaatattccggtaccggcagacggcaaaagtatcaccccggatgatgtgcgtccgatgcttgagcagatggtgaaagaggcagtgagccatattcctgttccgcgcgacggtcgtgactacgatccggatgttctgcagaaggcggtgaatgatgcggttgcgaatattccggtaccggcagacggcaaaagtatcaccccggatgatgtgcgtccgatgcttgagcagatggtgaaagaggcagtgagccatattcctgttccgcgcgacggtcgtgactacgatccggatgttctgcagaaggcggtgaatgatgcggtcgcgaaaataccggtaccggcagacggtaaaagtatcactccggatgatgtgcatccgatgcttgaacagatggtgaaggaggcggtaagccatattcctgttccgcgtgatggtcgtgactacgatccggatgttctgcagaaggcggtgaatgatgcggtcgcgaaaataccggtaccggcagacggtaaaagtatcactccggatgatgtgcatccgatgcttgaacagatggtgaaggaggcggtaagccatattcctgttccgcgtgatggtcgtgactacgatccggatgttctgcagaaggcggttctggaggcggtgagtgccctgccggctccgcaggacgggcgtgatgccacggcactggaaatactccccgccattgacgatcaaaaatcctttccccggggctcgtatgccacacaccagggtggactctggcgggcgtatgaaaaaacgtacgggatgcggggatgggaatgcctggttgacggggtggcggatattgacgtcagcatgacgggtgaacggtcgttctctgtggtggtccggcagagcagtggccagcgtacggaaaaaacattttccctgccggtgatgctctaccgtggtgtgttcagaatcggcgaaacttaccaccccggcgatacggtgacgtggggggctcgttgtggcactgcaacagtatga

SEQ ID NO: 38403 - DNA, 378 bp, Escherichia coli; identical to SEQ ID NO: 38035

SEQ ID NO: 38404 - DNA, 519 bp, Escherichia coli; identical to SEQ ID NO: 37222

SEQ ID NO: 38405 - DNA, 195 bp, Escherichia coli
atgtgggtgacacgaaaagatgcctggtactttgccaactatgacccgcgcatgaagcgtgaaggcctgcattatgtcgtgattgagcggaatgaaaagtacatggcaagttttgacgagatggtgccggagttcatcgaaaaaatggacgaggcactggctgaaattggttttgtatatggggagcaatggtaa

SEQ ID NO: 38406 - DNA, 222 bp, Escherichia coli; identical to SEQ ID NO: 6179

SEQ ID NO: 38407 - DNA, 168 bp, Escherichia coli; identical to SEQ ID NO: 29864

SEQ ID NO: 38408 - DNA, 510 bp, Escherichia coli
gtgataaatcctgatgatgaatcgatacgaattttttcatggcttgctgataatttccctgatttacaatattttaaacttcagctattagatgccagtaatcccagactgaccgtgagtaagcaacggaatgctatcacacagcaactaatcgacaatcttattaaagggttactacaaactatgccatatgccagcaatataagtattgcggtattagatgataatgtattggaaagtcaggctattgaaacattgtctgcaataggtctttcttatgaaaaatataaaacagctaacaatgtgtatttcaatatcattggtacgttaagcgacagtgaattaaacaaaataaataactatgttgacgaatattataaacaatggggtaaacaatatgtaagatttaatgtgaatttgaaaaatcaggacacaaataatagttcatttagctacggagataaccgattcgagaagtctcaaggtagcaagtggacatttcaggaataa

SEQ ID NO: 38409 - DNA, 168 bp, Escherichia coli; identical to SEQ ID NO: 29864

SEQ ID NO: 38410 - DNA, 861 bp, Escherichia coli
atgagcttctccgggtttatcttcggtcatactgttgcagtgccacagcgagcccccccacgtcaccgtatcgccggggtggtaggtttcaccggctctgaacacaccgcggtagagcatcaccggcagggaaaatgttttttccgtacgctggccactgctctgccggaccaccacagagaacaaccgctcacccgtcatgctgacgtcaatatccgccaccccgtcaaccaggcattcccatccccgcatcccgtgcgttttttcatacgcccgccagagtccgccctggtgtgtggcatacgtgccccggggaaaggatttttgatcgtcaatggcggggagtatttccagtgccgtggcatcacgcccgtcctgcggagccggcagggcactcaccgcatccagaaccgccttctgcagaacatccggatcgtagtcacgaccatcacgcggaacaggaatatggcttaccgcctccttcaccatctgttcaagcatcggacgcacatcatccggggtgagacttttaccgtctgccggctgcggaatatttgcgaccgcatcattcaccgccttctgcagtacttccggatcatagtcacgaccgtcgcgcggaacagggatatggcttaccgcctccttcaccatctgttcaagcatcggacgcacatcatccggggtgagacttttaccgtccgccggctgcggaatatttgcgaccgcatcattcaccgcctgctgcagtacatccggatcataatcacgaccatcacgcggtaccggaatggcccccacagcgtcatccaccatcgcctgcagaaccggacgcacctcatccaccgtcacatgcttctgtaa

SEQ ID NO: 38411 - DNA, 663 bp, Escherichia coli
ttgtcagacgatgactggcagcgactggctaaggtgaaggatctgacgccgggcgagatgacggcagaatcctacgatgataactacctggatgatgaagacgcggactggaccgcgaccgggcaggggcagaaatctgcaggtgataccagttttacgctggcctggaaaccgggagaggaaggccagaaagggcttataggctggtttgaaagcggcgatgtccgggcctataaaatccgttttccgaatggcacggtggatgtgtttcgtggctgggtcagcagtatcggtaaggccgtgacggcgaaagaagtgatcacccgcacggtgaaagtcactaacgtgggtaaaccttctgtagcggaagaacgcagcaaaattacgccggtcagtgcgattaaggtgacgccgacatccggtacggtggcaaaagggaaaacaaccaccctgacggtttcttttgagccggaaagtgcaacagacaagacgttcagagcggtttccgccgatccgtcgaaagccaccattagtgtgaaagatatgacaattacggtaaacggcgtggcgacaggtaaggtgcagatccctgtggtgagcggaaatggtcagttcgccgcagtggctgaagtcaccgttactgaagcgggcgctgcagggtaa

SEQ ID NO: 38412 - DNA, 201 bp, Escherichia coli; identical to SEQ ID NO: 37851

SEQ ID NO: 38413 - DNA, 267 bp, Escherichia coli; identical to SEQ ID NO: 37636

SEQ ID NO: 38414 - DNA, 1038 bp, Escherichia coli
atgtcggaggatgacgtccggccggaggcactgcgtcgttttgaactgatggtggaagaagcggcgcgtcacgctgaggaggcgaagaagaatgccggagaggcggagacgtccgcgaggaatgccggcatatcagccagtcaggcagaagagagcgcggcaaatgctgacacttcagcaggggatgcatcggagtcagcccggcaggcggcagaaagtgcagccgctgcaaagcagtcagaggaggcgtcctcgtcctcggcttctgcggccgctcaaaaagccagtgagtcatcacaaagtgcagcagaagctgaattgtcaagaaagacggcagaaagtgcagccggtaatgcagccagggatgcaacgaccgcaacagaaaaagcccgggagtcagcagaaagcgcacagtcagcggaacaaagcaggatagcggcggaagaagccgtaaaccgaatccccaccgtggtgggacctcccgggccaaagggggaaccgggtcccgcgggtcctcaggggccgaagggagataaaggagagcgtggagacaccggcccggcaggggcaaccggcgaacggggaccggcaggtgatgctggtccggcaggcccgcaggggccgaaaggtgacaggggagagcggggagagaccggtctgacgggaaatgcaggtccacagggtccaaagggagacaccggggcagcaggcccggcaggcccacagggaccgaaaggagaaacaggtgcggctggcccggtgggggcaaccggacctcaggggccgaagggcgacccgggggagacgcaaatacggttccgtctggggccggcgagcattattgagacaaacagccatggctggttcccgggtacagatggtgcgctcatcaccggactgacctttcttgcccccaaagataccacacgggttcagggtttttttcagcatttgcaggtcaggtttggtgacgggccgtggcaggatgttaaggggctggatgaagtgggcagtgatacaggcagaacaggagaatga

SEQ ID NO: 38415 - DNA, 1068 bp, Escherichia coli
atgttaaataatttatatgagaaaagcttaactttccgaagaataattaattattatgtgaaggaaataaacttaagtgattatggctttctaaaatgtaagattttaccagcatatgcttataactatgagatggaaaatgatgcccccccaaaaatactaattccaattgaccataatttaaattttattgatgcaaaatataatggagaaacttatcggggaaatgaagagtttgctattaatctttttctgcagcatatattacataatgacatacaagaacaaacatcgatagacttatacacgagcataataaataaagagttggatagcaatagaaaatcatacaataatgaaatttttaacaatttctcttttgataagtctgtaaagttgaattcatataactatattgcagatgatatagagcaagtaatcgataaaggaagcaaagttcaattggaggtatataatttattatccgaagaaaagatatttgaacataaaattatgaataattggacaaggagcataaaaaatatattgacgacatatttgtttatgtcatcaggagcggtgacagccagaaatgttcaaaccttttctccaacaataaataatgagtcaaggattcgattgccgagagcattgccagtaggccatccatatcctgaggaacataaggcttctggtttctccccttttatgatgggggggctgagtggtgatattcttccggaaattttaacggggaatggaccatctatattttttaacggaaaacataataaccaacatgatggagcttttggaaaaataatagattttacccaaaatggaaataaaataagtgcaaaagataaagaaataataaaaagatatatttttgataagatcaatgttttgattaaagagtatttcattagaactggtaaaaattctcataccccatttgaagtttttataaaggagcgattatttaatcaatatgatatttttaaaacattggctagagatatattggcacacccattagtaatatatctgtctcttatacacatctga

SEQ ID NO: 38416 - DNA, 189 bp, Escherichia coli
atggaaaagttattaccaaacgttaatacgtctgaaggttgttttgaaattggtgtcactatcagtaaccctgcatttattgaagacgccattaagcagagaaaactcgagcaggacctgttaaatgaagtatgcattccttcaatgctggctcgtctggacctgctgcaaaaaggatataaacaatga

SEQ ID NO: 38417 - DNA, 429 bp, Escherichia coli
atggcggaggacctgcagagcctggtgggggccacggtggtccgccgccgggtgtatgcccgttttctggatgcggtgaattttgtggcgggcaatccggaagcggacccggagcaggagctgagggaccggtgggtggtggagcagatgtcatcgctgacggccatgacggcctcgtttgtgctggcgacaccgacggagacggacggagcgctgtttcccggtcgcatcatgctggcgaatacctgtatgtggacctaccgctctgatgagtgtggttacacgggcggggctgtggcggatgagttcgacaaccccaccacggatatccgtaaggacagatgcagcaagtgcatgcgcgggtgtgagatgcgcggcatggcggttaattttggcggtttcctttccatcaataaactttcgcagtaa

SEQ ID NO: 38418 - DNA, 168 bp, Escherichia coli; identical to SEQ ID NO: 29866

SEQ ID NO: 38419 - DNA, 267 bp, Escherichia coli
atgagggtatccagacaagcatcgaataatttgtttgttcgagaggggtgtgactggtctgctaaagcggtatatgcagcccttgaaaacaaaggcacagacctccctgaactggaaagggagttaggattaaaaagcggatcaatgcgcaatgtgttttaccgccagtgccgtaaatacgaagccgccatcgccgaaaaaataggggttgaacctgctgtaatctggcccagcagataccaggtggacgccagagaagtggcttga

SEQ ID NO: 38420 - DNA, 612 bp, Escherichia coli
atggataaggcagaaaaaaccgtatccagtgcggaacggtttattgatatggaaggaataaaccgattttcagaacgcttagctatggctatgggaaacatgacaaacgtcgaactggcgaccctttgtggactatctgaagccacagtaagaaattacaggaaggggaaaaacttccctcctttggataaactggccttaatagctaaagcctgtaattgttcactcgaatggttggccacaggcaagaacgaagatgaatgcggaaaaatcgaaaacaattgcgattcaggttcgggtattgatcaggcgcttagctctctaagcccccaagagaagcaattaatccttacattcatcaggcgagaaggtactaataaccttgtcaggctggcagcaatgaatacatctacaatcagccaggatgcggtagaaagcatcattgatgccttgccattacgtcccgtactaaaaaatgcaataaagataggaatggcgggaagtgaagaaacagacaaagagattttgcgcgttattgagaagtacaactcgagcaataacgccacccaggaatcaggggcagtgacagtaaagaaaaatgttgttggttaa

SEQ ID NO: 38421 - DNA, 546 bp, Escherichia coli
atgagcaccgctttgcttgacgccgtggtgaagaaaaaccgtgtgcgtttaattccgtttatgttggcgctgtatgtgctggcgtttctcgaccgttcgaatatcggttttgccaaacagacctaccagattgataccgggttgagtaatgaagcttatgcgctgggagcaggcattttctttgtggtatatgcgtttctgggtgttccggcgaatcttttgatgcgcaaactgggggccagaacctggattggtacgacaacactgctgtggggatttctttcggcagccatggcatgggccgatactgaagcgaaatttctgatagttcgcactctgcttggtgctgcggaggccggatttttccctggtatgatttatctcacctcgcaatggtttccgcagcgtaatcgcgccagcattatggggctgttctatatgggcgcaccgctggcgttaacactgggatcaccgctttccggcgcgctgctggagatgcatggatttatggggcggttcatcccggctggttctggatgtttgtga

SEQ ID NO: 38422 - DNA, 297 bp, Escherichia coli
atggacaatagttctctgttgttctggtgcttatatatcacatcctttttcggcgcatttgttattacccggtggttatgtcgaaaaatcatctgcttttttgataaaagacatctggttgaacgggcggctgatgcgctcattcagcaggccattgtgttatatagcggtgagtttttctgccggataacaaccagagatggctggcacataatgattattccaccaacacaccatgcccggtgggatgaggcagaaaaggctttccatgtccgtaaaaaggtaaatacggtatga

SEQ ID NO: 38423 - DNA, 510 bp, Escherichia coli
atgagaggaaaactgatatccgccattcatgtggcaaagcgcgagcttgccctggatgatgagacttatacatccgcgctgctggcagccaccggcaaaaccagctgccgggatatgtcaccggatgagttatcccgcgtgctggatgttttcaaaaaacgcggttttaaagtgcgtcagaacccggttaaccgggccttaaaaccgggtacggtgaccgccaaaattcgcgccatctggaaggtgatgcaccggcagggctttatcaccgatggtgcggaaaccgcccttaaccgctgggtgaaatcgcagacggccgcgcagaacggcggcgaaggtgtggcaaactggcagtggctggagcaacaccccgccctggcctcagatgtgctggagcgtctcaagcgatggcaccgccgcaaaatgctggccgcgatgggaatgcccgaacgcacgctgatggggtatgacgccgtttgcaggcagtatgaaaaatcacttccccgttaa

SEQ ID NO: 38424 - DNA, 426 bp, Escherichia coli
atggcagaaactcagatgagcatgtttggtggtgacagtgagcaactgcacgcccttatcgaccgccttgatgacatccctgatgatgttctcaaaaagaactggccgcggaccctgtcagaactggttgaagtcaccggcgcagaacttcagcgtcaggggattgagccggtactggccggtaaactggcacgcaaggtggctgcggctcaggcagcctatatgggcggacggggttattacctgccggtcggggaatctctctttgccgagctgcgaaacaatgagatattttcgcgctgggaccggggcgagaaaattgaatcccttcgccgccattaccggatgtcagaaacccagatttataccgtcatacgcgaacagcgccgtctgcatctggcaagaacgcaaccgccacttttctga

SEQ ID NO: 38425 - DNA, 501 bp, Escherichia coli
atgccaaaactccccgcaccactgcgtaaaaagctgattgcccttgttctggccggtgccgggacgttcacgattgccacgcattacaccggttactgggaagggaaagaaaactccacgtatatcgatcccaccggtacacccaccatctgttacggccataccggcccggatgtgaaaccgggtatgaccctgacagatgaagaatgcctggaactactggaaaaggacatgaaatgggcctttgcggccattgatcggcgtgttcaggtgccgcttacccgtggtcagacggtggcgctggcttcgtggatcttctgggccggtgaaacgaactttcgcaactccacgcttctgcgcctgatcaatgccgggcagatgcccgcgtcctgtaagcagtatatccgctggatttattcaaagggggtgaaactccccggccttgaggcccgccgttcggcggatgaatggttatgtcgctacgacttgccgaaagtctga

SEQ ID NO: 38426 - DNA, 501 bp, Escherichia coli
atgaatggttatgtcgctacgacttgccgaaagtctgaaccgcttctggcgaccgctcatgatagcgctgctgtgtgcggtactgctgttacggggtgtcctgtggctgcggtgaataatgccttaccggccctgattgccggggcgtgcatggcggcgctggggattatcgctgtactggttgccgctatatggggaatgcaccagaagacgcagcgccttgaagacaataatcaggtgcttgtgcgtgagcgggatgaggcgcgtcaggtgctggcaaatcagcagcacaccctgcaactcatttcacaaatcagtgaggcggccacgaatgaaaaacaacagaacattcagcacagcgaggggcagcagagcgttgtccgccggtcgctggcggcagtgcctgcggcctctgcccctgttcctgatgatgtggctgatcgggtgcgccgggccgtctgtgaaatacgtgcctgtgaagccggtgccgatccccgctga

SEQ ID NO: 38427 - DNA, 294 bp, Escherichia coli
atgaatttactgatatggccggaacgcctgctgttccggcaggaaagacgaagtaaggaaaaaggtatggatgattcagatcgtgctcaggctgtgatggagcggggatcagaacgcgccctttgtaaccggctgacacgtaagcgccgggcaatggatgctccgggcagacgtgtctgcgcggactgtggcggagagatccccgccgcacgtcttgttgctgtgccggatgccatccgttgtgtgaactgccagaacatcatggaggcccgtcatgtgggtcagcatcgttaa

SEQ ID NO: 38428 - DNA, 309 bp, Escherichia coli; identical to SEQ ID NO: 24617

SEQ ID NO: 38429 - DNA, 291 bp, Escherichia coli
atgagtgatttcattactgaagatcagcgtctggtcattctgcggtcgctggcagattacaacggtgaactgggtgaatccgtgctccaggactgtctggatgattacggccaccgcgtgtcccgcgacaccgttcacacccacattgcctggcttgccgagcagggactggtgcgcaaacgcgttctgattaacggttatttcatcgcggaactgaccggtcgtgggcaggatgtggcggaaggccgggtctgcgttccgggtgtgaagaaaccacgcgcaagggggtaa

SEQ ID NO: 38430 - DNA, 582 bp, Escherichia coli
atggacaagccgacgcgtggacgcgtgcgcaaggtggatttgctccccgacagcatccgtaagccactgctggaaatgctgcgtgaaaaacgtctgacgcaggtccagatacgcgaggaaatcaaccgtctgatccgtgaggcgggcctgccggaagagcagcagctttcaccggcggccatcagccgggaagcctcccgtaatgagctgattgcccgtaacctgcgtgatttacgcgagcagacaaaagccatgatggccgaactgggagacaagccaaccggtgaaaccacagcgctgattctggagatgtcccgcgccctgatgtaccgccgtctgcgtgccgcgaccgaatccctgaacagtgacagcgacgtggatatgcgtcttattaaggacatcctcctgtcagcacagcgtgcggaaagtgccgccgagcgcagcattaagcgtgaaaaagaaatccgggccgcatttgctgaagagatggcaaacgcggtcaccgacgagctgcgcggcgtggacgggatgagtgaacagcttgagtcccgtattaaggggattctgttgggtaaagcctga

SEQ ID NO: 38431 - DNA, 1665 bp, Escherichia coli
atgaataacgccgaagaactctcacccttactgacgaataccgtctccacccgcaaaattgatctggccggtgaaaaagccctgctgggcgtggatgtgccggacagccttgatttgcccggtgatatgccggtgtttctggattatcaggcccgctggtttgaggatgaaagcgaggtctgcatcgcggaaaaatcccgccgcaccgggcttacctgggcggaagccgggcgtaacgtcattaccgctgcaaaaccgaagcggcgtggtggccgcaatgtgttttatgtggggtcaaagcaggagatggcgctggaatatatttctgcctgtgcactgttctcccgtgcctttaaccagctggcagatgctgatgtgtatgagcagaccttctgggatcgggataaaaaagaagaaattctgacctacatgatccgctttccgaacagtggattcaaaattcaggcactgtcttcccgtccgtcaaacctgcgcggccttcagggggatgtggtgattgatgaagccgcgttccacgagtcactggatgagcttctcaaggcggcaatggcgctcaccatgtggggcgcgcgcgtgcgtattatctccacgcataacggcgtcgataatctgtttaatcagtacattcaggaagcccgcgaggggcgcaaggattacagcgtccaccgcattaccctggatgatgccattgcggacgggctgtaccgtcgtatctgttatgtcaccggccgcgaatggtcaccggaaagcgagcagaagtggcgtgatgatctctacaaaaacgccccgacccgtgaggatgccgacgaggaatacggctgtatcccgaaaaaatccggcggtgcctatattcctcacgcgcttattgaaatggcgatgctccgcgacatcccgattctgacgtttgaagccccggacgacttcatcagccgtgccgcatggctgcgtgaatcggaagttttaacctggtgtgaagaacatttaaaaccgcttttagaggcgttaaatccccgttcccgcttcagcttcggggaagactttgcccgcaccggtgacctgtcctgctttgtgctgctggaaatcactgaatccctggcaaaacgcgaggtgtttcgcgtggagctgcgcaacctgccgtatgcccagcaggagcaggtgatgatgtacatcctgacccgcgttccggcgctggtcggtgcggcgttcgacgccaccggtaacggcggctatctggccgaagccgcgctgctggcctttggcccggacatcatcgactgcgtgatgttatcgccgaagtggtacggtgagtggatgccaaaactgaaggccgagtttgaggatcagaatatcctcgtcgcccgccatcagaccacgcttgatgatttgcgccatgtgaaggtggtgaacggtatcccgcaaatcgacaaggggcgtacgaaggaccagaacgcaacggctgtgaacgcccgccgccatggtgattttgccgtggcgctctgtatggcaaaccgggcgtcatacatggagggcttcatcctggatgaatcagcctgtcaggcgctgccggagcggtcgcgggcaatggagggcggttatcgtgatgacgatgaggcatatcatgaatttgatcgggggtgctggtag

SEQ ID NO: 38432 - DNA, 1590 bp, Escherichia coli
gtgggacgcataattgatcttgacggaaaacctttctcctttgacccggagatgcagagcgccgcgctggatattccgcagattgccagccgttatattgaacatccggcctcgggtatcaccccgaaccgggcggcgcagtgccttcgcggggctgaacgtggcgatctgattgcccagtccgatctggccgctgacattgaagaaaaggatacccacctttttgcagagctgggcaagcgacgtcttgccattcagggcgtgccctggagtattgagccgcccccgaacgccagcgcgaatgagaaaaaggacgcggaaatgctcgacgaatatctgcattccgccgactggtttgatgccatgctgtttgacgccacggatgccatcctgaagggctattcctgcatggagattgagcacgggatgctcggtaaaatgcacatcatccgcgccatccgctggcgtgacagcgggcatttctgccttaacccggatgatttgagcgaactgcggctgcgtgacggcagccatgccggggtggcgtttcagccctttggctgggtagtgcatcagtcacgttcacgcaccggttacggtggtgcgacggggcttgtcagaacgcttatctggccgttcattttcaaaaactattccgtgcgcgatctggctgaatttctggaggtgtacggcctgccgatgaaggtcggtaaatacccctccggggcaacaccggagcagaaaagcgccctgatgcgggcggtgatggatatcgggcgacgtacaggcgggatcatcccggccgggatgtcgctggagtttcaggtagccgcgaacggtcaggccgatccgtttgaaaccatgatttcgtggggggagcgttccatctccaaagctatcctcggcggcacgctgaccacggaagccggagacaaaggcgcgcgctcactgggtgaggtgcataacgaggtgcgccgggaaatcagggattctgatttacgtcagctggccgccacgctgaaccgcgatctggtgtatccgctgtatgccctgaacaccgcccacgccattgatatccgtcgcctgccgcgtatctgtttccagacaaaagagccgggggatatcaccaaaatcaccagtgcggtgatgcagctcagtacggggatggatattcctgatccctgggtacgggagcagaccggtattccacagcctgcccccggtgaagccatcttccgtgtccgtcagagtggcaatgaacctgctcagacagacaaagagatgccaccggaaaaacaggagaagacagagcagacggcgctgtcagcccgactgccggaagcgaaaagcagcccccgagatgaactggacgacatgggggatgcggtgcctgcccgccggttacaggaggccatcgacccggtactggagccggtcattgatgccatcagaacgcgggggctggcggatgcgctggcagacctgcctgccctttaccgtgaaatggatgattcccgcctgatgacgctgctcagtgatgccatgtttgctgcggaaatgaaggggatgctggatggcacaggggattga

SEQ ID NO: 38433 - DNA, 966 bp, Escherichia coli; identical to SEQ ID NO: 23801

SEQ ID NO: 38434 - DNA, 330 bp, Escherichia coli; identical to SEQ ID NO: 24045

SEQ ID NO: 38435 - DNA, 438 bp, Escherichia coli
atgcaggacattcatgaagaaagtctgaacgagtcggttaaatcagagcagtcaccgcgggtggtgctctgggaaattgacctgacggtgcagggcggtgagcggtattttttctgtaatgagctgaatgaaaaaggggaggcggtcacctggcaggggcgggaatatcaggcatacccgattgacggcagcggttttgagatgaacgggaagggcagcagtgcccgcccgtcactgacggtgtccaatctgtttggccttgtcaccggaatggcggaggacctgcagagcctggtgggggccacggtggtccgccgccgggtgtatgcccgttttctggatgcggtgaattttgtggcgggcggtcgtggttatcgggcggcagaggtaaaaagaataaaaaaatcccgcagagttgcggggacagacaaagattaa

SEQ ID NO: 38436 - DNA, 342 bp, Escherichia coli
gtggctgagataaaaacgctgcatctggtcccgcgtgaagggatgcaggtgagtgagaagccgtcggtggtgagggtgcggtttggtgacggttatgaacagcgccgccccacagggctgaatcctcaactgaagacgtttcaggcggtgttccgggtgacggatgagtcaacccggcgctggctggatgaatttttatcctggcatggtggttaccgtgcctttttgtggcgaccgccgaaacataaccggacggtgagggtggtgtgccgggagtggagcgtcacggataacgcccggtacagtgatttcagctgtacgattgagcaggtggtgaactga

SEQ ID NO: 38437 - DNA, 930 bp, Escherichia coli
atgatgaacaacacggacacgcatccgttctggcagtatgtggcggtcatggacagccgtacccgcccgtcgcattccacccttaacggtctggtattccgctatgatgatccgttctggaaaacacactacccacccaatggctggaactgccgctgccgtgtgcggccattgtctcaggcccgtctggatgcaatggggttatccgtttcatccggtgaggatcatctctccacccgcaatgttgaggctggcgtggataaacagaccggagaagtcagagaaatgccggtgaccacatattcagatggcaccagaaccatgacaccggatgtgggctggtcatataaccccggttcggcggcgttcggcacagaccaggcgctgatccgtaaactgatcgaggtgaaaagcccggcgttacgggaaatggtggttcaggagatgaacaacagcccggagcggcagctggcgttccgcatctgggcaaaaaatatcatgaaaacccggcgcggtggtcacgatatccgcacgctgggctttatgaccgaaagtattgcgcaggcagtggaaagccggacaggaacgccaccggcccgcctgctggcgatgagcggtaaaaatgtgctccatgcggacagtgtgaaacatcagaatgacggtatcgccctgacgccggaggatttcgcgcagcttcccgccatgctggctgcccccgatgccgtgctgtgggatcatgtccatcagaacctgctttacatcactgaaacccgtgacggaacggcaaagattgccgtcaatgcgccttatggtgtgaagcgccagccggataagctggatgtggtaattaatgcttaccgggtaaataaatttgatattgaaaaagcaatagagggcggaaagctggaactactggaaggtaaattgtaa

SEQ ID NO: 38438 - DNA, 192 bp, Escherichia coli
atgaacaactcatggtggcaggaactaatgcattttttcctgcaaggaatgacacttaaacagttgattcatatgctaatcatcctgattatattgattattgttatgcctgtaagcgtaaaagaatggataaacctgcataatccagaaatccttcctcattactggatgtattacatcctgttgttttga

SEQ ID NO: 38439 - DNA, 180 bp, Escherichia coli
gtgctggagcacaagccgcaggagccctggctggaaaacatataccgccctgtgggtaatacggtgaccgttcagcaaccggtcgctgacgatgaacctgatgaagaatacgagcgtaatttccagcggggattgcagttgctggaagcgaaattaaaagaaaatgacccgctggcctga

SEQ ID NO: 38440 - DNA, 180 bp, Escherichia coli
gtgctggagcacaagccgcaggagccctggctggaaaacatctatcgcccggtaggtaatacggtggccgttcagcaacctgccattgatgatgagcctgatgaagaatacgagcgcaatttccagcggggattgcagttgctcgaagcgaaattaaaagaaaatgacccgctggcctga

SEQ ID NO: 38441 - DNA, 759 bp, Escherichia coli
atgattaccctgaaaaatgtttcaaaatggtatggtcactttcaggtgctgaccgactgctcaaccgaagtgaaaaaaggcgaagtggtggtggtttgcggcccgtctggttccggcaaatcaacgctgattaaaaccgtcaacggcctcgaaccagtgcagcaaggtgaaatcaccgtcgatggtatcgtggttaacgacaagaaaaccgatctggcaaagctgcgttctcgcgtcgggatggtattccaacatttcgagctgttccctcatctgtcgattatcgaaaacctgaccctggcgcaggtgaaagtgcttaaacgcgataaagcaccggctcgtgaaaaagcattgaaattgctggagcgcgtgggactttccgcacatgccaataaatttccggcgcagctttccggcggccagcagcagcgtgtggcaattgctcgcgcattgtgtatggatcctattgcgatgctgttcgacgaacccacatcggcactagacccggagatgatcaacgaagtactggacgtgatggtggaactggcgaacgaggggatgaccatgatggtggaactggcgaacgaggggatgaccatgatggtggtgacccacgaaatgggctttgcccgtaaagtggcgaatcgggtgatctttatggatgagggtaaaattgttgaagactcgccgaaagatgcgttcttcgatgatccgaaatcggaccgcgcaaaagacttcctcgcgaaaatcctgcattaa

SEQ ID NO: 38442 - DNA, 249 bp, Escherichia coli; identical to SEQ ID NO: 37349

SEQ ID NO: 38443 - DNA, 1350 bp, Escherichia coli
atggtggatttaatggtgaatgagcaacggtcgggtacggcggggaaagatgtgcctgcggggtataagctgactgaggtgggggtgattcctgaggattgggtagtaatctctattgatgactgtacaaccaaagttggtagtggaaaaacaccaactggtggagcatctgtttatattgatagcggacgcccttttgtccgtagccaaaatgttgattggggaagattagatctcgccgatgtcgtacatattacagatgaaacccataacacattctctggttctgaaattcagcaagatgatgttttactcaacataacgggagcatctatcggccgatgcgctaaagctgattttagggttataggtggtaatgttaaccaacatgtttgcatcatcagaacagaggcaaaaaaactctccccatccttactggttgaattaatcaattcaaattatggacaaaaccagattgatagttatcaagccggaggaaacagagaaggactgaatttttctcaagttaaaaatcttaagtttgctattacaccaaactcctttgaacaaacggaaattgtcagaacattaaatgatattaatgcatttactctcgctctggaaaacttaattgctaaaaaacaggccataaaagccgctgctatgcaacaactacttaccggtaaaacccgtttgccacagtttgcgttgcgcaaagatggctctgctaagggatataaaaagagcgagttgggggagattcctgaagattggaattgtattaatcttggtgagctaggtaattgcattattgggttaacttacaaacctgaagatacatctgattatggtacattggtattacgctcatccaacattcaaaataatcacttagcttatgatgataacgtcttcgtcagcatagaaccacctgagcgcacaattgtgaaagaaggtgatatcttggtatgtgtaagaaatggcagtcgccaacttattggcaaatgcgcattaattgacaaaaatgcgcagggctcagcattcggtgcatttatgtcagtattccgaactgatatatatggatttacatttcaccaattccagtctgatattattcaaaagcaaatcgctgaagttatgggtgccactatcaatcagataactaacaaagatatgttgggctttaaaatcccattacctgaaaatacagaagaacaagccgccatcgccgccatcctctccgatatggacaaggaaatccagatcctgcaacagcgtctggacaaaacccgccagcttaagcaagggatgatgcaggaactgttaaccgggaaaatccgcttaatatag

SEQ ID NO: 38444 - DNA, 270 bp, Escherichia coli
atgaatattttgagaaagcttatgcagagtctgtgcggttgcggaaagcatgatgactgtgaaaacgggcagtcgcttacagcacaactgcgactgggaccggcagacattctggagtcagatgagaatggcattattccggagcaggacagggtaatcacacaggtggtgatactggatgcagataaaaagcagatacagtgtgtggtaagaccgctgcaaatcctgcgtgctgacgggaggtgggaaaatattggcgggatgaaatag

SEQ ID NO: 38445 - DNA, 333 bp, Escherichia coli
atggaatatacaccagacaaagggcttcatattcattttatcggctatctggatgggcaacgtcacaagaactcttatcagatatccaggcaactgggggatatctggaggcggatcacggaaggggagggttattttcacctgtgccgggctaaagacaaatacccggtgcgtatcgatcatgtaattcactatagtgataaatctgcggtagacgacttacgttacgcccttagctatctggcgaaacaggatcagaaagaacacggtattattctgggccgtagcaggcttcccgaaaaaagtaaccggggtcgaccacgacataactga

SEQ ID NO: 38446 - DNA, 1224 bp, Escherichia coli
atgacagtaaaaatttctggcgtgcttaaagatggcacaggaaaaccagtacagaactgcaccattgtgctgaaagccagacggaccagcagcacggtggtggtgaacacggtggcctctgaaaatccggatgaagccggacgttacagcatggatgttgagtacggtcagtacagcgtcattctgttggtggagggatttcctccgtcacatgccgggaccatcaccgtgtatgaagattctcaaccggggacgctgaatgattttctcggtgccatgtcggaggatgacgtccggccggaggcactgcgtcgttttgaactgatggtggaagaagcggcgcgtcacgctgaggaggcgaagaagaatgccggagaggcggagacgtccgcgaggaatgccggcatatcagccagtcaggcagaagagaacgctgcaaatgctgacacttcagcaggggatgcatcggagtcagcccggcaggcggcagaaagtgcagccgctgcaaagcagtcagaggaggcgtcctcgtcctcggcctctgcggccgctcaaaaagccagtgagtcatcacaaagtgcagcagatgctgagttgtcaaaaaagacggcagaaagtgcagccggtaatgcagccagggatgcaacgaccgcagcagaaaaagcccgggagtcagcagaaagcgcacagtcagcggaacaaagcaggatagcggcggaagaagccgtaaaccgaatccccaccgtggtggggcctcccgggccaaagggggaaccggggcccgcgggtcctcaggggccgaagggagataaaggagagcgtggagacaccggtccggcaggggcaaccggtgaaagggggccggcaggtgatgctggtccggcaggcccggcaggcccggcaggcccacagggaccgaaaggagaaacaggtgcggctggcccggtgggggcaaccggacctcaggggccgaagggcgacccgggggagacgcaaatacggttccgtctggggccgggaaacattattgagacaaacagccatggctggttcccggatacagatggcgcactcatcaccggactgacctttcttgaccccaaagatgccacacgggttcagggtttttttcagcatttgcaggtcaggtttggtgacgggccgtggcaggatgttaaggggctggatgaagtgggcagtgatacaggcagaacaggagaatga

SEQ ID NO: 38447 - DNA, 2454 bp, Escherichia coli
atgccggtatggaacggccagacgctgacgttcgttcaggacagtccgtcggatgtggtgtggccgtacaccaacagtgatgtggtggtggatgataacggcgtggggtttcgctacagcttcagcgccctgaaggaccgccacacggcggtggaggtgaattacaccgacccgcagaacggctggcagacctccacggaactggtggaagacccggaagccatactgcgctacgggcgcaacctgctgaagatggatgcgttcggctgcaccagtcgcggtcaggcccaccgtgccgggctgtgggtgataaagaccggactgctggaaacgcagacggtggatttcacgctcgggtcacaggggctgcgtcacacacccggtgacattattgaaatctgtgataacgactatgccgggaccatgaccggcggacgtatcctgtccatcgatgccgccagccgcaccctgacactggaccgtgaggtgaccctgccggagacaggtgccgccacggtgaacctgattaacggcagcggtaagccggtgagcgtggccatcactgcacaccccgcgccggaccggatacaggtcagcaccctgcctgatggtgtggagacatacggtgtatggggactctccctgccgtcactgcgtcgtcgcctgttccgctgtgtctccatccgggaaaacacggacggcacctttgccatcacggcggtgcagcacgtgccggaaaaagaagccatcgtggataacggggcgcactttgacggcgaccagagcggcacggtgaatggtgtcacgccgccagcggtgcagcacctgaccgccgaagtcaccgcagacagcggggaatatcaggtgctggcgcgctgggacacgccgaaggtggtgaagggcgtgagcttcctgcttcgcctgaccgtggcagcggatgacggcagtgagcggctggtcagcacggccaggacgacagaaaccacataccgcttcacgcaactggcgccggggaactacaggttgacagtccgggcggtaaatgcgtggggacagcagggcgatccggcatcggtatcgttccggattgccgcaccggcagcgccgtctcggattgagctgacaccgggctattttcagataaccgccacgccgcatcttgcggtttatgatccgacggtacagtttgagttctggttctcggaaaagcggattgctgatatcaggcaggttgaaaccacagcccgctatcttggcacggcgctgtactggatagctgccagtatcaatatcaaaccgggccatgattattacttttatatccgcagtgtgaacaccgttggcaaatcggcatttgtagaggctgtcggtcagccgagtgatgatgcatcaggctatctggattttttcaaaggcgagatagggaaaacccatctggctcaggagctgtggacgcagattgataacggtcagcttgcgcctgacctgactgaaatcaggacgtccataacggatgtcagcaatgaaataacacagaccgtcaataagaaactggaagaccagagtgcagcgatccagcagatacagaaggttcaggttgatacaaataataacctgaacagcatgtgggcagtgaagctgcagcagatgcaggacggacgcctttatattgcgggtatcggtgccggtattgagaacacccccgacggcatgcagagtcaggtgctgctggcagcagacaggattgcgatgattaatcctgcgaatggcaacacaaagccgatgtttgttggtcagggcgatcagatattcatgaatgaagtgttcctgaaatatctgacggctcccaccattaccagcggcggtaatcctccggcattttccctgacaccagacgggcgactgacggcgaaaaatgcggatatcagtggcagtgtgaatgcgaactcaggagcgctcaacaatgtcacgattaaccagaactgtacgattaagggcatgctggaggcgacccaggtcagaggggatttcgttaaagctgtatcaaaagccttcccgaaaaaagtcggtacgtggggtaacacggaaacaccaaacggtacggttacagtcaccatcagcgatgatcataactttgaccgccagattattattccgcccattatttttaacggtatagcgtatgacgatccggggagcggaaataacccaggaggcacgcgatacacggggtatggttttgaagttcgcaaaaacggcgtattaatcgcatccagagaaactaaaggggccattcccggtagttacagtgcagttattgatatgcctagtggtggtggtagcgtcactctggagtttaagattttccagaaaggcaatcagggggcaggcaatatcaccgactgtacggtgattgtgaccaaaaaagctgcttccggcatcagtattcgttga

SEQ ID NO: 38448 - DNA, 1203 bp, Escherichia coli
gtggcctctgaaaatccggatgaagccggtcgttacagcatggacgttgagtacggtcagtacagcgttattctgttggtggaagggttcccgccgtcacatgccgggaccatcaccgtgtatgaagattctcaacccggtacgctgaatgattttctcggtgccatgtcggaggatgacgtccggccggaggcactgcgtcgttttgaactgatggtggaagaagcggcgcgtcacgctgaggaggcgaagaagaatgccggagaggcggagacgtccgcgaggaatgccggcatatcagccagtcaggcagaagagagcgcggcaaatgctgacacttcagcaggggatgcatcggagtcagcccggcaggcggcagaaagtgcagccgctgcaaagcagtcagaggaggcgtcctcgtcctcggcttctgcggccgctcaaaaagccagtgagtcatcacaaagtgcagcagaagctgaattgtcaagaaagacggcagaaagtgcagccggtaatgcagccagggatgcaacgaccgcaacagaaaaagcccgggagtcagcagaaagcgcacagtcagcggaacaaagcaggatagcggcggaagaggccgtaaaccgaatccccacggtggtggggcctcccgggccaaagggggaaccgggtcccgcgggtcctcaggggccgaagggagataaaggagagcgtggagacaccggcccggcaggggcaaccggcgaacggggaccggcaggtgatgctggtccggcaggcccgcaggggccgaaaggtgacaggggagagcggggagagaccggtctgacgggaaatgcaggtccacagggtccaaagggagataccggtgcggcaggcccggcaggcccacagggaccgaaaggagaaacaggtgcggctggcccggtgggggcaaccggacctcagggaccgaagggcgacccgggggagacacaaatccgttttcgtctggggccggcgagcattattgagacaaacagcaatggctggttcccggatacagatggcgcactcatcaccggactgacctttcttgaccccaaagatgccacacgggttcagggtttttttcagcatttgcaggtcaggtttggtgacgggccgtggcaggatgttaaggggctggatgaagtgggcagtgatacaggcagaacaggagaatga

SEQ ID NO: 38449 - DNA, 330 bp, Escherichia coli
atgaaaacctttcgctggaaagtgaagccggatatggaggtgaactcgcagccatcggtgcgtgaagtgcgttttggtgacgggtactcacagcgtatggcggcagggctgaatgctgacctgaaaacataccgtgtgacgctttccgtgacccgggaggaggcccgacatctggaggcattcctggcagagcacggaggctggaaggcatttttgtggaagccaccctatgcataccggcagataaaggtgacctgtgccgggtggtctgcgcgggtcgggatgttgcgcgttgagttcagcgcggagtttaagcaggtggtgaactga

SEQ ID NO: 38450 - DNA, 168 bp, Escherichia coli; identical to SEQ ID NO: 29866

SEQ ID NO: 38451 - DNA, 375 bp, Escherichia coli; identical to SEQ ID NO: 24053

SEQ ID NO: 38452 - DNA, 315 bp, Escherichia coli; identical to SEQ ID NO: 24010

SEQ ID NO: 38453 - DNA, 315 bp, Escherichia coli; identical to SEQ ID NO: 24016

SEQ ID NO: 38454 - DNA, 732 bp, Escherichia coli; identical to SEQ ID NO: 37765

SEQ ID NO: 38455 - DNA, 423 bp, Escherichia coli
atggaccgctgccgggcgggtgaaacgtggcctccggacctggctgagtttgtggcgttgatttcggagagcggggcaaatccatttggcctgacggtggatgccgtgatggaggagtaccgtcgctggaggaatgaatcctggcggtacgacgggagtgataaatacccgtggccacagccggtgctgtaccacatttgcctcgagatgcgtgacagagggattgagcggcagatgacggaaggtgagttaaaacgacttgcagaacggcaactgacgaaatgggcaaagcaagttggtaacgggatgagtattcccccgatccggagacaactcgcatcgccgaagtgcccgcaagggccaacgccaattgaattactgaaacaggaatacgagcgccggaaggcggctggttttgtttga

SEQ ID NO: 38456 - DNA, 279 bp, Escherichia coli
atgagtacagaaatgaaaacggggctggtgctgtccggtggcggggcggtgggcgcttatcaggcgggagtggttaaggcactggcagagtgtggtacacagatcagcatggtttcagggaccagcattggcgcattcaatggtgccattatcgcggcctctcccgatctgtcagaagctgccgtacgcctggaggcgctctgggagcatctggggaataatcaggtgctgtcggtaaacagattggtttacttttcattgctgaaaaaattgttctag

SEQ ID NO: 38457 - DNA, 489 bp, Escherichia coli
atggcgaagcccttctgcgcccacgctgaagtccacggtctgcgtttccagcagttccgttttaatcagccacagcccggcacggtgtgcctgcccccgactggtacagccaaaggcatccatcttcgtgacgttacgaccgtaacgggcaatggcctgcgtgtcctccacaagctctgtcgccgtctcccagccgttgtccgggtcagtccagttcacctcaacggcattatggcggtctttcagggcgctaaagctgtagcggaacggcgcgccatcatccggcatcaccacattactgcggttataggtccacaccttatccgacggccggtcctgcacgaacgtcagcgtctgcccgttccataccggcatacagcgcatcgccgagcagaaatcactgagcacatcccacgccttgcgctgcgtggtcaggtacgcattacaggtgatgcgcggctccgtgccgccaaagccgtccggtactga

SEQ ID NO: 38458 - DNA, 213 bp, Escherichia coli; identical to SEQ ID NO: 29883

SEQ ID NO: 38459 - DNA, 330 bp, Escherichia coli; identical to SEQ ID NO: 37221

SEQ ID NO: 38460 - DNA, 270 bp, Escherichia coli
atgaacatattaaaaaaaattatgcagcgtctgtgcggttgcggaaagcatgatgactgtgaacacgggcagtcgcttacagtacaactgcgactggggccggcagacatcctggagtcagatgagaatggcattattccggagcaggacggggtaatcacgcaggtggtgatactggatgcggataaaaagcagatacagtgcatggtaagaccgctgcaaattctacgtgctgacgggaggtgggaaaatattggcggaatgaaatag

SEQ ID NO: 38461 - DNA, 2169 bp, Escherichia coli; identical to SEQ ID NO: 23833

SEQ ID NO: 38462 - DNA, 645 bp, Escherichia coli
atgtcggacctaatggctgggctgatgatggtttttatgttcatatctattgcttatatgcactacgtacgtattgaaaaagaaaaaattaaagaagttgccgtagcctacgagaatgctcagttacagctttataatgctctggatattgagtttgcaaaggatttacaagactgggatgcagagatcgataaacagactctggaggttcgatttaaatcaccggatgttttatttggcttaggaagcacagagctaaaaccaaagtttaaactcattcttgacgacttctttcctcgctacctaaaagttctagataattatcaggaacatattactgaagtccgcattgaaggtcacacaagtactgactggacaggaacaacgaatcctgatattgcttattttaataatatggcactatcgcaaggtcgtacacgtgcagtattacaatacgtttatgacataaaaaatatcgcgacacaccaacaatgggttaaaagtaaatttgccgcagtaggttattcatctgcacatcccattcttgataaaaccggcaaggaggatcctaatcgctctcgtcgtgtcaccttcaaagttgtaacaaatgccgagttgcagattagaaagattattcaggagtaa

SEQ ID NO: 38463 - DNA, 342 bp, Escherichia coli
gtggctgagataaaaacgctgcatctggtcccgcgtgaagggatgcaggtgagtgagaagccgtcggtggtgagggtgcggtttggtgacggttatgaacagcgccgccccacagggctgaatcctcaactgaagacgtttcaggcggtgttccgggtgacggatgagtcaacccggcgctggctggatgaatttttatcctggcatggtggttaccgtgcctttttgtggcgaccgccgaaacataaccggacggtgagggttgtgtgccgggagtggagcgtcacggataacgcccggtacagtgatttcagttgtacgattgagcaggtggtgaactga

SEQ ID NO: 38464 - DNA, 264 bp, Escherichia coli
atgaaaacattatccgacacacatgtacgggaggtatctcgctgcccgtctcccgtcaccatctggcagacactgctcatccgactgctggaccagcattatggcctcacactgaatgacacaccgtttgccgatgaacgtgtgattgagcagcatattgaggcaggcatttcactgtgtgatgcggtgaactttctcgtggaaaaatacgcgctggtgctaccgaccagccgggattcagcgcctgtacccgctctcagttaa

SEQ ID NO: 38465 - DNA, 306 bp, Escherichia coli
atggaccgtctgtgcgaagactactgcggtggtatctggaatctgtacaccctgaacaacggcggggcatttatggcacccgaaccggatgacgatgatgacgaaacatgggtactgttcaatgccatgaacggcaaccgcgctgaaatgagcccggaagccgccggtattgctgcctgtctgatgacgtacagtcatcatgcctgtcgtacggagtgttatgccatgacggtccactattaccggctgcgggattacgccctgcagcatccggaatgcagcgccattatgcgcatcattgactga

SEQ ID NO: 38466 - DNA, 351 bp, Escherichia coli; identical to SEQ ID NO: 23586

SEQ ID NO: 38467 - DNA, 315 bp, Escherichia coli; identical to SEQ ID NO: 24010

SEQ ID NO: 38468 - DNA, 648 bp, Escherichia coli
ttgttgatcgtcgccaaccagtacggccttaatccgtggacgaaagaaatttacgccttccctgataagcagaacggcatcgttccggtggtgggcgttgatggctggtcccgcatcatcaatgaaaaccagcagtttgatggcatggactttgagcaggacaatgaatcctgtacatgccggatttaccgcaaagaccgtaatcatccgatctgcgttaccgaatggatggatgaatgccgccgcgaaccattcaaaacccgcgaaggcagagaaatcaccggcccgtggcagtcgcatcccaaacggatgttacggcataaagctatgattcagtgtgcccgtctggccttcggatttgctggtatctatgacaaggatgaagccgagcgcattgtcgaaaatactgcatacactgcagaacgccagccggaacgcgacatcactccggttaacgatgaaaccatgcaggagattaacactctgctaatcgccctggataaaacatgggatgacgacttattgccgctctgttcccagatatttcgccgcgacattcgcgcatcgtcagaactgacacaggccgaagcagtgaaagttcttggattcctgaaacagaaagcctctgagcagaaggtggctgcatga

SEQ ID NO: 38469 - DNA, 429 bp, Escherichia coli; identical to SEQ ID NO: 37288

SEQ ID NO: 38470 - DNA, 570 bp, Escherichia coli; identical to SEQ ID NO: 37228

SEQ ID NO: 38471 - DNA, 315 bp, Escherichia coli
atggcggaggggaaggttttcacgcaggttcagtgggagcagaaatttgcccgtcacgtgcagcacgtcagggcacaggtaaaaccagtcagcaagggggtaagccatgcagcaccaggtggcaccgcatcacgggcagttcaggaaattcgggcagcacgtgaacagtgggaacgtgaaaacggatttatcagcaacggaaacggcctggaagctgtgggaacttatgggggaggtgtattcgaaccgctggacccagaagaacggggctgcgccgtcgaagctctggattgctcagattggcgcgatgactga

SEQ ID NO: 38472 - DNA, 156 bp, Escherichia coli
atgaagcagcaaaaggcgatgttaatcgccctgatcgtcatctgtttaaccgtcatagtgacggcactggtaacgaggaaagacctctgcgaggtgcgaatccgaaccggtcagacggaggtcgctgtcttcgtagactacgaatctgagaagtaa

SEQ ID NO: 38473 - DNA, 354 bp, Escherichia coli
atgaatgaacatcacactgtggcagcaacagatgattcaggtcttcaggtcagtggtgacaattctgtcacagtgctggcagaagtgcgttgcagtcgttcggcgtttcgtcgtgcggggttcctgttcacgcgtggacgtcagcaggttgaggtctccccggagcagcttgcccgactggaggcggagccatgcctcactgtgcgaatactacagacgcctgctgatgatgcggggagcgtggcgggtgtggttcatgcagtggccggtacagatttagccgaagccggacaggatactccccggaaaaagaccggtaacaaagcgaaacaggcgaaaaaggcccgcgcatga

SEQ ID NO: 38474 - DNA, 2049 bp, Escherichia coli
atgacgtccaaatgggttcaactatcatcaatgcccggaaactttactgttaaagtttccggtggtacagcggcatttcttgaggctccctttcctccggccgaaacaaaaggaggaatgacatttgctgactgtctcatcagttttaatacacgggattgcctgtgggtaaggccagtatccggtgatccgagtgtggaaattaccggagcgggtattggtgcggtcattccgttaagtgctgatgttgccggtactgctgaaccgtcagactgggataatgctgaaacacatacccgtccgtcaggaaatgaaactgcttccagctccccttcctggtattacgtgattgttatagccggccagtccaatgcttcatcttatggtgaagggttgccccttccggattcttatgatcgtcctgatccacgtattatgcagctggcacgcaggaatacacaaacccccggaggtattccctgcaaatacaatgaaatcattccagcagatcactgccttcatgatgttcagaatatgagtctgctgaaccatccaaaagcagacctgaaaaaagggcagtatggttgtgtggggcagggacttcatattgcgaaaaaagtattaccggtgattcctgctgatgccgggattttactggttccctgtgcccgtggcggctctgcttttacaaccggcgcagttggctcattcgatccggcaagtggtgcagccgaggcgtcactacgctggggagtggataccccactgtatcaggatcttgtcagtcgaactaaagcggcacttgaggcgaatccaaagaatgtgctgttatctgtcgtatggattcagggggaaggagaccttaaagcgaccccggcccagcatggtgcccagtttactgcgatggtgaaaaaattccgtgcggatcttggtgctttctccggtcagtgtattggtggttcatcagacagtgtgccgtggttatgtggtgacacaacctatgactggaaagagaagaacccggcggcatatgaaaccatttatagcggatataaaaaccgggcttccgagaacattcactttgttccactgatgcacgatgagttcggtaataaaaccgcgaccaacctgccggagcacgacccggatatcgcttctgccgggtattatggtgcggaatcacggggagatggcaactggacaacagcatccagggcaacccattttagctcctgggcgcgccgttttctggtctcagatcgttttgcatcagcaattcttaaatatgcaggtctgacctctgcatttattgccggtgtggcccctgatggtgaagccctgcctcagcccgcgccgggtgggaaaccggaagcgccgacaggtagtcagccaggaggcagtgagtccccccatccgacatccccgtcactccgtacgctgctttcacttaaagcatcagcaggagaagccccggctcagggctggaaaattacagatggtacaatccagctgacggacgaaggtaaagcgttgaccgtatccaaacaaagcggaaaaacctggacgcttacccatggaactgatgcagccggtgaacttctgaagcatggtggtcagttgacctgtaaattccgtctgtcaggtgaagtaaaagaaggccagtttgctctgggtatttacctccacaccgatacggtcccggaaggtgtaaccatgagtggtacaggcacaccgttcctgatggcgtattatctccagacaacaggcggccagttaaatctgatgcaccataaaacaggggggaatacgaaactgggatcatttggagcctacaataaccagtggcatacacttgtcctgaagtttacggcgggaagtgcccaggtaacgcctgtgctggatggcactccgggccaggcattccagatggtgaaagatgcactttcccctgccaaagatacgctgacactgacagatgtcaccaaaggggcaacttatggcgtgtcttttgagagcgttgtccttgaggttaatacccctgcggcataa

SEQ ID NO: 38475 - DNA, 180 bp, Escherichia coli
atgacatatataaacgtctgcctgctgtatttctgcacggtggtttgttgtctgttgcttgtcagcggtggttataaaattattcgcaattattttcgaaataaaattgatgcagctgccgaggaaaagataaaaagcggtgctgtaatgccgcagccgaaagactccggtcagatttaa

SEQ ID NO: 38476 - DNA, 996 bp, Escherichia coli
atgaacgttgtgtcagagtttataaccactatcaatacagttgttcaaagtggtgcagccagtaatgcagctaaaattgccaaagcaatatctcccgtttttgttgctgctgtacttttatacattgtgtatgttgcttatgagattacatattcacaaagagacattattcttagtgaagtaacaaaactaatcgcatcattaagtttagtaggggcattcacatatactgcaccatactacagccagtatgtaataccatttgtaatgcacgcagggtctgatctatcgaatgcattaacaggtactggagatgtagcaaccagcgttgatgggctatgggaaaagttaagcaccataatggataattttatttcttcgaaggtacaggaacttagcatgaccgacattggggggtatataggcgcatatgcaatatggggaataggatatgcaggaggtgcaatattaattttatatacaactatttttttatgtatatcaactttcatggttggtttactgcttgcgactggcattatatttatatgcttttcttttttcccaacaaccagaagcatgttcacttcatggtgtggtagttgtttgaactacatattattgaacgttttttatactatatcttttggttttgtggttactttaattgaaaaaaatatggttaaagatggtaatgtgaccattatgatggttgtcactctcttattagttatattaatttcagtatttctaatagaacaaatcggaactctttgttctacccttacaggaggggtcggaataaatggcctcacatcagcagcaaatggagctggagggaaattagcaggaagtttaggcagagtaaccggaaccagagcatttatgaatggtttcaaaagcaatatgagcaatcctttttttaatgctggtcagtcactggcatcaaaaatgcaacaatcgtctacccgtggcagtaaaataataggaggataa

SEQ ID NO: 38477 - DNA, 387 bp, Escherichia coli
atgaaacgtgcgggtctcaacattcctgatggctatgaagtcactggtgattttgaatttaacggcgggtttgacgctatgcgccaactgctatcacatccgctgcgtcctcaggccgtctttaccggaaatgacgctatggctgttggcgtttaccaggcgttatatcaggcagagttacaggttccgcaggatatcgcggtgattggctatgacgatatcgaactggcaagctttatgacgccaccattaaccacgatccatcaaccaaaagatgaactgggggagctggcgattgatgtactcatccatcggataacccagccgacccttcagcaacaacgattacaacttactccgattctgatggaacgtggttcggcttag

SEQ ID NO: 38478 - DNA, 900 bp, Escherichia coli
atgacggaacgggaactgtccattattcgtgcactgggcgaagaattctccacggtgctggcggatttacagcgcacatttgaggggaagatggccgcgcaggcacaagcgtttgaagagaaactggcttccctgtcggcggtattacagaagcatgtgacggtggatgaggtacatccggttctgcaggcgatggtggatgacgctgtggggaccattccggtaccgcgtgacggtcgtgattatgatccggaagtactgaagcaggcggtgaatgatgcggttgcgaatattccggtaccggcggacggcaaaagtatcacccccgatgatgtgcgtccgatgcttgagcagatggtgaaagaggcggtaagccatattcctgttccgcgtgatggtcgtgactatgatcccgatgttctgcagaaggctgttctggatgcggtgagagccctgccggctccgcaggacgggcgtgatgccacggcactggaaatactccccgccattgacgatcaaaaatcctttccccggggcacgtatgccacacaccagggcggactctggcgggcgtatgaaaaaacgcacgggatgcggggatgggaatgcctggttgacggggtggccgatattgacgtcagcatgaccggcgaacggtcgttcactgtggtggtccggcagagcagtggccagcgtacggaaaaaacattttccctgccggtgatgctctaccgcggtgtgttcagagccggtgaaacctaccaccccggcgatacggtgacgtgggggggctcgctgtggcactgcaacagtatgaccggtgataaacccggagaagctcattcatcaggctggaccctggctgccaaacgtggacgggatgcaggaggcggaaaatga

SEQ ID NO: 38479 - DNA, 216 bp, Escherichia coli
gtgcggaaaaacggtgctgaaatttataaccgtaccgcgctggataatacgctgatttacagtggcgttattgatatgcctgccggtcacggtcacatgacgctggagttttcggtgtcagcatggctggtgaataactggtatcccacagcaagtatcagcgatctgctggttgtggtgatgaaaaaatccacagcaggtatcagtatcagctga

SEQ ID NO: 38480 - DNA, 600 bp, Escherichia coli
atgcgtaaactttatgccgccattttgtccgcagccatctgtctggccgtatccggcgcgcctgcatgggcgtctgagcagcaggccacgctgagcgcggggtatcttcatgcccggacgagcgctcccggtagcgataatcttaacgggattaacgtgaaataccgttatgaatttacggacacgctggggctggtgacgtcattcagctatgcaggagacaagaatcgccagcttacccgttacagcgatacccgctggcatgaagattccgttcgtaaccgctggttcagcgtaatggcggggccgtctgtgcgcgtgaatgaatggttcagcgcgtatgcgatggcgggtgtggcttacagccgtgtgtcgactttctccggggattatcttcgcgtaactgacaacaaggggaaaacgcacgatgtgctgaccggaagtgatgacggtcgccacagcaacacgtctctggcgtggggggctggcgtgcagtttaacccgaccgaatccgtggccattgatattgcttatgaaggctccggcagtggcgactggcgcactgacggtttcatcgtgggtgtcggttataagttctga

SEQ ID NO: 38481 - DNA, 270 bp, Escherichia coli; identical to SEQ ID NO: 23881

SEQ ID NO: 38482 - DNA, 168 bp, Escherichia coli; identical to SEQ ID NO: 29866

SEQ ID NO: 38483 - DNA, 651 bp, Escherichia coli
atggctgtaatgatgatgattattccactaccaacagttgtggtggatatcattatcgcgattaatatttcgacagctttacttttattaatgctctcaatctatataaaaaatcctcttgaactaacttctttccccacaatcctgttgattacgacgttgatgcgcctgtcgctcagtgttagtacaaccagacttattctgctgcatcacgatgcgggtgacattatttactccttcggtaactttgttgttggcggtaatattgttgttggcctggttatttttactattatcaccattgttcaatttatggttattacaaaaggggccgagcgtgttgctgaagtgagtgctcgtttttcccttgatggtatgccaggaaagcaaatgagtattgatggtgatatgcgcgcaggcgttattgacccgcttgaggcaaaagttcttcgctcccgagtgcaaaaggaaagccagttttatggttcaatggacggggcgatgaagtttgtaaaaggggacgctattgctggtatcattattgttttagttaacctttttggtggcgtgctcattggtatgtggcaatttgacatgccatttagtgcggcactgattaaaaaagggcgactattaacagaaacctgttga

SEQ ID NO: 38484 - DNA, 342 bp, Escherichia coli; identical to SEQ ID NO: 37292

SEQ ID NO: 38485 - DNA, 342 bp, Escherichia coli; identical to SEQ ID NO: 29860

SEQ ID NO: 38486 - DNA, 183 bp, Escherichia coli
atgaagcatcctcacgataatatccgggtaggtgcgatcactttcgtctactccgttacaaagcgaggctgggtatttcccggcctttctgttatcagaaatcccctgaaagcacagcggctggctgaagagataaataataaacgaggggctgtatgcacaaagcatctcctgttgaattaa

SEQ ID NO: 38487 - DNA, 279 bp, Escherichia coli; identical to SEQ ID NO: 37604

SEQ ID NO: 38488 - DNA, 231 bp, Escherichia coli
atgttgcacctgttcagcggtaaaccaatccccgacaaccgggaaaacatcactattcgtctggatgatcacattcagtctgttcagggtaaagagagctatgaagatgagatgttcagcatcagatactttaggaagggctccgcgcatatcacgttcagaaaaccggaactggttgaccgactgaatgatattattgcagaacactatcctgacatgctgtcagtatag

SEQ ID NO: 38489 - DNA, 558 bp, Escherichia coli
atgcttgaacagatggtgaaggaggcggtaagccatattcctgttccgcgtgatggtcgtgactacgatccggatgttctgcagaaggcggttctggaggcggtgagtgccctgccggctccgcaggacgggcgtgatgccacggcactggaaatactccccgccattgacgatcaaaaatcctttccccggggcacgtatgccacacaccagggcggactctggcgggcgtatgaaaaaacgcacgggatgcggggatgggaatgcctggttgacggggtggcggatattgacgtcagcatgacgggtgaacggtcgttctctgtggtggtccggcagagcagtggccagcgtacggaaaaaacattttccctgccggtgatgctctaccgcggtgtgttcagagccggtgaaacctaccaccccggcgatacggtgacgtgggggggctcgctgtggcactgcaacagtatgaccgaagataaacccggagaagctcattcatcaggctggactctggctgcaaaacgtgggcgggatgcaggaggtggaaagtga

SEQ ID NO: 38490 - DNA, 327 bp, Escherichia coli
gtgacagcattactgacactggaagaaatcaaggcacatctgcgtgttgaccatgacgcggatgatgagatgctgatggacaaggttcgtcaggctaccgccgtgctgctggcctacatccagggcagccgggataaagtgattagtgaggacggtgagctgatccctggtgaggcattaacccggatgaagggggctgccatgcgactgaccgggatgctgtaccggaatccggatcttgctgagcgggaagacctcgtgcagggggaactgccgttttctgtttccgtgctgatttacgatttgcgttgtccgacggtgttatga

SEQ ID NO: 38491 - DNA, 1059 bp, Escherichia coli
atgcttaatactgtaaaaatatccagttgtgagttaatcaacgccgactgcctggaatttatgcggtcgttacccgaaaattctgttgacctgatagtcacggacccgccgtacttcaaagtgaaacccgagggctgggataaccagtgggcgggtgatgaagattacctgaagtggctggaccagtgtcttgcgcagttctggcgggtgctgaaacctgccggaagtctttacctgttctgtggccatcgtctggcatctgacaccgaaatcatgatgcgtgagcggtttaacgtgctgaaccatatcatctgggcaaagccgtccggacgctggaacgggtgcaacaaggaaagcctgcgggcgtatttccccgccacagagcgcattctgttcgcagagcattatcaggggccgtatcgtccgaaagatgccgggtatgaggcgaagggtaggacactgaaacagcatgtgatggccccgctgattgcttactttcgtgatgcgcgcgctgtcctggggataacggcaaaacagattgcagatgccacaggaaagaaaaacatggtgtcgcactggttcagtgccggtcagtggcagctgccgaacgaaagcgattatctgaaattacaggcactgtttgcccgggtggcagaagagaagcatcagcggggtgaactggaaaagccccaccaccagctggtggatacgtatgcctctctgaaccgacagtatgcggagctgcagagtgaatataagcatctgcggcggtatttcggtgtgacggtgcaggtgccgtacaccgatgtgtggacgtataaaccggtgcagtactatccagggaaacatccgtgcgaaaaaccggcagaaatgttgcagcagataatcagcgcaagcagtcgtccgggagacctggttgcagatttcttcatggggtcggggtcgacagtgaaagcagcgatggcgctgggacgtcgtgcaactggcgttgaactggagactgaacgttttgagcagacggtgcgggaagtacaggatttaatcattcgtaacggatga

SEQ ID NO: 38492 - DNA, 270 bp, Escherichia coli; identical to SEQ ID NO: 24012

SEQ ID NO: 38493 - DNA, 240 bp, Escherichia coli
atgatactgggcggtgtggcccagatgctggcaccgaaggcaaaaacaccggattaccgcgcaacggataacggtaaacagaacacgtatttttcgtcactggataacatgattgcccaggggaacccgatgccggtgccttatggtgaaatgctggttggttcacgacggatatcccaggacatcagcacccgtgatgagggcggagacgggaaagtggtggttatcgggcggggatga

SEQ ID NO: 38494 - DNA, 315 bp, Escherichia coli; identical to SEQ ID NO: 24011

SEQ ID NO: 38495 - DNA, 435 bp, Escherichia coli; identical to SEQ ID NO: 38222

SEQ ID NO: 38496 - DNA, 435 bp, Escherichia coli; identical to SEQ ID NO: 38224

SEQ ID NO: 38497 - DNA, 762 bp, Escherichia coli
  misc_feature (731)..(758): n is a, c, g, or t
atgaatcctaaacctaggaatgccagaatatctaaagaattgcttttattagctgttgatagacagattgagtgggcgaaaaaacattttataacaaaagatgtattggaaaatgttgtgtcaaaatgtgatttatcatctatctttaatgttaataaagtgcttcagaatactattcttgagtttgtccatgaaattaataatatatcatctgctcgctggatgtcaaaatcagaaaagaataataaacaaaaagaggcaatagaaaagttcaaaaaagaagtatcccatatgaatggcgggcagcagtttatttgggggtttgataaggttattcaagaaggcttaagtggattgattgagttaagtatcgatattaatgatagtacaaatcatcgtgataagtcttctctttctcctgatgggagagctgtgttacattttttaggtacaatttggaatatggcgatgggagctgtacctggttataatgcattgtctggtgtaagtagcattttacatagtgctatagtaaaagaatctagcaatatctgtgattatattcagggggctgtacgtattggaatggactttgttccaggcactcgctctgacttacatagccgttcgctgcagataaaatatgaggctttgaagcatatagaaaaaaacattaatgataatatctgtctcttatacacatctgacgctgccgacgatctactctgtgnnnnnnnnnnnnnnnnnnnnnnnnnnnnataa

SEQ ID NO: 38498 - DNA, 246 bp, Escherichia coli; identical to SEQ ID NO: 38246

SEQ ID NO: 38499 - DNA, 240 bp, Escherichia coli
  misc_feature (184)..(193): n is a, c, g, or t
atgtgcttacttgcaccagaaaatccttatccgatatatgcactaccaccgctggtgagaaatgcaataattgaaactcaaaaaaatacacaggcacctttggctatggtggcaacatccgcattaacagcgatctcaattgcctgtcagaatcagattgacgtgtgcagacctggaaatttannnnnnnnnnggctgattccggtgaaaggaaaacgaccgtggataaagtgtttatga

SEQ ID NO: 38500 - DNA, 459 bp, Escherichia coli
atgagcaaaattaaagcaataaggagggggctgcctgatgctccacttgaagacatcaccacaaaagaaattgcggcaatgctcaatggatacatagacgagggcaaggcggcgtcagccaagttaatcagatcaacactgagcgatgcattccgagaggcaatagctgaaggccatataacaacaaacccggtcgctgccactcgcgcagcaaaatcagaggtaaggagatcaagacttacggctgacgaatacctgaaaatttatcaagcagcagaatcatcaccatgttggctcagacttgcaatggaactggctgttgttaccgggcagcgagttggtgatttatgcgaaatgaagtggtctgatatcgtagatggatatctttatgtcgaacaaagcaaaacaggcgtaaaaattgccatccctatgaaccgccccggaaatcctggagactaa

SEQ ID NO: 38501 - DNA, 621 bp, Escherichia coli
atgaaagccgcatttacggcgacgactattgcagagtacttccgcgatcaaggtaaaaatgtattattaatgatggattctgtaactcgttatgcccgagccgcacgtgatgttgggcttgcatcgggagaacctgatgtaagggggggattccctccgagtgttttttcttcgttacccaaattattagagcgagcggggcctgcgccaaaaggttcaataaccgcgatttatacggtgttgttagaaagcgataatgttaatgatcctattggcgatgaagtccgctctattcttgatgggcacatcgtacttacccgagaacttgcagaggaaaaccatttccctgcaattgatattggtttaagtgccagtcgtgttatgcataacgttgttacatcggagcatttgcgtgcggcggcagaatgcaaaaagcttattgcaacttataaaaatgttgagctgcttattcgtattggtgagtacacgatggggcaagatcctgaagcagataaggcaataaaaaataggaaattaattcagaactttatacaacaaagcaccaaagatatcagtagttacgaaaaaacgattgaaagcctattcaaagtggttgcctga

SEQ ID NO: 38502 - DNA, 714 bp, Escherichia coli
  misc_feature (661)..(670): n is a, c, g, or t
ttggaaaaatacccacgtattcagaaagtgctcaatagcactgtgccggcattatcattaaattcgtctaccagatatgaaggcaagattatcaatatcggcgggacgattattaaggcgcgtttaccaaaagcgcgtattggcgccttttataagatagaacccagtcaacgtttagccgaggtgatcgctattgatgaagatgaggttttcttgttgccttttgagcatgtttccggcatgtactgtggtcagtggttaagttatcagggagatgagttcaagattcgtgttggagacgcactacttgggcggcttgttgatggcataggcagaccaatggagagtaatattgctgccccctatcttccgtttgaacgcagcttgtatgctgaaccaccagatcctttattaaggcaggttattgatcagccatttatacttggcgtcagggcaattgatgggctactaacttgcggtattgggcagcgtatcggtatttttgctggttcaggcgttggtaaaagtacgcttttggggatgatttgtaatggcgcatccgcagatattattgtccttgctcttatcggcgaacgtggtcgcgaagtaaatgaattcctcgcgctcttacctcaatccacgctttctaaatgtgtactgnnnnnnnnnnactggtcgtcacaacgtcagaccgccccgcgctggaaaggatga

SEQ ID NO: 38503 - DNA, 132 bp, Escherichia coli; identical to SEQ ID NO: 24006

SEQ ID NO: 38504 - DNA, 315 bp, Escherichia coli; identical to SEQ ID NO: 24010

SEQ ID NO: 38505 - DNA, 255 bp, Escherichia coli
  misc_feature (15)..(24): n is a, c, g, or t
atgctcaacaccctnnnnnnnnnnactcaggaaggatgcagttatttctatgataataaatactttaattccgtagacatgttatcaccgattattgaaaaattgcagaagatggaaattaactgcaaaatacatccttacatttacattgcaacaaatgatagcatgagcggattttatgctttcacctgtagtcagatgttaaactctgaatcaccaaataattgcaactctctctattataaagcggagtaa

SEQ ID NO: 38506 - DNA, 201 bp, Escherichia coli; identical to SEQ ID NO: 23527

SEQ ID NO: 38507 - DNA, 1272 bp, Escherichia coli; identical to SEQ ID NO: 37369

SEQ ID NO: 38508 - DNA, 429 bp, Escherichia coli; identical to SEQ ID NO: 37288

SEQ ID NO: 38509 - DNA, 399 bp, Escherichia coli; identical to SEQ ID NO: 38324

SEQ ID NO: 38510 - DNA, 507 bp, Escherichia coli
gtggcgatcgaagcctgccgtcagttgaaagagcagggcgtggcatttcgctatcgcatcctcggcattggcccgtgggaacgacgcctgcgcaccctcatcgaacaatatcaactggaagatgtggtggagatgccgggctttaaaccgagccatgaagtgaaagcgatgctagacgacgcggatgtcttcctgttgccatcggttacaggtgcggatggcgatatggaaggtattccggtggcgctgatggaagcgatggcggtcggcattccggtggtttctactctgcatagcggaatacctgaactggtggaggccgataaatccggctggctggtgcctgagaacgatgctcgcgcactggcgcaacgactggcggcgtttagccaactggacagcgacgaactggctcctgtcgtcaaacgtgcgcgcgaaaaagtcgaacacgattttaaccagcaggtgatcaatcgagaactcgccagcttgctgcaggctttatag

SEQ ID NO: 38511 - DNA, 228 bp, Escherichia coli
atgtgtttcggtgctggcacaacggaatatatcaacatcctgctaccgttcggcactgctgccattggcgcagttgccggtgtgttagccgcttatcttaaaaaagataaaaagttgcggcttgttctcgatgatggaaagttgaaagaaattgatgcttccaattacaagccagatgagcttattgcagccgtacaaaaaatcagagaactcgacatactcgattag

SEQ ID NO: 38512 - DNA, 237 bp, Escherichia coli
atggaactgtttgtcatttcttcaaaactccctttgcgtaaacgcattaaactggtcatcccactttttaagggcgttatgaccatcctctgtggttacaactggtcgcttaaattcaggcctgccgggaaagcgcaggccgacgggttaagctttgacgtctaccaggacgacgttacatcgcaagatgcgcttatcgtcctggtcgatagcaaacggactatgctgcctgattag

SEQ ID NO: 38513 - DNA, 294 bp, Escherichia coli
atgaaagtttcacaaaagatacgcgcgataaggaaagccgaagggctaacgcaagccaagttttgcgagttagtaggaatagcgttgggaacacttaagaacgttgaaggagaccacagagagccagggttacaagtagtaatgcaggttgttaataccccacaatttgagaaatacacactctggttaatgaccgataagacagcaccagaagccgggcagatttccccggtcgtcgcacactctgggccagaagaaacaacctcgtcacactcagaccgcaaaactggctaa

SEQ ID NO: 38514 - DNA, 333 bp, Escherichia coli
atgaaagaattaattaaggttgttttatctaatgatgttcatgaagtaattaagtgttggggctttatttgtgagaaggatgcgcaccacatttttaatgtagatgtaaattacattattgctgaggttaaaaaggaatgcctctgcacatttgaaattggctatctgttttttttggcttcaaaacctacatttgtccctgccagcccggacgccattactttatctgtacgtgatatccgcaaaattgcaaaacatatctggcgtgagcaaaagcgccgccatagtgcagagcgtcgcgccgccggttttgatgatggatttccattctaa

SEQ ID NO: 38515 - DNA, 231 bp, Escherichia coli
atgaatacgctgataagtagacgttttggaaaaacgacaatggcggaattattgcaacaggcaataaacgaggagagggtcaacgcggcgacgcgcttttcttctcaccttgacgcattaatacgccacattaccagtgctgatttgtcgcgcgtggagattgtcgagttactcagtcaggaatccatcaagttccataatatcggcctttctcgcggggagtctctttaa

SEQ ID NO: 38516 - DNA, 297 bp, Escherichia coli
atgtctctgatgcactccgtattacttaataactggctaaagattgcggttatgaaaaacggtgaattatcgcttgctgacattaagcgcgacaaagaaaccggagcgatgacggaatcaaccatcgctatttattcgagtgaattaaacctcctgacggatgtggtcaatttgcttgtgaagcgcgccgtttttcataagcaaatcaccaccgtagatgaattatcgaaattaaccattgagctaaccgggtactgcgccggtgagtttaaaaaactgaacaaagagaggagctaa

SEQ ID NO: 38517 - DNA, 225 bp, Escherichia coli
atgccggattatatggatcacattcaggaacgacagacggaatcactgactcgccagattaacgccgctcgggtgaagccgtgcggcgctgctgcattggtttgtgaagaatgtgacgccccaatccctgccgaccgtcgggcggcttatccgtcggcgactcgctgcgtctactgtcaatcagcgcttgaatcaaaggccaaacactatcgggggcaggcatga

SEQ ID NO: 38518 - DNA, 276 bp, Escherichia coli
atgagcattcgtatcgagattggcgagcgttatgtcgtcacaagtgaccgttttcagttcattttgcaggagaaaaagactgctgaaaccgggaagaatgccggtaaagagtggctggatgttgtcggctattaccccaaattaaaccagctcgtttctggtctgattcatcacgatattttgagcggcaacgctgtctcttttgaagcgttgagcgctcaagttgagctgctcggtcagcagtgtttacgggcttttgtcgcaaatggccgttga

SEQ ID NO: 38519 - DNA, 2286 bp, Escherichia coli
atggccgttgatattcgggggcgttctgcccctacaccgccaccaccatttgcaaaaggcaccggcaaagagtttgccggtgtttactcatggaacgcgccgcgtgaggctattgggcgcgagagaccccttacacgtgacgagctgcgtcaggtgcaaggcgttttacccaaaattgaccgcctgccttactttttaagttctctgtttacctcgcgctatgaatatatcaggcgcaacaaaagccctgtgcatgggctgtatttcctcaagtcgacatttctgcgccggttgtggccgcgcattgagcgggttaatcaacgtaacgaaatgaatacagaggcgtcgctgctgtttcttgctgaaagtgagaactacgcgcgtttgccggggatgaacgataaagagctgaaaaaatttgcgtctcgtatcgcctcgcagcttttcatcatgtacgaggaattaagcgacgcatgggctgaggcgcatggtggcaaagagtcgctttttaccgatgaggctcaggcgcacctgtacggtcatgttgctggcgcagctcgtgcttttaatgttgccccgcttttctggaagaaataccgcaaaggccagatgacaatccgacaggcattttccgccgtcgctcgcctgattaacgatgaatggtggactaaccaactcaaggcgcagcgcatgcgctggcatgaagcactgctgattgctgcaggtgaggtgaataaagaccgctcgccgtatgccagtaaaaatgccatccgtgatgtgcatgcacgccgcctggcaaatcttgaatacctgaaatcctgcgagctggaaaacaaagttaccggcgaacgtatcgaccttatcagcaaagtgatggggagtatttccaatcctgaaattcgccgcatggagctgatgaataccatcgcggggattgagcgttatgccgctgctgagggtgatgtcggtatgtttatcacgctgactgcaccgtcgaagtatcacccgacacgtcaggtcgggaagggtaaagataagactgtacagctcaatcatggctggaatgatgaggcttacaccccgaaggatgcacagcgttacctttgccgtatctggagcctgatgcgtactgctttcaaagataatgatttgcaggtttacggtatgcgtgttgtcgaaccgcaccacgacgggacgccgcactggcacatgatgctgttttgcaagcgccagcagcgcaaagaaatcaccgaaattatgcgtcgttatgctctcaaagaggatggcgacgagcgcggtgcagctcgcaaccgttttcaggctaaacacctgaacaaaggcggtgcggccgggtacatcgcgaaatacatcgccaaaaatatcgacggttatgcacttgatggcgagctcgataaagatacaggcaagccgctcaaagataccgccgccgctgttactgcatgggcgtcaacgtggcgaatacctcagtttaagccgattggtctgccgacgatgggggcttaccgtgagctgcgcaagctgcctcgcggggtcagtattgctgacgagtttgacgagcgtgtcgaagcagctcgcgccgcggctgatggcggtgatttcgacctgtatatcaccgctcagggcggcgcaaatgtcccgcgcgacggccagaccgtcagggtcgcccgtagcgtcagtgatgaggttaacgactacgaagaagatatcgagagggtggtcggtatttacgcgcctcacctcggcgcgcgtcacgttcacattacccggtcatcagaatggcgcatcgttccaaaggttttggccgttgagcctttgaccttaaaaagcggcatcgccgcgcctcggagtcctgtcaataactgtggaaagctcaccggcggtgatactccagttatgacccctacaccgtctgagcatgccgcagcggtgctaaatctcgttgatgacggtgttgtcgcatgggatgaccccgaagtcgtgacagcgctcaggggtgcgctaaaacacgacgcgccgcagcaaaatcgccagcaaagaagcggggagccattaaaaccgcatgacgtcgccccatcaggcaggctgactaaatccgaacgcgcgcaaataccgcgcatccgctttgaccttgcgcagcatggcatcaccccgaaacgatgggagcttgaggcgctggcgcgcggggcgtccgtgacatacgacgggcagaaattcacatatccggttgctgatgagtggccgggattctcaacaggctttaagtag

SEQ ID NO: 38520 - DNA, 273 bp, Escherichia coli
atgtcgggtgttattaaaatgatgtgcgttagctcagatgagcctgattggttcaccgttggtggcatttatgactcagagctgcgtgatgtagatgtctgtatttgtggcgataatttggtttcagacctcaaccctgttgactggtatgaaatgagtcagcgtgccgatggcttatggtttcttataggatttcaccaatctgtgctttttcgtccagtggcattagaaaagccgcgcctgattgaggtcaaaataaatgtatgcgcctaa

SEQ ID NO: 38521 - DNA, 243 bp, Escherichia coli
atgtatgcgcctaaaatgatgccagtcccaccgcagcacaccctaaaagctaaaaaactgatgggcgttgtgcatcgactgcagcagataatggtcaatgagaatttgacacccgccgagctggtcgggtgcgccgaaatagtcagggataattacggcaggctgtacgatatcggtaatccgaaaatggaggcgtttacaccggcgagaggtccgattattccgccgcctcgccgaccatag

SEQ ID NO: 38522 - DNA, 747 bp, Escherichia coli
atgaaaaataacgttttctcacaaagccagattcaggcaatggccgatattctgcacaatgatagctttgactatcaggcaacatggttgcgtgtcgggaaactcaatatcgaccgcagcatcaccaaatcgcgccagattggcgcaacgcagctctttagccgtgaggcgctgctcgatgcgctgacaacgggcgataatcaggtctggtttgctcacaccattgagcatgcgcgcgtggcgttgatgtacatgaataacctttcggcgcgcgtcggtgtcagtcttacgagcaacggccacagcctgcagctcgacgacggtgcggttatcagctttgttggcgaggaatcccactgcgccgcgctggcgggtaatgtttaccttgatgagttcggatggttcagtaacccgccaagagcggcaaaagtcgcggcggctatcgcctgccaaaaacgccacaatctgacgatgttcaccacaccatcagacagctacgcagcattcagggtgtggaacggcacaactcgcaagcgccgagcgtcaccgctaatcaataccggcgacagcgtattttgcacagatggtgtctggcgccagtcggtcactctggatgcagcatgccagcgcgggtgcaatctctttgcgcctgaggaaattaaacgcgaatacagcgacgatgattatcgtctgctgtttggctgcgactggtctttcgctgttgcagcgggtgaggtggcagcatga

SEQ ID NO: 38523 - DNA, 432 bp, Escherichia coli
atgaaaaaatatttacgttccctgatgtttgatgccctgctggcactggttctgctttgggggctggtatcgccgcaaagtgctgtaatgaattttgttgccgcgtgggcactctatgtctgttttgtctgcattacggcgagcctcgccgctgtggtcgcttatgaccactggcggctcaatacgggcaaaggtattcccgtcaatcctgagttgatgaaggtattccgcgccgccttttgccgcaaagggtcgaaagctggtcgcgcatggtctcttatccgtttctctgttaccgccggttgcctgctcggtgctggctggatccttaccgcgctgatgtacctgctttgtgttctgacctttaaggccgttcgcgagacttaccgccagcgcattgagggggctggcctgtgtccagagtcattgtga

SEQ ID NO: 38524 - DNA, 435 bp, Escherichia coli
atgacagttaattacttttactcgtctgagaataatgcattctatgccgccgagctaaagcgtgtttatctggaagctggtagttggccgaatgatgccttagaggtaactgatgagtgttttagcgaatttacagcggaaccgccggaagggaagattcgaggttcagatgatgatggaatgcctgtttggaatgacatgtcaccacctacgcaagatgacttgatagcatctgccatcaacgagaagaatttgttgattgttgatgccaacgattacataaatgacaagcaatggccgtcaaaacttgctttggggcgtctcagtgatgcagataagtctaaattcaacatctggcttgattatctggaattactggaatcagtcgatacatctacagcaccggatatcgagtggccggttaaaccggagtaa

SEQ ID NO: 38525 - DNA, 2442 bp, Escherichia coli
atgagtaataacctgaggcttgaggtattgctgaaagcggtcgaccaggcgacccgaccgcttaaatccatccagaccgcgagtaaatccctgtcgggtgatattcgcgacacacaaaaagggctgcgtgacctgaatgggcaggcgtcgaaaatagacgggtttcgcaaggcaagcgctcaactggccgtgaccagtcagtcgcttgacaaggcgaaacgcgaagccggtgagctggccgtgcagtttaaaaacaccaccagtccgacccgcgcgcaggcgcaggcactcgaagcggcaaagcgtgccgcctctgagctacagacgaagtacaacagtctgagaacctcggtacagcgccagcgctccgagttgatgcaggccggtattaacacccgcaccctgtctgccgatgaacgtcggctcaaaacctccatcagcgaaacgacggcgcagcttaaccgccagcgcgaggcactggcgcgcgtcagtgcgcagcaggcgaaattaagccgggttaaagctcgataccagtcaggcaaagagcttgccggtaatgcggcggcggctggtgctgcaggtgttggcattgcggctgcgggaacgatggccggggtaaaattactgatgcccggttatgattttgcgcagaaaaattccgagctgcaggccgtgctcggggtcgataagcagtcgccagaaatgcaggcgctacgcaaacaggcgcgccagctcggcgacaatactgccgcctctgccgatgatgccgccagtgcgcagattattatcgcaaaaggtggtggtgatgctgaagctatagcggccatgacgcctgtgactctcaacctgtcacttgcgaacagaaaaacaatggaggaaaacgcgcaactgttgatggggacaaaagccgcctttcagctttctaatgacgcggctgcacatattggtgatgttctttcaaccacgatgaacaaaaccaccgctgattttcagggactaagcgactcattaagttaccttgcccctgttgcgaaaaatgccggagtgagtcttgaacaagcggcggcgattaccggcacacttcatgataataacatcagagggtcaatggctgggacgggcggcgcggctgtaataacgagactacaggcaccaacaggcaaagcatacgatgccctcaaagagttgggtgttaaaacctcggacagcaaaggcaatacgcgcccgttatttaccatcctgaaagaaatgcaggccagttttgagcgcaacaagctcggaactggtcagaaagctgaatatgtgaaaaccatattcggcgaggaggccatgaagtctgcaagtgtgctgatggccgcagcggcaagcggaaagctcgataaactcaccgctacgattaaggcatccgacggaaaaaccgaggaactggtcaaggttatgcaggataacctcggcggtgattttaaagagtttcagtcggcttacgaggcggtcggtactgacctctatgaccagcaagagggctcactgcgcaagcttacccaaacggccacgcagtatgtgttaaagctcgacggctggatccagaaaaataaggggctggcggaaaccatcggcatcattgccggtggcgcacttgctctgattggtatcatcggcggcattggtctcgttgcgtggccggtggtgatggggattaacgccattattgccgctactggcgtgctgggtacggtctttactgttgccggtggtgccattatgacagcgctcggtgcgattacctggccgattgtggccgtcggtgcggcgattgtggccggggcgctactcatccgcaaatattgggagcccatcagcgcatttttctcgggggtgattgagggcatcatgagcgcctttgcaccggtaggggaaatgttcgccccactggcacccatttttgacggcctcggtgagaagctgcgcggcgtctggcaatggtttaaagacctgattgcaccggtcaaagccacgcaggagacgctagatagctgcaaaaatgtcggcgttatatttggtcaggcactggccgatgcgctgatgttgcctctgaatattttcaataagctgcgcggtggtcttgatgtaattctcgaaaagctcggccttgttaaaaaggaatcgagcagtattgatacggaaacggcaaaaacgccgccggttggtcagggtggagggtatattccgacaaccagctcgcttggtgggtatcaggcttatcaacctgtcacggctcccgccggtcgtacctatattgaccagagcagccctacctatcaaataaacctgccgggtggcggcgcgccgggtggtcaattgggtaaccagttgcaggatgcgttagaaaaatatgaacgcgacaagcgagccaaagcccgcgctagcatgatgcacgattaa

SEQ ID NO: 38526 - DNA, 417 bp, Escherichia coli
atgctcaacctcaaatcggcaattgcaaccgtcgccattcttctgtctatcagcgcccacgcccaaacgaataacgtaaaaactttacaaaaacagctaaaatcatggcaaccaattgaaataaaagaaaataataatgtcgtaactgtcgttctggacgcaaaccaagttacacctgaaatttatgatgcagtcgtaagctcaggaatttgtatggatgtttggacaaaagatgtgccggactcctacatgaaaacaactaaagaattgcacgtactgaataaacataaggcgtttggttatgtgctcgaacagcctctcgcaacttgtaacgagatgggtaaagaaccagatgacagagctaaagtgatgatgctctcaaaaactcatatgtttggaatgccaaagtcaaaataa

SEQ ID NO: 38527 - DNA, 423 bp, Escherichia coli
atggccagagtgtctattagtgaagcagcacggcttgttaaggttagtcgccctactatttacaagatgattaacagtggtaagttaagttacacctctgttgtaaagcacgggaagggtattaaagttattgatacatcagagcttattagagtgtttggttctcttgatggtgtcatcgatgctgtaaaatatgatgtaaaaagtgacgcagaatctacaggtattaacagcgttggtttacatgatttacaacatagaatcgctttacttgaagctgaaaacgatggtcttaaaggggctgttaaggctcgagatgagcatattgattcccttcgtcaggctatgcagcttctggagcacaagcacgaaccttcttcaccaccccattccccgtggtggaaattctggaaaaaatcctga

SEQ ID NO: 38528 - DNA, 192 bp, Escherichia coli
atgacgaaacaacagaaaacagcgctgaacatggctaaattcatccagaatcagtctctgctcctgctggagaagcttaacgagcttgatctcgatgctgaggccgacctttgtgagaaactccacgatgatgcggagcatcttttccgtacactgtcctcgagactggatgcattacaggatggtaactga

SEQ ID NO: 38529 - DNA, 1011 bp, Escherichia coli
atggagttccaagaattagaaaatagcgcatgcttatactggcccaaagaacttgcagaaagagcagcatctattagcgccataagccctcttatagagacccaagatgaatttttatcaatactaacaatatcaacaaataagcctacatcttgttttgatgctgtacggttatgcaataagatatcacccaacctatttgtcaagcacctaatggttttgtcagatattggaggcgaaagacttcatcgcttttttaaagatttagataaaatctatcctgacagaataatggagttcaatatagggaataactcttactcttaccaattcaatagcaatagagcatggacaaccaagaatttaaacgtggaaaaatcacgacttttgcaacctgtaagtgattttacacgagaaatgcttgatgtttgcatgctgatcctgtggggaggtaacactataaacaatacaaaccttccaactgaaatagaaaataactgtattttgggaaatttaattgggaacaaagaagcaatagaacaatttgtaaaagaaagatatataatggttagcagacaaacaggaggtgcaacggcaaatgatcttggacacatatgcgagatctttataaaagaaaaactttataaacttattgatgataatatatctctagatggacaccatatcgatggtgtaactcataacgataaagaccttacgacttttgatattgtagcaaaaaacacgataacaaaaaaatgtgttggtattgaaataagttttcaagttacaacaaactcaacaatagaaagaaaagcaggattagccaaaagcagaagagatttactcaattcaatagggcataaaatagcatatgtgattgatgggtctggtaattttcagcgctcaaatgccataaaaacaataattaaccatagtgacatgactgttaacttttcagataatggtataaattcactagcaacattcatctgcgagacattgaaatga

SEQ ID NO: 38530 - DNA, 1248 bp, Escherichia coli
atgattaaatttgttgaccttttttctggcacaggtggtattagacttggttttgagcaagccatgaaagaaattggattgtcaacaaaatgtgtaaaaagctcagaaattgacaaaaaagcatgcgaaacatacaaacttaacttcgacgaagaatcatattgtgatatacatgatgttgatatagatgaaagcttcgatgttttattggcaggatttccttgccaagcattctcttatgctggaaaacaacttggttttgcagacacccgaggtacattattttttgaagtagaaagaattataaagaaaaacaagcctaaattgtgtcttttggagaatgtacgtggattaacttcacatgataaaggaaggacattttcaacaatattaaaatcccttcacgatttagggtatcatgttgaatacagactattaaatacaagtaattttggcgtccctcaaaatagggttagaatatatataatagcctcattaaaaaaagaggtaacgcttactattcctaatgatcttggagccaaagatacgcacaattacaaaccatccaaaggtggtcatgatttttatacagaatcaaaagtttctgacatactagaggatagtccagacaagtcatatgattgcagcgattggttcaagcaacgccttgaagatatttttaaaggtgacctgaataaagttcatggaatcaggctaattgacacaaggaacggcaactccttgcactcttgggatcttgggctaaaaggcgagtgctcaaatgatgaaatagctttcatgaattcattaattgcaaatcgtagaaagcatatttttggcacacaccaagacggcaaggctttgtcaaaagcacaaattgaaacatttttcaaacatagcgaaaccaccaacataataaaaaatctaattaaaaagggttaccttaaagaaaaaaacggactatacaacccagtttgcggaaatatgtcttttgaagtattcaaattccttgacccaaataaagtgtcaattacacttactgcatctgatgccaatagacttggagtctatcacaacaatagactgcgacgccttacaccaagagaatgtgcaaggctacaaggttacccagactcatatatcttacacccaaaagatagcatggcatataaacaattggggaatgctgtaagcgttccagtcattaaaaatatttttcttgatataatgaagaataacttcatataa

SEQ ID NO: 38531 - DNA, 528 bp, Escherichia coli; identical to SEQ ID NO: 15035

SEQ ID NO: 38532 - DNA, 303 bp, Escherichia coli; identical to SEQ ID NO: 12251

SEQ ID NO: 38533 - DNA, 627 bp, Escherichia coli
atgacccgcagccatgaatatgcggaaatggcctcccgtactgaaagcatgagcgggcagatgagtgaagacttgtcgcaacagtttgcacagtatgtgatgaaacgcgcaccgcaggatgcagaagctattctgacaaataccagttcgccggagattgcagaacgccgtcgggctatggcgtggtcttttgtgcaggaacaggtacagcctggtgttgataatgcctggcgtgaatcccgtggggatattggtaaaggaatggagagcgtaccttcgggtggtggcagccaggatattattgctgaccatcaggggcatcaggccattattgatcaaagaacgcaggacagtaatatccgtaatgatgtaaaacatcaggttgataatatggtcacagaatataaagggaatatcggagatactcagaatagtattcatggcgaagaaaatattgtagacagacaatattcagagttaaaaaataatcacaaacaggaagaaattcagcaaaacaacagatataatgaagaaaataaacgacagaaattaatgccaacaccgtctgaagatgcgttaaaacagatggtggatgataagaaagaacgattgaaggggccattatga

SEQ ID NO: 38534 - DNA, 561 bp, Escherichia coli
gtggtgggcgttgatggctggtcccgcatcatcaacgaaaaccagcagtttgatggcatggactttgaacaggacaacgaatcctgcacatgccggatttaccgcaaagaccgcaatcatccgatctgcgttaccgagtggatggatgaatgccgccgcgaaccattcaaaacccgcgaaggcagagaaatcaccggaccgtggcagtcgcatcccaaacggatgttacggcataaagccatgattcagtgtgcccgtctgtccttcggatttactggtatctatgacaaggatgaagccgagcgcattgtcgaaaataccgcatacactgcagaacgtcagccggaacgcgacatcactccggttaacgatgaaaccatgcaggagattaacactctgctgatcgccctggataaaacatgggatgacgacttattgccgctctgttcccagatatttcgccgcgacattcgttcatcgtcagaactgacacaggacgaagcagtgaaagctcttggattcctgaaacaaaaagccactgaacagaaggtggcagcatga

SEQ ID NO: 38535 - DNA, 387 bp, Escherichia coli
atgaccacaacgcaaaaaacgacggatgttacagccccccgacgcagccactggtggtggacggtgccgggatgcctggcaatggtgttactgaacgcagccgtcagttacggcattgtcagactgaacgcaccggtgactgccgccttcaacatgaaacagactgtggatgcattttttgacagcgccagtcagaaacaactgtcagaagcacagtcaaaagccctttcagcgcgttttaacacggcactggaagccagcctgcaggcgtggcagcagaaacaccacgcggtcattctggtgtcgcctgccgtggtacagggggctccggatatcacccgggaaatccagcaggatattgcccggcgaatgagagcggaaccatga

SEQ ID NO: 38536 - DNA, 387 bp, Escherichia coli; identical to SEQ ID NO: 38535

SEQ ID NO: 38537 - DNA, 321 bp, Escherichia coli; identical to SEQ ID NO: 33488

SEQ ID NO: 38538 - DNA, 711 bp, Escherichia coli
atggtcattaaggcgcaaagcccggcgggtttcgcggaagagtacattattgaaagtatctggaataaccgcttccctcccgggactattttgcccgcagaacgtgaactttcagaattaattggcgtaacgcgtactacgttacgtgaagtgttacaacgtctggcacgagatggctggttgaccattcaacacggcaagccgacgaaggtgaataatttctgggaaacctctggtttaaatatccttgaaacactggcgcgactggaccacgaaagtgtgccgcagcttattgataatttgctgtcggtgcgtaccaatatttcaactatttttattcgcaccgcgtttcgtcaacatcccgataaagcgcaggaagtgctggcaaccgctaatgaagtggccgatcacgccgacgcctttgccgagctggattacaacattttccgcggcctggcgtttgcttccggcaacccgatttacggtctgatccttaacgggatgaaagggctgtatacgcgcattggtcgtcactatttcgccaatccggaagcgcgcagtctggcgctgggcttctatcacaaactgtcggcgttgtgcagtgaaggcgcacacgatcaggtatatgaaacagtgcgtcgctatgggcatgagagtggcgagatttggcaccggatgcagaaaaatctgccgggtgatttagccatttag

SEQ ID NO: 38539 - DNA, 903 bp, Escherichia coli
atgattaataaaattgatttcaaagctaagaatctaacatcaaatgcaggtctttttctgctccttgagaatgcaaaaagcaatgggatttttgattttattgaaaatgacctcgtatttgataatgactcaacaaataaaatcaagatgaatcatataaagaccatgctctgcggtcacttcattggcattgataagttagaacgtctaaagctacttcaaaatgatcccctcgtcaacgagtttgatatttccgtaaaagaacctgaaacagtgtcacggtttctaggaaacttcaacttcaagacaacccaaatgtttagagacattaattttaaagtctttaaaaaactgctcactaaaagtaaattgacatccattacgattgatattgatagtagtgtaattaacgtagaaggtcatcaagaaggtgcgtcaaaaggatataatcctaagaaactgggaaaccgatgctacaatatccaatttgcattttgcgacgaattaaaagcatatgttaccggatttgtaagaagtggcaatacttacactgcaaacggtgctgcggaaatgatcaaagaaattgttgctaacatcaaatcagacgatttagaaattttatttcgaatggatagtggctactttgatgaaaaaattatcgaaacgatagaatctcttggatgcaaatatttaattaaagccaaaagttattctacactcacctcacaagcaacgaattcatcaattgtattcgttaaaggagaagaaggtagagaaactacagaactgtatacaaaattagttaaatgggaaaaagacagaagatttgtcgtatctcgcgtactgaaaccagaaaaagaaagagcacaattatcacttttagaaggttccgaatacgggtaa

SEQ ID NO: 38540 - DNA, 372 bp, Escherichia coli
ttgctcaaaaaattctcttttaagaccttatttgccgtactcagaaatttaaaaagaaaaccatggtatatttgtagtttacgtatgcctatttgtgaacatcaggaactgaaaaattttaaacatcgtcatatatcatattctgcaattgaagaaaaatcatttataatcatagttgatgaaatctacagtattttattatccggatactcaattgtattatttgaagatgaagaaatttattctcttgctaagaaaataaagtatatacataatttaaataaagtcttaatagttcatcttaaaggtggaagtttaaggatcatatattctattttgaatgaagtttatgaacactcaagaaattattaa

SEQ ID NO: 38541 - DNA, 483 bp, Escherichia coli; identical to SEQ ID NO: 19577

SEQ ID NO: 38542 - DNA, 3552 bp, Escherichia coli
atgaagtccagatatcgaacctggcttgctgtcccgcctgaggagacagaagccgtaaaaaatgcagttcccccgttaaatggccgcaaagctgtcgcatgggatccagaaaaaaagctctggtatgcccgggcgggtaccgaactttcactactggagcgctggttaccccggccacaggaactgtcgatggatgccggcgatccggtcactgaatttgctcaggtcctggaaaacgccgggctggttattcagggattgccacagatggacggagccatacacagagtggccacccgggatgacaaaaaaggggccaaaagtggcgcatacagggcctatcttgatggtcgtcccgccggctggtaccgcgactaccggagcgccgatgacagtcccacaaactgggtattttccggcggagaacaacacgatcctctggccagactgcatctgcgggcattcgctcagcaacagcgcgatgataacgcacgtaaactgcagcaacagtataacaaacaggccggctatgcccgctcctatattaacaggttgccacaggcaacagcacatgaatacctgacgcgcaagggcatccgggccgcgcctggcgtgcggctgaacaataaaaatgagctggttattcccttcagcaacggccggggagaaatacgttcgtaccagcgtattccggtcaccggcgggaaggatgcccgcattctgaaagactccgagaaaaccggcaactggttcaccttcggaaccccggaaaatggccgccccctgttatttgcggaaggttacgctactgcagcctccctgcacgaagcaaccggccttccggttctgatgacagttgatgccagcaatatgattgccgtggcagaaaatgcccgccaaatctggactgacagcccctttgtcttctgtgccgacaacgatcatcaacgggaaattaacaaaggggtttttagtgcaacaaaggccgcagaagtcacgaatggcgaagtcattattccggcctttacggaggcggaaaaagcacagggactgaccgatttcaatgacctggacgccagccggggacgggacaactttcagaatgccatgaacgcacagttaaaacatatcggtatcctcacacccaacagtgacactgccgaccatcgtgaggctgtcgtgatcggcaacctgatattcacaccggtaaaaaatgagaagccacaaatgtcccctgaaaacagacagagcacagccccggaaacggagctggcgacacaggatacgccttatgacacccactccgacgatacagaaaaccaggcatatgaagatgactatgccgcctatgcatccctgcaatcagtaactgcggagacgttatccccggataaaccactggagaatattgcgtctgccgctgataccggcacagagaatacctctgtggctaccgctggcgaccaggaagacctcaatacagacgccacaggtacagacactgctcacaacagcgacacagcagaaacaggaacgcttcctgaacctgccgggatgcagtccgtgcagcaggcaaccactgaaccgaccgcagaagataaaccacacgagaacgttgtttccgctgccgataccagagaagaaaatgcctctgtggctaccgctgataccggtgaagaaaatgcctctgccaccaccgctgacaaccagagcacgcaggcagaagaacatccccggagtgaagacacaccggaaacctccctctccgacgcggccgggacacagcacaccaccacaacgcagtctgaagaacaagtgcaggtttccatggccagcgctgacgactggagcgcatttgcggaagatctcaacgctgacactccgggggcccccactgttcacaacaccgacaacgcggagacaaacacagtttctgaaccggccgggatgcggccagttcagcaggtgaccactgaactgacggcagaagataaagcacaggaaaagagcgttgcgtctgccgctgagaccggcgcagagcactcctctgacatcaccgatgacaacaggaacgcacccgctgaggagctcaatgccgatgccacggttgctgttcacaacaccggcacagcagaaacagcctcaccttctgaacctgcagaaactcaaccagtccggcaggccaccgctgaaccgacggctgaagataaactgcaggaagagcgtcttgtgtccgccactgagaccagcacagcgaatgaagcagcccaccctgatacgccatcgcttttcagccgtctgcgccgttttctgaccggtgggaaatcacgcacctcagaaccttccgttattcaggagaaaaagcccacggaggctgaaacagcaacagaggaggtcgtaccaccatcaccaccggaaaccagcccggaagacacatcgtcagcggaaccggacacgattatctttgcaccccgccgtcccgacagtccgcagcggcacaacctggacgagatccttaaaaatcttacacacaaagagtttcccgacaggactgcgctctacagcgttgacggtgaacccgccttcctggacagactctactgtctcgaaatggtggatggcgccagcgcggatgacaaaaaggtcctggctgcccttgctgtggccaccaacttctatggcggcgttatcgagctgaccggcagtgatgcctttaagcaaaaagccatgcagctgattgtcgaatacgacatcaaggttcgcatgaaactcccggcccagcgggcagcactggaaaaactccgaaaggaaaaagagatggcgcatgatgccattgtcacccacagacccacgccggaactcaaccgccagtcaccggaagagacaacaatggcccaaccggctccccctgtgtcaccgaaggcagaggctgaacaaacagcaggcagtacggctgaaacaccgcatccggaagcgccggtcacggcaaaagctgaagccccccgggccgacagaccggaacaacccgccgccccgtcgtctgcgccagaaaaagcccctgtcagtgcacagccgcagcaacccgacacaccggaggaagagccgcccggcaagctcagccccggtgaaagtgtgactgccgtcctgacaaactacggagaaaaagagtatgcgcccggaaaagggcgctgcttttttgtggagctcaccaaccgcagtggcaaacgggaatactggggaaacggcctggaagaactggtcaaaaaccatcagaagggtgaccccgtcacactgacactgcaggcgagagaaacattccggctgtccggtgaaacgcgggatcgtatccgtaatatctgggccataaccccggtcagtaacggcattaccgttaataatgaccaacctcatgcgggtcagcataccctggagtttccgatggcaacattcagccaggtgatgttacagatgcaacaacactggccacagataatgcaggaagttcgctcccccaaaaatcctcccaataatctgtacattggtgaagactga

SEQ ID NO: 38543 - DNA, 174 bp, Escherichia coli; identical to SEQ ID NO: 20951

SEQ ID NO: 38544 - DNA, 738 bp, Escherichia coli
atgctaaaggttggtattattgggtcttgtgttaccagggatgcttttgaagttacaaataacgtctatgacgttaaaggtgcttactttccaagagcctccctgattagtttaatgtctaaagaggtagagccatctccgacgttaataaatattgaaaagcaatgggtaaaatgggttcttaataatgattataataaaagtacgttacaacaactaaagtcaatatctccagacctgatatgtattgaccttattgatgaacgttatgatttagtgtcaataaatgatagttatttaacaagatccgatgaattggttgaatatattgtcgatgttaataatgtttctatagagaagatattaaaaagggggtgtgcagaaactgaagccattttttttgagaaggcagtttgcttctgtgagaagataaacaatttattcccaggtgttttagttgtcattcacgaggctaggtactctgattattatttagaaaatgggaatatacagaagttcagtgaagaaaggcgttttcttaacgccttaacaaatgctcgcttaaatatttattatgaattgttaaaagagaaaataaaaaactctatatcaattagacttgatgaacaatatgttgtttcatgtaaggaacataaatgggggttatccccatttcattatattaatgattattatgtggagttcataaataaattgaacaccatttcaattaaatga

SEQ ID NO: 38545 - DNA, 2763 bp, Escherichia coli
atgtcaaatcgtcttactaagaaaaaagtaaaaaataaattacacactggggatgaaattaaccaacttcaggtggcattttcaatctatgatagtcatttcgaaaaactttttcgtctattatcacgtaaggccaataaaatagaatggaaagagcaaaactatccgtttttacctttcaatggtctttctaatatagaatcatcgaccgaatggttattacctgctgataatagtcgtaataagcatttgcatatagagtcagatggaagtttgtctgtagaaatggatttgataaatggagactctttttatttacaaactggcagtatgaatattaatgggttgccattggacaaaaactcctggcgtatcaatggtggattcaagtatcgattagtattaaatgcatcatatggagagaatcgacctgaatgtgcaatttttattatccagtatgatgaaaataaaagaattactcacaaatatcaacttatttataacggtattaatcatattgaattcgatacaatgcctgatgcgcgttactttagtatggcattacgttttaaagggcaaggttcacttcgtattgaacctattaaactctacattgaagaaactttacccgtgaatgcaataaggcttgataattgccaaagccatgaggaaattatacgacactttgaagtgaaagcaaaaacgctgacaaaagctttcgagacgcgaattctctcattaccagaatcaccacaaatacaaaagcaaaaaattgacgagcttaaagacaagcttgttacagctctctacgagaagcagaaactagaaaggtctttatactatcgtttaggcaaaactatggtagagactaaacgtagcagcctgaaaggttttctttccttgcctcaaaagctaataaagattcgtgcggctaagcgtaaaggcaaatttgatcacccccctcttaactgtagtgtcaagaagcaattgcttgaaagtgttggtgtttataatgaggtaaaacatgataatgagattagttggcctgtctttgaatcacatgcacatttgcgaaatcagcatatcaatgttgtaacgatctgtgataagtttacttatgaatgctttcgctatgaggcaaactttattccgttaaccaagcaaaattggaaatcagagattgacgaatcacacccagtaatgttatttcttgaatcagcttggaatggtaataatggtgagtggacatataccatggtgagttataaaaaacatttgggtgatccacttcgcaaagttatcaaatactgtcaatccaagaatattcctgtagtattttggaataaggaggatccaaccaactacgaagtctttattgatgttgcagctgattgtgactatatattcacaactgatgggaatatcttagaaaaatacaagtctcgtgttggacataatagagtatacgcacttccttttgcggcacaaccagctatccacaacccaattcgtgataagaataaaaaacttccagtttacgaagtatgttttgccggtagttggtataataatggacatgatactcgtcgagcacaaacagaaattgtccttgatggaacagcacatcgtgaattgcatatatacgaccgaatgctgcatgcaaccaaacatagagaatcacgaatctttcctgaaaaatatcaaccatttatagttggttcacttgactatgaacagatgctcactgcttatagacaatacaagctattcctgaatatcaacactgttcaggactcaccaactatgttctcccgtcgggttttcgaaattttggcttgcggtacaccagttgtatcaactcattctgatggtatgaaagctatgcttggaaaccatgtacatattgtaaataataaagatgaggcaaaaaatatcgttcagcagttgcttaaatctgatctaaggcgtgaaattcttgggcatcaagctgcgcggcattgtcttctgtatcactcttatgaaaaacgatttaaacaaatccttaatactgtaggaattaatacttctccacttaaagatgataaaatctcgataattatatgtacaaatcgcctccagaatatagatatgctgattgataattatcagcgccaatctcatgagaacaaagaattactactaatccttaataatgatgacttcgatatagatttgattaaaaataagactcgaggtatacctaacgtatatatatatcaactatcacaggaaacaactcttggcgactgcctgaactacggcgttgctcatgcttcaggacattacattgccaagatggatgatgatgattattatggtggcaattatttattggatgcattgctagcttttaattatagtggggctgatgttattggtaaggattcttacttctgctatgtagagtccaaaaatgtcatggctattaaacaaccgggtaaagacaatcgtttttcagattttgtatctggtggcactttaataataaagaaatatgtatttgagaagattaagtttcaaagttgtaatcgcggtgaagatactaactttcttaaagaatgtaagatgaacggatttactatttactcatcagataaatataattttatccaaatgcgctataaaaatactgccgcgcacacatggcaaatccaagatgaagattatcttaaaaattgtcaagtggttaaagatgaatttgataaaaaattgtcttttatataa

SEQ ID NO: 38546 - DNA, 144 bp, Escherichia coli; identical to SEQ ID NO: 9158

SEQ ID NO: 38547 - DNA, 1464 bp, Escherichia coli
atggcaaaaaataacaatgataaaatgcgggcaaagtataggccgttcataaatatatgggaacatcttccttctgagttcaatgaactcatcaagacgttaatggtgctgatacggcaaggggaaaatgtgggagctcagcaaagggagcttgattccatcgaaaacttcaaacacctgttaagtggatggaagcgggcgcaaaggatcatagctgatgaactcattatcaggctttctcaaatcaaggatctggagttagaaaagaattgtgcccattcaaaaaaggactatgaaacaaagaagaagtgtatacgcaatattgaaaggactaggctagaaattaggattttacgtaggtgcattgattcaattgtatgggcgatattccgcaatgaacactcgtctataagacggttacctataaatagaaatactgacaatctgacaatatttaatatacatgattcaatggtggtagcagatgaaatcaatgctgatccgatggctatagctgttatcactgatattactacgtttgtacatactggtgatttacttgcgttaatacctcagcaaggcataactttaattgaaataaaaagtggtaagaaaaatatagagttttcaaaggcggctatgttctcagtgcaaagtaaatgtcttcattttgatgagatttatagaaaagaccttgataaaaatgacttgaaacactatgacagagctaagcgtcaacttaaaagagctcaaaatgtgatagatgtcattgaaactggtaagggatttgataacttttttcagtctcaagtaacaattcatgacagagatttttgtcccgatttttatacagataagattattgagctttggtatgagatatataacggtaaaacttgggcgattactgacattaatgattgtttattccttggggcatatattaattctaatatgggtttttgcggttttaatggatggatggaggtatctagaatatcggggagagtgtttaatattcttgatagcttttcagatgctttatcacgtccattttttagtttgaacctacctgataaattgcttctggatatcattaatggcaatctaattgttgtgctgtgtttcgatcatcgtcgtttcgtagaaagagcaaataaaaaataccccgggatttatgagttattggactttccatctccgaagattaatcctatgagtatgctttccatcaatgggaagggggtagtttctagtgttgatggacagagtgtttttattggaaatggttacgaaacacggattatttttgatcagcaatatccagatagtctgattaagtggtcataccatatgagtgatctcaaaaaaaatattgataaaaaaaagcgtaaaatgaaaaaggaaacgcaaagaaaaataaaagagaaaagaaaacgtagcagaaaacaatgcttaaactaa

SEQ ID NO: 38548 - DNA, 282 bp, Escherichia coli
atgaaagagctcaaagggattattaccgcaatggtaacgcctttcgatgaaacggaaaaaatggatatcactgcggcgaaaaaaatggcgcgctggttagtagataatggtgttcatggtttattcatttgcggaactaatggtgaattccatttgctttccgatgacgaaaaagttgagttaacaaaagccgtcgttgaagaggtcggtaatgaagttaccatttgtgcaggtgctgggtgctgggtgctgcagcacaaaacaaaccatcgaattgactaa

SEQ ID NO: 38549 - DNA, 426 bp, Escherichia coli
atgaagaaattatccctttcactgatgctgaacgtgtcgctggcgctgatgctggcactgtccctgatttatccgcagagcgtggccgtcagttttgtcgccacctgggcgattctggcgacggttatctgtgtggttgccggtggtgtcggcgtgtatgccacggagtatgtgctggaacgctacgggcgggagctgccaccggaatcgctggccgtgaagattgtcacgtcgctgtttttgcagccggtgccgtggcgcagacgggcggcggctctggtggtgatggtggcgacgtttatctcgctggtcgctaccgggtggatttttaccgcgctgatttatctcgtggcgtcgctgtttttccggctgatacatacggcctgtcgtcagcgttttgaggggcgggaaccatgtcaaagctga

SEQ ID NO: 38550 - DNA, 216 bp, Escherichia coli; identical to SEQ ID NO: 5262

SEQ ID NO: 38551 - DNA, 531 bp, Escherichia coli
atgagtgattcgcgactgctgccgaccggctcatcaccgcttgaggtcgccgccgcaaaagcctgtgcggaaattgaaaaaacgccggtcagtattcgtgaactgtggaacccggacacctgcccggcaaatctgctgccgtggctggcgtgggcgttttcggtcgacaggtgggatgaaaagtggccggaagcgacaaaacgcgccgttatccgcgatgcgtatttcattcactgccataagggcactataggcgcaatccggcgtgtggtggagccgctcggctatctcatcaacgtgactgagtggtgggaaaacagtgacccgcccggcaccttccggcttgatattggtgtactggaaagtggcatcacagaggcaatgtatcaggaaatggaacggcttattgctgatgccaaacctgcaagccgtcaccttattggtctgaacattacccgggacattcccggctacctgttcgccggtggtgtggcttatgacggcgatgtaattacggtttaccccggataa

SEQ ID NO: 38552 - DNA, 636 bp, Escherichia coli
atgaatataaatcactcattacaagagcttgcgcgtgcactgcgcaacatgatccgcaccggtattatcgtcgaaaccgaccttaacgccggtcgctgccgtgtgcagaccggcggcatgtgcaccgactggcttcagtggctgacccatcgcgccggacgttcgcgcacatggtgggcaccttccgtgggggaacaggtgctgattctggccgtgggcggtgaactcgacacggcgttcgttctgccggggatttattccggcgataaccccgcgccgtctgcgtcggcggatgccctgcatatccgtttccctgacggggcggtgattgagtatgaacctgaaaccagtgcgctcacggtaagcggagttaaaacggccagcgtgatggcttctgattctgttactgccacggtgccggtggttatggtgaaagcatcaacccgcatcaccctggacacaccggaagtggtctgcaccaacaaactgactaccggcacgctggaagtgcagaagggcgggacgatgcgcggcaacattgaacacaccggcggtgaactctcatcaaacggtaaggtactgcatacccataaacaccccggcgacagcggcggcacaaccgggagtcctttatga

SEQ ID NO: 38553 - DNA, 1245 bp, Escherichia coli
atgaaggcgacagaggtttttatcccaggcggttatcccaaccacacactggttgaggatcacctagtatctaaacagcaacagttaatcgatacacttgagatgggcaccatgctgatttctatctctggcccatcaaaatcaggaaaaactgtctttgttaagaaagtacttggaacccagaggctaatcgaagtaactggagcaggggttcaatctgctaatgatttatggaagcgcgttttcgacatacttggtgtaccagtaacccaagttcaaagtaaaactggcacctcatcattttcaagtacaggagaattatctgcccaagctggtgtaattttagcaaaaggtagtcttaaagggtctgcatccgctggttatagtacagcagatcaaacctcagaatcatttgcgatagatctctttcaactaatgaagcgagaaatcgcaaacacagattatgttatctttatcgatgattttcactatattgctaaagaagctcaagccgaactatcacgacaaataaaagatgccatagctaatggctgcaaatttatttgtgcatcagtgccatatcattctgatgatgttcttcggggtaactctgacttacgaggtcggatatttaatattgattttgattattgggatgaatcaaccttaaaaattattgctcagaaaggattcaaactactcaatatagatgcctctgatgaagttataagtgagttagtaaaagagtccgcaggctcaccacaactaatgcaatatttatgcttaaactcttgttttgaaatgaatgtcagagagacttctgatacttcaataaaatatcaaaaagatattgccacattgcaaagagtgtgcaaacgtacacttcagtcagcagattacagcacgattgtggataaaatgcgcgaaggacctaaagtgcgtggttctgatagaaaatcatatatatcaaaagatggctggcaaggcgatgtttatgtctttttattaaaagccattgcttctaatcctccgacgctgacatttcgttattctgacttagtatctcgagtgacctcgttatgtcatggcgatagcccaagcggttctagtataaccagtgcatgtcagcactcaactgctattgccaacgatgctgcaaatagcagtattatcgagtgggatcaagaaagcgatgtattagacatcagagatccttacttactattctaccttcgctggatttag

SEQ ID NO: 38554 - DNA, 450 bp, Escherichia coli
atgaatgagtttaagcgttttgaagaccggctgaccggaatgattgagtcgctgtcaccgtcagggcgtcggcgactggcggtagatattgcgaagaaactgcgccagcgccagcagcagcgaattaaattacaaaaaggcccggatggtacgccgtatgtaccgagaaaaaaccaaccagtgcgaaataagaaaggccggataaagcgggaaatgtttgtgaaattacgcactaaccggtttatgaaagcaacagctagcgagagtgcggcggtggtggagtttactggtaaggttgagtgtattgcgagagtacatcaatttgggttggctgataagcctagttacaacagtaaggctgtggtttatcctgttcgtatacttatgggaatctcagagcgtgatacgaaatttgttgaagaagttattattcgctacctatctcattag

SEQ ID NO: 38555 - DNA, 651 bp, Escherichia coli
atgcatactggctttaagggaacttatgacgcacttttgaggcttgagaaggctatagaaggtctgaccatccaagatgggttgatgacgaatactcttggggttgatgttccggcaataacatcagatgacctaattgaccaaataatttgcattattaacaagctgaaagcatatggtgatattgaactaactgaaaaagaaattgccgcttattcatctctccctgaaaaaattgacacactcattagagttcacgtcccagagttctcaggcgttaactccgcacgagctatatcttcatatatgctaacactggcatatgttgaccatttcttggatgaatcgtttacatggaagcggttggataatgctaatttacttcctagaaatttaagcagaaaaattaaaagcatggaggcgagaattaacaagattgatcctgagatggatgctcttgagagtaaagttaaaacgattaatgatgctcatgtagctgcagaaaatatacctatagacttaaatgaattaaaggaatacaacaaagaagcatctgatttaaaggagaagatatctaaaactcatttcagtttagagtcccaagaagaagccgcaaaaaaaattattgatgagttgcaagaaaaaatatag

SEQ ID NO: 38556 - DNA, 369 bp, Escherichia coli
atgtctacaaaacaaattaatcaacgtttcaaactcgcagaggattatgcttataaagcttctgtggctaaagcgtatgagggatacaaaaatgaggcatgcaaggtatcagatggagagttcgaaaaacgcttatttgattctgcgctaagtcgacttgaagaggctccattgcgttttgtgaaagatgaagatcatactactccttggacagaaatgcttaattctaagtcgtttcaaaaattcttagatgcctccattgataatgtaaattatgttaaagggattataagtaagaaaggccaatcagcagctaaagcaagcaatgatgaggttaatcacattgaaaaactaaagaatgaagcttga

SEQ ID NO: 38557 - DNA, 168 bp, Escherichia coli
atgacgatccggaccaaagaacgtcgacgcctgcttcacgaactgggtaccggtatttccagagacacgcacccaggcggcatagcgtttcacaccgtcgagcatggtttcgggtgtcacaccttccctgattcgggctttccaggctttaaaagcggcggattttga

SEQ ID NO: 38558 - DNA, 150 bp, Escherichia coli
atgtctgatgatcgttcccggcatgatcgtctggcggttcgcttatcactcattatcagccgactgatggccggagaatctctgtcactaaagacactgtcagatgaatttggcgttacagaacgtactttacagcgcgattttcattag

SEQ ID NO: 38559 - DNA, 930 bp, Escherichia coli
atgagtgttgcaaggcatcatcattttttatcccaatgttatttgaaagggtttacaagtaatggggggaaaaaatcaaaattaactgtaatagatttaaaggagcgcaaaacctttgagagtaatactcgcaatgtcgggggggttagagatttcaaccgattagaattggatggagttgacccaaactatctcgagagttctcttgcagagtttgaaggcagtgtcgctactcatttaagaaaacttgaggaggggggcgagttttcaggcgaaaccaaagatgttattctggagtttatttccttattggcaatacgtacgcctgctcagcgagaacatttatcatctccattgaaacaaatagcaaagtttatcatgaaatcctcagttagttcggctgagcgttgggacgattgcaaattagcttatgagaaagaaatgggtgagtctttgccatatgatctcgcttacgaaaaaattaaaaattttgtggatggggataatttcgaaatcaatgtaatcagagagttcatgatagatatggaaatgaaatgtgtacctgttatcaccaagttgttgcatcaacgcaactggtcacttatgaccatatctgatgggcaagggtcatttataacttcagataacccagtttgcttaatgtggactaatcctgaattagcacgaggcccttattcccccgggtttggtgtaaaagacactttagttttgttcccagtatcaaaaaaccttcttttggcgggcgagtttgatggtcatgagggtgtattcagttgtaatgaggagcaggctgcggtcttcaatacttcagtcattcggcataccgcagaaagaatattttcatctaatgataatttcaaatttttagactcatctaaaaaaatgaagcaaggcaaaagcctggtttga

SEQ ID NO: 38560 - DNA, 327 bp, Escherichia coli
atgacgacgttaactcaatgccagcagcaggtgctggatatgctgatttcttatcagaaagaacgtggcttcccgccaaccaatcaggaggtggcaaccatgctgggataccgttcggtgaatgcagcggtggagcatcttcgcgcactggagaaaaaaggcgtcatcacgataaagcgtggtgtggcccgggggatcacgcttcataccgcggtgaaggacgacgacagcgaggcggtcgggattatccgctcactgcttgccggtgaggaaaacgcaaggctgtgtgcaactcactggttacatgagagaggcctgaaagtatga

SEQ ID NO: 38561 - DNA, 654 bp, Escherichia coli
atgagtaataaatattgccaggtgctggtggagctgcggaacaaaccagcccatgaactgaaggaagtgggcgatcagtggcgcacgccggacaacattttctggggaattaacaccctgtttggcccgtttgttctggatctgttcaccgacggtggtaacgccaaatgtgccgcgtattacacggcggaagacaatgcgctggcgcatgactggtcagaacgtcttgcggagcttaaaggtgctgcctttggtaatcccccatacagccgcgccagtcagcatgaggggcaatacatcaccggcatgcgttacatcatgaagcatgccagtgccatgcgtgataaaggcgggcgctatgttttcctgatcaaagctgccaccagcgaagtgtggtggccggaagatgcagatcatattgcttttattcgcgggcgtattggttttgaactgcctgtctggtttatcccgaaagacgagaagcaggtgccgacaggagctttcttcgctggtgctattgctgtttttgacaagacctggaagggaccggcaatcagctacatcgggcgcgatgaacttgaggcatgtggtgaggcgtttctggcgcaggttcgccagcaggcggaaaaactgctcagggagatggcggcatga

SEQ ID NO: 38562 - DNA, 378 bp, Escherichia coli; identical to SEQ ID NO: 9199

SEQ ID NO: 38563 - DNA, 264 bp, Escherichia coli; identical to SEQ ID NO: 20307

SEQ ID NO: 38564 - DNA, 288 bp, Escherichia coli
atgctgatttcttatcagaaagaacgtggcttcccgccaaccaatcaggaggtggcaaccatgctgggataccgttcggtgaatgcagcggtggagcatcttcgcgcactggagaaaaaaggcgtcatcacgataaagcgtggtgtggcccgggggatcacgcttcataccgcggtgaaggacgacgacagcgaggcggtcgggattatccgctcactgcttgccggtgaggaaaacgcaaggctgtgtgcaactcactggttacatgagagaggcctgaaagtatga

SEQ ID NO: 38565 - DNA, 288 bp, Escherichia coli
atgctgatttcttatcagaaagaacgtggtttcccgccaaccaatcaggaggtggcagccatgctgggataccgttcagtgaatgcagcggtggagcatcttcgagcactggagaaaaaaggcgtcatcacgataaagcgtggcgtggcccggggtatcactcttcataccgcggtgaaggacgacgacagcgaggcagccgggattatccgtgcactgcttgccggtaaggaaaacgccagactgcgtgcagcccactggttacatgagaggggcctgaaagtatga

SEQ ID NO: 38566 - DNA, 234 bp, Escherichia coli; identical to SEQ ID NO: 6574

SEQ ID NO: 38567 - DNA, 393 bp, Escherichia coli
atggattttatcgaaaccgtcagtgcgctgatgaatgcaacccccggacgtgatctctgctggctcctgacccgtcatcctgaaaaaccggaataccacgtggtgctgtgcgtcagacaggagtatttcgatggccctgaattggaccggttgatactggatgcctggagtaacgtactgggcttcgcgtcaccgggtgaagcaaagcagtatcagaagcagatcacccgggatgtggtgctggacagtcgttcaccggactgtgaaaacatcctcaaagagttgatatgggcgttcagtgatttcgcccgcgatcgtcgtggtgtgcgcgatccggaagcccgttgcctcgccggtaatcccggctatcccggatctgcaggaccgttctga

SEQ ID NO: 38568 - DNA, 312 bp, Escherichia coli
gtgattgagtatgaacccgaaaccagtgcactcacggtaagcggaattaaaacggccagcgtgacggcttctgattctgttactgccacggtaccggtggtcacggtgaaagcgtcaacccgtgtcaccctggacacaccggaagtggtctgcactaacaaactgactaccggcacgctggaagtgcagaagggtgggacgatgcgcggcaacattgaacacaccggcggtcaactctcatcaaacggtaaggtactgcatacccacaaacaccccggcgacagcggcggaacaaccgggagtcctttatga

SEQ ID NO: 38569 - DNA, 324 bp, Escherichia coli
gtgcgctgtgttgttggcgaggtttttgatgttgcggttgatattcgtaaatcgtcacctacatttgggaaatgggttggggtgaatttgtctgctgagaataagcgtcagttgtggattcctgagggatttgcacatggttttttggtgctgagtgatttagcagaagttttatataaaacgaatcaatattatgctccatcacatgaaaaaaatattatatggaatgacctcttgcttaatattaaatggccgagcacagcactgatcactctgtctgataaggatgcaaatggggaaagatttgaactaagtgagttttga

SEQ ID NO: 38570 - DNA, 444 bp, Escherichia coli
atgccatggagtatttatcaggatatacagggagcaacatttctcctgaatatggctgcacttctgaaagccaaaatgacgacgctcaactcactaaacattcttcaggagtttgcatcaccatggttaagcacacgtcttgacagcattatttaccgcgtccgccagggggatcatcttggactggctttgcgtcagtgcggttatcagttcccatccagggaagcagccaacttcctgtctttattacagggagatggcgcaacagagctaatcagcaattatggtcaacgatggcttagtcaaacacttcaacgtgtaaagaaacgggcaaacgtgattcgtttaattatgctgatatttcttgtcatgtctctcatgttactggtttttgccattatggatattcagtctattagtgacaacagcatgggtaacttttaa

SEQ ID NO: 38571 - DNA, 309 bp, Escherichia coli; identical to SEQ ID NO: 31415

SEQ ID NO: 38572 - DNA, 1194 bp, Escherichia coli; identical to SEQ ID NO: 5954

SEQ ID NO: 38573 - DNA, 822 bp, Escherichia coli
atgttcatactcttcgccgagcgaaaagttggggaacagcacgggccggccgcgcaaggcgtgctggcagccgtgcagaccctgcgtgagatgaacgccgacaacctgcgcaaggtgccggccgatgcacccacggccttcatcaagccgcgctggaagtcgctggtgatcaccccggaaggcctcgaccggaaattctacgaaatctgcgccctgtccgagctgaagaacgccctgcgctccggcgacatctgggtcaagggctcgcggcagttccgcgacttcgacgactacctgctgccggccgagaagttcgccgcactcaagcgcgagcaggccctgcccctggcgatcaacccgaacagcgaccagtacctggaagagcgtttgcagctgctggacgagcagttggccaccgtcacccgcctggccaaggacaacgagctgcccgatgccatcctcaccgagtcagggctgaaaatcaccccgctggatgcggcggtgccggatcgggcgcaggcgctgatcgaccaaaccagccagttactgccgcgcatcaagatcaccgaactgctgatggacgtggacgactggacgggcttcagccgccacttcacccacttgaaggacggggccgaggccaaagacaggacgttgctgctgtccgcaatcctcggtgatgcgatcaacctcgggctgaccaagatggccgagtcgagccccggcctgacctacgccaagctgtcctggctgcaagcctggcacatccgcgacgaaacctattcggggtcggttccggctgagggcgaaatgacaccctaa

SEQ ID NO: 38574 - DNA, 426 bp, Escherichia coli; identical to SEQ ID NO: 6184

SEQ ID NO: 38575 - DNA, 699 bp, Escherichia coli
atgcaggatatccggcaggaaacactgaatgaatgcacccgtgcggagcagtcggccagcgtggtgctctgggaaatcgacctgacagaggtcggtggagaacgttattttttctgtaatgagcagaacgaaaaaggtgagccggtcacctggcaggggcgacagtatcagccgtatcccattcaggggagcggttttgaactgaatggcaaaggcaccagtacgcgccccacgctgacggtttctaacctgtacggtatggtcaccgggatggcggaagatatgcagagtctggtcggcggaacggtggtccggcgtaaggtttacgcccgttttctggatgcggtgaacttcgtcaacggaaacagttatgccgatccggagcaggaggtgatcagccgctggcgcattgagcagtgcagcgaactgagcgcggtgagtgcctcctttgtgttgtccacaccgacggaaacggatggcgctgtttttccgggacgtatcatgctggccaacacctgcacctggacctatcgcggtgacgagtgcggttatagcggtccggctgtcgcggatgaatatgaccagccaacgtccgatatcacgaaggataaatgcagcaaatgcctgagcggctgtaagtttcgcaataacgtcggcaactttggcggcttcctttccattaacaaactttcgcagtaa

SEQ ID NO: 38576 - DNA, 426 bp, Escherichia coli; identical to SEQ ID NO: 6184

SEQ ID NO: 38577 - DNA, 681 bp, Escherichia coli
atgaaacaatacagcgaattagaaaacaatgttaagagattcattgttgagcatgaaaaagggatttctattgatgatattcatcataagttccggatgaaggatggtcagaatcgcaagatggcagattatcttattgataataaaaagataattttggagatgaaaagtcttttttctgacagggtcaagaatgtcaatgataaactgaatgagttggttaaaactgatagttggcttgcaaaaaactggcatggtgctattcatttagaagagttgataaaaagacacccagactcaaagcgatttagaaatgatataatgaactttgcttatgaaaatattaaaacaaagatagttaaggaagctaataagcaaataaatgcaacaaaggatgttttggatttaaatgactcgattggcgggttgattttgttaaatgataatgtcttttcacatgagtctaattatttgtcagatgaaatattatatttgctaggcacaaagagatattcgagtgttgagtttgtggtttatattgcaaaattgattgataaacaggttgatgtttgtgtgctacttgacagtcaatctaaaaataaaaattatattgaatggtatatgaataatgtttttttattgaactgggcgtcttttaataaatatgcaataaagatgtag

SEQ ID NO: 38578 - DNA, 192 bp, Escherichia coli
atgttaaagcctgcagatgttgtttgtttgaaaagcggtggatttaaaatgactgtatctgactctactgaaactcatgctaaatgtatttggcatgataaagaaggagttttgcacgaggagtcattctccattgatttactggaaatagcagagagtaaaagtggtatgctttgtcgtccacgtaagtga

SEQ ID NO: 38579 - DNA, 414 bp, Escherichia coli; identical to SEQ ID NO: 7721

SEQ ID NO: 38580 - DNA, 786 bp, Escherichia coli; identical to SEQ ID NO: 9416

SEQ ID NO: 38581 - DNA, 936 bp, Escherichia coli
ttgctcaatggcttgttggtattgaaagcggtgtgcatttttttgccggtttttgcagacaccgggcatgagcatccgcagacaatggagtatctcgattatctggagaaccgactcgggccggttaaacgggttaaagctgacttctcccgacagattgaaggtaagcgcaagtttattgctgagaaatggcctgtttctctggttgaagagtgcggaatgtctccgggggaagcggcagagcgcatcaattgtgcgctggaaattctcaagcctactggtatcccatttcttgatttgtgcatgtggaaagggcgatttccttccactaaagccagattttgcacttttgaccttaaacatgagccagtacgtactcaggtcgtgttacctgcgcttaatgagtttgatgaggtaattagctggcaggggattcgcgctcaggagtctcctgcgcgcgcgggtctgcctgcctgggaagaggatgcggacaatacgcccgggctccatgtataccgtcctattctgaactggacgcatgaggaggtatttgcatttgcaagacgtcatggaattaaacctaatccgttataccagcagggatgcagtcgtgtcggttgtatgccctgcatccacgccagaaagtctgaattagctgaaatttttagtcgctggccggaagaggttaagcgtgttgcggaatgggagcgacttgtcgccgcatgctccagacgcggaaattctactttcttcccgtcaactcatgacccgcgtcgtgcggaacgccgcattgatattattactgtcgatgcttacggaattgagtcttatcgtgactgggcgatgaccacgcgtggcggggcacagtttgatttgctggcttcggtgaatgataagtcagtttgcagtagtgtctatgccggtgtatgtgaatga

SEQ ID NO: 38582 - DNA, 528 bp, Escherichia coli
atgagtgcacgtggtatcaacaaggtcatcctcgtcgggcgtctgggcaatgatccggaagtccgttacatccccaacgggggcgcagtggcaaacctgcaggtggccacgtcagaaacctggcgcgacaaacagacgggggaaatgaaggagcagacggaatggcaccgcgtggtgctgttcggcaagctcgcggaagtggcaggtgaatatctgcgtaagggggcgcaggtctacattgaaggccagcttcgcacccgtagctgggaagataacggtattacccgttacgtcaccgaaatccttgttaaaaccacgggcaccatgcagatgctggggagtgcaccacagcagaacgctcaggcgcaaccgaagcctcagcagaatgggcagccacagagtgctgacgcgacgaaaaaaggtggcgtgaaaacgaaaggccgtggacgtaaggccgcgcagcccgagcctcagccgcaaccgccggagggggaggattacgggttttcagacgatatcccgttctga

SEQ ID NO: 38583 - DNA, 141 bp, Escherichia coli
atggcgctggcaggcagtgaaatgaagcgcctgtatgccgtcgggagcgagaacgggggcgacggtgacgcattcgtcagggaagaacgcgaagcaatggacgttgtgttacaggcgctggacggggagcacatgtcatga

SEQ ID NO: 38584 - DNA, 228 bp, Escherichia coli
atgcaatatgcgaaacctgtcactctgaacgttgaagagtgcgaccgtctctcctttctaccgtatctgtttggcaacgattttctgtatgccgaggcgtatgtgtacgcgctggcgcaaaaaatgatgccggaatatcagggaggcttctggcacttcatccgccagccgtcaggtgacagttccggcggtgatgctggaaaaagtgatggcgctggcaggcagtga

SEQ ID NO: 38585 - DNA, 426 bp, Escherichia coli
atgcaatatgcgaaacctgtcactctgaacgttgaagagtgcgaccgtctctcctttctaccgtatctgtttggcaacgattttctgtatgccgaggcgtatgtgtacgcgctggcgcaaaaaatgatgccggaatatcagggaggcttctggcacttcatccgcctgccggacggtggcggttacatgatgccggatggcgaccgtttccacatggtgaacggtgcaaactggtttgaccgtaccgtgagtgctgatgccgcaggcatcattctgacttcccttgtgattaaccgccagttgtggctgtaccacgacagcggggatgcaggactgacccagctttaccggatgcgcgatgcgcagttgtggcgtcacatcgaatttcaccccgaatgcaacgcgatttacgcggcactggactga

SEQ ID NO: 38586 - DNA, 183 bp, Escherichia coli
atggggaaactcattccgtttttgtttatcgccttagacggcaaaagtgctgtcgcccacctgcgcttgcgcataccaggccataagctccgtggttcctggttctccttccgctggagcccagtgcgcatagtcatcggcagccacgggttgatagccaccgtgttttacttcaaaaattag

SEQ ID NO: 38587 - DNA, 498 bp, Escherichia coli
gtgccccgtatatttaaaaactttgaagttatcatacgtgctgcacaaatattacaagataaaaatattcatttttatcttacttttgatggtactgaaaataagtatgcaaaaagaatatataaattagcttccgaactgaaaaatgtacatttcctcggttaccttaatgcaaccgagatggttaacttttatcaagattcagatattatttgtttcccatcgaaactagaaacgtggggattaccattatcagaagctaaaacatacaaaaaatggatatttgcggcagacttaccttatgctcatgaagttttatataactattcaaaaactagatattttccatttgacgatgagaaaatacttgttcgctacatattagagtacacaagtaaaaatatgcatgaagatataaaaaatagtagggtgaattttaataatgatgcattgactggttttgaacagtttattgaatatatcctcaaggggaactga

SEQ ID NO: 38588 - DNA, 207 bp, Escherichia coli; identical to SEQ ID NO: 36337

SEQ ID NO: 38589 - DNA, 246 bp, Escherichia coli; identical to SEQ ID NO: 4533

SEQ ID NO: 38590 - DNA, 252 bp, Escherichia coli
atgttcaaagatggcgcggtgataaagcgaacttataccgaggaagagcagcgacaacaagcggaaaatgaaaaacaaagcctgttgcaacttgtcagggacaaaacccagctatgggactcacagctacggctgggcatcatttccgacgagaataaacaaaaattaaccgagtggatgctctatgcgcagaaagtcgaatctacagacacctccagcctgccagtaacgtttcccgaacaaccagaatga

SEQ ID NO: 38591 - DNA, 252 bp, Escherichia coli; identical to SEQ ID NO: 38590

SEQ ID NO: 38592 - DNA, 246 bp, Escherichia coli
atgtttaaggacggaactgtggttaagcggatttatacagcagacgaacagcaacaacaggccgaatcacaaaaggccgtgttgctttctgaagctgaaagcgttattcagccactggaacgtgctgtcaggctgaatatggcgacggatgaggaacgcacacgactggagtcatgggaacgctacagcgttctggtcagccgtgtggatacagcaaagcccgaatggccacaaaagcctgagtaa

SEQ ID NO: 38593 - DNA, 246 bp, Escherichia coli; identical to SEQ ID NO: 38592

SEQ ID NO: 38594 - DNA, 252 bp, Escherichia coli
atgttcaaagatggcgcggtgataaagcgaacttataccgaggaagagcagcgacaacaagcggaaaatgaaaaacaaagcctgttgcaacttgtcagggataaaacccagctatgggactcacagctacggctgggcatcatttccgacgagaataaacaaaaattaaccgagtggatgctctatgcgcagaaagtcgaatctacagacacctccagcctgccagtaacgtttcccgaacaaccagaatga

SEQ ID NO: 38595 - DNA, 252 bp, Escherichia coli; identical to SEQ ID NO: 38590

SEQ ID NO: 38596 - DNA, 246 bp, Escherichia coli; identical to SEQ ID NO: 38592

SEQ ID NO: 38597 - DNA, 246 bp, Escherichia coli; identical to SEQ ID NO: 38592

SEQ ID NO: 38598 - DNA, 669 bp, Escherichia coli
gtggagccgttttgtggggcagcagcgctctattttcttaagacacccggcaagatcgaagtcatcaatgatatcaacggtgaactggtgaatctgtaccgggtggtaaagcatcacctggaagaatttgtccgccagttcaaatgggcgctggtcagccgtcagatctacaaatggctgcagatcaccccggaagaaacactgacggatatccagcgtgcggcacggttctactaccttcagaagcaggcgtttggcggcaaggtggcagagcacagcttcggtacctccaccacatccccgccacgcttcaacctgctacgtattgaagaagaactgtcagcggcacacctgcggctttccagaacagtcatagaacacatggactggcaacagtgcattgagcgttatgatcgtccgcacacgctgttctactgcgacccaccgtacctgggtacggaaggctatggtgtggattttcctgaagggaactactcgcggctggcagagctggcccggtgcatcagaggaaaaatgataatttcggtgaacgacatcccgcagatgcgcgaggtgttcactggactgaacatacagacagtgaatatcaactacagtctggcgggtaaacccacgccgcgccgtgaactggtaatctgcaacttctga

SEQ ID NO: 38599 - DNA, 474 bp, Escherichia coli
gtgtctttcccgtatgccggagaatggctgaccgaagacgaaatcagggctgtacttgcggcggtgcgcgatgcggtacgcagtgtcagttgccgggtggcagaagatgcgcggcgtatccgggcggcgctgaccaccaccggtcagacgttgctgactcgccagacgcgccgctttcgtctggttgtgaaggaaagcgatcacccctgctggctcgatgaagatgacgaaaacctgcccgtggtgctcgatgccatcgtgaaccggggagcacgtttttcgtcggtggaaatgtacctggtcagcgattgtattgagcatatcctgtccagtgggctggcctgcgatgtgctgcgtataccggatgaaccgccccgccgctggtttgaccgtggtgttctgcgggaggtggtccgggaagcccgggccgaaatccgcagcatggcggatgccctggcaaaaatccggaaatga

SEQ ID NO: 38600 - DNA, 216 bp, Escherichia coli; identical to SEQ ID NO: 5123

SEQ ID NO: 38601 - DNA, 129 bp, Escherichia coli
atgaagctgatttttcagcatggtgatggtcgtctgctgcccgttggcgacgttgttcgccctgtccagcgaggtgcgcaggctggcgttttcatgcttcgccagaaacagaccggccaccgccagtga

SEQ ID NO: 38602 - DNA, 132 bp, Escherichia coli
atgaagctgatttttcagcatggtgatagtcgtctgctgcccgctggcgacgttgttcgccctgtccagcgaggcgcgcaggctggcatttttatgtttcaccagaaacagccccgccaccgccagcgataa

SEQ ID NO: 38603 - DNA, 600 bp, Escherichia coli
atgagtaaagactggcaaatattaaagaaatccctttcctatccattcgatgcgataagaaaaaacaaaagagagttttttatttggatcgtttttacagttgtttgtgggcaaatggggattattgcaaatataatcataagatattattcacattcaataccactagatcaatctatttacatagaaggttcgtcaggaagtttttacacattttccattgcattaatagcctctgcccttgggcctatgtttgtaactttttttagttcaaaacttgaatttaaaacaataaaaatcatatcaataatattattgattattttattacaattatcaggtataatatacgctgctacgcaatcaaaggatttaatcctaccaaattctaatgatttaacattcggtttaactcaacctataatttatgttatttctatagtcttagtatgctatacatttggcgtattaaaacttaacgctactgcacatacagatataaatgatgaaagttatatagaaaaagaagatgcaatagttatagatcagacaatggcaaccaatgaagtaactgatgatggtaaaggagttatgatatga

SEQ ID NO: 38604 - DNA, 1050 bp, Escherichia coli
atgaagttgaaatatattgaagttaatcaaccaatcggtactttctatttaacatcaataagagccattgacttgctcgatatagttagagttgatcgtcgcagagatttcgaatttggtgtgcaaagggatatttcatcatcaagagtttcagaaatcgcaaagtacactagtgagccggatgcgacttttccaacgccgatcataatttccgtcgatgattcatccaatttaaaaatggatgatacctatttttactttgagtctgaagtggttataggtgatgttatcgatggtcaacacagattatggggaattaaaaattcctctaatgctaaactttttgaactacctgttgttttaatgtttgatcttactgatgaagaaaaagcctatgttttctcaattattaatagtaaacaaactcgtgtaaatccatcaattgtatatgatttattttcgcttgcagaacgcaggagtccacaaaaaacatgccacgaaatcgcgagaggaataaacagtaatcctgattcccctttttataaaaagctaaaaatgcttgggaaaaaggaaataaaccaagataatgcatcattatcacaaagcactttcattaaatatcttatccaacatatttcaaaaaaacctgatgatgatgcaagaatgttaaaaatgaatctgccattaacgccaaataatcagtgtatattccgcgattattttatcgaagagaatgacgctgtaattcaaaaaataatattgaattattttaatgctattagcaatgtctatccagttgagtggaatacaccaagggaatattatttaagtaaactcacaggatatgcggcattaatgaaagtcttccctgtaatatattcaaagggcattaaagaaaaaacgttaaattatgactttatgctgagtgaagtaagtaaaataaaaagaaatcttgcagcgcgaggtattaattttaaagcgggtgaatttggcactaatgaatctgaaataaataagcttgtgaaaaacatcattgattcatgtagttaa

SEQ ID NO: 38605 - DNA, 327 bp, Escherichia coli
atggccacatcgcattatgcaatcacccaggaaaaagtatttcgcttgctcgaacgtctggaggcgctcgccacggaggaggatatatccccggagatgctggttgagtgcagccgtgtgatattgcgtcgcaagaacgacatcgcgcggttgacatctggcgcaccatccgtatcagccagtccaacgctttattgcagcttctgcaacaaatcccagcacgccgtcaaaaagttaattgctggggacgccgtttttatctgcgacgagtgcgtggatgtgtgcaacagaattatccggggagagaaagagggatcagcacgatga

SEQ ID NO: 38606 - DNA, 360 bp, Escherichia coli
  misc_feature (11)..(20): n is a, c, g, or t
gtgcgcctaannnnnnnnnntaaattcattaacctggaagatgatgttgctgatgaccaaattcgcggcaactacgtgcgtttccgcgccgtaattgagaacgatgaagaaggcattaagtaccagaacatcctcaaaacaatgggtgcaaaaggtgtcgtgtgcaacttcatccgtaagtcatcaatgatggaagggacagccagcacaactgaaaccagcaaaatcgatagcctgggagagtcggtatctgcttattgcaagattgtccacgatactgacggcggatttgatctgagcaaattggatattttgtgtcaggaaatcctcaccgaagcggagagttcggaggctgtgtga

SEQ ID NO: 38607 - DNA, 315 bp, Escherichia coli
  misc_feature (278)..(287): n is a, c, g, or t
atgataagcatcgtaaaacgtaacggccaaacagagccgttatccgaagaaaaatacaaccgcgtcgtaatgtatggcgtagaaggcattcgtggtgtaagcgcatccgctgtagcaatgggagctgcggccagcatttttgatgggattaccaccagccagttgcatgaggctttggttaaatctgccgctgatttgatctcaccagaagcaccaaattactcacaggtggctgcccgcctgaacatttttaaaatccgcaaagatgccttcggtcnnnnnnnnnngagttcttcgatctcttcaaacgaataa

SEQ ID NO: 38608 - DNA, 366 bp, Escherichia coli
  misc_feature (349)..(358): n is a, c, g, or t
atggctcaaaatcatgaagtggttgcatttgatacccatcaaaaaaaagttgacttacttaatgataaactctctcctatagaggataaggaaattgaaaattatctttcaactaaaatacttaattttcgcgcaactactaacaaatatgaagcctataaaaatgccaattacgttattattgctacaccaacgaattatgacccaggttcaaattactttgatacatcaagcgttgaagctgtcattcgtgacgtaacggaaatcaacccaaacgcaattatggtggttaaatctacggtcccagtaggtttcacaaaaacaattaaagaacatttaggtattaatnnnnnnnnnnggtattaa

SEQ ID NO: 38609 - DNA, 210 bp, Escherichia coli; identical to SEQ ID NO: 8156

SEQ ID NO: 38610 - DNA, 153 bp, Escherichia coli
atgtcgtcgcgtgtcagaactgagattaaattgctggcgctgctggcctacgtgccaatccggtacctggaaatcatcatcagcgtcgatatggacgaatataaaaacatttacgttatatcccaaaaacacacaggtcttagggaggtttaa

SEQ ID NO: 38611 - DNA, 345 bp, Escherichia coli
atgggcgaagttattgattttgcagaaaggcaaaaaggcagaaagaagaaaaaggcatcttccattccgcccattttaagaaaattccgtgtccatgcgatcaggttactcgccagcatcatcaaatccggcacttattcagtcgtttatatcgttaagaaaattacgggaaagttaatcaagtttttcgcaattttaacgatttttatttttgttgtcgaatatatcgcaggcgatataggttacaaatctatatataacgctgcgttattattatcgttactttccgtaactaacgttctggcgagcgtatacctgaagaaacaattgaggacaaagcaatga

SEQ ID NO: 38612 - DNA, 573 bp, Escherichia coli
atgaacatattccccttccccactgtagaaaaccttattctctgggcttgcggcgccatcgtgctgctcgccactttattctttaggcgatcagtacggcaccggcgccataaacggaaacagcaaagtgcgcgtcgggtactggaacgcataaaaacactgccgggctttccccaaaaaattagctacctgcggaaaattgacccctttgtatttgaagaactgctgttacatgcctttgaagatgccggttttgagatctccagaaatgcaaaatataccggcgatggcggcattgatggccggttctgcgttgacggccgcaaatttctcattcaggccaaacgttattcatcctgggtttcgacggcacacattcaccagctggatgcactggcgaaaaaagacggcagtcttgctgttttctgtcacactggcaaaaccagaaaacagacgcttgacacgtataaagcgcatgagcgggtgatgattataagcggtgagagattggtaagccttgtcgaaggagataccaggctggcgaaccggctccggtcattcgcccggcagtga

SEQ ID NO: 38613 - DNA, 231 bp, Escherichia coli
atgcggatcagtgtcgatgtctttgctgagttacttagcattaagccaggggaaatcgtttgggctgtcaatcacggcgggactttaggggggctagaattgccccctagtcagcgaggtataaaaaacgttcgttataaggggccgaactctcttacttttgaagtcacagccgctatgaaatttgcggaagaatttaagacgcgtaagaaatcactgccgggcgaatga

SEQ ID NO: 38614 - DNA, 882 bp, Escherichia coli
atggcagaggataaaccgctttctaagaagcaacttaaaactgtcgaagtatcggcattgataaagcaagacccgccgaaaggtaatgatctggcatttacccattcaattttatgtcaggtcggcttaccacgttcaaagccagaaggccgcgaatttatgcgccgctccggggatgcctggctagtagttcaggccggttggcttgatgaaggcaatgggccagtagaacagtgcttaccatacggcccaatgccgcgccttgctatggcctgggtatcatcattcgcattacggaataaaacccgtgagataaaaataggcagtagtgctaatgaatttctgaaaattttaggtatggaaccgcaaggcgccaggcataaaactctcagaacgcaaatgcacgcactggccgcttgcaggcttcagctcggttttcgtggccggacgtataacggccagccagttgagcaattcgatgcgtggttaagaaatgaagataccgggcaacaatcgctatggccgggcttgctgttactttctgaaggttattataaagggctgctggaaagcgctgtgccactggataaccgcgcgcttagcgcgctaaagggatctgctctggcacttgatatttatgcctggctggcgcaccggcttcaccgaattgagggccgccccgttttactttattgggctaaccttcgcgatcagtttgctcaggaatataaagggaaagaccccgataaagatttcaaaaagaaatttattccagcgttaaaagatgtactggctgtatatccggccgctaaagttcagcaggtaaagggtggcattttactttattcgtcacctccccctataccgtacaaaataccttaa

SEQ ID NO: 38615 - DNA, 330 bp, Escherichia coli
atggcacagaaaaacagaattaccgaagcagaatggactcagttattgcctcatatggcttcgctggcacacatcacaaccgatattggttattctgttttggtcaaaggagaaaaagcgtcagatgttgcagctcgtgtaggccgttctaaacagaatatttccagcacagcaaagcgtatctgggatctttatcaaaacaccacgttacatacagaagacggcgaagcccttcagcttgttcaggtctggattcctgaaaaacttgctaaaaaggttttagccgaggctgccaagtacagcgttaataaaaatagtgtgtctgaataa

SEQ ID NO: 38616 - DNA, 147 bp, Escherichia coli
atgttaagaggtgaaaaagaacaggagtggtttattgctgaaatgtattacccccctgaatttgaatatgatacttctatgcacgataaagaaatagaatatttgttatcaaaacctgaagatctaaaacgttacgaaccgaaataa

SEQ ID NO: 38617 - DNA, 321 bp, Escherichia coli
atgaccacacaaacccttgagcagatcacgaaagattttcgtcgccagtgtgaaatttttgcgagcgaacagcagccacgctgcggcctgatttatgaactgtatcagcgccgcctgagcgcggatattgacggctaccttgctggcgttccggccgcgtatcaggatgaactgatcgcagtggcgcggcgtgaatttgattatctgacccaggacgaaatcgctgatgaaatccgccaggatcgggaaaacggttattgcagccacggtattgatcgcaattgttgcccgctgggctgcggtgatatagacgattattga

SEQ ID NO: 38618 - DNA, 213 bp, Escherichia coli
atggaaatcaaagcaagtcagtttgtcacatcaagcggcagaagggtgttaacggatgatggcattcaggggatgggcggggaagcaggtgtcggatctacgacagagaaaaaacaggggcaggtggcaagtgcgatttatgctaactgcgagtacctggacaatagacagcttgatgaaattatcgagtgggttcgactattcaagtcttaa

SEQ ID NO: 38619 - DNA, 435 bp, Escherichia coli
atgaataaagctgctgatctgaaaccccgcaacttatcggctgctgtcagattgcgcctggatgaaatcgagaactggctggacaggggaattacacggcaggaaattgctgaaatcctcggcagcgaatacagcttttcggtgacggccaaagggcttgagatggcactgtatagagcgcggcaaaaccggaaaagtgtattgcacaatacacatgatagtaagccgggtgatgatgatagtgtattgcacaatacacaaggtaagagtagcgcgaagggtacagaggaaaatgtattgcacaatacacaaaaaccatctgagcctgaaccgcaggcaagtgaaaaggtagaaagtcccggcattattgataaagagttcttcaataaaatcggtgaggatttcgaccctaagaagttcaacaaaaaattctga

SEQ ID NO: 38620 - DNA, 252 bp, Escherichia coli
atgaagctgatgaaaccgaactcactaactttagcttttggcagtgcttttttgatagtcggcctgatcgtgttagccagcgccggtgctgctgaagatggcgatatgctgcaagaggctttaaacgctctcttagtggaaacgagtccttttcatagcattgcgattgttggttttgtcatgagcttgataggcgcaattttatcaggctattggatgctgtttggtagctccagtaacaacattggttaa

SEQ ID NO: 38621 - DNA, 183 bp, Escherichia coli
atgttttcggaacaacatcagggaacggctaattccttgatgcggatggggtctgtaatgcagaccctatctattaacgtcatgattgcatctcaaattttctccttatcttcattaatcaaaattcatttcatttgtgaaacatcacaatatttagaaaatggccctcttgcaagtgcataa

SEQ ID NO: 38622 - DNA, 135 bp, Escherichia coli
atgatctcactcccatcaggtacccgtatctggctcgttgccggcgttaccgatatgcgtaaatccttcaacggactgggagaacatgaaccgccccgggaatcctggagactaaacttcctgagaaagaggtaa

SEQ ID NO: 38623 - DNA, 1002 bp, Escherichia coli
atggatattcgcacacgaaagacaaaatttttagagtcgttagattcaactgaagtgatacgcaaagcagtaagtctcgctatagattgcattattgataatcataatagtaatgaagatacccccttagttattaccagctatgatgatctctgtagaatccaggtgctaaattatgtacaggagttttgcgaagctgcattccctgatatggatgaatattactttagtcctaacatacttcgcatcaacggcaagactagtgaagaagcttgtattaacttaattaaactcttaagaagtacaaaaggcatgctattctggtccgatgccccatcgtggttcgctagcctccccgacggattattccatgttgttaacattgatcaaaaaatcgttactcgcggccttaataagaaaaactctaagccgacaataatcaataaagattacagtgtagatacactactatcagagctatttttgaatggcgcacacatggagcaatccaacgtacacaacgtttctgagggaaacatgaagttctatgatgaatgccatgctggattaatcagaccaatacccgctccaataggcgcgtcatacgatgaagagatcacaattaattctccagattggcaaaagctcgcgtgtgtagctttacgccgctatcagtcgaaggaatgtcatgacggaatgcaatgggatacaaccgatcatggttggactgatgtaatcgcgtatccattcgtcgaagaaatacaatcaatggataatagtggttatcgacaatgtttagttgggctggtcacaataaacaattcaaatgcaaattctccgtacctatctaccgtttggatacatccattttatcgcaggagagggttattaagtaagttatggccaaaattacaagagttatatggaagtaacttcgaaattgagcgacctaatgaaaatatgaaagcatttctgaaaagtgcgaaacacgcagattactaa

SEQ ID NO: 38624 - DNA, 264 bp, Escherichia coli; identical to SEQ ID NO: 24468

SEQ ID NO: 38625 - DNA, 405 bp, Escherichia coli
atgagtcttactttgccaattatgtactttaaaacaggaagcgatcttagccagataacgcattttgaagtgaactacccggatgattttgtaaaacaagcgtgggaacggccagaaataaatctcttcatagtttgtgtagcaacaaagaaaggcgcggttcgggagatcaagggaggcatggccgtacttaccagcatacccgccagtaatgggcttgaactatccagggctcttgatgacgttcttagaaaatctgatgaactccgcccgctcgcaggtcagaagaataacgtgttccttccggcaaaggttggtcttgcgggtgacccccccacagaacaagagttgcttagtcttttttatcagcagtgcctgaaacacggaacatggggtaatgcctga

SEQ ID NO: 38626 - DNA, 1374 bp, Escherichia coli
atgccacgcattaaacctcttctggttctttgtgctgctttactgacggtcacacccgcagcgtcagcggatgtgaacagcgacatgaatcagttctttaacaagctgggcttcgcctccaataccacccagccgggcgtctggcaggggcaggccgccggctatgcttacggtggctccctgtatgcccgtactcaggttaaaaatgttcatctgatttccatgacgctgccggatatcaatgccggatgtggcggcatcgacgcctatctcggctcgttcagctttattaatagcgagcagttgcagcgttttgttaagcagattatgagcaatgctgccggttacttctttgaccttgccctgcagacaacggtgccggaaatcaaaaccgcaaaagacttcctgcagaaaatggcaagcgacattaacagtatgaacctcagttcctgccaggcggcacaggggattatcggcgggcttttcccccggacgcaggtgtcccagcagaaagtctgtcaggacattgccggtgagagcaatatttttgctgactgggctgcttcccggcagggatgtaccgttggcgggaaatctgacagcgtcagggataaagccagcgacaaggataaggagcgggtgaccaaaaacatcaacatcatgtggaatgcgctttccaaaaacagaatgtttgacggcaacaaagagctgaaagagtttgtgatgacgctgaccggctcactggtgtttggtcccaacggcgaaatcacaccgctatcggccagaaccactgaccgctcaattatccgggccatgatggaaggcggtacagcaaaaatttatcactgcaacgattctgacaaatgcctgaaagtggtggcagacacaccggtgaccatcagccgggataatgcactgaagtctcagattactaaacttctggccagcattcagaacaaggctgtcagtgacacgcctctggatgacaaggaaaaaggctttatttccagtaccaccatccccgtcttcaaatacctggttgacccgcagatgctcggtgtttccaacagtatgatttaccagctgacggactatatcggttacgacatcctgctgcagtacattcaggagctgatacagcaggcccgggcgatggtggccacgggaaattatgacgaagcagttatcgaacatattaacgacaatatgaatgatgccacccggcagattgcggcgtttcagtcacaggtacaggtgcagcaggatgcgctgctggtcgtcgatcgtcagatgagctacatgcgtcagcagctttccgcccgcatgctcagtcgttaccagaacaactatcacttcggagggagcacgctgtga

SEQ ID NO: 38627 - DNA, 453 bp, Escherichia coli
atggtaaaagattggattcccatctctcatgataattacaagcaggtgcaaggaccgttctatcatggaaccaaagccaatttggcgattggtgacttgctaaccacagggttcatctctcatttcgaggacggtcgtattcttaagcacatctacttttcagccttgatggagccagcagtttggggagctgaacttgctatgtcactgtctggcctcgagggtcgcggctacatatacatagttgagccaacaggaccgttcgaagacgatccgaatcttacgaacaaaagatttcccggtaatccaacacagtcctatagaacctgcgaacccttgagaattgttggcgttgttgaagactgggaggggcatcctgttgaattaataaggggaatgttggattcgttggaggacttaaagcgccgtggtttacacgtcattgaagactag

SEQ ID NO: 38628 - DNA, 234 bp, Escherichia coli
atgagcgaatatttcagaatacttcagggactgcctgacggctcctttacccgcgaacaggcggaagccgttgccgcacagtaccggaacgtctttatcgaggatgaccacggcgaacagtttcgcctggttgtccgtaataacggaacaatggtctggcgtacctggaattttgaggacggtgccgggtactggatgaaccatgtcatcagggatttcgggattcttaagtaa

SEQ ID NO: 38629 - DNA, 1209 bp, Escherichia coli
atgacgaataaccctaccgatgacagcagaccatggtcggtctttcttatttttctgcggcttggattgacatcttttggcggccccattgcgcacttgggctacttccgcgccgaatttgtcacacggcggcgctggctctccgaacggagctatgctgacttggtcgcgctttgtcagttcttgccagggcctgcaagcagccaggtcggcatagcggtaggactgtctcgggctggatacagcggggcgctggctgcttgggctggcttcacgctgccgtctgccatagccttgatcctttttgcgctcggcatctccagctatggcgattacgtctcgcagggcgcgttgcatggcttaaaagtggtggctgtggccgtggtcgctcaagcagtatggggcatggcgcgtaacctatgcacggatgggctgcgagtcaccatcatggcaattgctacctgcgtcgttttacttgtgccgtccgcgtggggacaggttggcgtgattgctatcgcaggcatcgcaggccggttattgttcaagccagcgaaagttgttgagcatgaccccctacctatcacggtcagtcaccgggccggcgtgctttggctctcgctgttctttgtcttgctgattggcctgccggtgttggccgaactgatgccaagtcaaaccatggcaatggtggattccttctatcgtgtcggatcactggtgttcggcggtggtcacgttgtgctgccattactgcaagccgaagtggtgccctccggctgggtcaacaatgaatcctttctcgcggggtacggggcagctcaagcggtgcccggccctttgttcacgttcgccgcgtttcttggtgcctcgatgaacaccgccccgtcgggctggatcggcggcattgtgtgtctgctggctatcttcgcgccctcgttcttgctggtcgtcggatcaatgccattttgggagcgtttgcgccgcaatacaggcatccaagctgcgctggccgggatcaatgccgctgtagtcggcttgctgctggccgcgctgtatcagcctgtatggactagcgccatctttcagccgcaagacttcggcttggcattagttgcccttgtcgcacttatgttctggaagctcccgccgtggctggttgtcctcggtagcggtgcagctgggggcactgttgcaaatagtcggtggtga

SEQ ID NO: 38630 - DNA, 450 bp, Escherichia coli
atgatgacgctggcggggaaaaatctccgcctttttcctgccggtccccggacagagcacaaaggaagtcgccgccggctccgctttacccggccatgcagggcatggccttgtggtttttcagttatgtggcctcagcgtcgtgtgcgggctgtgccgtgcctccatcttagccgggctggcagggatgcaagggtacgcttcgccgctgcggtcacccggtccctccttcccgtctgccgtgattttccggtcgttcacccgctcagatttcgcggtctcaccctccaactcccgccagccgtgtgcgtcaggctgcggcttcccttgcgccctgtgcatccccgccttatcgcccggcttttatggaggcacggcaccgcccggtgtcgcggaatatgtgaacaacggaggaaaacatcatgcaatatgcgaaacctgtcactctga

SEQ ID NO: 38631 - DNA, 861 bp, Escherichia coli; identical to SEQ ID NO: 9679

SEQ ID NO: 38632 - DNA, 483 bp, Escherichia coli
atgataaagcacctggtagcacccctgattttcacctcactaatactgactggctgccagtcccctcagggaaagtttactcctgagcaagtcgccgctatgcaatcttatggatttactgaatccgccggcgactggtcgctgggcttatcagatgccattctgttcgcaaaaaatgactacaaattgctcccggaaagccagcaacagatccaaaccatggcagccaaattggcctcgacagggctaacacatgcccgtatggatggacacaccgataactatggtgaagatagttacaacgaaggcttatcattgaaacgggcgaatgtcgtggccgatgcatgggctatgggtggacaaattccgcgcagcaatctcaccacacagggtttaggaaaaaaatatcccatagccagtaacaagaccgcccagggccgcgccgagaaccgccgcgtcgcagtggtgattactaccccttaa

SEQ ID NO: 38633 - DNA, 918 bp, Escherichia coli
atgggcaagtccaagcacaagatcagcaactggaaacagtacaaccaagccttggtgcaacgtggttcgttgaccgtctggatggatgagcaagccatccagcagtggcattgccagacccatcatggccgccgagggcgaggcttccattacagcgactccgccattgaaaccgcgctgatgctcaaggcggtattcaagctaccgctgcgtgccttggaaggcttcatcaactcgctgttcgagctgatgaatgtgcccttacagtcgccggactacagctgtatcagcaagcgcgccaagacggtcgaaatcaagtaccgcctaccgagccatggcccagtggctcacctggtcatcgatgccaccggactcaaggtctatggcgaaggcgaatggaaaattcgcaagcacggcaaggagaaacgccgcgtctggcgcaagcttcaccttgccgtagatgcggcgacccatgccatcgttgcagccgaagtcagcctggaaacggtgggcgataacgaggtgttgcccacgctgctcaaccccttgcgccgcaagatagaacaagtcagcgccgatggtgcctatgacaccaaagcctgttatgccctactacaaaagaagggcgccaaggccaccataccgccgagaaaaaatgcggcattctggaagacagaccatccacgcaacgaggcggttgccgcgctcaaggcaggagaactggagcaatggaaaaaggactctggctatcatcagcgctcgatagctgagaccgccatgtatcgcttcaagcagctcatcggtccgaaactgagtctgcggagctacaacgcccaggtgggtgagatcctggccggggtgaaagtcatgaacaaggtcatagggcttggtatgcctattcggcaggctgtcaactaa

SEQ ID NO: 38634 - DNA, 144 bp, Escherichia coli; identical to SEQ ID NO: 9158

SEQ ID NO: 38635 - DNA, 462 bp, Escherichia coli
atgctccacacactcactgaccagatacatttccaccgacgaaaaacgagcgccccggttcaggatggcatcgagcaccacgggcaggttttcgtcgtcttcatcgagccagcaggggtgatcgctttccttcaccaccaggcgaaagcggcgcgtctggcgggtcagcaacgtctgaccggtggtggtcagcgccgcacggatacgccgcgcatcttctgccacctggtaactgacactgcatactgcatcgcgtaccgcaccaagaacggccctgatttcgtcctctgccagccactcaccggcatacgggaaagacacctgcgttccgtctgccggaagtaccggcagcgactgccactgactgccggacagaacaagttccgctccggttccggtcagtttctgaatggcagaggccaggagcggcggcagtacgccgccgtgacggttgataagtaa

SEQ ID NO: 38636 - DNA, 462 bp, Escherichia coli
atgctccacacactcactgaccagatacatttccaccgacgaaaaacgagcgccccggttcaggatggcatcgagcaccacgggcaggttttcgtcgtcttcatcgagccagcaggggtgatcgctttccttcaccaccaggcgaaagcggcgtgtctggcgggtcagcaacgtctgaccggtggtggtcagcgccgcacggatacgccgcgcatcttctgccacctggtaacagatgcttcgtaccgcatcgtgcaccgcatcaagaactgccctgatttcgtcttcggtcagccattctccggcatacgggaaagacacctgcgttccgtctgccggaagtaccggcagcgactgccactgactgccggacagaacaagttccgccccggttccggtcagtttctgaatggcagaggccaggagcggcggcagtacgccgccgtgacggttgataagtaa

SEQ ID NO: 38637 - DNA, 327 bp, Escherichia coli; identical to SEQ ID NO: 10004

SEQ ID NO: 38638 - DNA, 324 bp, Escherichia coli
atgtatcccaaactggcaaaagcctaccccaccaataaattgccggatttacgcggtgaatttatccgtggctgggatgatgggcgcgggattgatgcgggacgtaccctgctttcagggcaggatggtacaagtttttctcattacggaggtaatttcgacattgggtctggtcattcaatcaataactatgaccaaattgtttctaaccaaccaggattttcccgtttttcatttgcagggccttcacgaggtgatggggttaattatgtaaccattcgtcctcgtaacattgcgtttaattatatcgtaagggcggcatga

SEQ ID NO: 38639 - DNA, 162 bp, Escherichia coli
atgcaggatatttacaatcgtaaaaactacactatgatacccagagtgtcagtttgtataaaaactctgtttacgctgaagaaacaattgagatgcaacttaaagttagtaaacatgccagtcaaaatatataatattatgattccacgcagctatatataa

SEQ ID NO: 38640 - DNA, 690 bp, Escherichia coli
atgactctcaataaaaccgatcgcatcgtcattacgctgggtaaacagatcgttcacggcaaatacgtaccaggctcgccgcttccggctgaggcggaactctgtgaagagtttgcaacctcgcgcaacatcatccgtgaggtgttccgttcgctgatggcgaagcggctgattgaaatgaaacgttatcgcggcgcgtttgtggcaccgcgtaaccagtggaattacctcgacactgacgtactgcaatgggtgctggaaaacgactacgacccacggcttatcagtgcaatgagcgaagtgcgaaatctggtggaaccggcgattgcccgttgggcggcagagcgcgcgacttccagcgatctggcgcagattgaatcggcgctgaacgagatgattgccaacaatcaggaccgcgaagcgtttaacgaagcggatattcgctaccacgaggcggtgctgcagtcggtacataatccggtgttacagcaacttagcattgcgatcagttcgctgcagcgggcggtttttgaacgaacctggatgggcgatgaggccaacatgccgcaaacgctccaggaacataaggcgctgttcgatgcgatacggcatcaggacggcgatgcggcagagcaggcggcgcttaccatgatcgccagctcgacacgaaggttaaaggaaatcacatga

SEQ ID NO: 38641 - DNA, 417 bp, Escherichia coli; identical to SEQ ID NO: 16762

SEQ ID NO: 38642 - DNA, 489 bp, Escherichia coli
atgattttggtgacggggggcgcacggagcgggaagagtcgccacgcagaggcgcttattggggactcttcacaggttctgtatatcgctacctcgcaaatccttgatgatgagatggctgcacggatagaacatcatcggcaaggccgcccggagcactggcgcacagtggagcgctggcaacatcttgatgaattaattcatgcagacattaacccgaatgaggttgtgttgcttgaatgcgttaccacaatggtgactaatctgttgtttgattatggcggcgataaagaccctgatgaatgggattatcaggcgatggaacaggcgattaatgctgagattcagtcgttgattgctgcctgccaacgttgccccgcaaaggttgtattagtgactaactggatttgcccctatatttccagacacctgttatcacttaacccattactggcctgctgccgcagatattcccgtggcgagcgataa

SEQ ID NO: 38643 - DNA, 951 bp, Escherichia coli
  misc_feature (541)..(550): n is a, c, g, or t
atgatgccatcaaaatttaccagtcactttgagcagcaactgattatgacatctccgaattcttcatcctcaatatctcgccttgcgcgaaagttaagaaaactgagcaataatccaaaactatttttgattgattcgagaggatatcaaattgtacaccgctcgtggaagaaaagtttacagctaggcagttttctttgggtagttatctgcttttctatcgcagtgctctattttggcttcattgcttccgatcgttatgtgagccgggctgaattaatgattaaacaagccgatcaagttaaaatgttgcctgatgcgttatcaatgttagggatcggtggtagtaatcatcaggatatattactcgttcaggattatatgaagtcatgggatatgctggccaagttggacaaagaacttgcacttaaagcacatttccagagtgatagtgcagattatttctcgcggttgcataagggagtcagtagggaggattttcttgattattaccgcaaacatttgacgttacatcttgatnnnnnnnnnnatcttgatgaattatcaggagtacttaccgttgagttgcagacatttgatccccaatacggtcagcgagttgttgagttaatgctcaaagaatcggagcgttttattaacaaattaggtcatcaggttgcgctcgaacaattggcctttgttgaaaaagaagtaaatagagcatatcaacgcttacaggatgaaaaagctaaagtattagcatttcagaatagccaccaacttctcagccctgaatctaccagcagcgcacgcttaggagtggtcagccagattgaaggagagctggtgcgtcaacaggcggagctaaaacaactgcgcagctatatgaaggaaaccgcaccggccgtagtctcattacagagccgagttgacgccctaacgatgccatga

SEQ ID NO: 38644 - DNA, 729 bp, Escherichia coli
  misc_feature (140)..(149): n is a, c, g, or t
ttgctcagcttttatcagcaacaatatttattcaataagaataaagaaaaattaaatgaatttaatatcgaaaaaccgctatgggtttttgtcggtaacaccgtaagtggtgaagattcagacattcacgcagtactgcnnnnnnnnnnagtactgcattttttagcatggtttttaaatcatgaatcgcaggcaaaatcgtggattaaagatctcattgaaaataaagcgcgaattcttgataccaaagagcgtaacatttttgaaaatcgctttaccgcactaatgaacggcccggaagatatctacgcagatattctttctcgtttgtttaacaccactcactcaggtcagagactgcgagttctgaatttaataggcagtaaaggtgaactggcattacaggttggtgaggccgaaccgtttggtcttatcaatattggtgatgcaccgtctctttacaaaatgtgtgaagaggatacgacatttgattatcagagagatgattttgcgaagtcactctttcatacgttaaatgacaaagactcgcaactacatattttgatcggctcgcgaaaatttactgaaggctggagcagttggcgcgtctcaacgatgggattgctcaatatgggccgtggagaaggttcacagatcattcagttatttggtcgtggcgttcgccttaaaggtcgcaattattctttgccgatgatgaagacattttaa

SEQ ID NO: 38645 - DNA, 318 bp, Escherichia coli
atggtgcagtacacccgtaacagtttttacatcccactaatgactcgcctgcgcccgatggggatcactgtcgatgttgaaacagccaaccgccacggtctgcgctggctgcacgatgtcgctaaccaacgaaagcatgaaacaatccaggcacgtccctgcgatcgctggctcgaagagcagcagtccatgctggcactgcctccggagaaaaaagagtatgacgtgcatcttgatgaaaatctggtgaacttcgacaaacaccccctgcatcatccactctccatctacgactcattctgcagaggagtggcgtga

SEQ ID NO: 38646 - DNA, 495 bp, Escherichia coli
atgcgaccagagatcggttgtgtcggggccaagctctattacagtaatgatactatacaacatggcggagttattctcggtattggtggtgtagcgggacactctcataaacagtaccctcgccatcatccgggttatttcagccgtttgttgttgacacaaaatctctcggccgtcacggcggcttgcctgcttattcgcaaaaatatttatgaggaagttgccgggttggatgaagagaatttgcatgttgcttttaatgatgtggacttctgtctgaaagtacgcgaagcggggtatcgtaatctctggacgccttatgccgagctttaccactatgaatcaattagtcgaggggccgaagattccccggagaaactagccagatttgccagggaagtgaactttatgaaaagcaaatggggtaaacatctcgaactcgatcccttctatagtcctaacctgacaaaaagcagagaagatttttcaatctag

SEQ ID NO: 38647 - DNA, 891 bp, Escherichia coli
ttggatacaggtaaagggttcaatgagtttgaaacagtaacgttgccatataaacgagcggtcagcgtcagtcgtttgttctatctggaatcgcctcttgttgcattacgatttgatccattagaacaggcagcaacatttgcaattaatcagtttgaaatagcagctgttgatgtgaaagtagttgagtctgcactattggctcgcattcaaaaagaacaccaaagctatcgtgacatgccgctagaaaaaatcaaaaaatccatattgatggacaatggcgatatgtcaatagagcgcctgcaggcattctataacgaaacgttcagcgttaccccgtcttctgtcggttatgaggaatggatagaaacggtggaattaccttcgttgcctggcaacaaagaggtgagtctgatgcttgccagtatgactcaccctccagttatatctattgtgattcctgtttataatccagcggagatctacttgcgtgcctgtctggattctgtcctggctcaaagctatccccattgggaactctgtattgccgatgatcgttcgccaaaagaacatgtgcaacgcgtactgcgcgaatacgaggccaaggatagccgaatcaaagttgtctaccgaaagcacaatggtcatatttcggctgcttccaacagtgctctcgaaattgcaaaaggggatttcgtagctctgttggatcatgatgatgtgttgccagagcatgctatgctatttatggctcaggctatttgtgagcagcctcatacccagatcctttacagtgacgaagataaaattaatgcccgcggtgagcgttttgatcctcatttcaagagcgattggaatcccccaatctgttgcagcagagagcggcgatag

SEQ ID NO: 38648 - DNA, 423 bp, Escherichia coli
atgccttttgtttcctgtgttctaaaaggttttggactaagtcacggcgtcccagaacacataaaaataatatgctctgtcgataataacatacgtggtgttattgattctattgttattactgaaaaatccataataattactggatgggttatatctcaaaatgagaaagacaacctaactgcatatgtatttggtgtgaatgataattttttaaagctttctaatatcattaggtatgctcgacctgatgtggttagtgttattgatggtgcttatttaaattgtggcattaaaatagaacagcatattttgcctgaagagttcagaattcttaagtctgatagtatcaaagttgttataaaagatggtgcatcaagctctaagatttttgttgataagaaaaatatcataattaattag

SEQ ID NO: 38649 - DNA, 441 bp, Escherichia coli
atggcgcactcacactcacacacttcctcacacctgccagaagataataatgctcgtcgcttgttgtatgctttcggcgtgactgccgggtttatgctcgtagaagtcattggtggttttctttccggttctctggcattgctggccgatgcgggtcatatgttgaccgatactgccgccctgcttttcgccctactcgcagtgcaattttcccgtcgtcctcccaccattcgccacactttcggttggctaagattgaccacgctcgcggcgtttgtgaatgccatcgccctggtggtgattactattttgattgtctgggaggcgatagaacgcttccgcactccgcgtccggtcgagggcggcatgatgatggcaattgccgtggctgggctgctggcaaatatactttctttctggttacttcatcacggcagctaa

SEQ ID NO: 38650 - DNA, 1056 bp, Escherichia coli
atgaaaaggaatttattatcttccgctattatagtcgccatcatggccctcggtctcacgggttgtgatgataaaaaagccgaaacagaaacgcccccgcctgccaatagtcaacctgccgcaccagctcctgaagcgaaacctgctgaagctcccgttgcaaaagcagaagttaaacctgaaactcctgcccaaccggtggtcgatgaacaagcggttttcgacgaaaaaatggatgtctatatcaagtgctacaacaagttacagatcccggtacagcgcagtctggcgcgttatgctgactggctgaaagattttaaacaggggcctaccggtaaagagagtactgtttatggcatctacggctttagtgaatccagcctcgctgagtgtgaaaaaggcgtaaaaagtgctgtggcgttaacgcctgcgctgcaacctattgatggcgtagcggtgagttatatcgatgctgccgtggcgttgggtaataccattaacgaaatggataaatattacacccaggaaaattataaagacgatgcgtttgcgaaagggaaaacgctgcaccagacattcttaaaaaatctggaagcctttgaacctgtagccgaatcttatcatgcggcgatccaggaaattaatgataagcgtcagcttgcggaactgaaaaatattgaagaaagagaagggaaaacattccactactattctctggcagtcatgatttcagcgaaacaaattaataacctgatatcgcaagagaagtttgatgttgatgcggcaatgaagaaagtgtctgaactggaaacgctggtggcgcaggccaaagaagcggataaaggcggtatgaatttctcgttcattaattcggcagaccagtatcaactcgaggctaaaaaatatgttcgccgcgtcagagataaagttccgtattctgactgggataaagagcaacttcaggatgcaaacacaagctggatggtcgacgactcatttccacgagcgttacgcgagtacaacgaaatggtcgatgactataatagcttgcgttaa

SEQ ID NO: 38651 - DNA, 213 bp, Escherichia coli
atgcttgccaattatccggcgcatagctgctggctgtttttcaacgagattaagcgtcatcactgtcatttccagcccctccggcttttcagaaaggtcagagccttttttaacggactctgttttttggtgcggataatgattcccttacgccccttaccgtgggtgatggtgaagtcaatcgccctggggctttcgttacgcagtaactga

SEQ ID NO: 38652 - DNA, 1014 bp, Escherichia coli
atggctaaagatttaacaacctctgctcatgacagacaaaatattttgaataactcttatgcactccgacatgctgaaaaacaccttgctcttggcggagttgagttcgatggagaaagagtttttaccaagaatcaactggtagatctgtttgatgtaagtgatgcgaccattgagaggtatatagctaacaacttggatgagctgaagaacaatggctacatcattttgagaggtaaaaatctaaaagaattcaaggaagtagctgatggtgccctcattaatgagggtaccaagacttcagtgctgggagtgtttaagtttagagccgtattaaaccttgcaatgctacttgtcgaaagcgagcaagccaaaataattcgcactagactgttagatatagtgattgatacgcttgctgaacgagccggtggtcacacgaaattcatcaaccaacgtgacgaagattacttagttgcctcctttaaagaagagagttacagaaagcaatttactaacgccctcaatgaatatgttgatgccaatggctggaagtttggaaaactaacaaatgcgatttatcaaagcattttccatgaaaatgccaatgagtacagaagcgtattaaaactccatcagcacgataaaatacgtgacactatgtactctgaagtgttgacgctgattgccagtttcgaagctggtttggctcatgagataaaacaaaagtcactccagataggtaggaaactcacatacaaagaagctgaagccatattaaccactatggaaaaacatcctctatatgaaccaatgttggttgatgtgcgaacgaaaatggcaagccgagacttatgttttcgcgatgctttacatgaaaaactggaagcatatgtgcgagctgtacctgaaggagactttgaacgtttcttgggtgagaaaagtaaatcacttgaagaacgcctgaacgatccagaaaccctagaagtgttcaaaagactaaaagaccgatag

SEQ ID NO: 38653 - DNA, 462 bp, Escherichia coli
atggacgatatacaattcaattattttgatattgaacacgccattcgggttcatgattggatcattgagaaaacaggcggcttacacggaatcagagaccaaggggtactggagagtgcccttgagcatatccaaaacgactggtattaccccgggtttgtagacaaactaagtcacttgttctttgcaatcaataaattccatgcttttagtgacggaaataaaagatcaagcatcgccctttcaacatactttcttgagataaatggttttggccattgtgtacaactttttgtgcgagaaatggaaaacatcgcagtttgggtggctgatggagcaatcgataaggagctactcaaaaacatcattcatgatctggtcttatgtgaagaaatacttgaaacgactaagctggagatcactatagcagttatgaattatgaaactctaaggcacgggtga

SEQ ID NO: 38654 - DNA, 627 bp, Escherichia coli
  misc_feature (601)..(610): n is a, c, g, or t
atggcttccagtaaatcgctacagcaggcaatcgccaatataaaaatctggcacaagggtgaacagcgcgcgccgcataaaccattgttactgctatacgtattagcgggatacctgaatgggcatccgcgccttttcgattatggattggaaatctacgaacctctgcacaatttactggaacgttttgggccacagcgttcacagtaccgacctgatatgccgttctggcgattacaaggcgacggattctggcaattacacaatgccgagctttgctcaacagcagggagcagccgacaaccgccagtgaaggaactgaacgaataccacgttgcaggcggtttcgatgaacagcactacgccctggtaaccggcaataaaaaactcatcaatactctggcgcaacagatactcgaagcgcacttcaccgagagtattcaggaagaaattgctgacgagctgggttttgatctccagcaaatccgtaaacagcgtgacccgttatttcgcaaaaatgtattacgcgcttataactaccagtgcgcgatatgtggctttaatatgcgccacgacgacaccaccgtcgcgctggaagcgnnnnnnnnnnggaagcggcgcatataa

SEQ ID NO: 38655 - DNA, 174 bp, Escherichia coli; identical to SEQ ID NO: 36745

SEQ ID NO: 38656 - DNA, 231 bp, Escherichia coli; identical to SEQ ID NO: 7663

SEQ ID NO: 38657 - DNA, 243 bp, Escherichia coli
  misc_feature (187)..(196): n is a, c, g, or t
atgtaccctatcgcaacgacgttaaaagtaggtaataatcaactggatagttatctgccgatacgtaacaaaaacaatgatattaactggcaatttgtcaccggattggtgcttagttacgccctgaagcgtaaaattgatgcctatactcccagtcaatttcgcgatgattgcaaggctcatttgnnnnnnnnnngaaccagcattctggactgtactggaacggatgtatttttccagtga

SEQ ID NO: 38658 - DNA, 621 bp, Escherichia coli
ttgcttatccgtaaatactgggagcctgtcagcgcattctttggcggtgtggtggaagggctgaaagcggcatttgcgccggtgggggaactgttcacgccacttaagccggtgtttgactggctgggcgaaaagttacaggccgcgtggcagtggtttaaaaacctgattgctccggtcaaagccacccaggacaccctgaaccgttgccgtgacacgggcgtcatgttcgggcaggcactggctgacgcgctgatgctgccgcttaatgcgttcaacaaactgcgcagcggtattgactgggtactggaaaaactcggcgtcatcaacaaagagtcagacacacttgaccagaccgccgccagaactcaagccgccacgtatggcagcggtggttatattccggcgaccagctcttatgcaggctatcaggcttatcagccggtcacggcaccggctggccgctcttatgtggaccagagtaaaaacgaatatcacatcagtctgacgggcggtactgcgccggggactcagctcgaccgccagttacaggatgcgctcgaaaaatacgagcgggataaacgtgcgcgcgcccgtgccagcatgatgcatgacggttaa

SEQ ID NO: 38659 - DNA, 294 bp, Escherichia coli
gtggttgccggtggtgtcggcgtgtatgccactgagtatgtgctggaacgctacgggcgggagctgccgccggaatcgctggcagtgaagattgtcgcgtcgctgtttttgcagccggtgccgtggtgcagacgggcggcggctctggtggtgatggtggcaacgtttatctcgctggtcgctgccgggtggatttttaccgcgctgatttacctcgtggcgtcggtgttcttccggctgatacgcacggcctgtcgtcagcgttttgaggggcgggaaccatgtcaaagctga

SEQ ID NO: 38660 - DNA, 576 bp, Escherichia coli
gtggtgctcggcacagcaaaatattatcggactggcgtaattaatcagtattatcgctaccgcattcaaggagcgattaatgcctataacagcggtaaggtaaattatctattactgagcggcgataacgcattgcaaagttataatgagccgatgaccatgcgcaaagatttaatcgcagccggtgtcgacccatcagatattgttctcgattacgcaggctttcgtacgctggattccatcgtacgtacacgcaaagttttcgatactaatgatttcattattatcacccaacgtttccactgtgagcgggcattatttattgcgctgcatatggggattcaggctcagtgttatgccgtaccgtcaccgaaagatatgctgtcagtacgtattcgcgaatttgccgcccgtttcggtgcgctggctgacctttatatttttaaacgtgaaccgcgttttttagggccgctggtccctattccggcaatgcatcaagtgccggaagatgcgcaggggtatcccgctgtcacacccgaacagttacttgaattacaaaagaaacaaggaaagtag

SEQ ID NO: 38661 - DNA, 357 bp, Escherichia coli
atgcaccccactcctgccatgcaggcattaattgagcagatatatcatatttttcgtcgttatccggcgccgcagcaatttgtggtttgttgtgaatattgtctgagtcaacaggaacaaaaagcattacggaatacatcgttgcgagcgattccttattccttaatcaatgcctggaatagtagtccaggacctgatccgcaaaacagcgatgaggttcgttattttctgccttgtttactggagtttgttgcgcaggggcaatttgacaatattcacgaagtattttctctacggcgtatcaaccttgccagtaaagaaaactggcgtgaggatgaacgggaaatattgcagtaa

SEQ ID NO: 38662 - DNA, 267 bp, Escherichia coli
atgacaagtcaaagcgtactgcctccgaacgcaataacccctgagagggcgcttgaggttgttttatctcacgtcggcgatctgcctggcgatattcgaattattaaaaatcccgatttgtgccctgcaaatctgttgccgtggctggcgtgggagtacgcggtcacctactggaaccccgactggagtgagcagcaaaaacgcgaaattattaaagcagctgcgtggcagaataagcaccgcggaacgcgtggagctgttgaatga

SEQ ID NO: 38663 - DNA, 402 bp, Escherichia coli
ttgaacgattacctgtttacctccgaatccgttgccgaagggcatcccgataaaatggcggaccaaatttctgatgccattttggatgcgatactcctacaggacccgtggggtaaggttgcctgtgaatgcttggtgaaaactggtgccactattgttgccggagaaatatctacccatgccgccgtggatattgagaagattgtccgcaacaccataaaagagattggttacgaccattcgcgattggggtttgatggcaatacctgctgtgtattaaatatccttggcaaacagtccgccaatattgctgacggcattcgcggccactcgatggaagaactggggcgggcgatcagggcatcaccttcggttacgcctgtgatgaaacgtcggaactga

SEQ ID NO: 38664 - DNA, 501 bp, Escherichia coli; identical to SEQ ID NO: 28761

SEQ ID NO: 38665 - DNA, 444 bp, Escherichia coli
atgcttaagacaaacagtctgcgagagtccatgcttcatgggtgtcggtggtgccaggctaatcccgagaaattcaccattttcgtggagagcggcaacattgaaacgaccggagaagcgccctcgtttgtttaccgctatcagatggtgatgtttgtcatggattacgccggagagctggacgacctcacgctgccgctgctggcgtggttatccgaaaatcagccacagttgttgctcaatccggagcgtaatcaggacatcaaattttctgccgttatcaatgacgatgacagcgccgatctcctgtttacgcccccctgcgggaacgcgttcgcatcacgcgcaacagtcagggcacaccgcaggcagaacacctgccggagccaaaaccccgtctgccttcttccgaaggcgactggtcgcatgtattccaggatgtga

SEQ ID NO: 38666 - DNA, 1086 bp, Escherichia coli
ttgcgtttttttatcgaagatctaggttttactacgtttgcttttgaatttggttttgctgagggtcaaatcatcaataactggatacatggacaaggaactgacgatgaaataggcagattcttaaaacacttctattatccagaagagctcaaaaccacatttctatggctaagggagtacaataaagcagcaaaagaaaaaatcacatttcttggcattgatatacccagaaatggaggttcatacttaccaaatatggagatagtgcatgacttttttagaacagcggataaagaagcactacacattatcgatgatgcatttaatattgcaaaaaagattgattacttctccacatcacaggcagccttaaatttacatgagctaacagattctgagaaatgccgtttaactagccaattagctcgagtaaaagttcgccttgaagctatggctccaattcacattgaaaaatatgggattgataaatatgagacaattctgcattatgccaacggtatgatatacttggactataacattcaagctatgtcgggctttatttcaggaggcggaatgcagggcgatatgggtgcaaaagacaaatacatggcagattctgtgctgtggcatttaaaaaacccacaaagtgagcagaaagtgatagtagtagcacataatgcacatattcaaaaaacacccattctgtatgatggatttctaagttgcctaccaatgggccaaagacttaaaaatgccattggtgatgattatatgtctttaggtattacttcttatagtgggcatactgcagccctctatccggaagttgatacaaaatatggttttcgagttgataacttccaactgcaggaaccaaatgaaggttctgtcgagaaagctatttctggttgtggagttactaattcttttgtcttttttagaaatattcctgaagatttacaatccatcccgaacatgattcgatttgattctatttacatgaaagcagaactcgagaaagctttcgatggaatatttcaaattgaaaagtcatctgtatctgaggtcgtttatgaataa

SEQ ID NO: 38667 - DNA, 132 bp, Escherichia coli; identical to SEQ ID NO: 7576

SEQ ID NO: 38668 - DNA, 396 bp, Escherichia coli; identical to SEQ ID NO: 11876

SEQ ID NO: 38669 - DNA, 312 bp, Escherichia coli; identical to SEQ ID NO: 8810

SEQ ID NO: 38670 - DNA, 126 bp, Escherichia coli; identical to SEQ ID NO: 8709

SEQ ID NO: 38671 - DNA, 417 bp, Escherichia coli
atgaggcttgccgcacccgcgatctttgccggtggcgatgtggcaatcacccgtcttgataatggtgcactacaccgctgcgaaagctgggaaaacgccaataaccaggcgcaaattgccgcttccgcaatgttggggctaccgcttccgcgactgccgccgccgtggttctggagcgatcagtacagtgataacttacagtttattggcgatatgcatggcgatgactggctttgtcgtggcaacccggaaactcagaaggcgatttggtttaatctgcaaaacggcgtgcttatcggtgcagtcacgctgaatcagggccgtgagattcgcccaatccgcaaatggatccagagcggcaaaacgtttgatgcgaaactgctgacagatgaggacatcgcgcttaaatcactgtaa

SEQ ID NO: 38672 - DNA, 375 bp, Escherichia coli
atgaaagacatcgatactgaaacccggaataacaccgtggcggatgatgtgacggcaggtgaggatatggctgtcgaacgtggcgtaaaactgacccgaccaattgagcgtggtggcgaaaaaatcacgtatgtggagatcaccggggctattgaacaggctggatccctgcgtggtctgtcgctgtctgatgtgctgaatctgaaagcggaatccatgtttacgctgctgtcacgcgtgacatcaccgcgactggatgaagtgacgatcaaaaaaatggcatcccgtgactttattcagttatgtgcggttgccgtaaattttttgagcggtgcggactctggcgggaagaacgaacaggcgacggaagcctga

SEQ ID NO: 38673 - DNA, 207 bp, Escherichia coli
atgcagaaacattcgggttccctgcggcgtatcacagatacagaacccctggctcatattatccgcgccgtcaaaaataccggcgtagtcaatatcgtggacaactttatgctgaagaaccacatcatcaatgatggcgcggtgcaggccggagatggcttcgttaacatattcctgtgttgcggcaatgacgctgctgtccactga

SEQ ID NO: 38674 - DNA, 186 bp, Escherichia coli
atgcatttcgctcagcgagttcgcgccctggttgtgttgaatggcgtggcgttattgcctctgttcgcaccgtggagcggcatacccagaccgttgtatgctttatttgcggggcgaaaggggatgcccgccattgcgcgatattttatggatgagttaaccacgcggcttgccaacggggtctga

SEQ ID NO: 38675 - DNA, 1542 bp, Escherichia coli
atgtccgccacgctccacgacaccgcagcggatcgtcggaaggccacccgccgcgaatggatcggcctggccgtggtcgccctgccgtgcctggtctacgccatggacctcacggtgctgaacctggcgctgccggtgctcagccgtgaactgcagccctccagcgcccagcttctctggatcctggacatctacggcttcttcgtcgccggcttcctgatcaccatgggcacgctgggcgaccgcatcggccggcgccggctgttgttgatcggcgcggcgttcttcgcattcgcctcggtgctcgcggcgctggccgataccgccgcgctgttgatcgcggcgcgcgccttgctcggcctggccggcgccaccatcgcgccgtccaccatggcgctgatccgcaacatgttccacgacccgcgccagcgccagttcgccatcggcgtgtggatcgccgcgttttcgctgggcagcgcgatcggtccgctggtcggcggcgtgttgctggagttcttccactggggcgccgtgttctggctcaacgtgccggtgatgctgctgacgctggcgctcggccctcgcttcctgcccgagtatcgtgatccggacgcggggcacctggacctggccagcgtgctgctgtcgctggcggcggtgctgctgacgatctacgggctcaagcagttggccgagcatggagcgggcctcgcctcgatggctgcgctgctggccgggctggcggtcggggcgctgttcctgcgccgccagggccacatcgcctacccgctgctggacctgcggctgttcgcgcacgcgccgttccgcgcggcgctggcggcgtatgcgctggccgcgctggccatgttcggcgtctacatcttcatgacgcagtacctgcagctcgtgctggggctgtcgccgctgcaggccgggctggccacgctgccctggtccctgtgcttcgtcatcggttcgctgttgtcgccgcagctcgcggcgcgctggccggcggcgcgcatcctcgtcgtgggcctgtcggcagcggcgttcggcttcgccgtgctggggctggggctggggcagggcctgtggtggctggtgccggccacgatcgtcatgggcctgggcctggcgccggtgttcaccatcggcaacgagatcatcatcaccagcgcgccgtccgagcgcgcgggcgcggcctcggccttgtcggagacggtgtccgaattcagcggcgcgctgggcatcgcgctgttcggcagcgtcggcctggtggtctaccggcaggcgctgaccagcgcggcgctgcccggcctgccggccgatgcgctgcaggcggccggtgcctcgctcgggggcgccgtgcacctggccgacaccctgccggcgtggcagggcgcggccttgctggcggccgcacgcgcgggcttcaccgatgcgctgcaggccacggcctgggccggcgcggtgctggtgctggtggccgctgggctggtggcgcgcctgctgcgcaagcgcccagcgctcgcatctggttga

SEQ ID NO: 38676 - DNA, 369 bp, Escherichia coli
atgtcgcaccgccgcctgaaagagaccatcggcgtgcgctacaacgatttcggcgtggtcgagcccatcgtcgccgacatccgcgccatgctggccacgcacgacggcatcgacaccacgcagacgctgatcgtgaacttcaacgcgttcgggccgagctcgctggacatcatggtctacaccttcaccaagaccacggtgtgggtcaccttccacgagatcaagcaggatgtgctgctgcgcatcgggcgcatcgtcgagtcgcatggcgccgagatcgcgtttccgacgcagaccgtctacctcgcgcagccagaagagccgcctgaggccatgcgacctgcagccgccccgccagcagcgcgctga

SEQ ID NO: 38677 - DNA, 633 bp, Escherichia coli
atgcttgtgggtactttatatctcggatatgtttttgatgtgcatcacattatgtcgattcttgaatacatccttgatcataacgctaaaccagatatttgggactattttaaagctatgggggttggttggttgaaaacgaacattccttttttgctggtttgcatgttcacaacaatacttgtctcctggtttcaaagtaaaatgcaattagcaactgaagctgttaaatttaagtttgattcattgaatccagtaaatggcttaaagcgtatatttggcttaaaaaccgtaaaagaatttgttaaagcaattctttatattgttttttttgcattggcgatcaaagtattttggagtaatcataaatcactgctttttaaaactcttgatggagatatcatatctttattatcagattggggagagatgctattccttctcatactgtattgtctcggcagtatgataattgtcttaatttttgattttatcgctgaatattttttatttatgaaagatatgaaaatggataaacaagaagttaaaagagaatacaaggagcaagaaggaaatccagaaattaagtctaaacgcagagagcgcatcaggaaattctttctgagcaattga

SEQ ID NO: 38678 - DNA, 219 bp, Escherichia coli
atgaaaactgatatcactgccatgtctgaaaatatagttggattctttgagaaaacaacactacgtgaccacatcaaaaaaacatggctatacaatgaaaactgcttcgttattgacttcgaatataaaggggtgaaatttgcattagatttcacagccagccagccagccagccagccagccagccagccagccagccagccagccagccaagtgtga

SEQ ID NO: 38679 - DNA, 1119 bp, Escherichia coli
gtgaatgtggattttgtacgacgaaataattgcccttgttatactataaaaggcaacgctaaaaaagaaaacatttcatcttctgctgttttaacaacagccctgcatacttctcttctaaaaatcacaacggtaattaatgaaattaattctatttatccctttgatgtctcagttgttattccggttcacaaccgagaaacccttattctcgaatgcattaaatctttaaacaatcagactatagataaaaattgttttgaagttattttcattgatgactgttccactgacaggagcattgccgccattgaatataacatttcgagagaaataaattatcgtattatccgtagagcagttggttcagggaatgcatcagcgccgcgaaatgagggaataaaatccgcaaaaggtcgctatgtgtttttcttagactctgatgattccattcactctgacttactgtccgatggtattcagatggcttataaaaacaatagtgacattgtatatttcaagcaggtttcctctacagggagaggggttcctgtacgcccatttaaggcagacacgaataaagcagatattataaaaaaccatctttttagatcattaaaaatcttcaagttcttcaaaagagagttgctaatcaataacaacatcttatttaacccatcaatttcagtctatgaggatatgcttttttcttgccagagtctaactgtagctaatacgatatctatactggcaagaaagggctactactctctgaatcgccatgaagaaccacatctatctaaaacatctttctccattaaacaaagagccttggtattacaaacaggtttgatttatatcttatcaagcaataaaaatgaagcagaaatagtaaaaatgtttaatgcatggctggttatttgcgttgagcacttggcatccatattatccaaaaaaagtttaacaactaatgagaagtctcatatttttaacttgatacataaatcactcttaccatatacagggcttgtaaatgagtcccaaatatatcccgcacaaagagaacttgtcagttgcttaatctgtggagattattcttctttttgcgaaaaaatataa

SEQ ID NO: 38680 - DNA, 282 bp, Escherichia coli
atgaaaattggagataatgaagatatacattcacttactacagctgaaatatcacaaataaacaaatcactgttaacaaccaagttgggtatcggttctgacttgttagcaattgaaagcatgcaagaacgatctatgaaactattttgtaatgcatcttggatcgtttctaatgttttatctcgtgagcctgtaagtggatggtatttagctactattttacaattaagtttttgttgtaattcagagagaaatataggtgacaatctagctgatgaataa

SEQ ID NO: 38681 - DNA, 231 bp, Escherichia coli
atgcattattctgattatgcatacaccttttcaaatatagagcagttgatgcaactaatagaaaacataattattaatgggaatgatcatctagctgaagccagatataaagcattagattatcttttgagtgtaaatgaaacagtaaacgatgcatttttaagtgagcttaagagaataagttcaactgtttcagaaaaagaaaataaacgtgaatttgtcattcaataa

SEQ ID NO: 38682 - DNA, 453 bp, Escherichia coli
atgaatgagtttaagcgttttgaagaccggctgaccggactgattgaatcgctgtcaccgtcagggcgtcggcgactgagtgccgaactggcgaaacgcctgcggcagagtcagcagcgtcgggtgatggcacagaaagctccggacggcacaccctacgcgccacgccagcagcagagcgccagaaaaaagaccggtcgtgttaagcgaaaaatgtttgcgaaacttatcaccagtcgttttttgcatatccgcgccagcccggaacaggcatcaatggagttttacggcgggaagtcaccgaaaatcgccagtgtgcatcagttcggtctgtcggaagaaaaccggaaagacggtaagaaaattgattatccggcgcgtcctctgctcggctttaccggtgaggatgtgcagatgattgaagagattatcctggctcaccttgagcgttag

SEQ ID NO: 38683 - DNA, 141 bp, Escherichia coli; identical to SEQ ID NO: 18476

SEQ ID NO: 38684 - DNA, 291 bp, Escherichia coli
atgaaaacgaagattttcgccgctggtacggcgctgacctgcctgatgctgtgcgccggttgcaccagcgcccggcctgcgccgacgccagtgattgtccacaacgcctgcccgaaagtgagcctttgcccgatgccgggcagtgacccggagacgaacggcgatttaagtgctgatatccggcagcttgagaacgcgctggcacgctgtgccagccaggtaaaaatgattaaacactgtcaggacgaaaacgatgctcaaacccgacagcctgcgcagggcgctgactga

SEQ ID NO: 38685 - DNA, 231 bp, Escherichia coli
atgaccaccgacgcaggccagaaaaagggcttcacgttttatgcggacatcaacaatgacagcagctttgatatcagtatcagcctgatgctgaccgagcgcacgctggtcagtgaggtggacggcgcgctgcatgtgaagaatatcccggaacctccgccgccggagccggtcacccgcccgatggagctgtatatcaatggcgaactggtgagcaagtgggatgaatga

SEQ ID NO: 38686 - DNA, 627 bp, Escherichia coli
  misc_feature (77)..(86): n is a, c, g, or t
atgcttgtttataaccggtgtcgctattttgaacatccagctctggtattccgcaaaagcagagtacctggcgggannnnnnnnnncaatcatatacttgaagaagcgtcacaggcgactcaaacagcggttaacattgccgggaaggaatgcgacctcgaggagcaatatcagcttggcactgaagcagctctgaaacctcacctgcgcacaatcatcattctcaaacagggtacggtctggtgtacatccttaccggggaatcgggtcctgctgtctcgtattcctgttgtcccggacagtaatttactgttggctccggcaatcgacaccgttaatagattacctatcctgctctatcagagccaatttgcagatacgcgcattttggttacgataagtgatcagcatattcgcggggcacttaatgtacccttgaaaggggtaaggtatgtattacgcgtggcagatgacattattggacctacgggtgatgtgatgacgcttaatggacactatccctataccgagaaggttcactccacaaaatatcatttcactattatctttaacccgcgccactctttagcttctacagacttatcgataaaggctttgggattttga

SEQ ID NO: 38687 - DNA, 1758 bp, Escherichia coli
atgagagaacacaaatttattagtgagctttttttagaaaatagtcaatttattcttattggtttaactgggagaactggctcaggatgtactactgcagcaaatattttagaacaaaaagaaatatcttttccagatagtaacgtcttggctgagtattataaaggattggatttgcggcgttatgaaatagtaaaaaattttgcagagactcattggaagaacttctattcgataaaggtcagtgatctcatttcaatatatttgctccttttatctccatcggccttagctaaattcattcagttttctgcaagtaaaatccccgataaaaaagaaaattcgatttcctttaaggcagccaagaaactggttgttaatggtgtgttcgctaaaagtttgttgaagataaaatatcttaaggtgataaaaaatcttcttaatcatgatgatgagattgactttaaaggcagggggaaagatacctttattaggatattaactcttactcgaaaatttacacgggattttaaaagggaattaaatgaactagagccaggtttatatattgagctatatcagtcagcaggaaagtcaattagaagaatagggaaggttgatgtagattatgaaaatcaagactttattccaaaggctgtttttcatttacctgaaacaattaatcgtgttattaaaataattagaaaagtaaagaataataaagcgtatatagtcattgatgcgatacgtaacccgtatgaagctaaattcttcaaagatagatatgctgcattccatctggtttctataaatgcaccagatgaacatcgaaccagatatttaaagaaattacataagttctcagaggaacagataaaaaaaattaatgatgaagaatctggtaaaggagatggcgagtataatcatcttactaatcctaatgtaaaaaaatgcattgaaatttcagatatacatttttttaaccctaaaaaagaatttgataataataattttctcaaagcacaaattgcgtggtatgtatcattaatgcaacaccctggattaatatctcctaccgccatggaaagggttatgcaagttgcatatactgtaaaactaaattctggatgtatatctaggcaagtaggggcggttgtgacagataatgataactctatcaagtcagttggttggaacgatgtagcaaaaggtcaagttccttgttctatgaggtcatttgatgggttattgcatgattttgatgagggaacatatagcctgtacgaacgaagtaatacaaaatttaggagtaaagttaaagaaaatttaataaaaataagggcgagtgattcaagttctactgtttttaaaggacttaatttgccatattgttttaaagatattcacaacagccttgatgatgaaaagaaagggaatcaagtgcatacccgtgcattgcacgcagaggagaatgcttttttgcaattggccaaatatggtggggtcggtattaatggagggaaactatatactacagctagcccttgtgaactttgtgctaaaaaagcttatcagttaggtatgacagagattatttttatcgatccatatcctggtatagcgcaagaacatattattaatatcggtagcttttcccctaaacttattcaatttaggggtgcaattggaaaatcctaccatagactttatgagcaagttatacctatgaaggatgaattggattacttgatgaaatag

SEQ ID NO: 38688 - DNA, 633 bp, Escherichia coli
atgatacaggtaaaggctggagagaatacagggggaagagaggctatccatagactaatggcagcctatgatttcaagtccagacagcaactttgcgatcacttaggcgcatcaaaaagcaccatggcaaacagatacttaagagatagttttcctgcagagtgggtgattcagtgcgccttggaaacaggagtttctttactgtggctaaccaccggacagggagagccaggtccaaacattaaacctaaaaaaaatatcaattccgtgaactccagcaaggttgtacctctttctgaactagtatctcctgaaattgacaaggcgactctcaacggtggtttattggtcgatgctggaaaagcaatcattgatagcagcatactcccctcagactcaagcaacctactgctggtgactacttctggtgattcttatttaatagatcgcaaccaaacacaaccagtaaatggtatgtggttagtcgatatcgacgggataaaaagcattgttaaattgactcggctcccgggaaacaaattagtagtgcatcaggatgattcatcgtttgagtgcggtctggatgacattgaggtagtaggccgcgcactgaaaatcattaagagcctttga

SEQ ID NO: 38689 - DNA, 441 bp, Escherichia coli
atgaccaaatacagatactcagcagttacaaacgaatttttcccttactcccttaaggatagctacctggcaagcgggcaatggcctgatgagggagtcgattttgatgaggacggatttatctcctggaaagcagaaaatgcaccggatggcaagatacgtgcagcagggaatgatggcttccctgaatgggtagatgaacctgaaccgactcacgaagaacttgttagaactgctgacgccgaaaaaaggtcccgtcttgagcaggctaactattatatcaatagtaagcagtggcccggtaaagccgctattggtcgtctgaaaggtgacgaactggcgcaatataatttgtggctggattatctggacgcactggaactggttgatacttccagtgcgccggatattgaatggccggaagaaccagacacaatgtaa

SEQ ID NO: 38690 - DNA, 924 bp, Escherichia coli
atgataaaagagacaccggaagtcaacacgctatctgagttattaggggctacgcctcccaaacctcagctagtagtgacgactaaaggtattgatttaggtctggatatctccctcggagattggaataactcttcattattatcacgaccttcagctttgttagcaattgagcatggggaaaatttatttgaactcatggataaagagttaggtcttgttggtattaatgaagaaggagtgatcaagtcaaacatcattatcgaactagatccccataaaacaactatgagaatattaggtaaaattgcggaagcactcattgttgaagaatgtgaaaaaaacgcgaaacaaaatgaaaactgggcattattagcaaagagatatacccctttcacagatagtttgtctaattataaagctgttgggactggactcaactatacgaaaattaactatcctactaaatatcaacctaatgatactcaacgggacattgtgtggatagacaaacgagacccactttctcaattacttatttctgctccaacgtcgaattcaggtatacaggctggaattcaagtgaaggtcagtgcaaatggtcttaactatctatcaccaatggatttttctagcagaagatatgaggtccctattgtttactttgatttaaataatgatttttttgaaattcagatgaagatagtgaactcaggaattgattcggtttatggaatggattatcaccgtggtagaaacatttctcctgaaatacatgaaaaactatgtgcatattataaccttatatactccattatcattggtgatatgaaattagaggctctgttactaaatgaagaggcactgaaagggtatgtgactgagattaaagatagacaaggtaaaagaataatcgtgacgtga

SEQ ID NO: 38691 - DNA, 246 bp, Escherichia coli
atgacgatcactatctatggacgagataactgctcatactgcaaacgtgcggtcgagctggcgaagcagcttcacggtcacggttttggcgattacgaatacatcgatattgtgtctgctgggatagacaaagagaaattgagcgccctggttggcaagccggtggagaccataccgcaggtgttcgtaaatggcgaatctatcggtggctatacggaattcgccgctctggtgagtacattataa

SEQ ID NO: 38692 - DNA, 144 bp, Escherichia coli
atgggaaataaatgtaaacatgcgcgtcgcgcatctcgtcaggtgcagaagtcaaatccatacattcacgagcactaccacctcagctctttcactaaccgctacacgttccccagcgaagcgcataacgaggcaaagcaatga

SEQ ID NO: 38693 - DNA, 822 bp, Escherichia coli
atgactatccttgaaaatcctgatgcgaatgttgaatctgtttatagtcttcatccaaccacgttgtttcattttacaaaaaacgaagatgctttctatagcatattggctgagaaatattttaaaccatttcttgctcgcgaggaaataagaggagtcgggggacgcaggaggtttgcagtaccaatggtatcgttttgtgacataaaactatcacaaatcagagatcatagcggaaaatatggagaattcggtcttgggctaactaagtcttgggcggaaaagaaaggtctacacccagttctatatatgaataagagtagtgaaatattttctaaatacaatgccagaattcgacttattaaaaataagttggtgccgctttggaaggctagaggaaatttagataccaaaaacagaatagagtttgagaaattgaaagcagaatattctgatctatataatttactgcgttatatgaaaaattacagaggcaagctagagcgaaaagataataaaacaatagagaattatatatatgcagacgagaaagagtggcgttatgtgccagctccttttattggtgatttatggcctagtctgagtttggagcgtgttatcacttctgatgacaaagcaaaaattagctcaaaattttcaaagtttggcattgattttgagttcaatgatataaaatatatacttatacctaaagaacaacatatccaaaagctaattaactttctctcaggtttagatggatttgaatcttcaattattagcaaaattctgaccatggataaagtaaagcaagatttttaa

SEQ ID NO: 38694 - DNA, 1212 bp, Escherichia coli
gtgtcaatatttttaagcgaaaaggaaatgcaaaattggataattgacaaattatctgatcaagatggattatataattcaatcatcaatattgataaattaaatgaatttaatccgaaaagacccgaagagaaaaaaattaaggagagttatcagttttgtttaaagaacataacattgttacatttaatgacagatgatgagaatatctcagcaacaaaatctgagatattaagacctgatgtcgttgcttattcaacagagaatgaatccttagttcttattgagttaaaaaatttttcaacaccaacaagggaagctggaactgagctagtggcatatgctgcggaactaaaaagttacttgtcatacttgtctgatggagatattaccaatgtacttatatcacctgactggccacctttggttagacactttatttttaatatgatcgtgtggcagaagaaaaactttctatgtttagaaccttgctatgatttacaaggtaacgtatcacttactcctttagatattaataaattagttattgcggaagaagcactcaagttctcatttcgtcatcttggcgggtttcatatatgtttgtatgatgatgaaatgtataatcaaccgacttccacttctcgtttacattcgaaattgaatgttattaaagccagcatggcaaaaatgtcctcagacggtgaaaagactaatagccatgggtttgctattttatgtagaaatttgaacgagagaactttagcaccatatacgattactctagttaatgtttctgcgttttcttccatagagcgatactttcattcgccacaaatatccaatgcttctcaactccctagaataggacaaaaaatttatgacatttacactcattaccaaccatcaggttttggggcatcaatgtcgaaaatttacaattctgggagggcatatttagaaaaaattaattgcaagccgcggatcgaggttatagacacctgggatgtattgcaagtacatacacatgcgccttatatggaaatggttcatattgaaacgtggggagtttttaaagaaaaattgattgaaggtctaaatgaatgttatgaggatgaatattacacacctgattttaacgatgtagatttttgcatggtgtgtattgaatccttaattgaccagaattatgaatttataaaacttttttga

SEQ ID NO: 38695 - DNA, 1131 bp, Escherichia coli
atggatttgttctcaaccaaaatagcaaaaaacaagctgcacgaatcttttaaacagatttatcaagataatacatatgctccagtaagagaagtgatacagtcgtgggggcgtgggttactggagcgtagcggtgagcagactaaattcgttaaagagtttcagacaaccttcaattccgccttatgggaattgtatctgaacgaaatgtttattcgtctcgattattctgtcgactacacaaaagacagtcccgatttctgtgttactacaccgtcaggctaccagtttaacgtcgaagctgtgatatcagatcggccacataatccacctgcaggtgctctttttagcgaatcaaaattcaaacatcaatcaacgctaaaattaatcggaaaaatcaaagacaaacatgatctttttacaggagttaatggcaaaaaattcccgtactctacgatgtctcatgtagttaataagccgtttgttctggcgcttgcaccctttgactccgatttatcattgtctcaaaataacacaatcatcaatcgagtgttgtttggcattgaggaacctaccaccagaaatttggtgactggcagccaaactaaagttacctcaatcaaaaagaatgaagacgttgaaattccattaggtatatttactaacgactcatataaagaaataagtgcggttattttctccaccaccggcacttttggaaaagccgtggttcaaagcggtatcggtagatatgtaaggtcaacacgatatcgagccattgatgtgaatgatttcatcgccaatgaagggatgaaaaacgagggaaagcacacacaaaggataggacctgatcatttcatcactacatatcggcattttttaaataacgaagtcactggtgcggatattgtagtttgccattccactgctcatgaagagacgcactttgacgacagaaatattttcttccccccagagataactcataatttttacgatatggaaaaagaacagtctgttcagaatcatcctgatggagcgctggtatctagacaggtttttgaaccaactagagcacattttaggtatatcatgaaacattggtttccaggctttctaaaagatgtttaa

SEQ ID NO: 38696 - DNA, 720 bp, Escherichia coli
atgctctacaaatatattggaagtgaagattcgcaaaaagtgttacgtaacctcaaacggtttgtagaggacggcactatctctgctagcgcaccttcttcattcaacgacccatcagagttcaaagtttcgataacgatgggaggtacagaagtggagcgccggaaacactttgaagacaatggatgtaaggatttttcctttgaagactgggatgctgtagctcctgaagctgcaaaatcgttggctgtggatttgcggaaagaatcattaggggcttttggtgtggtgtgcttgtcaccaaacgaagataacatcttgatgtggtcacattactcagtgtcgcataaaggtttctgcataggctttgatgatgattttgttacctctattgaggggtatcacagctttgataatgtgaaatatataccttctgttcccgtgttcgatgaagttacagatgagtttaaggtactttttgataagctctttttctacaagcacgaatgctggaaatatgaggaagaacaaagggttattactaaaaaaataggcgctcaggcatttgataagaaatatattagagagatcattcttgggtataacgtttctcctgaagtagaagaatatgcccggacacagctagacacgagcatcgaggtttacaaaatgagtacacctgatgatggttatcttcttgtcaaagaaaagctgaagtag

SEQ ID NO: 38697 - DNA, 435 bp, Escherichia coli
atgtatatggatgtaaaagtttatattgtcggcaaaaatcctcccaatgatttattggattcaaaaaatatcatcaggactggttttgttagtgatgtatcagtgtattacagaatggctactgtttttatatgccctctgaaacttggcgcaggaatgaaaaataaaattttagaagctatggcaacaggattgccaattatatcatccgacgttggagttgaaggaattgatggacttactgatggtgaaaattacctgagagctaacacattgcatgagtatgtagatgccattactagagtgcataataatccattgctaggcgatgggcttggaagaaaagctgctaagcttatttctgaaaaatatgattggcaaaatattgtggacagatacgttacaaagctacaagatatttccgacacacaataa

SEQ ID NO: 38698 - DNA, 291 bp, Escherichia coli; identical to SEQ ID NO: 5027

SEQ ID NO: 38699 - DNA, 270 bp, Escherichia coli
atgggacttgaaatgattattggcttagttcttgctgcactggcagcaattgctggtgcttttggtctgggcaaatcacgcggtaccagaatcgctgaaacaaaagcagaccagcaacgtacggaagaacgtgcagcggctattgaagcggtcgccaaacgcagggtagagacaataaaaggggctagggatgtacagcagactgttaaccatctttctgatgacgatgttgaccacgagttgcgcgaaagctatacccgcaaagcctga

SEQ ID NO: 38700 - DNA, 861 bp, Escherichia coli
atgaaatcagataaggcagaaaacttagagaatccactcgaacgtaatgattttacaattgatgacttccaccatgttcttagggagtttgataaagctgtttgtgaagccaatgcggtaagtcagggagtaggtgtgcgaatggctgaggcttatcaaggttggtcaacatatatatttgcacgaatttgcattcatgcttcgattatgatttctaatgttcctaagtccagatgggctaagcgagattacgatttctgggattttgcttctatagcatctcatgtcagggcgatccttgaagctgaacttctgtttatgtatttgtctgaagcaccagattcagaagaggcttggtcagcaaagctaaatgttatgcacatgaatgattgtgtaaaaaggatagaattattcacgcaaagtgataatacagaagcattagagttttataatgagcaacagagtataattgcggaaagactcaataaaaaccctgcttttttatcacttgatagtggtactaggaaacgttgcttgtcaggcaaggctttaacaattcctaatagagacgatttattgattaaactagggaaagacccaaaatcgtttaaagtgatgtttgattttctatcgcattacacacacatactccctatgtcatattacaaaatggaaccgaatgggagagggactggttgttttaacaagttcgattttggatatataataatgggtatgttgctatgtactgaatctttgattaagtgtactgaacggttggtggatattttccctgatgttaaacggttaagaaaaggaactaaatcaaaatttacattgggccctaaaccaacaaaataa

SEQ ID NO: 38701 - DNA, 945 bp, Escherichia coli
atgaaaaaatgtattatttgtctggaggaaaaagaagcaacctcatttggtgaggaacatgttattccagagactattggtggtaattatattataaataatgtttgtaattcttgtaattcaaaccttgggcaaaaagttgatataaaaataataaatgaatttttaccggtttgtctcaggcatgagaaagatattcgaggtaaaagtggtttactaccaattatgtttcccggtacttttgagaatgagtttgacaaaaaagaaaaatatagactagaacacgacgaaaatggaaatatacgaccggtacttatttataagcaaccatcaataaaaaaggttgaagaagagatatatagcattcagatagcattcgataattctttgtctgaagatgaaatgcttaaaaaaagtaagcaaataatatcaaaggaaatgaaaagaagaggggtggaaacttatgatattaatggttgctttgaaaaagtcaacactaaaataaagctatcaataaacagggagataactaattctgatagttttatttctatattgaaaatggcttatgagtttgcagcatccaatataaatggatatgtagatgatgagaaagctatagctatagccgacgtgctaaaaaaagcatcttattcagatgcattaaagtatgtgtctatgagagaaaatagctgggggaggggaaagtttgataaattattccctgacagtcattttattattgtcaattgttttgatggaatcctgggggcattggtatctttgcacaatataggagattatactgttaaactatccagtaaatcttttgttattaataacaaacctagttttaaaatgttgattaataatattaaggataaaagctataaaatatttcataataacgacactgtatttattttatttaataattgccaatga

SEQ ID NO: 38702 - DNA, 861 bp, Escherichia coli
atgcaaaacgtacagccgctatctctggtaactactttagtaattttgaggtctaatggagagtcaaagtcgttaggtactgggttcttttatcaacatagcaatggtttcattttccttgcaactaactatcatgtaataactggaatcagcccatccgaaaggggtgtaaagccatttataggcgatagtattgatattcagctgagagataaaaccggaaaactattcaaacatacgatgcctctgtttaaagatggttcaccgctgtggttggagcaccccacagataaagaggcagacattatcttgatgcctttgcctcaagagttgtttgtaaacacaggagtaaaagtagtctcaaaaacaacgacactgcctaatgtccagataaacccctcatctcctgttgtaatgattggatatcctcatggttatcatgacacgactcactaccttccaatatggaaaacaggaagcttagcgagtgagccagatatcgatttcgatgggaagaaattaatagttgtcgatatttctgctttccctggaatgtcaggctctccggcattctatgtcacgcacagtggttatcttacaaaagaagggaatatgatcatggatatgggaatgaaaattcatttccttggcgtttatgcaagtatgcaaatgctaaacagtgatcttttcttagaacaagtcgttagtgctgcagaatacaaagtgtcgcatagtgaatctttgcaactagggcatgtctggaaagctgagttacttgaagagatagctgcgacatctagtccgattgcaaccacaccatctcaatttcaaagtaatagcaaattcttatttaagtactga

SEQ ID NO: 38703 - DNA, 393 bp, Escherichia coli
atgaagttgagctataagctgattatcgctgctttccttttaactgtcgtctgttctttcatctggtcaaccaaccactactacagcaaatatcagcacgaaaagaaacgtgctgatgaggctgtacaaaatgccaaatcggcaactgccattactaataacgtcctgcaatcactacaaatcgtcaatacagtactggaggctaaccagcatgcaaaacagcagatcgcactggagtcacagagaacccaggctgatatcaaaatggcttttgcgaatgatgattgcgctgcccgtcctgttcctgctcgtgcagctgaacggctgcgccggtacgcggacagtttacgtaccagtttcggcggtaccactactagcgaatctgaccgctga

SEQ ID NO: 38704 - DNA, 1023 bp, Escherichia coli
atggcaaaattaaatgctagcgaaagactcgttactcatcatagtctgaccattgacacaaagtttagaaccaaggcaacacaagaggtaaaagcccagtgtatatgtcctgttccggaaatgtacatgcttgccccattgattgttaaacaaaagggactcgttcattcatatgattctgggaatattgtagttactctccaagatgtacaactttatcctttacttccagataactcacccacgcatattgtccttcttattaatagtgttgataaaaatggaagtactaccgttgtaaaaaatataaatactaatgaacgcgttgaaatccaaccaaaatatgaacaaggtgaaggctatgaagtttctacctatgttgtcatatcattaaatggaaataaaagaacctatgatatgatttgtacatctaccccaggtgtatctacggcccggttaaatagttttttagacaaaattctctttgaagtggcgaaagacaatgaagacttatttaccgcaaaacatccaactaacgttatttctgcaacatcaaaaaaagaagtaaaaatacgatacaaaccaatatttgaatttacaggaatgttagacaaggagctttttaataaaataaaccaaaaaggattatcagatgtcatattagtcaaggatcaattcggaacaattaatgctcctgatgttaactcaccttacattccgactgaaagtacattaaaattacttccaaatcatggtgacaatgttattggatggattaaaaatgtagcatctcatttcaataaaaaaatgaatggtggttatgataaattaaaggttaaattccaagatcctgaaacaaataaaccaaggcaggttgatttcaaaacctcaaacatcaatcttaataatttagaaaaaacatttattaagaaaagcattatcgataactttaattcgcgcctgaaggattcatatgttaaaattgagctagagtttgttgtgaaaatgatagatttgatgtga

SEQ ID NO: 38705 - DNA, 585 bp, Escherichia coli
atgccaatactttcagttttctctcatctaggcaagccgtttggatatctttttattaaaggtattagcggcaaagctgcatatgattgggtagcaccaattctacttacttctatcacagcagtacttttcattctattaaaaatccctgtcaaagatttatttgatgacaatggtttcattaaatcaatcgtttcatttatctctaacctaccagggttttatattgccgctctggccgccatagcaactttcaatagagctgagattgatttaccattgattagcaatgaaagaaatgcctctattgaaataaaagtaacaaaagaaaatggaaaagtagtaaattcagaggaggttctgaccagacgattatttctttgcatgctattctcttttttaacagcattaagcattgttataataatacttaatgctatattttcaccattaatcaatgtctatcaaaacagttttgttttaatggtttatactgttgtatttactttcctcgtttggcaactcttagtatcaactttctttggattatattatctcggaaacagaattcatatgaattattaa

SEQ ID NO: 38706 - DNA, 351 bp, Escherichia coli
atgcgtgatatgtatgaagtattggaccgctggggagcatgggctgcagcagataacagtggtgtggactggcagcctgttgctgcagggtttaaaggtttactacctcatggaaagaaaacacgccaacaatgcgatgatgatgaaggaatcatgattgacagctgtgttgcgcgaatgcggaaatataagccagaagaatatgaactgatcattgctcactttgttatcggtatttcactccgttcaatagcaaagaaacggaaatgctctgacgggtcaatcagaaaacaacttcaagcagcaataggagtgattgaaggtattttgttgattattaagcccctgtag

SEQ ID NO: 38707 - DNA, 123 bp, Escherichia coli
atgcatttatttgttctgtcagtcatccggctggcaggtaatgagaacgcaggaacagaaggaggaaaacaccggaaagcgtcagatgcagatatgaaaaaagcaggtcagggacctgcttaa

SEQ ID NO: 38708 - DNA, 552 bp, Escherichia coli
atgcctgacgtcggtatcgatgcgcaggagttaaaggatatcggctttcgtctcgtgcttagtgggcattaccacaaccacaaagaggtcattcctggagttatcagtgtcggtgcactgactcaccaaaattggggagatgttggatctctggctggctacatgatcgtaaacccggacggcagtttcagtcactacgaaaccagtgcgcctaaattcattaacctggaagatgatgttgctgatgaccaaattcgcggcaactacgtgcgtttccgcgccgtaattgagaacgatgaagaaggcattaagtaccagaacatcctcaaaacaatgggtgcaaaaggtgtcgtgtgcaacttcatccgtaagtcatcaatgatggaagggacagccagcacaactgaaaccagcaaaatcgatagcctgggagagtcggtatctgcttattgcaagattgtccacgatactgacggcggatttgatttgagcaagttggatattttgtgtcaggaaatcctcaccgaagcggagagttcggaggctgtgtga

SEQ ID NO: 38709 - DNA, 270 bp, Escherichia coli
atgattacaagtatacgctatcgcggcttctcattttattacaaagataacgataataaatataaagaaatctttgatgaaatactggcctataattttaaaacagtaaaagtattacgtaatattgatgataccaaagtatcgttgattgatacgaaatatggtcgctatgtttttaaagtctttgctcccaaaacgaaaaggaatgaacgtttttttaaatcttttttcaacatgttgaatttcgccagacagtgtctggcgaattaa

SEQ ID NO: 38710 - DNA, 741 bp, Escherichia coli
atgtgtataagagacagtttaaaggctagcgtatctattggaccgttaagaattatacctgattcttcatttacgccaaatccttatccagaacaaaatggatggtttgatggtacatcagcatgggataagctgtgtttatctcaacaaaatgatagtgatttgattaaaaaagtaagtgattggttttccaatagagataaactaaacactaattataatatatttagtggaggagaatttgatataaaaacctcccctcaacttttaggtctgaaagataatgtttacttctgtaaaatagattcaagccaaatgttatttccaaatcaagtcggtgtcggattaactcagatagcacctcttattattgcagccaatatagttcaggatggattaattgctatagagcagcctgagctacatattcatcccgctttacaactcgctgtaggtgatctgtttacccaatatccccttgatgttaaaagacctatgtttttagtcgaaacacatagtgagcacattttgcttcgaattttaaaaagaattagacaaacaacggacaatgaattacctgaatcaaattacccagtaaaacctgattttatatcagtgatcgttttcgaggataataatggttcgactgttactaggaaaatagatattactgatgatggtgacttcaaacaaaaatggcccaaaggtttcttcgaagaaagaaggggagagcttttttaa

SEQ ID NO: 38711 - DNA, 393 bp, Escherichia coli
atgaaagaaaataaaaataatcctgaactcaaaatcagaagtacagaacgagattataaatacatttccagaattactgacaggtatgctgtattgtctctggtattcctgactgccggaactgttttatggatagttatgaatattatttttgatgcctgtattgattcgtggaaagcggacccggaattaaataacgtacgttatatgtggaacatcctgatgtatgccattccgtgtacgttatgggcgcttgcatccggcttttttgttgcgggttatctgctgcctttatgtgcgttaccagtcagaaatatcaggatattcctgttgaaacgccgtatgtgccgggagaacacattaagggagggcagcaataatgcttcgcattaa

SEQ ID NO: 38712 - DNA, 681 bp, Escherichia coli
atgctcaatcagaaaattcaaaaccctaatccagacgaactgatgatcgaggtcgatctctgctatgagctggacccgtatgaattaaaactggatgagatgatcgaggcagaaccggaacccgagatgattgaagggctgcccgcctctgatgcgctgacgcctgccgatcgctatctcgaactgttcgagcatgttcagtcggcgaaaattttccccgacagtaaaacctttcccgactgcgcacccaaaatggacccgctggatattttaatccgctaccgtaaagtgcgccgtcatcgtgattttgacttgcgcaagtttgttgaaaaccacttctggctgccggaggtctactccagcgagtatgtatcggacccgcaaaattccctgaaagagcatatcgaccagctgtggccggtgctaacccgtgaaccacaggatcacattccgtggtcttctctgctggcgctgccgcagtcatatattgtcccgggcggccgttttagcgaaacctactattgggattcctatttcaccatgctggggctggcggaaagtggtcgggaagatttgctgaaatgcatggctgataacttcgcctggatgatcgaaaactacggccacatccccaacggcaaccgcacctattatttgagccgctcgcaaccaccgggctga

SEQ ID NO: 38713 - DNA, 216 bp, Escherichia coli
atgctagtgaccatgtcagataaagaactgaacaggattaatgtcattcagtcggttgtcgaaaagcgcatgcgccgtcgtgatgctgcacaccaacttgctctgaccgaacgtcagactcagcgtttgatgaaccgctttcgcgaatctggtgctgcaggtctggcaaaccttcgacgaggacgcccggtaatcacagactttctgagtcactga

SEQ ID NO: 38714 - DNA, 324 bp, Escherichia coli
atgggagtaccgtggtttcagctgaagtcggtgaaatttccggagccggtcatcgccttctccagtaattacgcgctatacgcatcgatatcgaacagggttatgtctcatctcgaggagctggtgccgggcgtggagcagtacagtattgatgagatgtttctcgacgtgcggggtattggcagctgcatcgatttcgaggatttcggccggcagctgcgtgaacacgtcaggaacgggactggcctgactatcggtgtcggaatggggccaaccaaaacgctagcaaagtcagcacagtgggcttccaaagagtggccatag

SEQ ID NO: 38715 - DNA, 231 bp, Escherichia coli
atgagtgatgaaatttacctgaccataaccggagaacaacaaggatgtatttcctctcgttgcggaacgagcgcatcaataggtaatcgctggcagattggccatgaagatgaaatcttcgcgttctcgctatctaatagtattacgaatacaggcaaagggtcacaattacatggccttagaacctatcccaaaaggaattgtcagataatacaatatgataatttctga

SEQ ID NO: 38716 - DNA, 873 bp, Escherichia coli
gtgttggtgggggacatggctgatctccttcaaaaatactattcacaggttaaaaatccgaatccggtgttcacaccccgtgaaggtgccggaacgctgaagttctgcgaaaaactgatggaaaaggcggtgggcttcacctcccgttttgatttcgccattcatgtggcacatgcccgttcgaagggactgcgtcggcgcatgccaccggtactgcgtcgccgggctattgatgcgctgctgcaggggctgtgttttcactatgacccgctggccaaccgcgtccagtgctccatcactacgctggccattgagtgcggactggcgacggagtctgctgccggaaaactctccatcacccgggcctcccgagccttgacgttccttgcagagctgggactgattacctaccagacggaatatgatccgcttatcgggtgctacattccgaccgatatcacgttcacaccggcgttatttgccgcccttgatgtgtctgaggatgcagtggttgctgcgcgccgcagtcgtgttgaatgggaaaacagacagcgcaaaaagcaggggctggataccctgggtatggatgaactgatagcgaaagcctggcgttttgtgcgtgagcgtttccgcagttaccagacagagcttaagtcccgtggaataaagcgtgcccgtgcgcgtcgtgatgcgaacagggaacgtcaggatatcgtcaccctggtgaaacggcagctgacgcgtgaaatctcggaagggcgcttcactgccaatcgtgaggcggtaaaacgcgaagtggagcgtcgtgtgaaagagcgcatgattctgtcacgtaaccgtaattacagccggctggccacagcttccccctga

SEQ ID NO: 38717 - DNA, 390 bp, Escherichia coli; identical to SEQ ID NO: 18152

SEQ ID NO: 38718 - DNA, 864 bp, Escherichia coli
atggaaagcgtgcagcatatcgttgatatggttgaagccggatgggagctggtgctaacccatggtaatggcccgcaggtaggctttattctgcgccgctctgaacttgccagtaacgaagtttctccggttcctctggattacgccgtgggtgatacccaaggcgccattggatacatgttccagaaagcgctgcataacgaattggctcgccgtggcataaacaaaccggtaattgccctggtgacacaaacgcgagtcagcccatatgacgatgctttcgccagccccagtaaaccgattggcgcgtttcttgatgaagaaacagcacaacaacgccaacaacaactcggctggacgctgatggaggacgccgggcgtggttggcggcgtacagttccctctcctgcgccactggaaattattgagcaccacaccatcgctcaccttgtgcgccagggatatctggttatagcctgcggcggcggcggtatacctgtggtgcgagacgggcaacaactgaaaggtgtggaagccgtgatcgataaagacctggcctccgcattgctcgccagtcagttaggcgctgatctgctggtgatccccaccggtgtagaaaaagtggcgattcactttggtacaccacaacaacaatggctcgacgctatcagcgtctacgaagctcaaacgctgttgcaggaaggtcagtttggtgtcggcagtatgcaacccaaagtggaagccattattgatttcatcaatgccagccagcaacaaggcaaacaggccagcggactgattacttcaccgcaaaccataaaagcagccctggcacatcagagcggaacatggataaccctttaa

SEQ ID NO: 38719 - DNA, 390 bp, Escherichia coli; identical to SEQ ID NO: 3590

SEQ ID NO: 38720 - DNA, 486 bp, Escherichia coli
atggtccattcgccagaaaaccgaagcaccggcatcagccaggcgtggagaaaactggtatcccagcagccagaaaaggccaaagacaagttcgctggcacctgctgtatcggtcataatttcggttggattcagcccggtctcctgttccagaagaccttccagcacaaagatagagtccctcagcgtccccggtataacgatgccatgaaagccggaatactgatcggacacaaagttgtaccaggtgatccctctgttattaccaaagtatttgcggttcggtccggcattgattgttctgactggcgtaacaaagcgcattccatctgcagatgccacttctcctccaccccatatctgtgccagtggcagcgttgcctgaaaatcaaccagtctggcattagcgctggtgatagtttcagcccgcagatagttcgcttttgtccagttcagccggtgtcgggtcagtgcaggaacatttga

SEQ ID NO: 38721 - DNA, 291 bp, Escherichia coli
atggcgtggtttattccgtttctgctgttcctgggtatcgccacgccacccgttgccggaatttatatcgctgactttttcctttatcgccgtaatggctatcaagagtcagtgttagcccaggagtcacagattaaagtgctgacattcgcagcatggatcataggcgcagcggttggctttatgaccgtaaaaggcttattcaccctgacgacgatcccttcggtagactcgattctggtggcatgtatcgcgtatgcgattctcagtcgggcaagtcaacaccgctaa

SEQ ID NO: 38722 - DNA, 405 bp, Escherichia coli; identical to SEQ ID NO: 13528

SEQ ID NO: 38723 - DNA, 177 bp, Escherichia coli; identical to SEQ ID NO: 20495

SEQ ID NO: 38724 - DNA, 261 bp, Escherichia coli; identical to SEQ ID NO: 19473

SEQ ID NO: 38725 - DNA, 189 bp, Escherichia coli; identical to SEQ ID NO: 9782

SEQ ID NO: 38726 - DNA, 261 bp, Escherichia coli
gtgataccgattggtgcgggcaacgaagtgaccgtggtgttccaggacggcttccagctgaaaaccgtggaagagatggcgctggaacgcacgcagagcagagcggaagaagacaatccggaaagtccggttcctgttccgccatcggctgaaagtcatcttaacggctttaatactgaccagatgctgaagcagctgggcaacctgaatccgcagcagtttatgtccggcagccagggagggggcaacgatggcaaataa

SEQ ID NO: 38727 - DNA, 168 bp, Escherichia coli; identical to SEQ ID NO: 21362

SEQ ID NO: 38728 - DNA, 168 bp, Escherichia coli
atgtacagctctgacggcccggattttgagtttgtgcagcagaaacgtaaagaggggctgagtattcatgaggcggtgtggcagctggcgtggaagaagtcagggccggagatggcttcgctggaagcctggctggaagaacatgagaaatacaggagtgttgcatga

SEQ ID NO: 38729 - DNA, 228 bp, Escherichia coli
gtgaggaggcgtaacgcgagaggcggtataagcagaacggtctcggtgtatctcgatgaagatacaaataaccgacttattaaggccaaagatcgtagtggaagaagtaaaacgatagaagtccagatccgtctcagagatcatctgaaacgatttcctgatttctataacgaagaaatattcagggaggtgaccgaagagagcgagtcaacatttaaagaactttag

SEQ ID NO: 38730 - DNA, 906 bp, Escherichia coli
atgagatcagtcgctttcaaaaatatcttcatctatcgtctttcacgcgaagttagctgggatactgcagaagtaaatgcagcccttagcaagtttgtgtttaccccatgcggttctcaggatatggctaaagctggttggacctccgttcttggtgacaacctcacacatgaataccagggttttctgctaatacagcataagcgagaagaaaaaattctcccctcgcaggtgctcaaggaagagttgcagaaaaaagtcctgaaactcgaagaagagcaagcccgcaagctgaagaaaacggaaagagacagtcttaaagatgaagtcctgcattcacttttgcctcgcgcgttcacgagaaaatcacttgccaaaatcctgatcgaccgcagcaaccatctggtattcgttgaggcaagcagcgccaaaaaggcagaggaccagctggctttattgcgaaaatcgctcggcagcctgcctgtcattccattcacaccacgcgaaccgctggaaattacaatgaccgagtggtttaaaagcggcttccctgccggatttacagcaggtgaagacgccacattaaagggtctgctcgataatggtggtgccgttcgctgcaacaaagttgatctacagtccgacgagattatgtctcacattgaggcggggaaagtagctacgaccgttgcaattaactggatggaacgcgcgtcgttcagagtcaacgatgatatgagtatcaaagccctgacattctgtgatgatctctatgaccagaatgacgatatcgaccgggaggatgtagcacaacgatttgatgctgatttcgtgctctttacgggcgaattatctgcactgtttaacgcgctggtggaggccattggcggtgaagcagaacgttaa

SEQ ID NO: 38731 - DNA, 303 bp, Escherichia coli
atgaaaataatttcggtaaaaacactaagggatttctgggcgaagaatcccgatgcagaacagccattaaaggcatgggttgatgaagcaacaaaggctgactggaaaaatccggctgagatcaaagaacagtaccggacagccagcatccttaaaaacaggcgcgtggtgttcaatattaagggaaatgattacaggttaattgtcgcaattgcttatcagcgaggatggatgttcgttaagtttattggaacacataaggaatacgatgccattgaagcggatacaatagaactggagtaa

SEQ ID NO: 38732 - DNA, 735 bp, Escherichia coli
atgagcgctgattcatcaatagaaaaggaaaactcctctacccaaaatctgttagaagatgctgtaaaagataagttgtttaataaggtttttgcctacatttttatttcgtttttaatttctaattggcgagacatatttatattactgaagtcaaaagatgatgttatgtatacattatctatagtgtttgtcggggaaaagatcccattattggggaatctttttttaccatcgttcgtagctcattttgttttgccttttatttatggtgttgtggcgtcaatattagcgccactgttaaccctgttaatttctttggtgacaagcacattatatgctaaattaagaaaaatagatgaaattgcaaataaaaaagaacaaataaggacaattaacagtgatattaagaaagccattaagaagcagagagacgttaaaaagtatattgaacaagaagaagaagaacttgaatcattagaaaaacggcttaaagaaattagggaacagattgaatgtgtggatagcgatatcattcatattattaaattatatagagagaaaggtgagagcttaaattcggtggatgatttttatgaattttttaccgccgtgaaaaactcatcttttcgttcgggtgatacaaatgacagggaaacacttgaggagcttctctcaaagctttctgattcacttgaaaaaattaaatgcgatgctaataaaaaggtgggataa

SEQ ID NO: 38733 - DNA, 624 bp, Escherichia coli
atggtgaaacgtgttttgaaaatttacatcgcggggccgatgactggttatccagattacaaccgtgctgcgtttaatgcgaaagcgagcgagctgatgtctgaagggcatatcgttctgaatccagctgtgttacctggtggcctttgccagagtgaatacatggatatttgcctggcaatggtgcgttctgctgatgcgatctatctgctcaatcaatgggaagaatcggttggtgctcgcgcagagcacgcgctggctgaaaagctggggctgactgtaatttatgagtcacaaaccaacattgaatgccaggttgctccgcatatttaccgtgaactggtaaatgcgttacgtgatgttgctattgaatgtcacggcacggatcagcttcgcgcccgcttaagcaaaaccctttccagttacctgtctttggctgaaggatacaacctccggcagcggagaatggtcaaattaatcacgcgtttatctcaatccctggcaaatgccgaaccaactaatccgctacctaatgacgcaatgaattatctgaagtcatgcggcgttgtttctgaagatgcagttcgttttgtggagtttatgtctcagaggatgtcagcgtga

SEQ ID NO: 38734 - DNA, 633 bp, Escherichia coli
atgattatcctggtagcaagtcaaaagggaggctgtggcaagtcaaccaccagcgtcaatatttgtgccgagctggcccgaaaaaacaaagatgtcgtcttgattgatgctgataagcagggaacggcagctcgatgggcgtcagaccgtaatgcaggtgaggttgcccctgtcattcactgcgtgcagaagttcgataatattcgtgagacgctgctcgatctggataaacgttacgagtacgttgtcgtcgatactgctggtcgcgacagtcgtgagatgcgtacaggcatgacagcggcagatgtgcttctggtgccgttccgtccttcccagccggatctggatactctaccgcaccttgttgaggttatagctgaggcgatggatttcaaccctaaacttaaggcgtatgccatgctgactatggcaccatccaacccggtcgttaacgaagccaatgaggcaagggaatatcttgctgaatacccgcaacttgaactcctgaaaactgtcgtccgtgaccgtaagatttatcgtgactgcatggcagaagggaagggggttgttgaaatggacaacgggaaagcaaagggcgagatccagatgttgattaaggagttgttatcgtga

SEQ ID NO: 38735 - DNA, 285 bp, Escherichia coli
gtgattaagcgccgtgagccagtgaatgcacaagctgtaaaagaccctgaactagagcgccgcattgaagagttcgccattaaagccgatttggtgccgggcgttgaggctgcaactcaaactccagataaagatgcgccgcgtgactttaaatccatacgcgtgagctttaatgaatatgagtacggcgtactcgatgatttaagcaaaaaactgaaccgcagcaaattgaacttgattcggcatgcaatcctcatgttagcggagtctgaggaagcaaaataa

SEQ ID NO: 38736 - DNA, 135 bp, Escherichia coli; identical to SEQ ID NO: 38622

SEQ ID NO: 38737 - DNA, 423 bp, Escherichia coli; identical to SEQ ID NO: 16789

SEQ ID NO: 38738 - DNA, 576 bp, Escherichia coli; identical to SEQ ID NO: 5316

SEQ ID NO: 38739 - DNA, 162 bp, Escherichia coli; identical to SEQ ID NO: 9709

SEQ ID NO: 38740 - DNA, 753 bp, Escherichia coli; identical to SEQ ID NO: 18432

SEQ ID NO: 38741 - DNA, 258 bp, Escherichia coli
gtggctgagccgtaccggtatgccgggtggttgttacgaaacgatgcttccgcacgcgcgcgcgataaagaagggatgattttcgtgagaagaggggaaaactggcgttctgataattgcagagttatttacggggcggttacgatggggcagaccgtgtccggtgggcaggcgacaggtatcactggtgggataagactgtctgattggtattataaatatataagagagatcaaacacatgagatcaaacacatga

SEQ ID NO: 38742 - DNA, 246 bp, Escherichia coli
atgttaactaaaagaatattattttctttaatgctaatagtttcaccatgcgtggtggcaagcgagaaagcgcatgaattgtatgacagcatatacggtggtcaacctgcgcccgatgttataaatagactgcataaaatggctgaattgggagatgtcgacgcgcagagcctgttaggctgggaatattatcagcctcgctttgataccaaacctgatgttcaggaagcgattaaatggttttag

SEQ ID NO: 38743 - DNA, 201 bp, Escherichia coli
atgagtgttgaattggataaaataagcctgaatcttgaattaagtaatactgaagcgtgggcgcttgctcaattctgtaaacgtacaacacatcaggattgcgttaacgtttctacgtctgagaacgaggcttatgaaatgatggatggcataaatgctattatgcggactttagctgaggcaggtatagctccgcgttaa

SEQ ID NO: 38744 - DNA, 720 bp, Escherichia coli
atgtcgagtggcaacttttttagtcccgcaggtctgagtgcagcggcaacaattctgctcacgctaccagggcaagtacaagccagcgccgagaactatcaataccaaatgaaattctcagctgatgctcagtctattcgcccgactacggtattcgatgatggtaaggctacatggtttgtcattccctctgacccaaaatcgccacctgcgatactgatcgtgacaccggatggaaaagagaaacttccagagcgttatgtgacggccccgaatgcaggtaacacggcaataaccatcattgcttatgatgttgcagaagaatggcgtattcgcaaaggagctatggttgtagcagtcagaaacgagaacttcaaaggcggcgtgactgtcactgatcatgagaaaaaaatcagtaaagaagaaacaaaaattcacgatgatattgcggaatacctgaccagattgaacaccgtttcaagccaggtagttattaagatgcaaaacattgatgttcatcctgaaaacaatagtgctgatttttcatatgccagattcattaaaaccacaaaaaataatgctgcatatgttaactatgaaaagatacaaggcaacctaacataccgttatgttgagcagcgtaaagaaaaaaacgccccgcagcaaaagcctgtatttcaggtgcaatcaattcaatttaagactgtggaaaataaataa

SEQ ID NO: 38745 - DNA, 282 bp, Escherichia coli
atgttagaaaggtacgttcaacgaaacagcgcttggctctttccgtttattgcggggcttatactcgcgacagctcctttaatgctggaaatgattacagataaaaacccattaccagcctgggcgcctgtagctgcggcctgtatagggttttgtgcgtcagggataggggccgcttttacgaataccctttcagcacaaattataaaattgctggtcggagtgtttgctgtagtaatggtcattatgattgttattaaactggttaacttattacactaa

SEQ ID NO: 38746 - DNA, 543 bp, Escherichia coli
atgaaaaaagatggcagaacctttatccggtggttcagctttggttgtaagagcctttttgctgtcataggcattgggatcgcctactatgctgcaattggggtttttggtttagcttataatccggtttcatattatttctctgaatggattaactggttgcaacctaagttaaaattgccggtgacttataatgattccagcctttaccttaatgacggaacctacagcttaggtagctaccttatgtctgtaggttatcttttgtttatgtttctcgttcagttgtatgttgctgcatatcttcttaataaactgtattggtctttaatgactcaggtaataatttataaagaaggacgggattttcacagaaaatatgctggtataagttcggctcgttttaacaggcttttaagtgaagcagaagttgatatggagctggaaaatataagcaggaagcattgggagaagtggagggaacattacaaaagtaacatgagttacgatgaatggaagaaaaagtttaaaaaggttctttag

SEQ ID NO: 38747 - DNA, 258 bp, Escherichia coli
atgctgaaagtattaaagaaaatatttggctgcgttaagtttatttgtgccctgatttggttcggtgttggtgcttattctatttggttaggatttagcaagatatttaaagataactctatccatatcggtggtcttgaggcggtatctttacttgatacaactccgtttgcagttatgtttatttttagtggtgtgcttatcattgcgtttgtatgggttggttatattagcaagaggctaaataatgaagcatga

SEQ ID NO: 38748 - DNA, 327 bp, Escherichia coli
atgaagcatgattatattcctgatgccggtgatattgtatggatagactttgatccgcaagccggtcatgaacaagcgggccacagaccagcattagtgttaagcccagcaatctataacggtaaaatagggttaatgttgtgctgccctatgacaacaaagataaaaggctatccgtttgaggtcaggaacggtgaggggagcgctgtgctggctgaccaggttaaaaaccttgattggcgtgaacgtggagcggtcaggaaaggaaaagtacctcctactgttttagctgaggttagggctaaactaaaagtattaattggttag

SEQ ID NO: 38749 - DNA, 438 bp, Escherichia coli
atggctattagcgagttatctttgggaaaacagattcttgataagataaataatcatgacgtttataattcaaggctgcgcttaaaaattcaactttcaaatatcgttgggttcgttgttctttttatgataggaagtaaatttaaccagttgatactgtgttcaatagcgtttgttattgtttttgtgttaaccaacatattttggagatttaagtcggttatttcatcctcgttgctatttgattacttcgaacgtagcgctgatgatgatgggtttagagagttttttatggggctattcaacagcaaagatttacttaccgtccgggatgatagagtaaaaatcagtcattttctttatgaacaagacaagagatatgatgaattaaagaaaatagagactatcactaacggtatgaaaggccgtggggaatag

SEQ ID NO: 38750 - DNA, 201 bp, Escherichia coli
atggaatatggaaaactggccgctcaaatcgggatgcgcctgaaactggaagtgatggagtcagcccgcggctattacattggaacgcagacagaatatggtgagccagtatcacgcgaatctaacgaatattttgataccgagcagcaggcagaagccgcactggctggcagattatggacacagaaacaaaacccctga

SEQ ID NO: 38751 - DNA, 798 bp, Escherichia coli
atgaatactcaattactgaaagtaggccagtgcctgaagcacctcaatgacgatgtagcagttagtgaagtgaccctctcagatggcgagatctcttacaccctcttaaacctcgaattaccgaccgcgttcaccgttgagcaagcccgtatcagcgcgcgctttggctggacgcttacagataagacgctatcccttgatgaaatccgcagccgccgcgaagtcgttcgcgtgtgtaagcagcgccgcgatgaagaagccgcgcggaaggcagaggaagaacagcgcagccgtgagcaggtatcaacgaatccagagtatcaggatctactgaccaaaaaagacgaacccagcacgacgaaactggcggctaaaaatatccgcctgctgctgaaaaagcatttcaaggggattaagttttcagtgcgtatgcgtgattattcctgcatcaatgtgggctggacagacggcccgacgactgatgaagtggacgccgtaatcagccgttttcaggaaggccgttttgacggcatgacggatatgtatgaatacggtaacgacccattcaacaaggtttatgggggcgtgcagtatcttttcacctcgcgcgaatgctcagatgctctgatcgaggaagcgatcgccagcgttaaaacccgctataaatcggtagttggggatgattgcacggtcgcggctttccgttccggcaagctgtggaacgtaggcaatgaatattttagccacggtctgcaatcagccattcaccaggcagcggccgcaatcagtaaaaaataa

SEQ ID NO: 38752 - DNA, 207 bp, Escherichia coli
atggaaagaaaagctatagagcaaatcctggctaagcagccggtaatgcaggttagcgtgaaaatagcggcagtttccaaatatggcgatcatcaggttgaaatccgttgcaaagatacagaccggcttatctggcgtgcctgggattttgagaaggattttaaggaagatttagagcgtgaacttctgcgccttgcaccgctttaa

SEQ ID NO: 38753 - DNA, 255 bp, Escherichia coli
atgctgaacaaaaccgaaaacaacaccaacattagtagcttcaatccctgttctacagagggtttaatcgccgtaaaggatgataaaggccggacgcacatcatccagcgtgaattaatatcccacacagaggacagatctgatattgaagggcaagcagcgacgtccgttttcttagtgtccgggaagtggataagggtatttttatctagtgaaaaactggcaagaaaactcggcattaccgtgtctgaataa

SEQ ID NO: 38754 - DNA, 717 bp, Escherichia coli
atgaaaaagctgatggttgtcccgctactttgcggcctgcttttcggttgcgacaacaaagccgaacagtttcagtttgaagcggccagcaaagcagcgctgagcgcgcccgatccgtttctggctctcaagcagtttgataaacaggccggagactatggtaaagattgtggcgaatccctcggggaagtgatatttggcgtatcagctggccgccgtgctgcctgcgaaaagcgattagaaatgcagaccaaaatagttgttgcttcggtcgataaaggttccatgcctgctttcatgttccttctcgatagtggccctaaatatccgcctgtctacctgactgatatgcctgctgactatgctaaccggcaaagggcgcgcctgtttgagctggctcgatcgttgccaccggcaaaggaaaatgcagagcttttccgccgcgcagctgaagatctgcaaacaggaaataacgtgatgcaggattccacggcagccattgctctttataaaaaggcctggcaagcaggcgataaatcggccgcagatgaactgtctgatgtctatgcgtttctgggcgacacgccgcgagcttatttctggaaaattcgcgctcacagcaaccctgaatacacgaaggacgtgaacaagctggcgccggaggaaaaggtagttatccagcgcaaagcggcagacgtaacacaaaccgatatttga

SEQ ID NO: 38755 - DNA, 1278 bp, Escherichia coli
atgaatactgataactatgttttcgaattaccagcaacacgcggcgtccagggtggcgttgaacagtacatgctgactgtgccaatggccgttttacgtcgccttctggcgatggatgatcagggcgatgtaatggcccgcagccagcgcgaagcaaacagaacgcgcgcgcgtaaaatcagaaactatgttgccgaggccaccggaagcggtaagccgtatattctgccctcgatcaccggaaatattgatattgacgtagatttccttcccagcgaactatcgccgtctgtgggtatcctgaaaatcccaatggaagcagatctgaagttattcgacggacagcacagggcgctgggcatcatggattttgtccgggactacgcgaataccggcgacaccatcagcctgttgttgacggttggcctgccgcttgaaatgcgccagcagttttttgccgacatcaacaacaacgccagcaaaccggcagcagcgatcagcatggcttacaacaacaacgacccggttaaccagctggcgatgtacctggcgcaaaacgtcaccggcctggcggggtcggtcgatttcgaacataacgccgttccggcaaaaagctcacgccttattagctttaaggcgcttaatgacgcgactaaaaagatgctcagcctgcgcgccagtagcgagcctacccttcagcagcgcgaggcggccgaaaagctctggtctgcctggtcaggcgccatgcgctggctggatatagcgcaggatgatattgccgccgaataccgccaggaagcgctggggcttcatgggattatgatcaacgcgatgggtatggcaacggcccggatgctgcaaacgcggccgatagattcaatcgtcagcctcctggcctgcgcagaacaaggcgagaacggttttcactacagagacagctttatgcatgaaaactggcatgacatctgtgtagatccgcaaaccggcacaatccgaactgaccgccgcgcgctggaagcgacggctaaagagttacagcggctggttgacccgttcgcggaatgtgcctggctgcggccttatctgggcgatgaagtcccggatacaacgttgctgaagttcaatgcggggatcgtgaagctgaaagaggaaacgagtctgccgcaaatagcaattattgaaaaactggagcagctgcgcgacggtgacgaacaaacccggtcgcgtattgtggggacgctgcgggcttttaaaaagtacattgcagacggtgtataa

SEQ ID NO: 38756 - DNA, 378 bp, Escherichia coli
atgcgtgtattaaccccccaccaattttttaacctcaactggtatgtcagtaacccggaattgacctcactgaaaccggcgcaagataacgagcctgccctggcaatgggttatgtatggttccacgttcaggatgaagtgaatggcgccgagccggacgaggatatgatgtgtgctgttttcccctggtacgccgagatcactacaaccgatggcacgccggacattcaggtattcaccgagcaggacgattgctggctttccgcacatcagtttatgtttgcgcgtgatgcggttccttcccatgacgaatatctcgtttatttcgactcgcttaactggcgcgccgacgtcaaaaaactgcttctcgatcgctaa

SEQ ID NO: 38757 - DNA, 222 bp, Escherichia coli
atgccgcaaggaaatgtcatattcaacaagaaaggtaaattcttctggtttgaagatgaaaacagaataccaggattgatacgtagtgaaaaagaacaagaatggtatatcgctgaattgtattacccacctgaatttgattacgacaccgctatgcacgacaagcaaatacaatatttgttatcaaagcctgaagaattgaaacgttacgaaccgaaataa

SEQ ID NO: 38758 - DNA, 339 bp, Escherichia coli
atgagcgtaactataaaagacgatcgactcaggactatcgcgacctttgatggcaagaccttgaaagatgatcgactgaggaccatcgcgacgtttgatggtaaagccctgaaagacgaccgactccgcaccatcgctacctttgacggtaaaaccctgaaagacgaccgactccgcaccatcgcaacatttgatgggaagaccttgaaagacgatcgactccgcaccatcgcaacttttgatggtaaaacacttaaagacgaccgactcagaaccatcgcgacagttaatggtaatgtcagtattgttgttttggcgtttgctgctcggctattttga

SEQ ID NO: 38759 - DNA, 1011 bp, Escherichia coli
gtgacgttcagggacctggagcgtccgaccattgatgccatcacactttttggcgacaaaaacaccaagaatgtggtactggaaaaaagctacgaagagtacatgcagggctttaccgatgcggcaaccggtgaggctaaacgaggttttatggctgttgtttcggagctggagcagcgcttccctgaccctgctagtatcgacagtgaaaaagagaaaaaagccttcgtcaaactgtttggtgaatatttgcgggcagaaaacatcctgcaaaactatgatgaatttgccacgctgaaagccctgcagaaggttgatattagtgacccggaagcggtagaaacctttaaagcagagcactatgtggatgatgaaaaatttgctgaattacaaaccattcgtctcccggcagaacgtaaagttcaggactatcgctcagcatacaatgatatcagggactggcagcgacgcgaaaaagcatcaaacgacagggataaatcaaccacagactgggatgatgtggtgtttgaaattgacctgctcaagtcgcaggagattaacctggactacatccttggtctgattttcgaccacaacagagagaaaaaaggtaaagaagccctgactgaagaggtcagacgcttaatccgctcaagtctgggcaaccgtgccaaagaaggtctgattgttgactttattcagcaaactaaccttgatgacatgcccgacaaagctagtatcattgatgcattctttacctatgctcagcgtgaacagcagagggaagcggaagcgttgattaaggaagaaaacctcaatgaagaggctgcaaggcgctatatccgcacatcactaaaacgggaatatgctaccgaaaatgggacggagttaaacgagacgctaccaaagctcagtccgttgaatcctcagtacaaaacgaaaaagcagactgtattccagaaaattggggcgtttatcgaaaaatttaaaggggttggtggacacctctag

SEQ ID NO: 38760 - DNA, 525 bp, Escherichia coli
atgaaacgtaaacttattgcctttgtgattctggctacatcatcctgtggatatgcagccaccaaagatgtaacaatgaatcttgttgatagtgacggaaaagagcgaaatattggtaaaataaccatccagaagacaccctacgggctgctgttcacccctgatcttcactccttacccgccggcattcatggttttcatgtacatgaaaacgcaagttgtgctcctgccctgaaagatggaaaaactgtcgctgctttatctgcaggtggtcactttgacccggaaaaaacagggaagcatctcggtccatggtctcctgatggccacctaggtgatctccctgcgctttatgtcactcatgacggaaaagcaacctacccggtgcttgcgccaagactatctgaattaaaggagctcgatggccgttcgctaatgctccacgcaggaggtgataatcatgatgaccatcctgaacctctaggtggcggtggtgcaagaattgcctgtggtatcatcccataa

SEQ ID NO: 38761 - DNA, 225 bp, Escherichia coli
atgagtgagaataccggaaaatcccatgaaaataaaatggttattattgactgcggggaatatgatgaataccttcgtaacgcgtggttccgaggttttcgggaaggttatgatatggcgatgaaatttggattaggctgccagcaatgttatgaaacaggtgaaaaaatagcatgcgcaagagctgaagaatgccgtaaaaagattaaggtaataaaacactga

SEQ ID NO: 38762 - DNA, 480 bp, Escherichia coli
atgaatcacagcgaaacaattaccatcgaatgcaccattaacgggatgccttttcagcttcacgccgcgccaggaatgccgctttcggaactactccgagaacaagggcttcttagtgtcaaacaaggttgctgcgtaggcgaatgcggtgcctgtacggtgctggtcgacggcacagcaatagacagttgcttattccttgcggcctgggctgaaggaaaagagatccgcacgctggaaggtgaagcgaaaggtggaaaactttctcatgtccaactggcttatgcgaaatccggcgcagtgcaatgcgggttttgtacgccgggcctgattatggctaccacggcgatgctggcaaaaccacgcgaaaaaccattaaccattacggaaattcgtcgtggactggcgggaaatctttgtcgctgcacggggtatcagatgattgtaaatacagttctggattgcgagaaaacgaagtaa

SEQ ID NO: 38763 - DNA, 144 bp, Escherichia coli
atgaaatatatcatgctgtttctcatggtaataatgctaaatgcatgtgaatcagctcaaaattttaaacgtccagaattatctcaacaaaactgtgatacatgtaacattgatgatgctgacagcccaatctttgatgattaa

SEQ ID NO: 38764 - DNA, 2688 bp, Escherichia coli
atggataaaataattttctgtcatcgctctgctggatatggttcttccctgctattggcggtgttttcattatcttttatttccagctcagtgaatgcggctatttcttctgattgttcgggatcatcttattgcactaataaaacaatagatgccaatactgctggatatatcgataaatctcctgtttattttttagggaatacagatcttactgtttctgccagccaggcctttaataataacaaaggtacctatgagttcagagagaatacgcatgtaaaagtcaacgccgagtcaggattaaatggcggtacatacacgctaagaggcggaagtacaccagggaaagttgaaatcgatatcaatgccagttctggtataaacaatgccaagttaactgctctcgctggtagtaatggcgtagtcaatgccaatactgaaaaagcaattaatggcggtagtcagatattcaatgctggaacaacactaaacatcaatgcagccgatggcgtatttaacagcacgggactgacattcacagatgcgacacttaatttaaacgcatccgatgcctttagtaaaaatacgatgtcctctggtaaagttggcagtgttaaaggaacgtcaacggttaatatcaatgccacggggggaatgtctggtgggcagttaaacattcaggattccagcgaggtcaatgtgactggaaacggtagtgtcactggaggcacgttactgttcactgggagttcagtattaaatgcggataccgctaatgctatcgcgggagaaacgaataatacgaataaacagatatttcaatctggtacgacaatgaatgtgaatgcagccacggcactcagtggtggcaatcaaacatttaacgatgcaacattaaatgtcaatgccagtcaaggtataagtggtggatatcagatcctggcaaaaagctcagtcctgaatacagaagcagatcaggctattattggaggacaaataaaattacaggataatgcagtatttaatgctaacggtaaatcaacaattaccggggggatacaaaattttaacgataatagtatattaaatgccaatggcgaagataccctgtctggaggcagacagaattttagtggaaacagcatcctgaatggcaacagtaaaggggcgatttccggtaacagcaaacaaatatttagtaacaatgctatatttaacgccaatatcagccaggcagttactggtggcacatctactacatttaaagacgatgctgtcatgaacatttcagcacagcatggtgtggatggcggaaatttattatttgatggtaattcgacattaaacattaatactgcagatgccattaatggtggcgagcagcgttttaaagggaattcactgataaatctgaatcatgaaaactcgttatataatacaacattgaaactagaaggaaatgccagtgtcaatataaacgcggataatgctttgaattatactgaccatatcgttttttcaaaaacgtatgacactacaacaggcagtatactggatgttaacggacactccctaaccattggtagtatcagtggtaatgataccaatgcggtaatcaaaaatagtagtgctcaggatgccattctgactaccggtttgtatgattatggtgtgtttgccgggcaaagttaccaatatgattcttttctacagcgtggcgcgatgcgtgcagatgctgtcgtcagcagcgcattgggagatattacccgtcaggctggactggcgctaataccacagtttgctgacagactcgttccggaacccagtggaatggcccaaaatggccaagggatttgggtacgtaccctttacggacaacaggaaaatcaaggtgacggagccacaaatgcggcatggaatggccacgtaaaaggtatccaaattggggctgatttatggcctgctgatgaagacagcagtcataaactgggtgtttatgtgggttatctcgacagtaatgctaatgtatcgggcaaaaccatttacacctcgaatgcccagcttggaagctaccagctcaatacttacgctacaggtttatactggcgttatacagcaacccagggctggtacacaaacaccactttacaactagcccggtattctggacaggtagaatcgaataacagtacacgtaaacctgatattcatggtcgtgggcagattctggcttttgaagcgggctatccgcgagtactaaatgaggcgctgacactggtgccacgaatttctgtatcctggcagaaagttaaattagatgactatcgttatgatgatttaaacgttaataacgatctggataatcagttaaccgcctccgctggagctcgtttgtactggaatactatgacgatatccggggtccagtggtcccccttccttgatgcagagctgaataatcaactgaccgccagagacagaaataatgttaccgtaggcagtacgggataccaggattcattacttacatcctataatggttctgctgcaaaaataagcggcggcgtgaccgtaaagctgaatgattatacaaattattatatcaaggttgattatcaaaacggtcttagtgaacgatccgaaaagacctggcagggaacaacaggggtcagtttatactggtaa

SEQ ID NO: 38765 - DNA, 888 bp, Escherichia coli
atgaaaaaaaatacccctttaacattagaggactatatttcaaaaaccgtgctgttatgttcactaaccgagtcagaacaccgtcttgacgcgtatatgcgtgaacattttaatgaactcccttttcacggcatcatcgacattgcccgcaatgcaatggtgagtaaagcaacggttgggcgttttttaaataagctgggatttatcggctacgctgacttccgtcgggcattggaaaatacgctgacactgcaaaaaatggtgccgccgtttgagctggcatcacgcattcaggtaaaagaaaagattaccacggaacaaattgtttccgaatttaataagaatgttacgaccttgttcgagaattttaaagataatatcaatattgacagtctggataaatttatcgacattattttgaataccaaccgacatatatacgtaatcggtcccgcgtcttcctatgcgatggcgaaacattttactacgctgattaaatatttccgcgatcgggttacattgctttctatggacgttggggagttgccgaagtcattgctgaccgttacggatcaggacgtgctgatcgttttctcctactaccgttttaaccgggtagtgattcgcgttaccgaatggtgttgtaaaaaaggcgcgacggtagtgctgattactaactcggagtccaacccgtacggcaaattttgtaatctgcagtttgtgttgccgagcgatacgcaatccgtattcaaaagccgcatcgtaggtttcttttttattgagctggtgttgcatctggcctatgaaaaaggcgaaggcgagggcaatttcgagcaactggaggaactgtttgtcttttttgaaaccttttcacctcttcctggataa

SEQ ID NO: 38766 - DNA, 1371 bp, Escherichia coli
atgccaggcagtcaaagttcggtatttgattcagaattgtattcctctctcttcacgcagccggagatgaaatcaatctggtccgatgataatcttcttcgctgttggctgacctttgaagcaaccatcgcgcatgtgcagactgagttaggtattattccccctgaagccgccgcggaaatttccgccgcctgccagacgctgaaaatagactggccgcgcctcgccagggaaacgcgttccgtcggtatggcgattaagcctctggttgatcaaattgccgatgcgggttcccctttggtcaaaaaataccttcactggggctgcacgactcaggatctgctggataccgccctggccatgcgcatgaagcaaaccctgcaattactgcgcagacagttggtgcagttgggcgaaacgttgaaagctatggcgcttgagcaccgacatacggtgatggtcgccagaacgaattccgtcgatgcttccgccacgacgtgggggctacacgtcagcagctatctgtccgagctaacccgccaccttcagcgcctggatcgcctctacccggcagcgactaccggcctgtttggtggcgcggtcggcaacctggcctccgtcggcagccagggaatggcgatacgtaagcaattaatgggcgcgttagggttgtcatgccctgtcggtatgagcaatgccagtcaggatcatgtagtcgaagtggtgcagttttttgccctggtgcatggcacgctgtgtcgcatggccaacgacgttgaaacgcagggccgcacgtccgtgggcgagttgcgtgaaggcgaaggcggtggaggatccagtacgatgccacacaagacgaatccccgcgcgagcaatatgatccagacgctttcccgcatgggctggaactatgcctctggtgcaaccagccttctcgatcagtgtgacgtgcgtgctgcctccgcccgcgtactcaactggacgctggtaccggagtcggcgctggccttgtcggccagccttgaacgtgctgtccggttaattacgcatctggtggtggacaaagagaagatgcgcagcaacttcgccgcttcaaagaacttcattatgtcggaatccgtcaccatggtattggctgagaaaatcgggcgtggtgccgcttacgatctgatgaaagcgttattaaaagacgcagacggctctaaagacctgttgcagtgcatgctggaaaatcagaccgttattgacgcgctaactgagtcggagattgttgctgcttgcgatccattgtcttatctgggctgcaatgacgcgctgatcgaagaaaccgtcatagccttcgacgattacattcatgtccggacggcgtag

SEQ ID NO: 38767 - DNA, 1050 bp, Escherichia coli
atgagcattaaagccaaaacattattattcattgccttatctggggctagcacgtcagcgctggcgattagcgtttatgaggataaagccaccacgctggatatttacgggcgtattgagtggcagttagcgaatggagaagcatcattcgcaaatgatgactcccgtagccaaataggggggcgcttagggatttatttaacccgcgacctccctttactggaagatactaaacttgtcggtcgcctggagtggcaggttcgtactgaaaaagatgataataaaaccaaagataaagatctcgacgcccgttacgcctatctggggctttctcatgctaaatatggcgagctgattgccggtcgtactaaaaacccgttatatcaggtcatgcgcatgacggacaaatataaaaactttacgccaaacgtatataactacggtattaccactattgacgattcttaccaatttaaccgtcaggatggcaccctgcaatggaacggtgattttagcgggcatcaggtgcaactggcttacgtttttggaaatggcaatagcgacaacgatgcacttgataacggcatgatggccagttatcgcaagatgattaaattcggcgacgtaaaaatcacaccggcgattgccgtcagtcaatataaccgtcaggacggcgtaaaaaccaccgacggccgcaagaagcacagccaggtaatgggcgggctgcagttcgattatagcgatttgtcattagccgtaacggcgggtaaggtctccatagaaagagacaataaatctgacaatgactatacgagtttcgattccgttgcctcctatcaattcaccaaagaattcaaagtgcttggcgggtacagcatcctggatgaagccgacgaggatgtgtacgaacacgagggctggcgaattgaatcgcagctaaccttagctaagaatgtgtatttatcagcaacttaccttaatacgctggccagtaaaaacgagaaggtcaacgatgacgccattatcgtcgggttgcgctacgacttctga

SEQ ID NO: 38768 - DNA, 765 bp, Escherichia coli
atgaaaaaaatcatgttgttgctggcaggactggcgctgatggtcgacgcgcaggccgatacgattattgcagccaaaccgcaggataaactgagcggagtcaataaatccattgcgctctacggaaattcatatacacattataacaataatataaatacccgactgcgcgatctcagccgttcgctgttaccgaatggcgctaaagactatatgttccggggaatcaccatttcttctggacgtttaggctggcaccttccgaatcttgaattccagaatacgctgcaaaaatgggacgtggtgatatttcaggggaattcaacagagcctttttccgctaaaaaagattcgcgtcactatttcacggagtccgccgtcaagatggcagatatggctcacaaagagggctcgcgtgtggtttattttatgacctgggccagcaaggataaacccgagcaaactgaaaaactggagaaagcctatctgaatatagccagtaaaaccgggggatacgtcgcgccggtcgggctggccttcagtaacgcaattaagacgcatcctgaaatcaatctgtatcatagcgatggaaatcacccctcgctggcgggaacctatctggctgccagcgtgctgttcgccacgctgtatgaccagtcaccgataggcggcgcactgcctgccgacagcgatatgaccgagcaaaccgccaaagcgctgcagcaggtggcatgggataccgtccaggaattccgtgctaactaa

SEQ ID NO: 38769 - DNA, 219 bp, Escherichia coli
atgaagtggcttttattaatcaccttgagtctatattcttttattgtgcaaagtgctccctgtgcattgaccaatgtcggtgaacaacgtggaacatatatactcaagccactgagtatgaaaggtaatctaaccgccgaaaaattgaaaacaccggaaatatcattgagtgtacagacttgcaagagacaaccaacgccattaaagttcattttttaa

SEQ ID NO: 38770 - DNA, 435 bp, Escherichia coli
atgcaacgaatagatgcgatagactctctcattcgagatcgcaagcgagtgtatttgaatatttcattcaaaaagcatctagttcgctcaaatagttcctttaataatgttatagttgaaaatctaaatgcaattattcacagaaacatcataaaacagtacatgcaaaaatcaacaactatatatgttcattctgtttataatttattaaaggttataacgctcattgatctaaaaaaaacaattcttgatatacatggtgttgtaccggaagaacttttggcagataataaaaaattacttagtaaagtatataacatggtggaaaaaaaaggtgtccttggatgcaaaaaattaatacacgtcagtacagaaatgcaaaaacactatgaagcaaaatatggagtaaacttcaatagtgctcccgatttttga

SEQ ID NO: 38771 - DNA, 978 bp, Escherichia coli
atggcttatgatttgactaatactctggtcattggtattagttcaacagcacttttcaatatgcaggaatcagataatctttttaaggaattctgttccagcaatccagaaaaagcaattgagcaatacagagactacatgcttttgcatgagaatgatgagttgcttcctggaactggatttcccttggtagaggctttgctggggctaaataagtataaaaaagaagctgataaatctcctcttgttgaagtagtggttatgtcaagaaatagtcctgatacaggacttatgatactgaacaatataagaaaaaaaggagtagatataacaaggtcagtattcacaggtggtgaaacggtggttgactatctcgaggctttcaatgtggatctctttcttacaaccagtattgatgatgcacagcgcgttatcgactctaatgcctgtgcagttgctattttaaaggaaccgccaaaagaatctataaaatatccgcaagatcaggtaagaattgcctttgatggtgatgctgtcttattcgatgagtcgagtgagattgtctataaaacgaaaggaattaacagtttccatgcacaagaaaatgccaagcaaaatgaacctttggcggaaggtccttatgcaatgctgctaaaaaaaatagcgagattacaagaccgattacctgcaagagttgattattcaccgataagaattgctcttgttacagcaagaaatagcccatccgagctacgagttataaaaacattaagagcttgggggataaatgttgatgaggcattctttctgggtggggtcgagaaaacaaaaatacttaaagctttcaatcctcatatattttttgatgatcaagatgtccaccttgagccagcatcagtatatgtcccttcaggccgagtaccttatgcttctcgctcaccattatatcagcaaatattgtcaatcaagccagcttaa

SEQ ID NO: 38772 - DNA, 222 bp, Escherichia coli
gtggtaattatcaatagcacgatactgagcggcgcaggcgctatcccttccctgacgtcgctcttacccgacatcagaaaaatgctgctggtcactgaccgtaatattgcgcagctcgacggtgtgcagcagattcgcgcttactggaaaagcactgcccgcaggttaacgttatcgataatgtgcccgcagagcccacgcatcatgatgtgcgccagctaa

SEQ ID NO: 38773 - DNA, 2043 bp, Escherichia coli
atgagtattctcaagaaaggaattatggaagatcaacgtttattggcatctgcagctctttttcgtcaattacatgaaaataagaaagatatatacgatgttttagctcagttcctatgttcaactatagtcatacatcagttatgggagttcgacgtaactaagtgctctcaggaactaaattctgactatggatttgatatacctgaagctgtagtgaaatcatgtctaaaaaacagactcaagaaaataggtttgttggaatttaaaaatggcaaatattatgttactgaaaaatttgatagaaacaataatctaaaagcaagttacgagcaagtaaaggaagaacaagactatataaaaaacttgctcattcaattcgttaagtcctttagtaaagaagaacttaatctagagcagattgaagagctattatcagatttttattcatattttattcatgacagaaagcagagtgagaactccgtagttatcagtcagttcatcattcagaattcaaaagaccctctgttcaccgataagttaaacaaggttgaagaaggactaattctttacggtgggatctgttataactcagacttagtgaatgctgagccatggaggaatgattttcaaatagttcttgatacggaattattatttgatgctgtaggattaaatggcgatattcattatcgtatgtttgaagaatttctattattagtcaaggggttacgagaccgctcaggaaataaatcaaaaatagaattaaagtactttgaagaaacacaaagcgaagttgaaagttacttttatgcagcagaaaagattttcgagcgtaatcaacatccagacccatctaagactggaatgatcaatctactacaaagctgttctacaaaatcagacatcacaataaaaaaaatagagttttttgaaaaactaggaaaaatgaaaatttctcttgatgctaacactgattattacgataagccggagtataatattgaaagcacctctacacttgataaactaaaaagagaattcccagattatgaattggataaaattgctgatactttaaaaattttcacaaagataaattacaaaagaaaaggaagaagcaatataaagttagagcaaactggagccctactcatcacgggtaaaaatataaccaaatccctatcacattacttttctactcaaggagaaagaacaataccattcgcagccactttagactatataactgagagattatggtttaagtctcataaggggtttgctaatggagtgaaattacctacgacttttgatgtagttgctagagcacaagttattctttctacacaggtggcagcaaaagtcgctaatgtatacaaagatatgaaaggttctgtcgcgagtggagccatgtcaaaagagactgcagccaacttggttatagagttgagaagcaaaaatttacagccggagggatttgtaccggatctggttgaggatatcatgagttttatggatgaagatgtaatagaaaatgcacttaggacaaaatctttactcgaaattcgggctaagcaaggtatcgaaagtgaaaaacaagttgaggttcttcagaaaaaacttgaagaaataagtgcagacaaaaatgaacttgtcatcaaatcgaatctagaaaaagctgccactataactgaagcccaggccttggttagaaatgtaataattcagacacgaatccgtgagggtgcaaaattaaaaagaaatgccaaattaaaatataaactcattcgttctgtttattttatgttattagtaaccatacctgtttcatttattgcgtattttaatgtcccgtcggacacggtggttagcgtcgcttcattaatatcaggcgttattcctttgttcttcgttgctgccatgtttaaaccgatagaaaaattaacttctcggattgttataacggggttcaaaagaaaaatcaaaaaaagaaatgaagttcattctgttgataatcttcttctcactatgcattaa

SEQ ID NO: 38774 - DNA, 132 bp, Escherichia coli
atgaagttcgagtccagtcagaggagccaaatttctgaaaagcccgcttttatagcgggctttttgctatatctgataatcaatttcctcttcactgttttccatcacctgccgcttgatatcctcaactga

SEQ ID NO: 38775 - DNA, 444 bp, Escherichia coli
atgactagtggtattttcttatcccgtgaagatttgatgttgttatcagaccaagcaaaagaagaagtgctggcattggctactggggattcggtttctggtgtttatgaggagtcggaagatgggcctactgatctttcctcgcttcaggcagaaaggcttgttcgtggtttaagtgataagtcgcgaacagtgctgaaagctattcttgaaagcgaggatggtgagcgaggattctggtgcaagagcctcgcaaaggagcttggttttgatgtctctgagctttcaggtgtctggtcagggcttacacgcagaactcgcacggtaagtgatgattctgaggcttatttgattagctgggcttgggatgatgaccgtgatgattactatggaacgctacatccaacaacctatcgcaactgcaagaaagctatgaacttttga

SEQ ID NO: 38776 - DNA, 618 bp, Escherichia coli
atgcccgtattccctgccagctttaatacgtccttccggtgctgcatcatcgcctctttcaccccttcccggtgtttttccagcgatttctctgtcgaggctgtgaacagggctatagcgtctctgattttcgtctcgtttgaggtcacagcctcgctgacagactcgccgagcttcctgaactcgtcgttcagcattttctctgtagattcggctctctctttcagctttttctcgaactccgcgcccgtctgtaaaagattgctcataaaacgctcctttcagtctgatattcctcccgccgttcgggtctgcaatgctgatactgcttcgcgtcaccctgaccacttcaagccccgcctctgtgagcgcctgaatcacatcctgacggccttttatctctccggcatggtaaagtgcgtctataccgcgtgtaacgctctcagcaagtgcctgtttcgtttccggcaggttatcaggaagggtcagcgtccggcggttctccggggcgttggggtcatgcagtccgtaatggtgattcaccagcgtctgccaggcatcaattctcggcctgtctgcccggtcgtagtacggctggaggcgttttccggtctgtag

SEQ ID NO: 38777 - DNA, 195 bp, Escherichia coli
atgcaagtagagattaaatccggtgtcacccaggtaaatacggttggtatttttaaatgtataacgctgctcgctacccggtttatcatgacgatcattataaaagttttcccagtcgaagaacccgtacatttctccccaactaaagttagcgccgccttccagttccagatatccaaaatcatctttgtgtga

SEQ ID NO: 38778 - DNA, 882 bp, Escherichia coli
atggaatatttgcataatgaatatggagaaaatgcaataaatgcagttttacatttagacgagcaaacaccacatattcacgcttttataactccaatcgaaaataaaaacggaatatataaactaaacaataaatcgtatatgaaaaaatacgaaacaatgcaggatatatattttaaatacaataagccattgggtttaatccgtgggattaaaaaagaggtttcgaatgcagaatataaggaagttaaagaattttacagcgatattaaaaacattaaaaatgaaaccgaattagaaatagaaaataataaaattgaaaaaattagagttgttgaaacagaagaaaagaaaaaattatttagagatccggaggtagtgcctaagcactacacaggagctgaggttaatcgttacatacgaaaggctctaaaaccttacaagaacgaacgaaagccccttatagctcgtctaaacgggtttaagagccgtttagagcattcagaggctgagttgtcagatctccgtcaaaacttcaacagaagagtccaggaacgggtacaacaggagcaaaagttagcagtggccagagccacggctgagcaagaacaaatcattcaaaataaaaacagaaaaataaaagatatggagttggaaataatagaatacaaaaggcagttaaaggaaaatgcttcaatttctcagagatatgaaaaatataaaattaacagtgatgttttagatctaatacaagagcataaaccggcagaatttaaacaactcttcaatgctgctattgcagcagcagatgccgaatattcacagaaacagcaaaataataactacataccccagaataagccaaaggctttaaaattataa

SEQ ID NO: 38779 - DNA, 600 bp, Escherichia coli
atgaaaaagaaaaataatatagagtatttacagttaaacaatgctgaaaatagtgaggattttgatattgaacacaaaaaaaatcctttcgtgttcaatatggaaattgatactaaaaagaaaaagctaactgttgatcgaggttctgaattagaaaccgaagaaggagtttttactacaacaatttcacaaatccaagaagtagataaagaggaatttttaaagctgtttactggtcaaattaaattctatttcgatttaactcaaacagggtttaaattatttttcttgattatgggtatttaccaaaagcaaatcggcggtgacgaaatttacttaaatttcgaaacagcaaaggaagaagctgaaaaatatgattatactatttcaaaagctgtttattatcgcggattaaaagaactattagaaaagaaaatgatcgcaaagtctgttaagaaatacatattttatataaatcctgcaattgtatttaatggcgatcgtgcaaggtttgttaaagagatccgaattaaggaagaagaaaaacaaagagaagcagatttaaaaagcattaatgaaagattggatcgatatgcttaa

SEQ ID NO: 38780 - DNA, 414 bp, Escherichia coli
atgggagcgaaatttttagatcaaaaaacgggcgtaattttggaagagccggagttcgtgaagctgtatatccgtgatttatgccgtgttaaaggactatcagcaacgcaatacaaaatatttacgttcatgcttgctaatatgaatactgataatgttgtttcatttggaccaagaactaaagaaaaatttttatcagaacattcaattaaaccacaaacatttaataataacgtgtctcaactgattgactcatgtttaatttctagaatagctagaaatgaattcttggttaataaaaaatacgcggttaaagttgattgggaaaaagtacaaaagattgtatggacaacaacttatagtaatgaaggggttgattcaacagtgacgatagccccgaaaaaaacggattaa

SEQ ID NO: 38781 - DNA, 426 bp, Escherichia coli
atggttaaaaataagcgcagcggctcagaaacacggcagagaagcaaggttataaccttgcggataaataacaagattgacagggagatccgacgcctggcaaaggcggaagggatgacgatttcagaatatataagaacgtcatgtttaaataaagaaataatacagcgcatcccttccagatatttggatgaattattagagcttggccggatgcagaagaatttatttgataaaggaagagcaccgaaggataaggactaccttgatgtgatgcacaaaataatcacgctgtgtgcagaagcgaaggaggttattttacgtaattctgatatatataaagagatggatttattaaaacaggaaataaaaataatcaaacagcactataaaaataaatacccaggttctgatttatttaattga

SEQ ID NO: 38782 - DNA, 1491 bp, Escherichia coli
gtgtatgacccgacggtacagtttgaattctggttctcagaaaaacgcatcacgaacacagcacaggtggaaaaatctgcccgttatctggggaccggcagtcagtggactgtccaggggagccggattaagccggggacggatttctggttttacgtgcgaagcgtcaacctggtgggaaaatctgcttttgtggaagccagcgggcagcccagcaatgatggtgaagggtatctggaaattttccgggggctgatagatgagacgcttctgggtcaggcactgaaagagcgcattgatgcttcagcgctgcgtatggaggtcacgcaactggaagaagatatccgtcagcggatggacacggatatcgcagaagtgacccggaaaatcgggaaggcggaaaacagcctcacgcagctggttgcgaaaaagaatgaggatcagacactggccatcgcgcaggtgagccagaaagtggaccgggtgagcagtgaaatctcacagactgtcagccaggggcagtcagaaaacgcccgacagatagcacaggtccgccagtacgtggataaaaaagggagtgaaattacctcgaccacggataaaaagctgggtgaccaggccgtgaccatacagcaaatccagcgggttcagtcagacacgcgcaatgagctgaatgccatgtatatgctgaaggtgcagaaaacaaaaaacggtattccctatgtggccgggattggtgcggggattgaggatgttgatggtcagaccctgagtaacattctgctgcaggccgatcgcattgcgatgattaccccggagaacggcaacaccacgccgctgtttgtggcgcaggggaatcagctgttcatgaacgacgtgttcctgaagcgactgtttgcggtgagcatcacgtcatccggcaatcctccgacgttttccctgacgccggatggcaggctgacagcccgcaatgcggatatcagtggagccatcacggcgaataccggcacgctcaataatgtcaccattaacgagaactgtgtcatcagagggaaactgtctgcaaaccagattgaaggcgatctcgttaaaacagtgggtaaggctttccctcgtgactcccgtgcaccgaagcgttggccatcaggaaccattaccgtcagggtttatgacgatcagccgtttaaccggcagattgttattccggcggtggctttcagcggtgccagacatgagcgggagaacagcgatacttattcgtcatgccgcctgatagtgaagaaaaacggtgctgaaatttataaccgtaccgcgatggataatacgctggtttacagtggtgttattgatatgcctgctggtcgcggcgacatgacgctggagttttctgtatcagcatggtgggtaaatggctggtatcccacagcaagtatcagcgatttgctggttgttgtgatgaagaaagccactgcaggcatcacgattagctga

SEQ ID NO: 38783 - DNA, 369 bp, Escherichia coli
gtgtcagacacactccccgggacaacacttcccgacgacaatcacgaccgcccctggtgggggctgccctgcaccgtgacgccctgtttcggggcacgtctggtgcaggagggtaaccggttgcattaccttgccgaccgcgccggtatcagaggcctgttcagcgatgcagatgcgtaccacctggaccaggcctttccgctgctgatgaaacaactggaactcatgctcaccagcggtgaactgaatccccgccatcagcataccgtcacgctgtatgcaaaagggctgacctgcaaagccgataccctcagcagttgtggttacgtttatctggctgtttatccgacgcccgaaatgaaaaattaa

SEQ ID NO: 38784 - DNA, 261 bp, Escherichia coli; identical to SEQ ID NO: 5351

SEQ ID NO: 38785 - DNA, 417 bp, Escherichia coli
gtgccaaaagagcacagcaaaacgaaggtaacaatattccgacctattcctgatggtattttgccgttcattcagaagctggtggagcaaaacgcacacactgggttattactcggcgaactgaaaaaagataccacggtggcgcaatatggacgaaatgcgcataagcggcttaagcaggaacactggacgctgcatgatttccgacacacgtttacaactatgctgaatgatttaggtgtcgatccgcatatcgtggagcacatcacagcgcatcagatgccaggtcagcaaaaaacctataaccattcacgctatttgcaggcgaaacgggacgcactgaatctatgggttgagcgtcttgatgtgattgcaggatataatgaaaatattgtgatattgagagggatacaatga

SEQ ID NO: 38786 - DNA, 465 bp, Escherichia coli
atgaaaacattgtctcagaacaccacctcttcggcctgtgcaccggagactgacctgcaacaactggttgccaccctcgtccctgatgaacagcgcatcagcttctggccgcagcattttggcctcattccacagtgggtgaccctggagccccgtgtcttcggctggatggaccgtctgtgtgaagactactgcggtggtatctggaatctgtacaccctgaacaacggtggcgcatttatggcacccgaaccggatgacgaaacatgggtgctgtttaacgtcatgaacggtaaccgcgctgaaatgagcccggaagccgccggcattgccgcctgtctgatggcgtacagccatcacgcctgtcgtacagagaattatgccatgacggttcattattaccggctgcgggattatgccctgcagcatccggaatgcagcgccattatgcgcatcatcgactga

SEQ ID NO: 38787 - DNA, 600 bp, Escherichia coli
atggctccggaggactggctgcaggcagagatgcagggtgagattgtggcgctggtccacagtcatcccggtggtctgccctggctgagtgaggctgaccggcggctgcaggtgcagagcgatttgccgtggtggctggtctgccggggggcgattcacaagttccgctgtgtgccgcatctcaccgggcggcgctttgagtacggggtgacagactgttacacactgttccgggacgcttaccatctggcggggattgagatgccggactttcatcgtgaggatgactggtggcgtaacggccagaatctctatcttgataatctggaggccacagggctgtatcaggtgccgttgtcagcggcgcagccgggcgatgtgctgctgtgctgctttggttcatcggtgccgaatcacgccgccatttactgcggcgacggtgagctgctgcaccatattcctgaacaactgagcaaacgagagaggtataccgacaaatggcagcgacgcacacactccctctggcgtcaccgggaatggcacgcatctgcctttacggggatttgcaacgatttggccgccgcatcgaccttcgtgtga

SEQ ID NO: 38788 - DNA, 543 bp, Escherichia coli; identical to SEQ ID NO: 31431

SEQ ID NO: 38789 - DNA, 1458 bp, Escherichia coli
atgattttcaaaaaacaaattaaatttatattcgtgattttattatttgcgtcattgtttatgctatatcactttgccagcttaaacatattcccaccaaatacagatgcggcaacagtgcttttgcttggtaaggatatgtcagaaggtaattacttacttcatggatggatgctatccacggttcctttttactttacagaagtatctttttatgcgatcgcctctatattatttggctacagcagtgagcttgcatatataataccaccagcgatgtatgctactgtgatatttttgatatacaggctgtctacaaataaatcattagcattagcgctaattatattctactttgttttccctgctgacatggctgttacatcaatgctttcagcgtgcattcacatgggtacatacatatttatcattggatgcttaatatttacagaaaagtatattaaaacagaaaatatattatttgtatacttttcaaccatactatcctctatggctatttttagcgataatatctcagtctatatatacgttgcaccgctaacattagcagcaatatttttgttgcacaaggaaagaaaaaagaaataccttattataatggctggattgttttcttcatatttaatttccaaggcgatcggttttttgtttttaaaccttggaagctttacattgccaggactaacagatgtaaagattgttgagtatgacaatattttagttaatataaatactgcagtaagcggaactttattgttttttaatgcaaacatatttggtgagcaaataacaccatcactgcatctattatctaaagcaatacgctttgctggtgttgttgcattaatttacttcactttcagaaatctttttaaaaacagaagcgttattgatatatgtttgtcattgtctattttaatcatgacatctgcttatattggtagtaacctcccaagaaatatatggacaataagataccttgttcccgtcttcattatggcagtaattcttttgtcaagatctaaatttaataaaaaaagcattattttattaatagcttttttgggtataatatcaggaattaaaacaataaatattaatggctccactgataatagatacaatcagatgtcatgtattagagaaaaaatcaacgagcacaaagcaaattatggatatgcccctttcacatttactaactctgttggtgtgaatggagacataaaaatagcaaatatactttttaataacaatgaaataaaaagagataactggcttacaaatagcgaatggtataacaaaggaaataatttctttattcttgagaataaagaacaattgaatattgtgaagaaaatttatggtcaacctgaagatattgaaagcgtgtgtgatgtgatttttgtcaaatacagaaaccacatttacgtcaaataa

SEQ ID NO: 38790 - DNA, 537 bp, Escherichia coli
gtgatcgctgagatatttcagggaggctttgtagtcttccagcaacagttcagcaaagtccatttcgaagccgcgacgacacataatgcgcatcaccacgatgtcggtggcttcaccgccgagagtgaaggccggaacctgccagccgcgcagacgcagacgttcagagaggtcgtacagggtgtatcccggatcttcaccatctttcagtttgaagcaaaccgccgggatgccttcgtccgggcgaccggtacagatgaactcatacggccccagtttggcgatttcatccgccagataggcagcgacctggtaggaagcattctgtactttggtatagccttcacgaccgaggcgcaggaattcatagtactgtgcaattacctgacccgccgggcgggagaagttgatggcgaaagtcccaatctgaccaccgagatagtcaacgttgaacaccagttcctgcggcagcgcttcttcatcacgccagataacccagccgcagcccagcggagccagaccgaatttatggcctga

SEQ ID NO: 38791 - DNA, 153 bp, Escherichia coli
atgccttcgatgatagcgataattttactcatcatccttcacatctggctctgtagacagggtggtgctcacttctggagtgaatccagattaaacatctcattgctgatgcttgatattgagcattttgcgcgcggtaaggggctgcgttga

SEQ ID NO: 38792 - DNA, 231 bp, Escherichia coli
atgatgaatgctgaagataaactttttaaaaatgtagacaggctaatgctgcatgattcactaaaaaagaatgaggttctgactgtttgggagcgtacttttttaagcagtgtttacagcatatatcgtagaactagcggtaataaatactcaactaagggtttgtcaccaaagcagaaaaacgcagctttttctattttaaaaaaacataattaccatctgaatgattaa

SEQ ID NO: 38793 - DNA, 150 bp, Escherichia coli; identical to SEQ ID NO: 32729

SEQ ID NO: 38794 - DNA, 459 bp, Escherichia coli
atggaacaggttaacgcaggaatgcgcgtagcccgtcggcagaatcgaccattcctgccatcccccggacagtttgtagcctggtgccgggaagaagcatccgttattgccggactaccaaacaccagcgagctggttgatatggtttacgagtattgccggaagcgtggcctgtatccggatgcagagtcttatccgtggaaatcaaacgcgcactactggctggttaccaacctgtatcagaacatgcgggccaatgcgcttactgatgcggaattacggcgcaaggctgccgatgaactgacttgtatgaccgcgcgaattaaccgtggtgaggcgatacctgaaccagtaaaacaacttcctgtcatgggcggtagacctctaaatcgtgcacaggctctggcgaagatcgcagaaatcaaagcgaagttcggactgaaaggagcaactgtatga

SEQ ID NO: 38795 - DNA, 303 bp, Escherichia coli
atgaaaaggatatgcaaaggtctaatcgtaatttttactgtgtcctggctgacagcgccagcgtatgccgctgatccctgtaaatctgttttttgtctttatggtaaagctgtcggtagtagtggagggagtgagtgcagtagtgccgaaacggatttttttaaaaaaattgaaaagaaaaagggaaaaattcgctggagtaaaacatttgatgcccgcaaggcatttcttaatcagtgttcaacggctgatcctgctgctatatcgaaaatcatgagtaagtttggtcgtgtcagaggttag

SEQ ID NO: 38796 - DNA, 909 bp, Escherichia coli
atgagacttaaagttatgatggatgtgaataaaaaaacaaagattcgtcacagaaatgaactaaaccatactttagcccaactccccttacctgctaagcgtgtaatgtatatggcgttagctcctattgatagtaaagagcctcttgaaagagggcgaatctttaatattagagctgaagatctggcttcccttgccaaaataaccccttcattggcttacaggcaattgaaagaaggtggaaagattttaggagcgagcaagatctctttgagaggggatgatattattgctttagctaaagagcttaatcttcccttcaacttaaaaaatacaccagatgaattagatctcaacatcactgaatggattgcatattctaaggatgaaggttacttatcccttaaattcacccgtacaatcgaaccatatatatcaagtctaattggtaaaaaaaataaatttactacacaattacttgcagctagcctccgtctgagtagtcaatattcttcatctttgtatcaattgataaggaaaaattactctaacttcaaaaagaaaaattcttttgtgatctccatagaagaattgaaagatgaattgattgcttatacctttgatgttgacggtaatactgaatataaataccctgaattccctatatttaaacgggatgtacttaataaatcaatcgcagaaataaagaaaaaaactgaaatatcttttatcggcgtttctgtttttgaaaaaaaaggccgcaaagtaagtaagttacggtttgattttatagttgatgaagaagagttttctggaaacggtgatgatttattgactgcttttagtgaagaagaaagtgcatttttagaggcgtttgacaaagtcgttccacctaaaaagaataagtga

SEQ ID NO: 38797 - DNA, 861 bp, Escherichia coli
atgataaatatagaaaacactatcaaatttatgatgaaagacattgataaatatctggatgatatcactctgaacgccatcacagtggatagcaaaactatattaaaacttgaggatatgtccagtaaaaacatatcaccttaccttaaaaagatactcggaacgcttataaaaatcgaaattgaacacatacctgactttgatttcagtaagatccagtctcttgaaaactccaagagtttcaaacatcttccagctaaaagtaaaacccccagttgctacagagacctgtattcgtggggaaaggaaatgcctaacacagaaaaacttaaggcagaagatgagtccgactggaaaaagaatattcaacatatagaaaaagaaggattccatcgtaccgagccaattgaaataacatactacacatggcttgacagatattttgtatcaaatattggaggttctcatcacgcagcccttgttgtctggcaatcagttcgggacaaacttgagtacaaaagagaagtcaatataaccaaactcagcattgataaagactccataaaaaaactgaatagtgattactggtcttttatactaaacttcagatatcaaaccaacataaatacattatttaatctgttcaaagacctggtcagcaagcatacagacatgctggaaccaagtcattatcatggcaattacagattgttttttgtccctaaaagccagctaaagatgaacaagtatgcttttgaatactggtacaggaatgcaattaaaaataaaaagataattgcgctacctgagtatttagaaacccctcttcagttccataccggaggcattctcatccagtag

SEQ ID NO: 38798 - DNA, 423 bp, Escherichia coli
atggcagaacattatctgtcaggaaatcgaatagcaacccaggaatcactaatcactggcatttacaaagtaaataatggtgagtttataaaatttaataatcagttgaaacctgtgctacttcgtgatgagtttagtattaccaaaaagaacaattcaactatcgacagtatcattgataatattgagatgatgcgggacaatagaaaaatagccctattattctccggaggattggattctgcattaatttttcacacacttaaagaatcaggtaacaaattctgcgcttatcatttttttctgatgaatctgatgacagtgaaaagtattttgctaaggaatactgttcaaaatatggagttgattttatatctgttaataaaaatatcaactttaatgaaaaactttatttcaatttaa

SEQ ID NO: 38799 - DNA, 222 bp, Escherichia coli
atgaaacttgcctctgctcagttttttgcaactgattatacaggaaaaattaataaactaactccattcctgcataaaaatattatccagcattatgctggcttaccagtttttagtctatttaaccagcactttgatcgttatcccgttcgttatgaagcgtttcaacgatttggttcagatattttctggaaaaaaacaaacggtcatcttcacagctaa

SEQ ID NO: 38800 - DNA, 267 bp, Escherichia coli
atgaggcgtaaggcttcactcactgataaggaactaccccagcttaaagatattgacctgacaactaaagcaggtcgtgtcgagtgtcaattaattttgtccaaacatctggaatccctgacactgggtagagggcaagtgacggttaagttgagtaatgggactgaaatcatagttcctacagacccattaccattaactgacggagcagcaatctttgaaattgctgagaaaaatcttttgaatattgacactttccaactgtag

SEQ ID NO: 38801 - DNA, 711 bp, Escherichia coli
atgacaaacgatttatatattaacggcagaaagattgatagcttcggtgactggtcgccacagactgaacatccagctatcaatctccagcgcaaagaacacgatgaaagaattaagcttgagcaagagttaaagatgtcaccaaaggaaatcatctttgtggctcctgaacctcaagagatgcctgatatttgtaaaactgaagcactatttaatcttgagcgtgaatattacccactgctaaaagcacagcgtattaaactagatgatgcttacagtaaagttaccctgatgcaatcagctattgagccatcagaatttgagattcaggatgaattgtcacagaagccatttatttacttcacatacgaagacaatgacggttttggtatttatccagaaaacatccccgacgtgattaataatcttcctgatggatatcgaattgtgaagatggttaaagcatcaagaggtgctggccagtttatttacacgagtaataagagcgatgaagaactctgtgaaatttctagacagaacatcttggcatcacgtaacaagcagcttgaaaatgttaagttatatctctcaagagagcttcaggctatgaaagagcttgttagtgaatatgagtcgcagaagaaggttgctatgcaggctgatattgagcagcttacgaagatttctcagaaatatagcaaagcactttga

SEQ ID NO: 38802 - DNA, 297 bp, Escherichia coli
atgaaaacttataatggcgaaagaaaataccgtgactatttactcagacgttacagcatttctcgtgaaggttacctgatgaaagatactcacggggaagtttaccggattagaccgaagaaagaagggagggattatttcttttacgatggtgtgacagatttaaagattgacgctttgaagtttgcggtgttgcatcattttgatatctggaattcagtccaccagctacgattaaaagacggtgaccccagcaacttaaaggccaccaatattatcaagggaaagtgccggtaa

SEQ ID NO: 38803 - DNA, 186 bp, Escherichia coli
atgaacacacaaaacaacaatcccgttgaaatcctgaaagctgtttccaccttaccggaagatattttaaatatctctcaagtatgcaagtttttagggatctctaataccgctgtacgtcaaagaatctttgccactggctgttctgaaccgccccgggtttcctggagagtgttttatctgtga

SEQ ID NO: 38804 - DNA, 210 bp, Escherichia coli
atgttgtcgtcattgatggacaacttgatctgtgcgttgatggtgaatggcagagccttaattgtggggaaggcgctcgatttgctgcagacgtcacgcatgtctatcgtaatggaggggagcaaaccgtacattttcattccctcatccattacccgcgcagttaagcgggaaaactatttcgcaacgtcgcgcttgtggctaaaatag

SEQ ID NO: 38805 - DNA, 9114 bp, Escherichia coli
atgaacagaaattgttaccgcattatttttaacaaagcccggggaatgctgatggtggtggcagatattgcccattccggtcgcgccggtacatcactgtcctcccgcacaggatatccacacaggcaacgtatctgccgtgtcacgccgcttgcattctctttgtggctggcgtcggggatggtgcattctgtcagtgctgcaggcattgtcgcagaccatggcgcaccggggcatcagcagcccacgattacgcagacggccagcggcattccgcaggtgaatattcagacgccttctgccggcggggtttcacataatacatacagccagttcgacgtcggtaaccagggcgtcattctgaataatgcccataacaatgtgcagactcaactgggtggcatggtggccgggaacccgtggctggccaagggagaggccagaatcattcttaatgaagtgaacagtcgcaatcccagccagttgaacggttttgttgaggttgccgggaaaaaggcgcaggtggtgattgcgaacccggccggcatcagttgcgacgggtgcggttttattaatgcgaaccgggccacgctgaccacggggcagcctcagatgaaaaacggcagtctgaccggattcagtgttgaacgtggtgagattcagattacgggcaaagggatggatgcctcgcgcacggattataccgatatcattgcccggtctgtgaagattaatgcgggtatctgggcgcaggacctgaaagtgaccacaggacgtaacaatgtggatatcgcgcacgggcagattgagaaaaagaccggagatgtctcttcacagcctcagatggcactggatgtggccagtcttggcggaatgtatgccggaaaaattcgccttgtcggtacggaaacgggggtgggtgttcgtaacgccggtcatattggtgcacaggcaggggcggttaccctgacggctgacggacgaattgaaaacagtggcagtatcagtgcgaaaacggatgtgcatctggcgacaacccgggagttgcataacagtggttctgtttatgcggggcaggatacgcagatacagagtgatggtgtattcacccatacaggctctgtggcatcacgtcgcaacacccggattcagacagcgcgtctgatcggcggtgagcggagtctgctggccgccggggtgaaagatgacggacgtctggcggcagcgggcaacctgactgtcagtaccaccggcgaactggcggcacacggacaggttctgtccggtggggacatgcaactgaaggggcaggggctggatttaggcaacagccggatacagggacaacatactgagctgaatgcaaccagtggaaatctgtctacacagaatgcgcaactgagtgccggtacgctttccgcccggactgccgggcagttcagcaataatggcggtacgataaatgccgacacactgcagataacggcacaaagcctgtcaaatcgtaaaggcagtctgattcagacgggaacaggggatttttcgctgagtctgccgggaagcgtggataaccgggaagggctgcttgcggcaaatggcgcggtgcgtctggatgcactgagccttgataatcgcaaggggaaagtgcaggcggcgcagtcaggcagtctgcaggtgaagacaaccggtgccgtggataaccagcagggacgtctgcttgccagcagtgacatcctgattaatacacaggcgctgaataacgacaacggactgatttcagctgctgccggaacgggcaggataaaaacacagcaggctgtcagcaatacggagggacgaatggagtccgccggcaggctggatatttcggcagggagtctgaataaccaccagggtacggtggtgtctgacgggctgtccgtgacgctggatggtgcgctggataatacgtccggcagactgctttcacagaaaacgctgtctgtgtcaggcagcgaactggtctctgatgatggtctgattcagtccggcagtgacatgacgctggatgtacaggacggggtacttagtaaccggaacacgaaaacacggggtggtatcagcagcgccggtaccctgacagtgcgggctggtatgctgaataaccagcagggatttatggtgggtcagaaggatatgaccctgaacgccggaacgcttgataaccgtcagggcgtgctggggagtcaggcgtcattacagatatcgtcaggtacgctgatgaatcagaaaggtgcactgaaggccgggacggatatgttgctgagtggtggcgatgtcagtaatcaggaagggacgcttgccgccggcggggacctgaatactcacctgaatgtgctggaaaatcagcaggggacggtggtcagcaacggtaacagcaggctggatgtcacacggtttgataatcagggcggcagactggtggcacagcagtcactgaccctttcctcgacggatatcatcaacgatgccagcggcctgatacagagcggtgcatcgctgaatctccgtgctgacacactgagtaaccgtaacagtggtgaccggggcggggttatcagtcagggggcgatgacgctgaatgccggcacactggacagcactgccggtgtgcttttgtcgggagatgctctgtccctgactgcaggcgtggttaacaatacatccggtcaggtggtggcaaacggtctgctcggctggaacagccaggcgctgaacaatcagtccggtcttattcaggggtggggtatcagcattaataccgcaggccagacgctggataacagacgcggtacgctgaacagcctgcaggaactgactgtcagttccggagcaatggataaccggggcgggaccgtgggggcgaaaacgacagctgacctgagcaccacctcgctggataaccgtgagggtggccggctggtcagtgaaggtgaactccgtctgcatacgggaggtctgcagaacagccacggacagatacagtctgtgggcgacatgttgctcaacagtgtacggggcgttgtggacaacgtctctggtctgattcgcagtggttccgccattacgctgaacgccctgcagtttatcaatcgccacacgcagaataccggccaggggctggaagcgcagacaatacacatcacgacgcaggcccttgataaccaggagggcagtattctggcagacagggtgcttacggttatggcagacaggacgctcagtaataatgatggcgtgctctcttccggcgcgacattgtctgtcagtggccgtcagctgacgttttcgaaccgtgacggcgtggttaaggccgggcagtcagtatctgtggatgccggtcagctcggtggtgacgggaaactgctttcgctgggcgatatgacgctgaaaagtaacacaacgttcagcaacagtggtcagactattgcaaacggaaaccttacgctttccgttaatggcgatgtctctaataccggcagcctgctggcaggcagccggcttgacctgaacagcatccgccttgaaaacacagagaaaggtgaaatcagtgccgggcagacctggcttaacgtgacggacacactgctgaaccgtgggctgattgacgggaaatatacgcgtcttcaggcgaacaccctgacgaattccggtaccgggcgaatctacggcgatgctgttggtgtcagcgctgccacatttaataatctggaagaaaatggcgtggcggcgacgctggccgggcgtgagcgtgtggacttaggggtacagaccctgaataaccggacgcacagcctgatttacagtgcaggtgatatgcatactggtggcatgctggatgcgaatggtgccgccacggggaaagccggtgtactgaataatcacagtgccactattgaagccgccggatatctggtactgagtgccggacaaatcaataacgtcaatgaccatttcaccacggagcgcgtggtggtttccacggaaaaggtgactgagtatcagctcagcggctcagataaacgctggagcgccggtgaaccgggcgtttatgtggataacgattccagtaactcactgaaaaaactgcatacaccggaaggcgccagagataaattcacgcagtacgattacacccgtaccgtggaagaaacccgggtaaaagaatccgacccgggaaaaattctgtccggtgccggcatgacgattgtggcagacaaactgcttaatgataagagtcaggttgttgcaggcggcctgctgaccattccgtcaggaagcgtggaaaatgtcagtgtcagtggcgagcggcatgttacggactcaggaacatccacgtattattaccgtatcaggaaaaaaggaaaggataagcagggggagaaaacctctcagtacactccgcccactgtaattcagaccatcacgctgaagccgggagagctcaccagccacggacaggttcagggcagccatgtcacgctttctcccctgaagccacagggaacggatgtacagacaggactgaccggaaatgtggatgcgacagtagccggtactgaccggataccgcttcgcccggtggtgtctgccggtgaaccggtcattctgttgccggggcagcagtttgaagtcagcgcacctcagggcagtatccatgttgccgggccggatacccgtctgccggacagcagcctgtttaaaacaaatccggcagtgaatgtgccatatctggttgaaacggacccgcgttttacgaaccagaagacgtggctgggcagtgattacatgcagaaggcgttttctcagaacggggataacatgctcaaacgcctgggggatggtttttacgaacagcgtctgattcgtgagcaggttgtcgctctgaccgggcaacggtacctggacggatacagtaatgatgaagatcagtttaaggcgttaatggatgcgggtattgcatttggtaagcaatacaacctgacaccaggtgtggcgctgactgctgagcagatggcgttactgaccggtgatattgtctggctggttaacaccacggtgacactgccggacggcagcacgcagacggttcaggtacctcaggtgtatgcccgtgtaaaacccggtgatgtgaacagcgccggtgcgctgattgccggcagggacatggtgatgaagctggatggtgacctgtttaacagcggtaaactggccgggaagcagaccgtgcagctcagtgcagaaaacattcacaaccaggccggtaccattcagggagcaaatgtcagcctgacggcccggacggatattaacagtaccggcgggctgctgcaggctacggacagcctgctggcgatggccggacgggatatcagtctgaccaccaccacccgtacggcacagcgcgacgccggacagaaccattttgaacgtaccagtatcgacagtgtggccggcgtgtatgtgcagaacgaccagggcagactggtgctgcaggccggacgggatatgaacctgacggctgcaacggtggtgaatcagggtaaggacagcctgacgcaactcagtgcgggcagggatatgacgctttccacagtgaccacatccgcgcaggacaatattacctgggacaaaaataatcgtctgtcgcagggcgtcacacagagtacgggcagcacgcttgccggtaacggtgatgtcacgctgaccgccggacgggatatgacgtcacaggcggcatcgctgtcagctcagaaaggcctggccctgatggcgggtcatgacgtgacgctgaccggtgcacagaatacccgctcgctggatgaataccataaagtgaccggcaacagcgggatgttatcgaaaaccaccactaccacgcatgatgtcactgaccgccggaccatgacaggcagtgaactgaacggggatacggtcagtatcggtgccggacataatctgaacgtcacgggcagcagtgtggccggggataaccgtgtctccctggctgccggaaataacctgaatatcggtacgctgacagaaagcaaccgtgaaacacacctgaaacaggagaaaaaatccgggctgatgagctccggaggtgtgggattcagcgtgggcagccagagtctgaaagtcacggacaccgcaacagacaccacacagaaaggcagcacggtggggagtgttcacggtgatgtttcccttcaggcaggtaaccggttgaccgtcaacagctctgacctgattgccggcagggacatggcactcagtggtaaggaagtcagcattaccgccgccacagaccagcatgtacagacacatacggtggagcagaaaacctccggtctgacgcttgccctgtccggcacagcgggcagcgccctgaatacgacggtggagaccgtacaggcggcgaaatctgccggaaacagccggcttgaagccctgcagggggtgaaggccgcgctctcgggggctcaggccgtgcaggctggacgactggcagacgcgcagggcgccgatgccggaaataataacacggtgggcatcagcctctcttacggcagccagtcttcgaaatcagaacagcagtcagagcagacggtggcgaagggcagtacactgaccgcaggtaataacctcagtattcaggccaccggctccggcgtgaagggcgtggatggtgacctgacgatacagggcagtcagataaaggccgggaacaacattctgctgcaggcaaaccgtgacgtgaatctggtatcagcagaaaacacttcaaagctggaaggaaagaacacatccagtggtggcagcgtgggtgtcggtgttggtgtgggctccggaggctggggtatcagtgtttcagccagcgcaaaccagggtaagggcagtgaaaaaggcaacggtaccacccatacagaaaccacggtggatgcgggaaaccggctgaccattatcagcgggcgggacaccacgcttaccggcgcgcaggctggcggtgaaacggtgaaagtggatgccggtcgtcatctgacactgaccagtgagcaggacagtgaccgttatgacagtaagcagcagaatgccagcgccggaggcagcttcactttcgggtccatgagcggttcggcgagtgtgaacctcagccgggataaaatgcacagtaattacgacagtgtacaggagcagacggggatttttgccggcaggggcgggtttgatgtcaccaccggacagcatacgcaactgaacggtgcggtgattgcgtccacggcaacggcagataaaaacaggctggataccggcacactgggcttcagtgacattgaaaaccgggccgactttaaaacggaacatcagagtgcagggctcagtaccggtggcagtgttgccggaaatttcctggggaacatggcaaacaatctgctggtcggtgcaaatcatgaaggccatgcggacagtaccacgcagtcggcagtgtctgcagggaatatcaccatccgggatacgcagagccagaaacaggatgtggcagacctgaagcgtgacgcagcacatgcaaaccagacgctgtcccccatctttgacagggaaaaagagcaacagcgactgcagcaggcgcaactcattggtgagattggtaaccaggtggcagatattgccagaacggaaggacagatagccggtgagaaagcgaaacgggacccggcagcactgaatcaggcccgcgcagagcttgaggcagcaggaaaaccgttcacggaacaggatgtggcgcagcgggcctacaataacggtatggcggcctcaggttttggaacgggaggcaaataccagcaggcgatacaggccgcaacggcagcagtacaggggctggccggcggtaatctgagtgcagccctggcaggtggtgcagtaccgtatattgctgaaattatcaaacagaccaccccggacggtgcgggacgtgtggcagctcatgcagtagtgaatgcagccctgtctctggcacagggtaagaatgctctggctggggccgcaggcgcagccaccggcgaggtggtgggaatgatagccacacagatgtacggtaagccggtgagtgaactgagcgagacagagaagcagacggtctcgacactggcaacggtcgctgctggtctggccggtggtctggtgggagactcgggtgcttcagcggtagccggagcacagtcaggtaagacgacagttgagaataatttccttggaacaacatcttcagacaagctcgacaaagccgttgagaaaattaagaacggtgataagtcattagcgacagccaatgagcttatcaggctggaaaatgccgataagcgtagcgatgcgctggtatcaaaattcaccaaagacccttcacagatgaccagtacagaacgtgctgaactggcagcttacttgcgtgtatatgcttcagaaatggaaaaggagtacggtacagcggtggcacaggagcttgttaccgggttactgtcaggacaggactatataaaacgtaaccctgatactgaagcaatggcaaaggctcaaagcattatgaatacctgggggtatcataagtctaatgcaagtattggtgatgctcctttgttgtttggaggaagcgtactggggttaacagtgaaaggtatggcgactaatgcagcaattggtatcagcgtaaactcagctgctcagcttgctggaaaagatcctttcagttatgtggatgcgataatggctggggtgacagctgcagctacaactggtaaaggcatcatcgtctcaactcccatcaatatgggcggtgctgcaatcggtagtagtatcaagggagaagatccaactaactcagttattggtgctggagttggctcgatcttcggcggtggtattggaaaaattgctacagaacaactgaaaccggttattaaagaaggtagtgctgaggtaattggggcagttacgggggctgtctcaggagaagttactggcaaccaagtaaaagataaactggacaaggtagggaataaaaatgggagcaattaa

SEQ ID NO: 38806 - DNA, 126 bp, Escherichia coli
atgaaacgtgttgtaatgccagcgctggtattgtggaacccggccctgcccctggtgctggcgacatttacgttcatcttcttgcagacattctccagtcagcctgcaggttatagctattcctga

SEQ ID NO: 38807 - DNA, 558 bp, Escherichia coli
atgtcattcggtcagccttgtgatgagtttcccctgagttcgctgcctccactcattcgtgatgccgttattgaagctcagcaaattacgcaggctccccttgggcttgtggcagcgtctgccctgggcgctgtttcacttgtctgccagaatctgattgatgtctgcagactgaatacactgcgggggccggtctctctttttttcctgacgcttgccgagtccggagaacgaaaaaccgcagtggacaaattattaatgaagcccctgtaccagcaggagatgcagttatattccagatacaaaagtgaactggctgtctggaaaaacaaggaagagcttttaaaggctcagaaaaaagcattgttgtcaaaactgaataaagaactccgcaaaggcgcggatgagtcagaaaccctcagacaactggaagtacttcagaaaaacagtgcggaagaacctgtgaggtataaattcatttttaatgatgccacgactgcggcaattaagaatcagctttgtggtaaatggcgttcagtgggtatatatgtcagatga

SEQ ID NO: 38808 - DNA, 549 bp, Escherichia coli
atgaagttaaaattcatctccatggctgtattttcagctctgaccctgggtgttgcgacaaatgcgtctgccgcacctgctactgtcaatggtggtactgttcactttaaaggagaggttgttgaggctgcatgcgctgtgaatatgaactcagcagaccagacagttcaattggggcaagttcgagcggcaaaattagatgctgacggaaaaatgagttcacctgttggttttgatattgaattaaatgattgtagctcagccgcctcatcaggagcttcaattattttttctggcccccagggtgggcaggcagacattttatccttgcagggtagctcagcgggttcagcaacaaatgtcgggataaaagtaatggattataaaggtgtagcagtcaagttcgatggggttacagctagctcagaatataccattactgatggcacaattaaaatcccattccaggctcgctatgttgctgtaggtggtgcagctggtgctggtattgccaacgccgacgccacctttaaagttcagtaccagtaa

SEQ ID NO: 38809 - DNA, 222 bp, Escherichia coli; identical to SEQ ID NO: 24122

SEQ ID NO: 38810 - DNA, 456 bp, Escherichia coli; identical to SEQ ID NO: 20158

SEQ ID NO: 38811 - DNA, 801 bp, Escherichia coli
atgacgtttgaagaatttgttccggcattttcttcctggtttgcagacaataaatgtggtgtggcagtactgaccggtgtccgtgcggatgagtcccttaaccggttcatgggactggtgtcccagcgcaaactgagatacgccgatgataagccctggaccacggcatcgcctgaagggttttactacaccatgtatccactgtatgactggaaaactcgtgatatctggatatatcacaccagaacccgtgccatctacaatcccctgtatgacctgatgtaccgtgccggcgtaccgttacgcaacatgcgtgtctgtgaaccttttggtcctgaacaacgtaagggactgtggctttaccatgttctggagccggatacctgggccaggatgtgtgagcgggtatcaggggctgccagcggggcactttatgccaatgaaagcggtgcttattttgccctgcgcaagcgcatatcaaaaccagcccatcatacctggcgcagctacgcgatgtttctgctggatgtgatgccggaaagaacagcagaacattaccgcaacaagatagctgtctatctgcgctggtatcagacgcggggcttcccggatgacattcccgatgaacaggagaatgacctgggctgccgggatatcccgtcctggcgacgtatctgtaagactcttataaagaatgatttctggtgccggacgctgtccttcagcccgaacaaaccccggcactatgaacgttacctgcagcgtatgaaggaaaggaggaatgaatgggggattctgtga

SEQ ID NO: 38812 - DNA, 801 bp, Escherichia coli
atgacgtttgaagaatttgttccggcattttcttcctggtttgccggtaaccggtgtggagtggcaatactgactggtgtccgtgctgatgaatcgctcaatcgctttatgggactggtatctcagcgcaaactgagatatgccgatgataagccctggaccacggcatcacctgaagggttttattacaccatgtatccgttgtatgactggaaggcccgcgatatctggatatataacgccagaacctgtgccatttacaatcctctgtatgacctgatgtaccgtgccggcgtgccgttacgcaacatgcgtgtctgtgaaccttttggtcctgaacagcgtaagggactgtggctttaccatgttctggagccggaaacctgggccaggatgtgtgaacgggtgtcaggggctgccagcggggcgctttatgccaatgagagtggtgcctattttgccctgcgtaagcgtatcacgaagccgcctcatcatacctggcgcagctatgcgatgttcctgctggatgtgatgccggaaagaacagcagaacattaccgtaataaaattgctgtctacctgcgttggtatcagacgcggggcttcccggatgacattccggatgaacaggagaatgacctggggagccgggatattccgtcctggcgacgtatctgtaagactctcataaagaatgatttctggtgccggaccctctcctttagccctaacaaaccccggcactatgaacgttacctgcagcgtatgaaggaaaggaggaaggaatgggggattctgtga

SEQ ID NO: 38813 - DNA, 243 bp, Escherichia coli; identical to SEQ ID NO: 8603

SEQ ID NO: 38814 - DNA, 630 bp, Escherichia coli
atgaataacgttcgtctgtatgccagggcatccaccgccgagcaacacgccgaccgtgccgttcctgcgctggaggatttcgctaatgagcgtggttggtctattgctgcgcgatacatcgagaacgccagcggtgcgcggctggagcgtcctgaactgatgcgcctgctgggtgaggcggaggctggcgacgttctacttgttgaaagcatagacaggctaagccgcctgactcaaaaagaatgggcgacactgaaacagaggattcaggataaggggctggtgatcgtcgccgttgacctgccaacctcgtggcagttgctgaacgaaaccgcgtcagagctaaccagcggcatcctcagagccgttaacgcaatgctgatcgatatcctcgctacaatggctcgcgtggactacgagacgcgactgatgcgccagcggcagggcattgaacgagccaaagctgaggggctttatcgtgggagtcagaaggatgccgccgctcgcgagaccgtcagggaaatgctggggcagggtgtgaaacctgagcgcatcatgaaagctgccgggataagccgtgcaacgttctatcgcatcaagcgagagctggccgccagcgttacggagtga

SEQ ID NO: 38815 - DNA, 303 bp, Escherichia coli
atggttgatttacgccacatgaattcacgcctgcaactggagctggcaactgctgctgccgaagcgttaagcacgattagcgccacgccgcaacaactggtctggagtgaaactgttatcccgcattacgtgcgctgcgctgtcacggacaagacggtacagggagcattccacaaacgtctgcgtgtgtattactacaatcccgatggttccgttatgaccttccgcgcatggcgaaagctgcacggcgtgaccaaaaagagaggtgtccaccgccgatacatctggcggaaagctgcttga

SEQ ID NO: 38816 - DNA, 1845 bp, Escherichia coli
atgcccacgagattgaaccgcctgcttgcgctggccgctgacgccgaaccgctgaacactgcgcctgcggatgctcagcaactggttgcggataagatagttgtatcgcgtaacaagcaatgtcctgtaaagcgtaaacccatacaggctgcgtttaatacggagtcacaagagttttactttaacgctgacgattctgttatgtcgttccgagaatggaaagaggctaacggaatcggacgcaagacacacgcccgccgcgctgatgcagggttgcgccagattatccagccgggcgatgcaatccactgccgccgcgctgagctggtgatgtggctaaacaaaaagcctgcccggtacgccgagccgctgccaccagatttccccggtgttcgcgtagacgatgccgcattgaaaccgcgtgagcacgccatcccggaagcgaccacggggcaaaacgcctttcttaaagcctgtcgcgagtttctgatttgtgatgagaagaccatccgccgcatcaatcgtggcatgagcaagctggaggcgatgcgccacgctgactttgacaccctcggggatagcccggagtttcaccagctatggggcagtgagctgaaatccactaaggacaatttcaacacgaagaaccaacactgtgacgttggcggcgctgacctgccgccgtccatcccgcctctggttacagcgccgtacaggttccgtgagctggagcaatgcgaccgcccggcattcgtaccgttaccgccgccagatggtcatgactggcgacccggtcaactcgacgtggccgccgctgtgtttgcccgtgaccgcgatatgttggccgtactgccgaccgggtacggaaagacggctgcattcacctatgccctgcattttgagtctgatgctggcgaaggtatgaccgttattgtcgtgccgacgaacactatcaagcagcaggtgctacagcagttaagggaggctggcgttcacgctgtggcatttggcgataaactaccgaagcggcgtaatgcgcagcaacttgcggggttggctgctggtgctttccgcgtcgcagtcgtttcgcctgaacatctggtgccgggtagtcaggtgcttgccgcgctgatggccgctggtgcggacagatttatcattgacgaggtgcacaccgttgatgaatgggagttccgggacgctttccctgcaatgaagcacaccctgcaaaatgccttcccggatgctcagcggtgcgcgtttactgcgaccctgcgaaaaggtgatgagtctggcttgatgaaagagcttggctgtcgtggcgagttcctcacctaccgcgccagtgctgcccgtgaaaacatccagcttattcctgctcagcaatgcgtaactccgcgccgggctgccgttggtctggtcaatgcgctgccggagaatgaaaagacattggtgatggtggacagcataaagatgctgtatgcgtatctcaacgaactgggagaccgtgcccggccttatcattctgacgttgagcgactgagccgcgatcagcggcacgccaacgcagagtggttctccagcacgcccggcgctgttctggtggcgaccaaagcctttggcctcggagccgatatttctgacgtgcgtaacgtaattgtcacttatgttccggaagacctgcccgatttggtgcaaatggttggccgtgccgggcgcgatggtcaacctgcccgtgctttcatactctggtcatcgttggcgctgggggatgcgcctgatgatttggcggcgttgtaccagccccacaatgctaactggggttacatctcccgcttcctctga

SEQ ID NO: 38817 - DNA, 432 bp, Escherichia coli
atgcctgatgaaaccgtgcggcaacgcgcggggcgttctgacgccctgattaatgcgcagctcgcttacgccctgaacgggtattcatttgatgggttggccgaacgtcatcgcaagacccttaaccgggaggccatccttcgcgaggtgtccacgccgctggagcgatattgccttttgaatgattgcgaaccgtgggagtgtctggccgctgtgctgaaccgcatgaaaaggccggatggctcacgttgctggaaagctgtccgcctgtctgagcgggtttttaatggtcgagtgcatccagtgcgcaagacacctgatgaagtttacgccgccattgcccgccgtttatttctgccgaagcccgtgcatcaagaagtgatacagcacatccgggcgcttggcctgttaccagttggagataaccattaa

SEQ ID NO: 38818 - DNA, 210 bp, Escherichia coli
atgaccaaaaccgagtttgaagctgggacatgggatatgcggtgcctgttgctggaggcgctgacccgccgcctgaaagaggactccgctggagaatcccgcatggctgctgccgagctgtcatcctgcgtgaacttcctcaagcaaaatgccgccgatgcgccggacgcatctttcaataacgtgttcccggaggatgacaacgaatga

SEQ ID NO: 38819 - DNA, 192 bp, Escherichia coli
atgacgccgcaccagtttagagcgtggtttaactcgctgcctgagaagtaccagaagcaggccaaagccatgtacgacaacgcccggcgcggcggtggtatccataccgcatccagcctcgctttgattaaagaccttgtagaagattcgattaactttgatggagagttccagtatgacaaccaccagtaa

SEQ ID NO: 38820 - DNA, 579 bp, Escherichia coli
atgacaaccaccagtaacgcaaccctgaccctgcgcgatattcagcttatcaataaactgagtattgttgaccacctgaacaacgatgaaatctcttctcgcactggtttcagcccgagcgacatcgaccgtgtaatccgtggcgtctatgtcgatgacttggccgaacagtggaaagacgatgctgatattactctggctgaatacaacgccatccgcagccgctataagcccggcaagctgcaccgtgatacggaatttatgattgcccgcgatacgctgattcgccctgaaaccgtgctggctatcgctcattccagattccagaacgcccacactcaccctgcgccgaaagccgttaaagtgaagccggagaaagcgaaagccatgcgcaagctggtgccttctgatttggatgaaatccacaagttagagcgctttggctggcctgtcgctgacatcgcccaaaagctggacgttccgccagaggtgatcgctttcgttaaccgctgcttaaagagccgctggccgtatggtgacattctggaaaatgttaatgcgaaatggggagccgagtga

SEQ ID NO: 38821 - DNA, 231 bp, Escherichia coli
atggaagataacgacatcattcaccctgcaattgacccgactcaatacgtcaaccttgacgagatgcgggaaggctacgcccctgttaagccgcaggggtgggacatcctgacgcagaatctccgaagtgaggccgcacccgaacagccagtcaccgcccgtggacgccgccagcgtccgcgtggctccgctggcgagcgccgttggctacgccgtcacgggcttatttaa

SEQ ID NO: 38822 - DNA, 696 bp, Escherichia coli
atggctgacaatcaaaacccttatctcgctgctggcgctgatgctgcatcgcagcaatcgccatacatggctgcacctgttggagctgacaatggggcatcccgctttagctctgcgcctgctgatgctgatttcctccgtacccaacccgttaacggtaatgatggcggccaatggaataatagcaatattgctaatcagcaagaccagaacgcggacagcgccggggcgcaggtgggcgatactattcccctgatggatggaacagctattgagtacaccgccgagctgcaaggattgatggggcagtttcaccagtctatagaaagccagctcgggcacggaacagttgacgctatgttgcagtacgcgggcacgcttgacgccgggacgcaatccacccttgaacgtatggttatgtctggcgaccctgcgcagatgcagcgggctgttcagtacctgcaagagaggatggccgcaggcactgcgactggttatgtcccgtcgcaggggaacacatatggtcagcccgccgcgcaacctgtcggaatgtcacacgctgaattcatcgcggcgtacgatgcgctgaatcaatgggctgcacagactggccggggtgctggcacgcgagaatacgaccagcagtatcatgcgctggttgctcaacgcagcgccgggaagcgtgccgggcgctaa

SEQ ID NO: 38823 - DNA, 264 bp, Escherichia coli
atgtacgatgagaatagaatccgagtcctgaccgaggtagagaaacaatctcactcggtcgatagcattctttccattctgcttgataaataccccagcaccagccccgaccatctgacgcgtgtcgctgaatgcctcgttacttttggctggggtgttgctgaatacgatgcgtaccgcgccgggatgcttggcgaagagaagcgccagacgatggtcgcttggtttactgagcggaattccgcgcaacgctgggctgcctga

SEQ ID NO: 38824 - DNA, 510 bp, Escherichia coli
atggttaatgatacttacgcccctgagctgttgcgatcccttttcctgtacgacccggtgacaggtcgcctgcaccataaagctaaccgacgccgggttaaggctggctcctgtgctgactccacccgtcgagctgatggctatcgtcaagttgccctgcgactggatggcaagcagtaccagctaaaagcccaccgcgtggcgtggattcttgcgcatggcgctattcctgatggtctgcaagttgaccacatcaacggtatccgtgacgacaaccgcctatgcaatctgcgcttggttacgcagcgggaaaacgaccagaaccgacgcagggcaaagggttgtagctggaataagggctgtagcaaatgggaggcttacattcgcgttaatggtgtacgccatcaccttggcttattcactagcgaagcggcggcgcgtgctgcttacctgaaagcaaaagccagataccatccctcgaccccagtcgatttgttaaatgctgcttaa

SEQ ID NO: 38825 - DNA, 435 bp, Escherichia coli
atggggactaaaaagcagggtagagcaatccgagtgctgccagatgatgacccacgtcgccagcggtacgccgaactgttggcgcaggctggccggatgactgtcccccggttgcatccgggagacgctaacagcgtaatgagccagctcgcgacgatgcttggcgcaccagtcccgatagtcggcactatgacggagcacgccgccgcatggcggacctgcctgctggagcaaggacttggcgatctgctggctggcttgagtaagcaggtactgaccgtcttctttctgctttgctggagagacagcgccttgcggcaggttggcaaggagcgggaacggcttacggcggccagcgaaggcttgaccattgaacagtatcgggcaatgcgctcggcttacagagagaataaagaagatgatgaccacgattaa

SEQ ID NO: 38826 - DNA, 429 bp, Escherichia coli
atggttacacggacagaccagctattaagaaaagctatgcggggctatctggaacaccttggcaagatgccgctggcgggacggattacaaacgctgctgcattcgaagatgtgtatcgcttcctgttgaatggttccgggcggctggagttgcgccgcgctgatgtggccgctgtccgtatcttcctgtggaattatcaataccgacgctgtgcggtgacaggtaagccgctgcgcctcacatctgccgtgctagatcactgccaccgaaccgggcgcgtgcgtgctgtggtgcatcgctccgcgaacgctgctgagggtggctaccatgctgggtgtttgtgtggattgtcacccgccagcatgggagcaatgttggcgagctatcgcagacaatataaagggacgggcctcatttatccaaagtaa

SEQ ID NO: 38827 - DNA, 960 bp, Escherichia coli
atgtcattaccacagttcaaggaaaagccactatataacacagagttagggagtgcttatgtagcggactccttagaaatgcttgctcagttacctgataactcggtcaacttagtgatgacatctccccctttcgcgttacagcgtaagaaagactatggcaataaagaacagcatgagtacatcgactggctggcagagtttgcatcattggtttaccaaaaattaaccccggatgggtcatttgttgtcgatctcggtggggcatatcagaagggcgtccctgtacgaagtttgtacaattatcgtgttttaattaagttttgtgacgagatcggcttccatttagccgaggagtttttctggtataatccgtctaaactcccatcgcctatcgaatgggtgaataaaagaaaaataagaacgaaagattctgtaaacactgtatggtggctgtctaaatcagaatggccgaaggcaaatgttagcaatgttcttactgagtattcagaaagaatgaaaaagttaataaaaaatcctgaggcttattactcaccagccaaaaggccatcaggtcatgatataggttcttcatttggtaaagataatgggggagctattccttcaaatcttttacaaatccctaactctgaagctagctcgaaatatcttaagctctgcaaagaaatgggcattaaagcgcacccagctaggtttccagcaaagctgcctgagtttttcattcggtttttaacagagcctaatgatcttgtcgtagatatattcgcaggttcaaatacaactggctatgtggctgaaaaagaaaatcgtcgctggttggcttttgagcaattaccagaatatctgaacgcatctatattcagattcttagaagataaacctttggaagtaatcaaggagcgatatctcgatattatagataaagaaggcatttactaa

SEQ ID NO: 38828 - DNA, 213 bp, Escherichia coli
atgtcagccagacaaaattttgcacggaatctgcggaagataaggcaatcgcaaggcatttcccaagaaaagctcgcggatttgtgtgatctccataggacttatgtcagctcagttgagcgcggcgagagaaatatcgctgttgataacatggagcgtttggctattgctcttggcgtggatataagggagctattagaaccaaatgactga

SEQ ID NO: 38829 - DNA, 567 bp, Escherichia coli
atgactgaaactgtaccgaagtctcacaaagaaagattcaacgagctttttccttatgtgagagaatatcagaaattagcttctgaatataatattaacgatatattccaagataatggagggaaatatctacagttgcttatgttgttagatttgacaactgacgggacacgcgaagggaatgatgcaattgatgcagagggtaaagagtacgaaataaaaactgtaaatctcgatcttcaacgtcaatttacaacacatcatcacatgaacccagttatcattgctaagtatagaaaggttgactggtattttgcagcttttcaaggcattgagcttaaggtaatatataaactcactcccgataaaatggaaccattttataaaaaatgggaggagaaatggcacgcagatggtggaaaggatattaataatccaaaggttcagttgcggtatgtaatgcaagtaggtcaagttgtatggttgcctgatggtgttagagaatttactgttcctccgttagctcggaaaagaaaggcaaatgctatttcaacaacagatgaatag

SEQ ID NO: 38830 - DNA, 669 bp, Escherichia coli
atgtccgttaatgaatcagaagagaggttgcttaacttcacaaagaaaacatttctgtcaatgtggtctcacagcaatattttctataagaaaggaaaggaaaggaaaggaaaggaaaggaaaggaaaggaattttgcgatgtaatggtcgtctttggcaatgatgtaatcatcatgtcagataaacttattaattataatattgaaattgacgaaaaaatcgcatggaatagatggtataaaagtgctatcgaaagcagcataaaacagctaaatggtgcatataaccatataaactcatatcccgacaatctatatactgatgctcaagcaacagagccattctcaatggaattaccacattcggatgaaatatgcattcatttaattgctatcgcaaatggttgctctaacgcatgctatagaaaatacggtcgctatggattaaatattgatacagcatgtaccggaaaagacaccttatttactataggtatacccacaagaaaattcgtccatatattcaatgatagcagtctagataaaatatttacatgtttagatacaaccagagatttcattgattacattcaagctagggaaaacttacttacaacttcagataagtacattaaaatatactcaataaacctcaagatgcgggtgtga

SEQ ID NO: 38831 - DNA, 279 bp, Escherichia coli; identical to SEQ ID NO: 14406

SEQ ID NO: 38832 - DNA, 585 bp, Escherichia coli
atgcggaaccagaagaacaggttgatccacgcaaagccgccgtcgaagccgctatcgcccgcgccaaagcacgcaagctggaacagcaacaggccaatgcggagccagaacaacaggtcgatccgcgcaaagctgccgtcgaagcggctattgcacgcgccaaagcgcgcaagctggaacagcaacaacaggctaatgcggaaccagaagaacaggttgatccacgcaaagccgccgtcgaagccgctatcgcccgcgccaaagcacgcaagctggaacagcaacaggccaatgcggagccagaacaacaggtcgatccgcgcaaagctgccgtcgaagcggctattgcacgcgccaaagcgcgcaagctggaacagcaacaacaggctaatgcggaaccagaagaacaggttgatccacgcaaagccgccgtcgaagctgctattgcccgtgccaaagcacgcaagctggaacagcaacaggctaatgcagagccagaagaacagattgatccgcgcaaagcggcagttgctgcggctattgcccgcgttcaggccaaaaaagccgcccagcaaaaggttgtaa

SEQ ID NO: 38833 - DNA, 150 bp, Escherichia coli
atgattaaagggagcaacttagcttgctcctttccttttcactttcctaatcaaaatcctggcaagatgaattatttagcagaatatctgttttcattttattcgtctgacgtgttccaattatttagcaaaaccgcgacaacaaagtga

SEQ ID NO: 38834 - DNA, 291 bp, Escherichia coli
atgaaaacgaagattttcgccgctggtacggtgctgacctgcctgatgctgtgcgccggttgcaccagcgcccggcctgcgccgacgccagtgattgtccacaacgcctgcccgaaagtgagtctttgtccgatgccgggcagtgacccggagaagaacggcgatttaagtgccgatatccggcagcttgagaacgcgctggcacgttgtgccagccaggtaaaaatgattaaacactgtcaggacgaaaccgatgctcaaacccgacagcctgcgcagggcgctgactga

SEQ ID NO: 38835 - DNA, 153 bp, Escherichia coli; identical to SEQ ID NO: 14351

SEQ ID NO: 38836 - DNA, 135 bp, Escherichia coli
atgtcatatgtgagacggctagttgaacgaatattaaattttgctgaattttttatgttgattttacttgttacagaacatatcacattatatatagataagattagttgcattaatgatgagggttattattag

SEQ ID NO: 38837 - DNA, 1566 bp, Escherichia coli
atgatagttaaatttcatgccaggggaaaaggtggtggcagtggtccggttgattacctgctggggagggagcgtaaccgcgaaggcgcaacggtgcttcagggtaatccggaagaagtccgggaactcatcgatgccacgccatttgcgaagaaatacacgtccggtgttctgtcgttcgcggagaaggagctgccgccgggaggacgtgaaaaagtgatggcgagctttgagcgtgtactgatgcccggtctcgaaaaaaatcagtacagcatcctgtgggtggagcaccaggacaagggacggcttgagctgaattttgtcattccgaacatggagctacagaccggaaaacgcctccagccgtactacgaccgcgcagacaggcctagaattgatgcctggcagacgctggtgaatcaccattacgggctgcatgacccgaacgccccggagaaccgccggacgctgacccttcctgataacctgccggaaacgaaacaggcgcttgctgagggcgtcacacgcgggatagacgcgctttaccatgccggagagataaaaggccgtcaggatgtgattcaggcgctcacagaggcggggcttgaagtggtcagggtgacgcgaagcagtatcagcattgcagacccgaacggcgggaggaatatcagactgaaaggagcgttttatgagcaatcttttacagacgggcgcggagttcgagaaaaagctgaaagagagagccgaatctacagagaaaatgctgaacgacgagttcaggaagctcgaagaatctgtaaacagggaactgacctcaaacgaatctttaatcaggaacgctatcaacgaccatacaacagccctgaaagaactgctggagaggtatcagaaaacgaccgtcgatacgatggacgcgcactggaaaaccgtactgaaaatgagcgtgaaacgctggctgtggctgattatcgtctcagtactgatgtttgccacgaccgggagtctgctgtggtaccagggcatgaagataaacgcgaatatgaatattctccgcgagcagaaagagagtctggagaagctgaacgcgaagacatggggcgtgcgttatcacgaggacagcaacggacgttttctggtgttgccgaaggggatgaaagccgaaacgaactggacgaaggacaacggcaaactgaacgcagtgagactggtgcaggagtgacagagcatgacggagctggaaagacatttgctgaacgcattagagcaactgcaacaggactatatgcagcggctgaacgaatgggagaacgccttcgtggaattgcagaaaatgttttcgcttacgcaacgggacaacgcgatgctgaacgggcgagtcatgcagttgagtcagcaggtgcagcacttgagcgagcggacagaacgcttgagccagttatacagcgagaacaggagataagggatgaacggctgatgcaggaacgcgaacatgagttatctctggagcgggagcgtcagccggaaatccaggagcggacactggatggcccttcgctgggatggtga

SEQ ID NO: 38838 - DNA, 171 bp, Escherichia coli; identical to SEQ ID NO: 12692

SEQ ID NO: 38839 - DNA, 234 bp, Escherichia coli
atgcgcctggtcttcctggcgctcaccggcagacaccttcacaccggacggctttttctgcgtcgactcataatccttttttgccgacgccatcagcgtgttgtaatccgcctgcaggattttcccgtctttcagggccttattcagctcttcctgccgggcggtatatttctccagtggcgtcagcaggcgctcatacgccttctgcgcctctccggtatacttcagctgtga

SEQ ID NO: 38840 - DNA, 363 bp, Escherichia coli
atgactgaacgcatagaatttgttttgccttacccgccgacggtgaatacctactggcgacgtcatggcagcacatattttgtatcaaaagccggggagcgttatcgccgtgatgtggcgctaattgttcgccagcagcggctgaaattaaacctgtccggaaggctggcgataaaggtgattgcagagccaccggataagcgtcgtcgcgacctggacaatatcctgaaagcaccgctggatgcgctgacgcatgcgggagtgttaatggacgatgagcagtttgatgaaatcaatatcgttcgtggtcagccagtatctggtggacgtctgggggtgaagatttaccccataatgcattaa

SEQ ID NO: 38841 - DNA, 273 bp, Escherichia coli
atgcagcatgtccctgaaggcgtgattcaggcaccagaatcacccgacgccccggaggcgctgccggggtgtcgttccatttctgatgatgacctgtgcgcctggtgtacccgtctgctttaccgtcccggagaaatcagtctgtgcagactgagtatacaggcaatggcatctggccatccgtctgtgaccggaacggttacgcgtacggctgtccggaatttcagccgaatatcattcatccctgacattaccgggtctcacggtcagtga

SEQ ID NO: 38842 - DNA, 378 bp, Escherichia coli
atgcgctacttaaatacaaagaatatcattgcagcaggagtattactctcctgtatgagcagcattgcctggggtgccatcatcccggatcgtacccgtatcataatgaatgagtcagataaaggcgaagcattaaaacttactaatcaaagtaaaaacctgccctatctggcccaaacatggatagaagatacgaaaggcaataaatcgcgtgactttattgtcactgttcctccaatggtgcgtttaaatcccagtgagcaaattcaaataagaatgataactcaggaaaaaattgctcaacttcctaaagacagagaaacgctcttctattttaacgtgcgagaaataccgcccaaaacagataaaaaaatgtga

SEQ ID NO: 38843 - DNA, 297 bp, Escherichia coli; identical to SEQ ID NO: 14056

SEQ ID NO: 38844 - DNA, 1341 bp, Escherichia coli
atggatagagacaatcaagctgatgataatgcagaacatttatatcgatatataaatcagaacaggcctgatatatctatattttttgttttattaaaggactcacatgactgggtcagattagagaaagaaggttttaaattactagcatttggcagtcgagagcatgaagctgcattagaatcatgtgataaaataattagttctcatgcggctcagtttgttacggattattttaaagataaacgaatgctatggaaaaaatttatttttcttcagcatggtatcattcataatgatcaatctacattatttagaccagactggaagaaaattgatatttttttaacatctggagtggatgaatataattccttggcaggagagaaaaccacttataaatttactaaaaaagaagtgaaacttacggggttgccaaggcatgactcattattaaaaaaagatatcgatgaagaaaatatcattttagtaatgccaacctggagacctaacttgttaggaaaagtcacatctggtaccagtcgtgaattattacctgattttcaaaatagtgagtatgctaaagcatggacagaattgctatcatccgcgtcattgtataatctaataaaaaatgaagggtatagaataattttctttccgcatgccaatatgcaaccatatataagtgagtttaacctaccagaacatataagcatacaatctcattatgatggtagtatccagagtttatttaagcgttcaaaaataatgatcactgattattcatcagtagcatttgaaatggcgtacttgaataaaccagtctgttattatcaatttgatgaaaaacagttttttacgaaaggtcattataataaaggttattttgattatcgttcttctggatttggccccgtgttcaatactgttgaaggagttctggagtttttgcataatattataaaaggtagatatcctgattcagatatatatgaaaaacgtgctgctaatttctttccttatcgtgacggaaaatgttgtgaacgagttttggatactataattaaacttgaacaaccaagagtaacacaatgtagtaccgactatttaaaatgggctgctcatgcctataaaacaggagattatattagtgcacgctctcgttatgaaaaatatttcattaaccataatgattcatgggcgacatataatgacaaacatttatttaactacatggttagtttaatatcacttggcgattttaactttaataaggtatttaaaataaagaagaacggattttgtattaatttcagaagagtgtgtttggtaatataa

SEQ ID NO: 38845 - DNA, 519 bp, Escherichia coli
atggcagagttccgtcgcgcaactggcctgccgaccgcaaccaatatgatcgccaccgactggcggcagatgggccatacgctctcgttgcaatccgttgatatcccgcttgcggatccgcatttctggacgatgcaaggttcggtacgtgtggcgcaaatgtgtcatgaatttggcctgacctggggttcacactccaacaaccacttcgatatttccctggcgatgtttacccatgttgccgctgccgcaccgggtaaaatcaccgcgattgatacgcactggatctggcaggaaggtaatcagcgcctgaccaaagaaccgttagagatcaaaggcggtctggttcaggtgccagaaaaaccggggctgggtgtagaaatcgatatggatcaagtgatgaaagcgcacgagctgtatcagaaacacgggcttggcgcgcgtgacgatgcgatgggaatgcagtacctgatccccggctggacgttcgataacaagcgtccgtgcatggtgcgttaa

SEQ ID NO: 38846 - DNA, 210 bp, Escherichia coli; identical to SEQ ID NO: 22985

SEQ ID NO: 38847 - DNA, 216 bp, Escherichia coli
atgctgtgcggcgtgagtcagggcgttcaacgcggcggttacggcggcatcatcacgggtggcgcgaatgcgttccagcgaagcaatttgctcgttacgcaccatcacgttgtcgatctcaaggacgtcggtttcgtcttcgtgatccagtttgtacttgttgacaccaacgatgacacgcttgccctggtcgatcagcgactgttcgcgcgctga

SEQ ID NO: 38848 - DNA, 510 bp, Escherichia coli
atggcttctatttttgctacgccactggcaataatatcccaacgcaaaaccaagctgggcactaatcgggccgacaaaatcagtccacggctgcggccaaaaaggggaaaaattcaggggaagccagacaaatgtccggcgtggacgaaagagagcgtgctgccgggtggtgccattgaaggcgaccgtgacgattacgccgcccgcctgcgccgccgttacccgttcctgaccgaatcgctggcacgtcactacgcgcgcacttacggcagcaacagcgaactgttgctcggcaatgcaggggcgataagcgacctcggtgaaaatttcggtcatgagttctacgaagcggagctgaaatatctggtcgaccacgaatgggtccgccgcgccgacgatgccctgtggcgtcgcacgaaacaaggcatgtggctaaatgcggatcaacaatctcgtgtgagtcagtggctgatggaatatacgcagcagaggttgtcgctggcgtcgtaa

SEQ ID NO: 38849 - DNA, 234 bp, Escherichia coli; identical to SEQ ID NO: 16607

SEQ ID NO: 38850 - DNA, 1143 bp, Escherichia coli
atgacaaataaacacccatcattgttttctccttttatgctgacagaaaaaataaagctacgtaatcgtatcgttatggctcctatgacaacctggtcagctaatcctgatggaaccatctctgagcaagaactcgaattttataaacgtcgctcacaaaatgttggtttagtaataacaggatgtacctatgtcacgccaagcggcattgggtttactcatgaatttgccgcgtatgacgaccgtttcattaacagccttgaaaagttagcagctgcagccaaaagtggcggtgctccggctattttgcagattttccacgccggtaataaagccatcccagagcttgtgccaaataacgatgttattagtgccagcgcatcaagcgtaaaatctggtgactttatgaagagagtggtacaaagcagggaaatgactgaaaacgaaattcaggaaaccattagagcattcggagatgtcacaaaaagggcgattaaagcaggttttgatggcgttgaacttcatggtgcgcacggattccttctgcagaatttcttctcccctctatttaaccagcgtaatgaccgatggggaggagatcttgaaggacgtatgcgcttcccgctggccgtattacaggaagtaaaaaatgtagtctatgaatatgcgacaaagccctttgctatcggttacagaatatctcctgaagaatctgtaacaggggggctgcggatagaggatacttataaactccttgatcggctcatttcatccggtatttcgtatatacatacctcgctggtcagtattaacgatagctaccctgttgagtcgccaaatggcccccgaactattgaattgattttaaatcatattgcaggcagagtgccggtaatcgccgcaggtaaaatacgcacaccgtctcaggctcaagaagcaatttccgctggcctgccacttgttgcgatcggtaaagggctggtgataaatccagaatgggtgactttagctgaatcaggtagaagtcatgaaattcaaacagcccttaatccacaacgcgttcctgaattaaccattccggataaactatgggatcaaattcaggcatcgaaaggaactggctggtttccgttaatggattaa

SEQ ID NO: 38851 - DNA, 732 bp, Escherichia coli
atgagacaggatatcgaagcgagcgttatcggtggcctgctgattggtggattaactccaaccgccagtgacgttcttgcaacgctggagccggaagcgttttcaattccgctctaccggaaagccttcgaggttatccggaagcaggcgagaaacagaaacctaatcgacgcgctgatggttgccgaggcgtgcggagaggagcatttcacgtcaatcctgatgaccagcaaaaactgcccgagcgccgcaaacctgaagggatatgccggaatggtcgcggataactatcaccgccgtctggtgctggaaatcatggatgaaatgcgtgaaccaatccaaagcggaaccatcgacgcatcgagtcaggcgatggatgaacttgtaaaacgtctctcagccatcagaaagccccgtgacgaggttaaacctgtacggttaggggaaatcatcaccgactacactgacacgcttgacaggcgtctgaggaacggagaagagtccgataccctgaagaccggaatcgaagaacttgatgccatcaccggagggatgaacgcggaagacctgatgaaccgccccgggtttcctggagagtgttttatctgtgaactcaggctgccagatcatcgtttccgatggaagcataataagctttttctgcttctgccggaggagtatggcccagcctttccagcaatcgtcgattgttataccagtccacccacgtga

SEQ ID NO: 38852 - DNA, 309 bp, Escherichia coli
ttgatcagtgcaagctggcatagcactaaaaaggtaatcgaccgctatgaagctacattcgatataaaagtacaaaaagactgtccgatagaagctattgaattggcaaccctcaatcgaaatcacttagtgcatcgtggtggaaaggataaagaagggaacctcgtagtgattacagaccaggatcttgaaacgctgattgaaaatgcatcgaacctggcaattatgctctacaacagtttaaatgtagcaacgaataaaaccaccattttgcaaccagatgacaaaccgttcattcatgaattttaa

SEQ ID NO: 38853 - DNA, 1758 bp, Escherichia coli
atggcaaaagtggctgacgggatccgctacgccgaacgtgttgttgcaggagaaattgttgctggcgaatttgtccgcctggcctgccagcgttttcttgatgatctgaagtacggcgaaaagcgggggatttatttcagtgaaccccgtgcgcagcacatcctgaatttctacaaatttgtgcctcatgtaaaaggggcactggcaggccagcccattgagttgatggactggcatgtatttatcctcattaatatttttggttttgtcattccgctggtcaatgaagaaaccggggaagttgtcatgcgcagcgatggcagcggacgtccggtgatggtgcgccggttccggacggcgtacaacgaagtcgcccgtaaaaacgcaaaatcaaccctgtcatcgggtatcggcctgtatatgacgggggcagatagtgaaggcggagctgaggtgtattcagccgcaaccacgcgtgaccaggccagaatcgtgtttgaagacgccaaaaatatggtcagaaaagcccggtcgacactcgggcggttgtttgatttcaacaagctggcgatttaccaggagcagagcgcatcaaaatttgaaccgctttcctcggatgcaaacaacctggacggtctgaacatccactgcgccattattgatgagctgcatgcacataaaacccgcgacgtgtgggacgttctggagacggcaaccggtgcccgtctgcagtctctgttatttggcatcaccacggctggctttaacaaggaagggatttgttacgagcagcgtgattacgccatcaaggtattgcgaggctataacagcgacgtggagggcgcggtaaaagacgactcctactttgcgatcatttacacgctcgatgagggagatgatccgtttgatgaaacggtctggcagaaagcgaatcctggcctgggcatctgtaaacgctgggatgatctgcgtcgtctggcgaaaaaagcgaaggaacaggtctctgcgcgggtgaatttttttaccaaacacatgaatgtgtgggtaacagcagagtctgcctggatggacatgattaagtgggataagtgcgaatacattgccccacgacatgagctgaaaacgtatcccatgtgggtcggcgttgaccttgctcataagattgatatctgtgcggcggcaaaactctggcgaaccgataacggacatgttcatgctgattttaaattctggcttccggaaggacggctggaacgatgctcgcggcagcaggcagaactttaccggaagtgggcggagatggataagctcatcctgacggatggtgatgttatcgatcatgctcagataaaaagtgacttactggaatggattggcggtgaaaacctcagggaactgggatttgacccgtggagcgcaatgcagttcagcctggcactggctgaagaagggataccgctggtggaggttccgcagacggtccgcaatctgtcagaggccatgaaggaaacggaatcactggtttatgccgggcgtttccatcacagcaatcatccggtcatgaactggatgatgtctaacgttactgtaaaaccggacaaaaacgacaacatcttcccgaataaatccacgccggaagccaaaatcgacggccctgttgcgatgtttacagcaatgagccggatgctggtcaatggtggtgaaccggagctggatctgtctgaacatctggtcagcgtgggcatccgctcgctttaa

SEQ ID NO: 38854 - DNA, 138 bp, Escherichia coli
atgagtcatcagatagccccagaaactcgctcaaaagcactcagacgcgtgaaacgggttttagatgcccgtcagggcatggaaggcgcgaataacgcttacagagcgtttcaggaggtcaggcgcgccgatacctaa

SEQ ID NO: 38855 - DNA, 141 bp, Escherichia coli
atgtttaattgtaataccggcacacacaacgtattgccacttggtcagagtttcccccacaacatcagtgcgaacgtgcttaatgctcgctacggctctctcatgttgccggtgattccgttgttgttctttcaggaatga

SEQ ID NO: 38856 - DNA, 327 bp, Escherichia coli; identical to SEQ ID NO: 5975

SEQ ID NO: 38857 - DNA, 528 bp, Escherichia coli
atgagtgcaacgattgaaaatgatgaatctctgccatcaacaccagcgaacaatcacaacttcgtgcaggtttcacgcgcttatctgaaagcatggagaggcttgatccgaaaaagtggtttagctgccgagatccttttttatcttgttgaaaggatggggaaaacaacgaatgctgttgtttgtagctatgcaactttaactgaggttacaggctatagtcggcgaagtgttgctacggccataaaaatcctcaaagaggataattggatacaggtcgttaaaattggaaatgctagtgcttattgtgttaacgagaaggttatttggcaggctggaagaaatcagcgcaaatatgcgattttcagcgccacagtcgttgccagcgaatctgagcaggaaagtgattaccatctaaaagcaaaagaaaaactaacttacattccgtttgttgaacgtactgaaaggatggttatcggggaagaagaattacccccaccagaccaaaaagatttggatctatcgtag

SEQ ID NO: 38858 - DNA, 207 bp, Escherichia coli; identical to SEQ ID NO: 14967

SEQ ID NO: 38859 - DNA, 576 bp, Escherichia coli
atgaccggcatagctgacatggctcatcatcacgccaatggagccgatacgggatgtctgggtaaccagccgtcgggagcaggccgacgccagcagcatggctgcagaacaggccgtgtcattacacagtgcccagaccggcttctgctgacggaggcggtaaatcatgtcagcgcagtcaaacgcgccggcggcctgcccgcccggactgtcaatgtccagcagtacgccccgcacctggctatccgccattgcctgctgaagacaggcgacaatgccgtcatagcctgtcattccggaaaatggccgcataccacccagccggtgcaccagcgtgccggtcaccggcagtacagcaataccgttcaccacccggtaaacacgggccggtcgtttacctccggccatgtactcgtccgtttcagccagcattccgggagcatcaaactgtacctgctgttgtggtaccgaaagacttgctgcccccatctcgcgcccgagcgcgcaaaagaaaacccgcgcataggcgggctccagaagcagcggttcattgaatgctgcggcaataatgtgtga

SEQ ID NO: 38860 - DNA, 255 bp, Escherichia coli
gtggaagcctacaccgaatatcggcatcactgcgaaacactcgatgttgaggggtatacctaccgcacggaaacgcagagcggtgatgtactgattaaggcgcaccccgcggcggcaatgaaagcggatgcctggaagcggatccgggcaatgcttgcagagtttggtatgtcaccggcaagccgggctaaagtaaatatcgccggaccggatgatgttgatccgctggcggagcttttaaaagcgagagactga

SEQ ID NO: 38861 - DNA, 282 bp, Escherichia coli
gtggtcccgctgacggagggaaagcctgcggtatctccgccgtggctggtgttttctgtggtgtctgacacggcatctgatgtgcttgatgggcaggctgaatccagaattaccgtgcagatcgatgtctgggcgacagtacctgatgacgcagataatattcgtgagcaggcgcttgatgcggtaagaaaactggcaccctccgttatttctaaaacgcaggggtatgatcctgactcccgtctgagcagagccacgcttgaatttcaggtaatagcctga

SEQ ID NO: 38862 - DNA, 354 bp, Escherichia coli
atggattattcacagttaagtgattttgaaattaacagaatggtgggggacataatttttaaaggcctttgggcatgtaaaccggaaacatcagggaataacaccaacaaatggtattacggaaatgctgatacaacttttgagccattaaatcatttgcctgactactgcaatgatccgagcgcttcatggccgattattgagaagtacaggattagcattatcaatctcgatgaagacgagtggggtgcacgtggtgtggccgactgtaaatctaagcgagctatacatgaaaattccctccgcgccgccatgattgtctttctcatgatgcaggacgccaataatgcttag

SEQ ID NO: 38863 - DNA, 468 bp, Escherichia coli
atgaaagcgtctgaattgtttcgttatgaagatggattgcttttttggcggattaagccagcacgatggatgagggctggtgataaggcaggaggaaaaacaaaatctggccattgcattgtaagcattaacggaaaaagagaatacgtgcatagggttgtatgggaaattcaccacggtgaaattccagaagggatggtaatagaccatatcaatggaaacccgagtgataaccgaatagaaaaccttaggtgcgtctctcagcaaataaatcttctgaacaagagaaaacagaaaaataacacatctggcattactggagttgggtttcacaagcaaagaggaaaatggagagccacattcatgaatgagtatcttgggtcgtttggtagctttgtcgacgcctgcgaggcaaggatagttgctgaggtttcttctgggatctccactgagaggaatggcaaatga

SEQ ID NO: 38864 - DNA, 177 bp, Escherichia coli
atgcgtgtggcatgtatcggcttgttaccttacccgactcgtttttgggcttctgcgctaattgcaaagccgcatgtcctgatggctgacaacatcatcccggcaccaaagcgccgccataccggtattgcatcggcacgacgagcagcaaagaaacgcaggagagcaaaacgatga

SEQ ID NO: 38865 - DNA, 189 bp, Escherichia coli
atgaaaaaccgtaaagcaaagattctgttagttcgtagaaacgctcctggcgtctggcagtgggtgagactcagcaaccgacgggtggggttaatgaaacattacgggatgatggattatggtttttgcaaaaagcccagcgcggcgcaaaaccgctggaaaaaccacttgcgtactaaaggagagtga

SEQ ID NO: 38866 - DNA, 363 bp, Escherichia coli; identical to SEQ ID NO: 28876

SEQ ID NO: 38867 - DNA, 1137 bp, Escherichia coli
atggatctattgattgttttaacttacgtggcgctggcgtgggcggtctttaaaatcttccgcattccggtgaatcagtggacgctggcgacggcggcgctgggaggcgtgtttctggtgagtggtttgattttgttgatgaactacaaccacccttacacttttaccgcgcaaaaggcagtgatagcgatccccatcacgccacaggtgacgggaattgttactgaagtcaccgacaaaaataatcagcttattcagaagggcgaggtgctttttaagctcgacccggttcgttaccaggcgcgagttgacagacttcaggctgacctgatgacggcgacgcataatataaagacgctgcgcgcgcagctcactgaagcgcaggccaacaccacccaggtttcagcggagcgcgaccgtctgtttaaaaattatcaacgttacctgaaaggcagccaggtggcggtgaatccgttctcggaacgtgacatcgacgatgcgcggcaaaacttcctcgcgcaggacgcgctggtgaaaggctcggtggcggagcaggcgcagatccagagccagctcgacagtatggttaacggcgagcaatcgcagattgtgagcttaagagcgcaacttactgaagcaaaatataaccttgagcagactgtcattcgcgcaccaagcaatggctacgttactcaggtactgatccgcccaggtacatacgcagctgccttgccgctacgtccggtgatggttttcatccccgagcaaaaacggcaaattgtcgcccaatttcggcagaactcgctgttacgtctgaaacccggcgatgatgcggaagtggtgtttaacgcgctacctgggcaggtgttccacggcaaactgaccagtattttacctgtcgtgccaggcggttcgtatcaggcgcaaggggtattgcaatcattaacggtcgtgcccggcacggacggtgtgctgggaaccattgaactggaccccaacgatgatatcgatgccttacccgacggcatctacgcccaggtggcggtttactccgaccatttcagccatgtttcggtgatgcgaaaagtgctgctaagaatgaccagctggatgcattatctttatttggatcattga

SEQ ID NO: 38868 - DNA, 609 bp, Escherichia coli
atgaaactcgtcggtagctacaccagcccgtttgtacgcaaactttctattctgttgttagaaaagggcataactttcgaatttattaatgaactgccctataacgcggacaacggcgtggcgcaatttaacccgttagggaaagtgccggtgctggtgaccgaagagggcgaatgctggtttgattcgccgatcatcgctgaatatattgaattaatgaatgtcgctccggcgatgttgccgcgcgatccgctggagtcgttgcgggtgcgcaaaattgaggcactggcggatggcattatggatgccgggctggtatcggtgcgtgaacaggcgcgtccagcggcgcagcagtctgaagatgaattgttacgccagcgggagaaaatcaaccgcagtctggatgtgctggaaggatatctggtcgatggcacactcaaaaccgatacggtcaatctggcgactatcgccattgcctgtgccgtcggatatctcaatttccgccgcgttgcgccaggttggtgtgttgaccgcccacacttagtcaaactggtcgaaaacctgtttagccgcgaaagttttgctcgcaccgaaccgccaaaggcttga

SEQ ID NO: 38869 - DNA, 1392 bp, Escherichia coli; identical to SEQ ID NO: 28873

SEQ ID NO: 38870 - DNA, 1845 bp, Escherichia coli; identical to SEQ ID NO: 28872

SEQ ID NO: 38871 - DNA, 1152 bp, Escherichia coli; identical to SEQ ID NO: 28871

SEQ ID NO: 38872 - DNA, 1539 bp, Escherichia coli; identical to SEQ ID NO: 28870

SEQ ID NO: 38873 - DNA, 324 bp, Escherichia coli; identical to SEQ ID NO: 28869

SEQ ID NO: 38874 - DNA, 1137 bp, Escherichia coli; identical to SEQ ID NO: 28868

SEQ ID NO: 38875 - DNA, 975 bp, Escherichia coli; identical to SEQ ID NO: 28867

SEQ ID NO: 38876 - DNA, 741 bp, Escherichia coli; identical to SEQ ID NO: 28866

SEQ ID NO: 38877 - DNA, 1971 bp, Escherichia coli
atgaacatttcggaagtcgatctgcataaactgacggtcagcgatccgttcctcggtcagtaccaacaactggtccgcgatgtggtgattccttatcagtgggacgccttgaacgatcgtatcccagaagcggaacccagccatgcgattgaaaactttcgcattgccgcaggactgcaagacggtgaattttacgggatggtgtttcaggacagcgacgtcgccaaatggctggaagcggtagcctggtcgctgtgccagaagccggatgccgaactggaaaaaaccgctgacgaggtaatcgaactggtcgcttccgcccagtgcgaagatggctatctcaatacttactttacggtaaaagcgcccgaagaacgctggagcaatctggcggagtgtcatgaactttactgcgccggtcatctgattgaagccggagtcgccttcttccaggccacgggcaagcggcgcttgctggaagtggtttgccgtctggccgatcatatcgacagcgtatttggtccaggtgaaagtaagttacacggttatcctggtcacccggaaattgaactggcgctaatgcgcctgtatgaagtgaccgaagagccgcgctacctggcgctgacgaactattttgtcgaacagcgtggtgcgcaaccgcactattacgaccaggaatatgaaaagcgcgggcagacctcgcactggcacacctacggcccggcgtggatggtgaaagataaagcctacagccaggcgcatttgcccatcgcacagcaacaaaccgccatcggacatgcagtacgctttgtatatctgatgactggcgtcgcacatctggcgcgtttaagtcacgatgaaagcaagcgtcaggattgcctgcggctgtggaacaatatggcccagcgtcagttatatattaccggcggcattggctcacagagcagcggtgaagcgttcagcagcgattacgatctgccgaatgacacggtatacgctgaaagttgcgcctccatcggcctgatgatgtttgcccgacgaatgctggaaatggaaggcgacagtcaatatgccgatgtgatggagcgcgcactgtacaacaccgtgctcggcggcatggcactggatggcaaacatttcttctatgtgaatccgctggaagtacatccaaaatcgctgaaattcaaccatatctacgatcacgttaaaccgatccgccagcgttggtttggctgcgcttgttgtccgccaaatatcgcccgcgtactgacctcgattggtcattatctctacacgccgcgtgaagatgcgttgtatatcaacatatatgcaggaaacagcatggaagtgccggtagaaaatggcacgttgcgcctgcggattagcgggaactatccgtggcaggaacaggtgacaattgcggttgaatcgccccagccggtgcgtcatacgctggctttacgtctgccggactggtgcacacagccgcagatcatattgaatggggaagaggtcgggcaggatattcgtaaagggtatttgcacattacccgcgaatggcaggagggcgatacgctgaatctgactttgccgatgccggtacgccgcgtttacggtaacccgctggtgcgtcacgtcgccggaaaagtggcgattcagcgcggcccgctggtgtattgcctggaacaggccgacaacggcgagtcactacataacctgtggctgcccgccgatgcgccatttacgacctttgaaggcaagggattgttcagccataagatcttaatccaggcaccgggttaccggtatgaacagagcaatccagagcagcaaccgctgtggcattacgacagcgcgccagccaaacgccagccgcaaactctgacgtttatcccgtggtttagctgggctaaccggggtgaaggcgaaatgcggatctgggtgaatgaggaaaagcattgccatccgtag

SEQ ID NO: 38878 - DNA, 1401 bp, Escherichia coli; identical to SEQ ID NO: 28864

SEQ ID NO: 38879 - DNA, 816 bp, Escherichia coli; identical to SEQ ID NO: 28863

SEQ ID NO: 38880 - DNA, 696 bp, Escherichia coli; identical to SEQ ID NO: 28862

SEQ ID NO: 38881 - DNA, 861 bp, Escherichia coli; identical to SEQ ID NO: 28861

SEQ ID NO: 38882 - DNA, 663 bp, Escherichia coli; identical to SEQ ID NO: 28860

SEQ ID NO: 38883 - DNA, 1497 bp, Escherichia coli; identical to SEQ ID NO: 28859

SEQ ID NO: 38884 - DNA, 1278 bp, Escherichia coli; identical to SEQ ID NO: 28857

SEQ ID NO: 38885 - DNA, 474 bp, Escherichia coli; identical to SEQ ID NO: 28856

SEQ ID NO: 38886 - DNA, 468 bp, Escherichia coli; identical to SEQ ID NO: 28855

SEQ ID NO: 38887 - DNA, 999 bp, Escherichia coli; identical to SEQ ID NO: 28854

SEQ ID NO: 38888 - DNA, 849 bp, Escherichia coli; identical to SEQ ID NO: 28853

SEQ ID NO: 38889 - DNA, 474 bp, Escherichia coli; identical to SEQ ID NO: 28852

SEQ ID NO: 38890 - DNA, 1254 bp, Escherichia coli; identical to SEQ ID NO: 28851

SEQ ID NO: 38891 - DNA, 2031 bp, Escherichia coli; identical to SEQ ID NO: 28850

SEQ ID NO: 38892 - DNA, 825 bp, Escherichia coli; identical to SEQ ID NO: 28849

SEQ ID NO: 38893 - DNA, 1179 bp, Escherichia coli; identical to SEQ ID NO: 28848

SEQ ID NO: 38894 - DNA, 1182 bp, Escherichia coli; identical to SEQ ID NO: 28847

SEQ ID NO: 38895 - DNA, 1542 bp, Escherichia coli
atgccttatctacttgaaatgaagaacattaccaaaaccttcggcagtgtgaaggcgattgataacgtcagcttgcggttgaatgctggcgaaatcgtctcactctgtggggaaaatgggtctggtaaatcaacgctgatgaaagtgctgtgtggtatttatccccatggctcctacgaaggcgaaattatttttgcgggagaagagattcaggcgagtcacatccgcgataccgaacgcaaaggtatcgccatcattcaccaggaattggccctggtgaaagaattgactgtgctggaaaatatcttcctgggtaacgaaataacccacaatggcattatggattatgacctgatgacactacgctgtcagaagctgctcgtacaggtcagtttatctatttcaccagatacccgcgttggcgatttagggcttgggcaacaacaactggttgagattgccaaggcacttaataaacaggtgcgtttgttaattctcgatgagccgacagcctcattaactgagcaggaaacgtcggttttactggatattattcgcgatctacaacagcacggtatcgcctgtatttatatttcgcataaactcaacgaagtcaaagcgatttccgatacgatttgcgttattcgcgacggtcagcacattggtacgcgtgatgctgccggaatgagtgaagacgatattatcaccatgatggtcgggcgagagttaaccgcgctttacccaaatgaaccacataccaccggagatgaaatattacgtattgaacatctgacggcatggcatccggttaatcgtcatattaaacgagttaatgatgtctcgttttccctgaaacgtggcgaaatactgggtattgccggactcgttggtgccggacgtaccgagaccattcagtgcctgtttggcgtgtggcccggacaatgggaaggaaaaatttatattgatggcaaacaggtagatattcgtaactgtcagcaagccatcgcccaggggattgcgatggtacccgaagacagaaagcgcgacggcatcgttccggtaatggcggttggtaaaaatattactctcgccgcactcaataaatttaccggtggcattagccagcttgatgacgctgcagagcaaaaatgtattctggaatcaatccagcaactcaaagttaaaacgtcgtcccccgaccttgctattggacgtttgagcggcggcaatcagcaaaaagcgatcctcgctcgctgtctgttacttaacccgcgcatcctcattcttgatgaacctaccaggggtatcgatattggcgcgaaatacgagatctacaaattaattaaccaactcgtccagcagggtattgccgttattgtcatctcttccgaattacctgaagtgctcggccttagcgatcgtgtactggtgatgcatgaagggaaactaaaagccaacctgataaatcataacctgactcaggagcaggtgatggaagccgcattgaggagcgaacatcatgtcgaaaagcaatccgtctga

SEQ ID NO: 38896 - DNA, 993 bp, Escherichia coli; identical to SEQ ID NO: 28846

SEQ ID NO: 38897 - DNA, 1323 bp, Escherichia coli; identical to SEQ ID NO: 28845

SEQ ID NO: 38898 - DNA, 342 bp, Escherichia coli; identical to SEQ ID NO: 28843

SEQ ID NO: 38899 - DNA, 438 bp, Escherichia coli; identical to SEQ ID NO: 28842

SEQ ID NO: 38900 - DNA, 996 bp, Escherichia coli; identical to SEQ ID NO: 28841

SEQ ID NO: 38901 - DNA, 309 bp, Escherichia coli; identical to SEQ ID NO: 29541

SEQ ID NO: 38902 - DNA, 912 bp, Escherichia coli; identical to SEQ ID NO: 28839

SEQ ID NO: 38903 - DNA, 2070 bp, Escherichia coli; identical to SEQ ID NO: 28838

SEQ ID NO: 38904 - DNA, 213 bp, Escherichia coli; identical to SEQ ID NO: 28073

SEQ ID NO: 38905 - DNA, 372 bp, Escherichia coli
atgaataaactgcttttactgttgataatgctctatcaacgacacctttctcctcgcaaaggataccgctgtgcttacagtgtgttgtaccaaacgcagggatgttcgggagcagtcaaagagattattcaacagaaaggtgttattgcaggctggggcgagatacgtcagcgttttgcagattgccgacttgcggcacagacaatcaggcagaagcaacacctgaacgaggtaatacgtaaaaagaagaataataattgtgattgttccgggtgcgatggtgcggtctgtcgtgattgcgacattccggtgccggatctggattgttcctgggactgttcttctctacatataaagcggtttatccaataa

SEQ ID NO: 38906 - DNA, 213 bp, Escherichia coli
atgtccggtaaaatgactggtatcgtaaaatggttcaacgctgacaaaggcttcggcttcatcactcctgacgatggctctaaagacgtgttcgtacacttctctgctatccagaacgatggttacaaatctctggacgaaggtcagaaagtgtccttcaccatcgaaagcggtgctaaaggcccggcagctggtaacgtaaccagcctgtaa

SEQ ID NO: 38907 - DNA, 291 bp, Escherichia coli
atggaatataaagatccaatgcatgagctgttgagcagcctggaacagattgtttttaaagatgaaacgcagaaaattaccctgacgcacagaacaacatcctgtaccgaaattgagcagttacgaaaaggaacagggttaaaaatcgatgatttcgcccgggttttgggcgtatcagtcgccatggtaaaggaatgggaatccagacgcgtgaagccttcaagtgccgaactaaaattgatgcgtttgattcaagccaacccggcattaagtaagcagttgatggaatag

SEQ ID NO: 38908 - DNA, 711 bp, Escherichia coli
atggcgacaggaaagtcctgctctcgctggtttgcgcctcttgcggcgttattaatggtagttagcctgagtgggtgttttgataaagaaggcgatcagcgtaaagcgtttatcgacttcctgcagaatacagtgatgcgtagcggtgaacgtctaccaaccctgactgccgatcagaaaaaacagtttggtccttttgtctctgattacgcgattctgtatggttattctcagcaggtgaatcaggcgatggattccggtctgcgcccggtcgtagacagcgttaacgcaattcgcgtaccgcaggattacgttacgcaaagcggcccactgcgtgaaatgaacggttctctgggcgtactggcgcaacagctgcaaaatgcgaagttgcaggccgatgctgcgcactctgcgctaaaacagaccgatgatttgaaaccggtctttgatcaggcattcaccaaagtggtaacgacgccagctgatgcattgcaaccgttgattccggcggcacaaactttcacgcaacaactggtgatggttggagactacattgctcagcaaggtactcaggtgagctttgtcgcaaatggcatccagttcccgacgtcacagcaggcaagtgaatataacaaactgattgcgccattaccggcacagcatcaggcgtttaatcaggcctggactacagcagttactgcaacccaataa

SEQ ID NO: 38909 - DNA, 975 bp, Escherichia coli
atgaagccgtccgttatcctctacaaagccttacctgatgatttactgcaacgcctgcaagagcatttcaccgttcaccaggtggcaaacctcagcccacaaaccatcgaacaaaatgcagcaatttttgccgaagctgaaggtttactgggttcaaacgagaatgttgatgccgcattgctggaaaaaatgccgaaactgcgtgccacatcaacgatctccgtcggctatgacaattttgatgtcgatgcgcttaccgcccgaaaaattctgctgatgcacacgccaaccgtattaacagaaaccgtcgccgatacgctgatggcgctggtgttgtctaccgctcgtcgggttgtggaggtagcagaacgggtaaaagcaggcgaatggaccgcgagcataggcccggactggtacggcactgacgttcaccataaaacactgggcattgtcgggatgggacggatcggtatggcgctggcacaacgtgcgcactttggtttcaacatgcccatcctctataacgcgcgccgccaccataaagaagcagaagaacgcttcaacgcccgctactgcgatttggatacactgttacaagagtcagatttcgtttgcctgatcctgccgttaactgatgaaacgcatcatctgtttggcgcagaacaattcgccaaaatgaaatcctccgccatattcattaatgccggacgtggcccggtggttgatgaaaatgcactgattgctgcattgcagaaaggggaaattcacgctgccgggctggatgtcttcgaacaagagccactgtctgtagattcgccgttgctctcaatggccaacgtcgtcgcagtaccgcatattggatctgccactcatgagacgcgttatggcatggccgcctgtgccgtggataatttgattgatgcgttacaaggaaaggttgagaagaactgtgtgaatccgcacgtcgcggactaa

SEQ ID NO: 38910 - DNA, 660 bp, Escherichia coli
atgaagaaacgtgtttatcttattgccgcagtagtgagtggcgctctggcggtatctggctgcacaactaacccttacaccggcgaacgcgaagcaggtaaatctgctattggcgcaggtctgggctctctcgtgggcgcgggtattggtgcgctctcttcttcgaagaaagatcgcggtaaaggcgcgctcattggcgcagcagcaggcgcagctctgggcggcggcgtgggttattacatggatgtgcaggaagcgaagctacgtgacaaaatgcgcggcactggtgttagcgtaacccgcagcggggataacattatcctcaatatgccgaacaatgtgaccttcgacagcagcagcgcgaccctgaaaccggcgggcgctaacaccctgaccggcgtggcaatggtgctgaaagagtatccgaaaacggcggttaacgtgattggttataccgacagcacgggtggtcacgacctgaacatgcgtctctcccagcagcgtgcggattccgttgccagcgcgttgatcacccagggcgtggacgccagccgcatccgtactcagggccttggcccggctaacccaatcgccagcaacagcaccgcagaaggtaaggcgcaaaaccgccgtgtagaaattaccttaagcccgctgtaa

SEQ ID NO: 38911 - DNA, 2334 bp, Escherichia coli
ttggccaactcatcctcacgatattccgttctgactgccgcccactgggggcccatgctggttgaaactgacggcgaaaccgtgcttagctcgcgtggcgcgttaaccacaggaatggaaaactccttgcagagcgcggttcgcgaccaggttcacagcaatacgcgggtacgatttccaatggtgcgcaaaggctttcttgcgtcaccggaaaaaccgcaaggcattcgcgggcaggatgaatttgttcgtgtgagttgggatgaggcgctggagcttattcaccaacaacataaacgcattcgtgaggcttatggtccggcatcgatttttgctggttcctacggctggcgttcaaacggcgtgctgcataaggcctcgacattattacaacgctatatggcgctggcaggcggttataccgggcatctgggggattattcgaccggtgcagcacaggcgatcatgccgtatgtcgtggggggcagcgaagtttatcaacagcaaaccagttggcccctggtgctggaacatagcgatgtcgtggtgctgtggagtgctaatccactcaatacgctgaaaattgcgtggaatgcatccgatgagcaggggctttcttacttttccgcactgcgtgacagcgggaaaaagctgatctgcattgatccaatgcgatcggaaaccgtcgatttctttggcgataaaatggagtgggtggcaccgcacatgggcaccgatgttgcgctgatgctggggatcgcccatacgctggtggaaaatggttggcacgacgaagcgtttctggcgcgttgcaccaccggttatgccgtcttcgcctcttatttgctgggcgagagtgacggaatagccaaaaccgccgaatgggcggcagggatttgtggagttaacgcagagaaaatccgcgagctggcggctcttttccaccaaaacacgaccatgctgatggctggctggggaatgcagcgtcaacagtttggtgagcaaaaacactggatgatcgtcacgctggcggcaatgttggggcaaatcggcacacccggcggcggttttggtctttcttatcattttgccaatggtggtaaccccacgcggcgttctgcggtgctctcttccatgcagggcagcttgcctggcggcaccgatgcggtagataaaatccctgttgcccgcattgttgaagcactggaaaaccctggtggcgcatatcaacacaacggtatgaaccgacatttcccggatattcgttttatctggtgggcgggcggtgccaactttactcatcatcaggataccaatcgcctgatccgtgcctggcaaaaaccgaagctggtggtgatctctgaatgcttctggacggctgcggcgaaacacgcggatatcgttctgcctgcgactacctcttttgagcgtaatgatctcaccatgaccggtgattacagtaatcagcatctggtgccgatgaaacaagtggtgccgccacgttatgaagcgcgtaatgattttgatgtctttgccgagttgagtgaacgttgggagaagggcggctatgcgcggtttacggaaggaaaaagtgagctgcaatggctggaaacgttttataacgttgcccggcagcgcggggcaagccagcaggttgaattgtcgccatttgctgagttctgggaagccaaccagttaattgagatgccggaaaacccggacagtgagcggtttattcgcttcgccgattttcgccgcgatccgcaggcgcatccattaaaaaccgccagcggtaagattgaaatattctcgcagcgtattgccgattatggttaccaggattgccctgggcatccgatgtggctggagccggatgagtggcagggcaatgccgaaccagaacagttgcaggtactttctgctcatccggcacatcgtctgcacagccagctgaattacagttctctgcgcgaattgtacgcggtggcaaatcgtgagcctgtcaccattcatcctgacgatgcccaggcgcgcggcatacaagatggcgatattgttcggttgtggaacgcacgcgggcaaattcttgccggagcggtcattagcgagggaattaaacctggcgtgatttgtattcatgaaggggcatggccggatctggatttaaccgctgacggtatttgtaaaaacggcgcggtgaacgttctgaccaaagatctccccagctcgcggctggggaatggctgtgcgggtaatacggcactggcatggctggaaaaatacaacggtccggaactgacacttacagcgtttgaaccaccggccagctcataa

SEQ ID NO: 38912 - DNA, 441 bp, Escherichia coli
atgattcgggaagcgcaacgttcagaactccccgcgatcctcgaactgtggctggaaagtacaacctgggggcatccctttataaaagcgaattactggcgtgattgcattccgctggtgcgggatgcctatcttgccaacgcgcaaaactgggtctgggaagaagacggtaagcttctcggttttgtcagcattatggaaggccgatttctggctgcaatgtttgtcgcaccgaaggccgtcagacgcggtattggtaaggcgctaatgcagtatgtgcagcagcgccatccccatctgatgctggaggtttatcaaaaaaatcaaccggcgatagatttttaccatgcgcagggttttcacattgtcgactgcgcatggcaggatgaaacccaactacccacctggattatgagctggccggtggttcaaacgctgtaa

SEQ ID NO: 38913 - DNA, 564 bp, Escherichia coli
atggaacgttgcggctgggtgagtcaggacccgctttatattgcctaccatgataatgagtggggcgtgcctgaaactgacagtaaaaaactgttcgaaatgatctgccttgaagggcagcaggctggattatcgtggatcaccgtcctcaaaaaacgcgaaaactatcgcgccagctttcatcagttcgatccggtgaaggtggctgcaatgcaggaagaggatgtcgaaagactggtacaggacgccgggattatccgccatcgcgggaaaattcaggcaattattggtaatgcgcgggcgtacctgcaaatggaaaagaacggcgaaccgtttgccgactttgtctggtcgtttgtcaatcatcaaccacaggtgacacaagccacaacgttgagcgaaatccctacatctacgcccgcctccgacgctctatctaaagccctgaaaaagcgtggttttaagtttgttggtaccacaatctgttactcctttatgcaggcatgtgggctggtgaatgatcatgtggttggctgttgttgctatccgggaaataaaccatga

SEQ ID NO: 38914 - DNA, 699 bp, Escherichia coli
atgatcataaaaaaaagcggtggtcgctggcagctaagcctgctggcgagtgtggtaatcagtgccttttttctcaacacagcttacgcctggcaacaagaatatatcgttgatacgcaacccggacattccacagagcgttacacctgggatagtgatcaccaacctgattacaacgatattttgtcgcaacgtattcaaagtagccaaagggcgctgggactggaagtcaatctggcggaagaaactcctgtggatgtgaccagcagtatgagtatgggctggaattttcctttatatgagcaggttacaaccggcccggtcgcggcattacattacgatggcacaaccacctcgatgtataacgagtttggcgacagtactaccacgctggccgatccgttatggcatgccagcgtgagtaccttaggctggcgtgttgactcccggcttggcgatctccgaccctgggcgcaaatcagctataaccagcaatttggcgagaatatctggaaggcgcaatcaggcctgagccggatgacggcgacaaaccagaacggcaactggctggatgtcaccgtaggcgctgatatgttgctcaatcaaaatattgctgcctatgctgcgctatctcaggcagaaaataccactaacaatagcgactatctgtatacgatgggggttagtgccagattttaa

SEQ ID NO: 38915 - DNA, 1209 bp, Escherichia coli
atgacaccttcaaattatcagcgtacccgctggttgacactcatcggtactatcattacccagtttgcgctggggtcggtttatacctggagcctgtttaacggcgcgctttctgccaagctggatgcgccggtaagccaggtcgctttctctttcggcttgttaagtctggggctggcaatttcatcttctgttgcggggaaattacaggaacgttttggcgttaaacgcgtcactatggcttccggcattttgctgggattaggcttcttcctgacagcgcattctgacaacctgatgatgctgtggttaagcgccggtgtgctggtcggtctggcggatggcgcgggttacctgctgacgctctctaactgcgtgaagtggtttccggagcgtaaaggtctgatctccgcgttcgctatcggttcttatggtctgggtagcctgggtttcaaatttatcgacacgcagctgctggaaacggtgggtctggaaaaaacatttgtgatttggggagcgattgcgctggtgatgattgttttcggcgcaacgttaatgaaagacgcaccaaaacaggaagtgaaaaccagcaatggtgtcgtggagaaagattacacgctggcagagtcgatgcgtaaaccgcagtactggatgttagcggtaatgttcctgactgcctgcatgagcggcctgtacgtgattggggtagcgaaagatatcgcccaaagtctggcacaccttgatgtggtttccgcagccaatgcagtcactgttatttccatcgccaacctttcaggtcgtctggttctggggatactgtctgacaaaatcgcccgaatccgtgttatcaccattggtcaggtgatttcgctggtgggtatggcggccctgctgtttgcaccattgaatgcagtgacgttctttgcagcgattgcctgcgtggcgtttaactttggcggcactatcacggtgttcccgtcactggtcagtgagttcttcggcctcaataacctggcgaaaaactacggtgtgatttatctcggtttcggtatcggcagcatttgtgggtcgattatcgcctcactgtttggcggcttctatgtgaccttctacgtgattttcgccctgctgattctgtcactggcgctctctacgacgattcgtcagccagagcagaaaatgttgcgtgaggcgcatggctccctttaa

SEQ ID NO: 38916 - DNA, 1692 bp, Escherichia coli
atgagatacatcaaatcgattacacagcagaagctgagctttttgcttgcaatctatattggcctttttatgaatggcgcggttttttaccgccgcttcggcagctatgcgcacgattttaccgtctggaaaggcatttctgctgttgttgaactggccgccaccgtactggtgaccttctttttactacgtcttctttcgctgtttggccgccgcagttggcgtattctggcatcgctggtggtgctcttttccgccggtgccagctattacatgaccttccttaatgtggtcattggttatggcatcatcgcttccgtcatgaccaccgatatcgacctgtcaaaagaagttgttggtctgaactttattctctggttaatcgccgttagtgcattgcctcttatccttatctggaataaccgctgtcgctacaccttgctccgacaactgcgaaccccagggcagcgtattcgcagcctggcggtcgtcgtactggcgggtattatggtttgggcaccgattcgtttgctggatatccagcagaagaaagtggagagggcgaccggcgttgatttgccgagttatggcggtgtcgtagcgaactcttatctgccatcaaactggctttctgcgttggggctgtatgcctgggcgcgggtcgatgaatcttccgataataattcattgcttaatccggcgaagaaattcacttatcaggcaccgcaaaacgttgatgacacttatgtcgtgtttatcattggtgaaaccacgcgttgggatcatatgggcattttcggctatgaacgcaataccacaccgaaacttgctcaggagaaaaatctggcggcgttccgtggttactcctgtgatactgcaaccaaactctcactgcgttgcatgtttgtacgtcagggtggagcagaagataatccgcagcgcacattaaaagaacagaacattttcgcggtattgaagcagttaggattcagttctgatctctacgctatgcaaagcgaaatgtggttctacagcaatacgatggcggacaacattgcttatcgtgagcagattggtgcggagccacgtaaccgtggcaagccggtagatgatatgttgctggtagacgaaatgcagcaatcgctggggcgcaacccggatggtaagcatctgatcattctgcataccaaaggctcacactttaactacacccagcgttacccgcgcagctttgcgcagtggaagccggaatgtattggtgttgatagcggctgtaccaaagcgcagatgatcaactcatacgacaactcggtgacctatgtggatcactttatctccagcgtgattgatcaggttcgcgataagaaagcgattgtgttctacgcagctgaccacggtgagtcaattaatgaacgcgagcacctgcacggcacgccgcgtgaactggcaccgccggagcagttccgcgtgccgatgatggtctggatgtcagataaatatctggaaaatccggccaatgcgcaggcatttgcgcagctgaaaaaagaagccgacatgaaagtgccacgccgtcatgtagagctgtacgacaccatcatgggttgtcttggctatacttcaccggatggtggaattaacgaaaacaacaactggtgccacatcccgcaggcaagagaggcggcggctaactaa

SEQ ID NO: 38917 - DNA, 1608 bp, Escherichia coli
atgcgtatttccttgaaaaagtcagggatgctgaagcttggtctcagcctggtggctatgaccgtcgcagcaagtgttcaggctaaaactctggtttattgctcagaaggatctccggaagggtttaacccgcagttgtttacctccggtactacctatgacgcctcttccgtgccgctttataaccgcctggttgaatttaaaatcggcaccaccgaagtgattccgggcctcgctgaaaagtgggaagtcagcgaagacggaaaaacctataccttccatctgcgtaaaggtgtgaagtggcacgacaacaaagaattcaaaccgacgcgcgaactgaacgccgatgacgtggtgttctcgttcgatcgtcagaaaaacgcgcaaaacccgtaccataaagtctctggcggcagctacgaatacttcgaaggcatgggcttgccggagctgatcagcgaagtgaaaaaggtggacgacaacaccgttcagtttgtgctgactcgaccggaagcgccgttcctcgctgacctggcaatggacttcgcctctattctgtcaaaagaatatgctgacgcgatgatgaaagccggtacaccggaaaaactggacctcaacccaatcggtaccggtccgttccagttacagcagtatcaaaaagattcccgtatccgctacaaagcgtttgatggctactggggcaccaaaccgcagatcgatacgctggttttctctattacccctgatgcttccgtgcgttacgcgaaattgcagaagaatgaatgccaggtgatgccgtacccgaacccggcagatatcgctcgcatgaagcaggataaatccatcaacctgatggaaatgccggggctgaacgtcggctatctttcatataacgtgcagaaaaaaccactcgatgatgtgaaagttcgccaggctctgacctacgcggtgaacaaagacgcgatcatcaaagcggtttatcagggcgcgggcgtggcagcgaaaaacctgatcccgccaaccatgtggggctataacgacgacgttcaggactacacctacgatcccgaaaaagcgaaagccttgctgaaagaagcgggcctggaaaaaggcttctccatcgacctgtgggcaatgccggtacaacgtccgtataacccgaacgctcgccgcatggcggagatgattcaggcagactgggcgaaagtcggcgtgcaggccaaaattgtcacctacgaatggggtgagtacctcaagcgtgcgaaagatggcgagcaccagacggtaatgatgggctggactggcgataatggggatccggataacttcttcgccaccctgttcagctgcgccgcctctgaacaaggctccaactactcaaaatggtgctacaaaccgtttgaagatctgattcaaccggcgcgtgctaccgacgaccataacaaacgcgttgaactgtacaagcaagcgcaggtggtgatgcacgatcaggctccggcactgatcatcgctcactccaccgtgtttgaaccggtacgcaaagaagttaaaggctatgtggttgatccattaggcaaacatcacttcgaaaacgtctctatcgaataa

SEQ ID NO: 38918 - DNA, 1020 bp, Escherichia coli
atgttgcagtttattctccgacgtttgggactcgtcatccccacgtttatcggtattacccttctcacatttgcctttgtccacatgatcccgggcgatccggtgatgatcatggcgggcgaacgtgggatctccccagagcgtcacgcgcagctgctggctgaactcggcttagataaaccgatgtggcagcagtatctccattacatttggggcgtaatgcacggcgatttaggcatttcgatgaaaagccgcatcccggtatgggaagagttcgtgccgcgctttcaggccacgctggaacttggcgtctgcgcgatgatttttgctacggcagtcggtattccggttggtgtgctggctgcggttaaacgcggttccattttcgatcacacggcggttggcctggcgctgacaggttattcaatgcctatcttctggtggggcatgatgctgatcatgctggtttcggtgcactggaacctgacgcccgtctccggtcgcgtgagcgacatggtgttcctcgatgattccaatccgttaaccggttttatgctaatcgacaccgccatctggggtgaagacggtaactttatcgatgccgtcgcccatatgatcctgcccgccattgtgctgggtactatcccgctggcggtcattgtacgtatgacacgctcctcgatgctggaagtgctgggtgaagattatatccgcaccgcgcgcgccaaagggttgacccgcatgcgggtgattatcgtccatgcgctgcgtaacgcgatgctgccggtagtgaccgttatcggcctccaggtgggaacattgctggcgggggcgattctgaccgaaaccatcttctcgtggcccggtctggggcgctggttgattgacgcactgcaacgccgcgactatccggtagtgcagggcggcgtattgctggtggcgacgatgattatcctcgtcaacttgctggtcgatctgctgtacggcgtggtgaacccgcgtattcgtcataagaagtaa

SEQ ID NO: 38919 - DNA, 903 bp, Escherichia coli
atgtcacaggttactgaaaataaagtgattagcgcaccggtgccgatgaccccgttacaggagttctggcactattttaaacgcaacaaaggcgcggtcgtcgggctggtttacgtcgtcatcgtgctgtttatcgcgatctttgccaactggattgcaccctataacccggcggaacagttccgcgatgcactgctcgccccgccagcctggcaggaaggcggcagcatggcgcacttgctgggcaccgatgacgtaggccgtgatgtgctgtcgcgtctgatgtacggtgcgcgattgtcactgctggttggctgtctggtagttgtgttatcgctgattatgggcgttattctcggcctgatcgccggttacttcggaggcctggtcgataacatcatcatgcgcgtggtcgatatcatgctggcgctgccaagtttgctgttggcactggtgctggtggcaattttcggcccgtcgattggtaacgccgcgctggcattgaccttcgttgccttgccgcactatgtgcgcttaacccgcgccgccgtgctggtggaggtgaatcgcgattacgttaccgcgtctcgcgtggcaggtgccggggcgatgcgtcagatgtttattaacatcttcccgaactgccttgcgcctctgattgttcaggcgtcgctcggtttctctaacgccattctcgatatggctgctcttggtttcctcggcatgggggcgcagccgccaacgccggagtggggcaccatgctctccgacgtgttgcagttcgcgcaaagcgcctggtgggtcgtgaccttcccgggtctggcgatcctgctgacggtgctggcatttaacctgatgggtgacggtctgcgtgacgcgctcgatcccaaactgaagcagtaa

SEQ ID NO: 38920 - DNA, 984 bp, Escherichia coli
atggcgttattaaatgtagataaattatcggtgcatttcggcgacgaaagcgcaccgttccgcgccgtagaccgcatcagctacagcgtaaaacagggcgaagtggtcgggattgtgggtgagtccggctctggtaaatcggtcagttcgctggcgattatggggctgattgattatccgggccgcgtaatggcggaaaagctggagtttaacggtcaggatttacagcgtatctcagaaaaagagcgccgcaacctggtgggtgccgaagtggcgatgatcttccaggacccgatgaccagccttaacccgtgctacaccgtgggtttccagattatggaagcgattaaggtgcatcagggcggcaacaaaagtacccgccgtcagcgggcgattgacctgctgaatcaggtcggtattcccgatccggcatcgcgtctggatgtttacccgcatcagctttccggcggcatgagccagcgcgtgatgatcgccatggcgattgcctgtcgaccaaaactgctgattgccgatgagccgaccactgcgctggacgtgaccattcaggcgcaaatcatcgaactgttgctggagctacagcagaaagagaacatggcgctggtgttgattacccatgacctggcgctggtggcggaagcggcacataaaatcatcgtgatgtatgcaggccaggtggtggaaacgggcgatgcccacgccatcttccatgcgccgcgtcatccatatactcaggcattgctgcgtgcgctgccggaatttgctcaggacaaagaacgtctggcgtcgttgccaggtgttgttcccggcaagtatgaccgcccgaacggctgcctgcttaacccgcgctgcccctatgccactgacagatgtcgcgctgaagaaccggcgctgaatatgctctctgacgggcgtcagtccaaatgccattacccacttgatgatgccgggaggccgacactatga

SEQ ID NO: 38921 - DNA, 1005 bp, Escherichia coli
atgagtacgcatgaggccacctcgcaacaaccgctgttgcaggctatcgacctgaaaaaacattatccggtgaagaaaggtatgttcgcgccggaacgtctggtgaaggcgctggacggcgtttcgtttaaccttgaacgtggcaaaacgctggcagtagtaggtgaatctggctgcggtaaatcgaccctcggtcggttgctgacgatgatcgaaatgcccaccggtggtgagctgtattaccaggggcaggatctgctcaagcacgatccgcaggcgcagaagctgcgtcggcagaaaatccagattgtcttccagaacccttacggttcgctgaatccacgtaaaaaagtcgggcaaattcttgaagagccgctgcttattaataccagcttaagcaaagaacagcgtcgggaaaaagccctgtcgatgatggcgaaagtcggcctgaaaaccgaacattatgaccgctatccgcatatgttctccggcggtcagcgtcagcgtatcgccattgcccgtggtctgatgctcgacccggatgtggtgattgccgatgaaccggtttccgcgctggacgtttcagtgcgtgcgcaggtgctgaatctgatgatggatttgcagcaggagttggggctgtcttatgtctttatctcgcacgacctgtcagtggttgagcacattgccgatgaagtgatggtgatgtacctgggccgctgcgtggagaagggaacgaaggaccaaatcttcaataacccgcgtcatccgtacactcaggcgctactctccgcgacgccgcgcctgaacccggacgatcgccgcgagcgcatcaagctcaccggtgaactgccaagcccgctcaatccaccgccgggctgcgcgtttaacgcccgctgtcgtcggcgcttcggcccctgcactcagttgcagccgcagctaaaagactacggcggtcaactggtagcttgttttgctgttgatcaggatgaaaatccgcagcgttaa

SEQ ID NO: 38922 - DNA, 1272 bp, Escherichia coli
atgcagcacaacacactaccgaaacacgatcagaaattgccgtttacacgctacgacttcggctgggttttattatgcataggcatggcgattggtgccggaaccgtgctgatgccagtacaaattggcttgaagggaatttgggtatttattaccgcagcgatcattgcttatcctgccacctgggtagtgcaggacatttatttaaaaaccctttctgaaagcgattcctgtaatgactacaccgatattatcagtcattacctggggaagaactggggaattttcctcggggttatctactttttgatgattatccacgggatttttatctactctctctccgtggttttcgacagcgcctcgtacctgaaaaccttcggtttaaccgatgccgatctttcacaatctctactttataaagtcgccattttcgccgtactggtggcaattgcgtctggtggtgaacgattactgtttaagatttccgggccaatggtggtggtcaaagtagggattatcgtcgtgttcggttttgcgatgatcccgcactggaatttcaccaatataaccgccttcccgcaagcctccgtctttttccgcgatgtcctgcttaccattccattttgcttcttttctgcagtatttattcaggtacttaacccaatgaatattgcctatcgtaaacgggaagcagataaagtactggcaacccggctcgcgctgcgtacccaccgaattagttatatcacgctcatcgcggtgatcctgttttttgccttttcgtttactttctcaattagccacgaagaagccgtttctgcctttgaacaaaatatctcggcactggcactggccgcgcaggtgatccctgggcatatcattcatatcacctctacggtgctgaatatctttgccgtactgaccgcattctttggcatttatctcggtttccacgaggctattaaaggcattattctcaatctgttaagccgaattattgataccaagaaaattaactcacgcatgctgactctggcgatctgcgcttttatcgtcattacgttgacgatttgggtttcgtttcgtgtatcggtgctggtgttctttcagttgggaagcccgttatatggcattgtgtcgtgcctcattccatttttcctgatctataaagtcgcacaactggaaaaacttcgcgggtttaaagcctggctgattctgctgtacggcattttgttatgcttgtcgccactgttgaagcttattgagtaa

SEQ ID NO: 38923 - DNA, 1287 bp, Escherichia coli
atgaagatagcgacgataaaaactgggcttgcttcactggcgatgctgccgggactggtaatggctgcacctgcggtggccgataaagccgacaatgcgtttatgatgatctgtactgcgctggtgctgtttatgactattccggggattgccctgttttacggtgggttgattcgcggcaaaaacgtgctgtcgatgctgacgcaggtgacggtgacgtttgcactggtctgtattctctgggtggtttacggttactcgctggcgtttggtgagggcaacaacttcttcggcaacattaactggctgatgctgaaaaacatcgaactgacggcggtgatgggcagcatttatcagtatatccacgtagcgtttcagggatcgtttgcctgcattaccgtaggcttgatagttggagcactggcggaacgaatccgcttctcagctgtgttgattttcgtggtggtatggctgacgctctcctacattccgattgcgcatatggtctggggcggcggtttgctggcttctcacggtgcactggatttcgcgggtggcaccgtggtgcacattaacgccgcaatcgccggtctggtgggcgcatatctgataggcaaacgcgtgggcttcggcaaagaggcgtttaaaccgcacaacctgccgatggtcttcaccgggactgccattctctatatcggttggtttggctttaacgccgggtcagcgggcacggcgaatgaaatcgcagcactggcatttgtgaatactgtggtcgcaacggcggcggcaattcttggctggatcttcggtgaatgggcgctgcgtggtaagccttcactgctgggagcgtgttcaggcgcgattgccggtctggtcggcgtgacgccagcctgtggctacattggggttggcggcgcgttgattatcggcgtggtagctggtctggcgggcttgtggggcgttaccatgctcaaacgcttgctgcgggtggatgatccctgcgatgtcttcggtgtgcacggcgtttgtggcattgtcggctgtatcatgaccgggatttttgccgccagttcgctgggtggcgtgggcttcgctgaaggtgtgacgatgggccatcagttgctggtacagctggaaagcatcgccattacgatcgtctggtccggtgtggtggcatttattggctacaaactggcggatctgacggttggcctgcgtgtgccggaagaacaagagcgagaagggctggacgtcaacagccacggcgagaatgcctataacgcgtaa

SEQ ID NO: 38924 - DNA, 324 bp, Escherichia coli
atgcaactggaagaagtagctaaagctctaaaagaactgggtcacccgacccgtttgttcatattcaaacatcttgtaaaagctggagaacaaggtttacctgtaggtgaattgcaaaagcagcttggcattccttcatcaacgttaagtcatcatatttcagccctggtatcagtaggactcgtcacacaaaaccgggagagtcgaacgctcatgtgcgtctctcaatatgaaatactggaagctatcatcgaattcttacgtgaagagtgctgtgtaaacagtaaaacagatgttgcggaacccgctggcaaaaatgggtaa

SEQ ID NO: 38925 - DNA, 1080 bp, Escherichia coli
atgaatagttggattcctatgttgcaagatgccgcagagatgtttgtttttctggctgttgagctttcattgctgtttattgtcattagtgccggtgtgagcctgataaggcaaaaagtcccggatcataaaattcagcagatgatgggggcgagaaaaggtaaggggtatctgttggcctcgttgctgggagccgttacccctttctgtagttgctcaacaattccaatgttgcgaggattgttgtctgcgaaagcggggtttggtccgacactcacttttttgtttgtttcaccgttgcttaatcccattatcgtgggactaatgtgggttacctttggctggaaagtaactttgctgtatgcgatcatcgctgccggtgtttcagttctttccagtattatactggattatttagggtttgaacgtcatattgttgaatacaaaaattcagtatcaggtagttgcgccaccaagtgcggtgattctgaagcttcggtaaaaacgaattgctgtacttcatcagcaaaaaccataattaacttaaagacagtaaagaaagagcaaaatatatcggcgtgttgtccctcaattctatcagaaaaatcttctgaaagttgttgcagcagcgagagtcagggcaacagaaatctcacaatgaatgccacctctggtctaataaaattagcaatgaaagatgccttacaacagtttaaggatgttctgccttatcttttgttagctatattaataggttcatttatttatggttttatcccttcagagtggattgcagctcatgccggtgcagataatccattagccataccgctcagtgctgttgttggtattccgctgtatattcgtgctgaggccgtaataccacttgcatcagttctgatgactaaaggtatgggcctcggagctttaatggccttgataatcggtagtgctggagcgagtctgacagaagtaatattgcttaaatcaatgttcagaatgcccatgataatcgcatttctgacggttatcttaggtatggcaatccttatgggatatttaacgcaatttttgttttaa

SEQ ID NO: 38926 - DNA, 843 bp, Escherichia coli
atgaaagaaaaggtagttgttgataaagcgatttcactctataccgaatcattcggcgacccggcccatgaacccattattctgatcatgggggcaatgtcgtctgcggtgtggtggcctgatgagttttgttcccaacttgccaaaatgggtcgctatgtgatccggtacgaccaccgtgataccgggaaatcaacaagctatgagccaggtcaggctccatattccgttgaagaattagcagatgatgtggttcgcgtcattgatggttatggtctggaagctgctcatttagtcggcatgtctttggggggatttctttcccagcttgtagctctcaagtatccgaaacgtgtgaagagcttgacgctgattgcttcagaacggcttgcagatgcagatccggatatgcccgcttttgatcctgccatcattgagtatcaccaacgggcggaatcgctggattggtctgatagagatgctgtcgtcgcgtatcaggtcggagcgtggcgaatcaactcaggtactgcgcatgcttttgacgctgagaagatacaaaacatcgctgagttaaattttgatcgcactccgaatatcctgacaacattcaaccacactactttaggtggtggcgagagatggctcgggagattaaatgagatagctgtaccaactttgatcattcacggcacggaggatcctgtacttccttatgtgcatgggttggcactgaaagatgcgattcgtggttcaaaaatgctgacactcgaaggcacgggacatgagttgcatcatgaagactggccgaggattatccaggcgattaaggggcaaacgtcatag

SEQ ID NO: 38927 - DNA, 609 bp, Escherichia coli
atgtctctcgcactctttgacttcgatggcacaattaccactcgcgagacgatgccggattttgtgcggcggtccgtgagccgacgtcgactgcttgtgggacaactgcttctggcgccgctcgtgcttgggtataagattgggatcttgtctggcaccctgatccgtcgcgtcatcgttcgcttcgcttacagcggcatcccggcctcggtcctggaggcccaaggtcgtgacttcgctcagagctacctgcccaataccctccgcggcgaggcaatgcagcgcatcgcatggcacaaagcgcaggggcacaaggttgtcgttgtttccggcggacttgaggcttacttggagccgtggtgcgactcgcacggcgttgagctcatctgttcttccttgcaacagtcggacggaatcctaacgggccgctatgaagggcggcagtgcgtcttgacggagaaggctcgcttggtccgtgagcgctacgacctggcgacatatccgaccatctacgcgtacggagacacgccggaggacctggatatgctggccattgctactaagcagtactatcagtggcaagaggttggcgtcgcaggtgggcgctaa

SEQ ID NO: 38928 - DNA, 333 bp, Escherichia coli
gtgaagaactggctctttctggctattgcaatatttggtgaggtcgtcgcaacttccgcactgaagtccagccatggattcaccaagttagttccttctgttgtagttgtggctggctacgggcttgcgttctatttcctctctctcgcactcaagtccatcccggtcggcattgcttatgctgtttgggctggcctcggcatcgtacttgtggcagctatcgcttggatcttccatggccagaaactagacttgtgggcgttcgttggcatgggacttatcgttagtggcgtcgccgttctaaatctgctatccaaggtcagcgcacattga

SEQ ID NO: 38929 - DNA, 576 bp, Escherichia coli
atgcgcagtgagcgtgctctcaagctcgccatcgccgaaatgtatgtcaaaggagtaagtacccgcagggtctcggatatcgtcgaaattctttgtggcaccgaagtcagctcgtcccaggtcagcaggctggcaaaggagctcgatgaagagattacgtcttggaaggcgcagcctgtcggacagattcaatacttggtacttgatgcgacctatgaatcggttcgcgtcggttcccatgtggtcaagcaggcgcttctagtggctattggcgttgattacagcgggaatcggcatattcttgacgccgaagtcgcgaacagtgaggcagaggtaaactggcgttcctttctcgagggtctcgtacgacgagggatgcacggcctgcgaatgatcaccagtgatgaccactcaggactgcgcgcggcaatcgatgctgtcttccctggaattctgtggcaacgctgccagtttcatctgcagcagaatgcccactcctacgtcacgaaaaaagatgagatcccgctgatagccgctgatattcggaaggtgttcaatcggaatatgtcaagatag

SEQ ID NO: 38930 - DNA, 792 bp, Escherichia coli
atgagcaagatttttggaatcgtaaatataaccaccgatagtttttccgatggaggactttatttagatacagataaggcaattgagcatgctctgcatttggttgaagatggagcagatgtgattgatttgggagccgcttccagtaatcctgatacaactgaagtgggcgttgtggaagaaatcaaaagactcaaacctgtcattaaggctttaaaagaaaaaggcatttctatttctgttgatacatttaaacctgaggttcagagtttttgcatagaacaaaaggttgattttattaatgatattcaaggttttccttatcctgagatttattcaggcttggcaaagtcagattgcaaacttgtgttgatgcactccgttcagcgaattggtgcagctactaaagttgaaacgaatccggaagaggtttttacttccatgatggaattttttaaagaaagaattgctgctttagttgaggctggtgtaaagcgtgaacgaattattcttgatccgggtatgggcttctttttaggctctaatccagaaacatctattcttgttttgaagcgtttccctgaaattcaagaagcttttaatttgcaagtaatgattgcagtgtcacggaaatcattcttaggtaaaataactggaaccgatgtgaaatctcgtttagcaccaactcttgcagcagaaatgtatgcatacaaaaaaggtgcagattatctccgcacccatgatgttaagtctttatcagatgccttgaaaatatccaaagccctaggttag

SEQ ID NO: 38931 - DNA, 249 bp, Escherichia coli
atggcttcgtgggggagttatgtgtttgagctttgtcgcattaacgcgaatcaggggttgacggcagaaatagactggaattacacttcttggagtcggcgttgccggaaaattctgattggattagttgttcggggtgcgaaaacagtcgtagttcggggaaaaaaccgaattttgacccaaaaccgcgaaaaactcgaaatgacagttcctatcagttttcataatgaattaaaacaaaaaaattag

SEQ ID NO: 38932 - DNA, 246 bp, Escherichia coli
atgaaaattgaaattatggaatataacccggattggacaaagaattttgaagaagagaaaataaaattgctccattttttcggttctcatgccgtagccattgaacatatcggaagcacggcgatacccaatcaacgggcgaaaccggttatagatatatttattggcgtttcgccttttgctgaactaccttttatcagcgcatttttaatgcaaaggagtatcaccacactccgacagatatga

SEQ ID NO: 38933 - DNA, 864 bp, Escherichia coli
atgatacctaatagcgaaaataaaagagtatggtttattaccggagcaagcaaggggcttggctatgcttttacatgcgccgccttgaaagccggggataaagttgttgcagttgcaaggactatcgataatttggcgaagctagaagaaacatatcaagagagcttactgccattaaacctcgatgttacagatagggaggctgttttttctacggttgaaacagcagttaaacatttcggtaggcttgatattgttgttaataatgcgggtatcatgactatgggtatgattgaagaactaaacgaatccgatgctcggaaactaatggacacaaacttttttggagctctttgggtttgtcaggcagtgatgccctatttgaggtcgcagcgttctggacatatcatacagattacaagcattggcgctattatctcgggtccgatgtctggtatttacagtgcaagtaaatttgcgctggaaggaatgagtgaagccttagcaaaagaagcggaacatttcggagtgaaactcactatggtggaaccaggaggatattggacagatttatacacttcgatgagttacagcaatccattagattcatacggtacactgcgcgatgagctggcgaaacagtattccgaagattcggtcgatagtgatccttccttggcagcggaagcccttatgaaattagtagccagcaataatccgcctttgaggcttatccttggcagcatggtatacgatttggcgatggataccttaaaagcacggatggctacctgggaagaatgggaagctgttagccgtgcatcagaaaaggctattcctgcaccggagagatatggagtataa

SEQ ID NO: 38934 - DNA, 498 bp, Escherichia coli
gtgccgttccaggtacaccgtgttccacagcacgatagccgccgtcaccaggttgaggccgctggcccggtagcgctgctgctcgaagctccgatccctgatttccccaaggcggttgaagaacaccgccctggccagcgagttgcgcgcctcacctttgttcaggccggcatgcacgcggcggcgcagttcaacactttgcagccagtccaggatgaacagcgtgcgctcgatccggcccagctcgcgcagggccacggccagtccgttctggcgcgggtagctgccgagcttgcgcagcatcagcgaggcggtgacggtgccctgcttgatcgagctggccaggcgcaggatgtcgtcccagtgggcacgcacgtgcttgatgttcagggtgccgccgatcagcgggcgcaacgtcgggtaggcttgcacgccctgcggcacgtacagcttggtttcgccgaggtcgcggatgcgcggcgcgaagcggaagcctag

SEQ ID NO: 38935 - DNA, 1191 bp, Escherichia coli
gtggtggcaagtgaactgcacggcgagcagccgcaggcggtgccgggacgcaggggttcaggtaccacgctgaataaccactttgcggtaataccggcagacagaacatggcggccacagccgttgctgaaaccgctggtggacggcccgcagagcgccgtcgtgacgggaccggcaggagaagaaatcttctgtgatgaacatggccgcgtgcgggtgaaatttaactgggaccgctataacccgtcaaaccaggacagttcatgctggatccgtgtggcacaggcgtgggcaggcaccggctttggcaacctggcgataccgcgtgtgggtcaggaagtcattgtggacttcctcaacggcgatccggaccagccgattattatggggcgtacctaccaccaggaaaaccgcacccccggcagcctgccgggaacaaagacgcagatgaccattcgttcgaaaacctataagggcagcgggtttaatgaactgaagtttgacgatgcgacagggaaagaacaggtctacatccacgcgcagaagaacatgaacaccgaggtgctgaataaccgcaccacggatgtgataaacaaccatgccgaaaaaataggtaacaaccaggcgatcaccgttaccaataaccagatccagaacattggcgttaatcagatacagacggttggtgtcaaccaggtggaaacggtaggcagcaaccagattgtcaaagtgggttcaaaccaggttgaaaaggtggggatcattcgtgcgctgacggtgggcgtggcttaccagacgacggtaggcggcatcatgaatacctcggtggcgttgttgcagtcctcacaggtagggctgcataaatcactgatggtgggaatgggctacagcgtcaatgtagggaataacgtcaccttctcggtgggcaagacgatgaaggaaaacaccggacaaacagcagtttattctgccggtgagcatctggaactctgctgcggtaaggcaaggttggtgctgacgaaggacggaagcatatttctcaatggtacgcacattcatctggaaggagagtcggatgtgaacggtgatgcgccggtgattaactggaactgtggtgccacacaacctgtaccggatgcgcctgtgccgaaagatttaccccccggaatgccggatatgcggcaattttga

SEQ ID NO: 38936 - DNA, 180 bp, Escherichia coli; identical to SEQ ID NO: 17883

SEQ ID NO: 38937 - DNA, 2682 bp, Escherichia coli
gtgaaaggttcagaatggaataaatgggatttgcatatccacagcccgatgacgtggcaggccaatggttactccagtcagtgtgatatagagcactatgtacatctacttagagagaagcaactttcccttatcgccgtgaccaactatttttatttccggcagaatgaactggaaacaatcagggaagaaattgcccgtcagggtcttaatatcaccgtgctgggaaatgtggaattccgccttgatcaacagaacaaggccggggattttattaatgtccatatccttttttcagataaggtgagcaccgaacgtattaacgaagccctagcccgtgttccactaaggttaacagacggcgacagaaaggccatttactgctgtgaaaagagcgtcacggaaagcggacatggtgtggataccattgtggtagacttcagtgcactgcttgggcatctcagttccgcattccgaccgttcaaggattacctagtggccgtctgtccgaacgggtatggcggctatcggcccgacgcaagtggtcgctctgcggcaatcgcaactgagatcgaccgtcagggacaaattattttcggcggaaagggcgatcgtgaattttttctgagaacaaaccgttatgacggtgcatccatcaaacccgtcttcctctgctccgatgcgcatcgagtggaggatatcggtagccgttatacttgggtaaaggcacttcctaccttcgaggggcttcgacaagcgttactggaacctgaagaccgtcttaggctcggagatgagtggctgactgaactcacgccaaaaacacatttcagtcagatcgatcttgaagggacgatttttgatggccaagaaatcagattcaagaagctgtccatcccccttaaccaggatatggttgcaattattggtggccgaggcacgggtaaaagcctgctgcttgatgctctccgttcccgctttgccggtaccgcaacacggggaagcgaacaacgtgaagtgaatgttcagtatctaagcattgaattagataaagccaatggtgagaagatgcgatttgatgccccttcagaagggtatgaatatctgcatgtgtctcagggtgaaatcaaaaagctctgccaggaaccggggctcatcagtgatgaaattaagaaaatgctgagactgacaccaattcatgaggcgggtgatacagttgcacaactggcagaaaacctcaacatctggcgtgcctggcgtgaattcagtttgtacaggaatgaacattcagagccggtgaatacacgcaagtttcagcaacagatcatccggggagcacaggaaaaaatagaggttctcacaagtgaccgcaataaagcattgattgagacatttcgtgaaaacagtcggcgtcagacattgctggttcagatgcgggataaattaacgggtgtacgtgctgacattacgacagccgaaaataacctaaatgccagcatagctgcaattaatgctagcgttacaactaaagaagcaatcccgctcgtagatctgtcagcacagacagaggctgttgcgtgtaggcttctatccattcaggagcaaacgacacagttcgggcgtgataacgacgaaattattggcactttccgcgagcagggactaggacaagacatcacagggttactggaaaaagtacatgaatatcagcgtcaaatggagcttgcagaaacgcatctgcatgaaatagagcgtcgagagagacagtaccagactgggctagaacaacgcgccaaggttgctgctgaattcatagatggattgctgtccagacagagtgtgattgatacggctttcgcatctcttaccacaaaaccacatctgacgcaggaccaacagaccctgataaaggacattcttacggatattcgcatttatggaaagccacactttgatataaaggccttttatgaagggatgctcagttgtctgaaccgaggacgattcagggcaagcggagagctgacctctgttgacaggcttcgacaggtgttcagagtcggcagtattgatgactttcgggcactgctagcaaataaacccatgctggttctgccagagttttcgaacagaaaagtgaccatcgaagagttcctctggtgtgatgaatactttaacagtcccggaccggattcactactcagttatctgtttagccctgagcagatccagcgctatctgaacgtcagggcggaatttgaatacaaaggcaaaacggtcgaaaaattgtcagccggccaacgaggaaccttctatgtctgccttaagctggcgacggacgccttcggatcaccgtttgtatttgatcagccagaagatgatctagacaatgacttcatcatgcacagtctggtacctctcttccgaaaaataaaacagtacaggcaagttattatcgtaacgcataacgctaaccttgtggtgaactgtgatgctgagcaggtcatcatcgccactaataatgatgagattattagttaccgtagcggagcactcgaatacggagatcatgatgcgccaaacagcatgcgcaaggcaatatgcgatgtacttgaagggggccatcaggcattcgaagctcgtgaacaaaaatatggaatgttgtggcttaaaaccatctaa

SEQ ID NO: 38938 - DNA, 3309 bp, Escherichia coli
atgacgcagtatggcggtagcattgttcagggttctgccggggtacgtattggtgcccccaccggcgtggcctgttcggtgtgccccggcggggtgacgtccggccatccggtcaatccgctgctcggtgcgaaggtccttcccggagaaaccgaccttgccctgcccggcccgctgccgttcatcctctcccgcacctacagcagttaccggacaaaaacgcccgcgccggtggggagcctcggccccggctggaaaatgcctgcggatatccgcttacagctgcgcgataacacactgatactcagtgataacggcggcagaagcctgtattttgagcacctgtttcccggtgaggacggttacagccgcagcgagtcactctggctggtgcgcggcggcgtggcgaaactggatgaaggtcaccggctggccgcactctggcaggcgctgccggaagagcttcgcctgagtccgcatcgttatctggcgacgaacagtccgcaggggccgtggtgggtactcggctggtgtgagcgggtgccggaggcggatgaggtgctgcctgcgccgctgccgccgtaccgggtactgaccgggctggtggaccgcttcgggcgcacacagacgttccaccgtgaggctggcggcgaaatcaccggcgtgacggatggtgccgggcgtcacttccggctggtactgaccacgcaggcgcagcgggcagaagaagcccggcagcaggcctcttccggcgggacggaaccgtccgcttttcctgataccctgccgggttacaccgaatatggccgggacaacggcatccgtctgtctgccgtgtggctgacgcacgacccggaatacccggagaatttacctgccgcgccgctggtgcgctatggctggacgccacgcggcgaactggcggcggtgtatgaccgcagcaatacacaggtgcgcagctttacttacgatgataaataccggggccggatggtggcgcaccgtcacacgggccggccggaaatccgttaccgttacgacagcgacgggcgggtgacagaacagctaaacccggcaggcttaagctacacgtatcagtatgagaaagaccgcatcaccatcaccgacagtatggaccgccgtgaagtgctgcacacgcagggcgaaggcgggctgaagcgggtggtgaaaaaggaacacgcggacggcagcgtcacgcagagtcagtttgatgcggtgggcaggcttaaggcacagacggatgccgcaggccggacgactgagtacagcccggatgtggtgacgggactcatcacgcgcatcaccacaccggatggcagggcatcggcattttactataaccaccacaaccagttaacgtcagccaccgggcctgacgggctggaaatacgccgggaatatgatgaatccggccgtctgattcaggaaaccgcacacaacggcgatatcacccgctaccgttatgataatccacacagtgacttaccctgcgcaacggaagatgccaccggcagccggaaaaccatgacatggagccgttacggtcagttgctgaccgtcactgactgttccggttatgtaacccgttatgaccatgaccgttttggtcaggtgacggcggtgcaccgcgaggaagggctgagtcagtaccgcgcatacgacagccgtggacagttaattgcggtgaaagacacgcagggccatgaaacgcggtatgaatacaacgccgccggtgacctgaccgccgtcattgccccggacggcagcagaaacgggacacagtacgatgcgtggggaaaggccatccgtaccacacagggcggtctgacgcgcagtatggaatacgatgctgccggacgggtcatccgcctgaccagtgaaaacggcagccacaccaccttccgttacgatgtactcgaccggctgatacaggaaaccggctttgacggccgcacacagcgttatcaccacgacctgaccggcaaacttatccgcagcgaggatgaggggctggtcacccactggcactatgacgaagcagaccgcatcacacagcgaacggtgaatggtgaaaccgcagaacagtggcggtacgacgaacgcggctggctgacacaaatcagccatctcagcgaaggccaccgggtgacggtgcattacgggtatgatgagaaaggccgcctgaccggtgagcgccagacggtgcatcacccgcagacggaagcactgctctggcagcatgaaaccagacatgcttacaacgcgcagggactggcgaaccgctgtataccggacagcgtgcccgccgtggaatggctgacctacggcagcggctggctgtcaggcatgaaactcggcgacacaccgctggtggatttcacccgcgaccgcctgcaccgggaaacgctgcgcagcttcggccgttatgaactcaccaccgcttacacccctgccgggcagttacagagccagcacctgaacagcctgcagtatgaccgcgattacacctggaacgacaacggcgaactcatccgcatcagcagcccgcgccagacccggagttacagctacagcgacaccggcaggctgaccggcgtccacaccacggcagcgaaccttgatatccgcatcccgtatgccacggacccggcgggcaaccgcctgcccgacccggagctgcacccggacagccccctcagcgcatggccggataaccgtatcgcccgtgacgcgcactatctttaccggtatgaccgtcacggcaggctgacggagaaaaccgacctcatcccggaaggggttatccgcacggatgatgagcggactcaccggtaccattacgacagccggcaccggctggtgcactacacgcggacacaatatgcagagccgctggtcgaaagtcgctatctttacgacctgctgggccgcagggtggcaaaacgggtatggcggcgtgaacgggacctgacgggctggatgtcgctgtcatggaaaccggaagtgccctggtacggctgggacggcgaccggctgaccacaatacagaacgacagaacccgcatccagacggtttatcagccggggagcttcacgccactcatcagagttgaaactgccaccggtgagctggcgaaaacgcagcgccgcagcctggcggatgcgcttcagcagtccggcggtgaagacggtggcagtgtggtgttcccgccggtgctggtgcagatgctcgaccggctggaaagtgaaatcctggctgaccgggtgagtgaggaaagccgccgctga

SEQ ID NO: 38939 - DNA, 1773 bp, Escherichia coli
atgaccatcaccacagacaccactcttttacacgacccgcgtcgtcaggcggcgctgctgtactggcaggggttttccgtgccgcagattgccgccatgttgcagatgaaacgcccgacggtgcagagctggaaacagcgcgacggctgggacagcgttgcccccatcagccgtgtcgaaatgagtctggaagcgcggctgacccagctcatcatcaaaccgcagaaaaccggcggtgacttcaaggaaattgacctgctgggacgccagattgaacgactggcacgggtcaaccgttacagccagaccggcaacgaggcagaccttaatccgaacgtcgctaaccgcaacaaaggcgggcgtcgcaaaccgaaaaagaattttttcagtgacgaggccatcgaaaagctggagcagattttctttgagcagtctttcgactatcagttgcactggtatcgcgccgggcttgagcaccgcatccgcgatatcctgaaatcccgccagattggcgcaacgttttatttttcccgcgaggcgctgctgcgcgccctgaaaaccggtcataaccagatttttctgtcggccagtaaaacgcaggcgtatgtgttccgcgaatacatcatcgcctttgcccgtctggttgacgttgacctgaccggtgacccgattgtcctgggcaataacggcgcaaaactgatttttctcggcaccaactccaacaccgcacagagccataacggcgacctgtacgtcgacgagattttctggatcccgaattttcaggtactgcgtaaggtggcatcaggtatggcctcacagagtcacctgcgctcgacctatttctccaccccgtccacgctggcgcacgacgcctacccgttctggtcgggtgaactgttcaaccggggacgcgccagcgccgccgaacgcgtggaaatcgacgtcagtcataacgcccttgccggtgggcttctctgtgcggacggccagtggcgacagattgtcaccattgaggacgccctgaaaggcggctgcacgctgttcgacattgagcagctcaaacgcgaaaacagcgccgacgattttaaaaacctgttcatgtgtgaatttgttgacgacaaggcatcggtgttcccgttcgaggagctgcaacgctgcatggtcgacacgctggaagaatgggaagactatgcaccgtttgccgccaatccgttcggctcccgcccggtatggattggttacgacccgtcacaccgtggcgacagcgccggatgcgtggtgctggcaccgccggtggtggccggtggcaaattcagaatacttgagcgtcaccagtggaaaggtatggactttgccacccaggctgaatccatccgcaaactcaccgaaaaatacaacgtcgaatacatcggaattgatgccaccggcctcggtgtcggcgtgttccagctcgtgcgctcgttctatcccgccgcgcgcgacatccgctacacgccggaaatgaaaaccgcaatggtgctcaaggccaaagacgttatccgccgtggctgtctggaatatgacgtcagcgccaccgacatcaccagctcgtttatggctatccgcaagaccatgaccagcagcggacgcagtgccacctatgaagccagccgcagcgaggaagccagccacgccgacctcgcctgggcgaccatgcacgccctgttaaatgagccactcaccgccggtatcagcaccccgctgacatccaccattctggagttttactga

SEQ ID NO: 38940 - DNA, 2268 bp, Escherichia coli
atgaatcatattccttccggcgtccggcattttaccgccagacagctcgggattcgtgatatcaccgttcttgcagaatacggtcagagggaaaatacccgccgtgagcatgcagcgctgatacgtcagcactatcagtatcgtgaatttgcctggccctggacatttcgccttacccgtcttttatatacccggagctggataagcaacgaacgtcctggcctgcttttcgatctggcgacagggtggcttatgcaacatcgtattattctccccggagccactacgctgacccggttgatttcagaggtaagggaaaaggcgacgttgcgcctgtggaacaaactggcactgataccgtcagccgaacagcgttcacagctggagatgctgctggggccaactgattgcagccgcctgtctttactggaatcactgaaaaagggccctgtgaccatcagtggtccggcgtttaatgaagcaattgaacgctggaaaactctgaacgattttggcctgcatgctgaaaacctgagtacactcccggctgtgcgcctgaaaaatctcgcacgttatgctggtatgacttcggtgttcaatattgccaggatgtcaccgcagaaaaggatggcggttctggttgcctttgtccttgcatgggaaacgctggcgctggatgatgcattggacgttctggacgccatgctggccgttatcatccgtgacgccagaaagattgggcagaaaaaacggctccgctcgctgaaggatctggataaatctgcattggcgctcgccagcgcatgttcgtacctgctgaaagaagaaacaccggacgaatcgattcgtgctgaggtgttcagctacatcccaaggcaaaagctggctgaaatcatcacgcttgtccgtgaaattgcccggccctcagacgataattttcatgaagaaatggtggagcagtacgggcgcgttcgtcgtttcctgccccatctgctgaataccgttaaattttcatccgcacctgccggggttaccactctgaatgcctgtgactacctcagccgggagttcagctcacggcggcagttttttgacgacgcaccaacggaaattatcagtcggtcatggaaacggctggtgattaacaaggaaaaacatatcacccgcaggggatacacgctctgctttctcagtaaactgcaggatagtctgaggcggagggatgtctacgttaccggcagtaaccggtggggagatcctcgtgcaagattactacagggtgctgactggcaggcaaaccggattaaggtttatcgttctttggggcacccgacagacccgcaggaagcaataaaatctctgggtcatcagcttgatagtcgttacagacaggttgctgcacgtctttgcgaaaatgaggctgtcgaactcgatgtttctggcccgaagccccggttgacaatttctcccctcgccagtcttgatgagccggacagtctgaaacgactgagcaaaatgatcagtgatctactccctccggtggatttaacggagttgctgctcgaaattaacgcccataccggatttgctgatgagtttttccatgctagtgaagccagtgccagagttgatgatctgcccgtcagcatcagcgccgtgctgatggctgaagcctgcaatatcggtctggaaccactgatcagatcaaatgttcctgcactgacccgacaccggctgaactggacaaaagcgaactatctgcgggctgaaactatcaccagcgctaatgccagactggttgattttcaggcaacgctgccactggcacagatatggggtggaggagaagtggcatctgcagatggaatgcgctttgttacgccagtcagaacaatcaatgccggaccgaaccgcaaatactttggtaataacagagggatcacctggtacaactttgtgtccgatcagtattccggctttcatggcatcgttataccggggacgctgagggactctatctttgtgctggaaggtcttctggaacaggagaccgggctgaatccaaccgaaattatgaccgatacagcaggtgccagcgaacttgtctttggccttttctggctgctgggataccagttttctccacgcctggctgatgccggtgcttcggttttctggcgaatggaccatgatgccgactatggcgtgctgaatgatattgccagagggcaatcagatccccgaaaaatagggcactgttgcaaatag

SEQ ID NO: 38941 - DNA, 180 bp, Escherichia coli
gtgcaccttgccgtcacgggtgactggccagacgaagcggccccgctccaggcgtttggtgaagaggcacagtccgtcactgtcagcccacaacacttttatctggtcaccccggcgtccgcggaagatgaacagatgcccggagaacgggtcatccttcaggacgttctgaacttttga

SEQ ID NO: 38942 - DNA, 642 bp, Escherichia coli
atgaattttacccggattgacctgaatacctggaatcgcagggaacattttgccctttatcgtcagcagattaaatgcggattcagcctgaccaccaaactcgatattaccgctttacgtactgcactggcgaaaaccggttataagttttatccgctgatgatttacctgatctcccgggctgttaatcagtttccggagttccggatggcaatgaaagataatgaactgatttactgggaacagtcagacccggtctttactgtctttcataaagaaaccgaaacattctccgcactgtcctgccgttattttccggatctcagtgagtttatggcgggttataacgcggtaacagcagaatatcagcatgataccaggttgtttccgcagggaaatttaccggagaatcacctgaatatatcatcgttaccctgggtgagttttgacggatttaatctgaatatcaccggaaatgatgattatttttccccggtttttacaatggcaaagtttcagcaggaaggtgaccgcgtactattacctgtttctgtacaggttcatcatgcagtctgtgatggttttcatgcagcaaggtttatcaatacacttcagctgatgtgtgataacatactgaaataa

SEQ ID NO: 38943 - DNA, 501 bp, Escherichia coli
atgcgcctgcaacagtgggccaccgaaaatattaaaaaactgctttatctcgcgggggatgacgcggtgattaattacgggaaaatgcggctggaatttttgcagaaagcactggcgcaggatacctccggtgacttctgctttcgtgtgctgcatccggaagtgtctggcccgccggatatgaaaaaggcttccgccgggtaccgtgactttattatcggtaacagagcgttgctggatctggtgaattcagccggtgaaggggctccggttgcgcattattccgctgatgaaattcagtcattattttcggcacaaatacaggggtcggtggataaatacggcgatagtttcctgacggatgatccgtatgtgctggcggaagacaagctgcaaacctgtcagatggaaattgatttaatggcggatgtgctgagagcaccgccccgtgaatccgcagaactgatccgctatgtatttgcggatgagtggccggaataa

SEQ ID NO: 38944 - DNA, 465 bp, Escherichia coli
atgccattccccaaaacaaccaacctctttatggcaggctaccgaaaagacccacctcttcttcccaggctaccggacaaccaacctaactttcacaggcaatccgaaaatattcatacgcgcgatacccacgacacgccattccccaaacagcgaagaaacaccagaatcactgaaacccccaacgaagcctgtaaccgcaaggattctctcaatcccaaaagacacgaaacagaacaatcacgggaaacgccattacccaacacacgaataactacaaaagcctttcacgcactccagacaaacacaataacgaaaggaatcgcccacctgccattactccatatacggagaagaacaatcaccaaaacgacgagaaccccccatagaagaaccaccgcaaaacgaacgaaaccacatacaccgacagataaaacaacacacccaattcaccaacagaaatag

SEQ ID NO: 38945 - DNA, 756 bp, Escherichia coli
atgctttacaaatatgttggaagtagcgtcccggaagacacaataaattatttaaagtattacttagaagatgggaaaattcgagcaactcgtccgaatgatttcaacgatcctgccgagtttaaagttaattttgattatgatgctgatatagacgccattaagaaaagattttttgagctttggcctaatcatcacaatgatgaatttgaacgctggttattgagtcaaacagaacatagtcgcagttttgataactatatgattagaacaacttttctgcagtgtcggggagttatttgtttgacaaaaagaccagataattatcttatgtggtcgcattatgcgcattctcactctggtttttgcatcggatttgatgatggttttataaatgcgtttgatgatggtttttttgttcgcggtgaggtcaaatattcctctgatgttccggttgtaaatttttataccgactcagataaagagattgcagcggctctttgcctaaataaaagcgatgtctggaaatatgaagaggaggttagaatcgtaaccgagaattgtggcgtgaaattatttgataaatccttaattaaggaaataacaataggttgtaaggctagcagtcaacttcaaaattatgttcatcaactatttgattcaggtatcgaaatctacaaaatgaagtgccctccaggatcgtataagctggaaaaaataagattagagaaagatactgattttcttggatactag

SEQ ID NO: 38946 - DNA, 1188 bp, Escherichia coli
atgattattttctgggataccgtcaaggaaaacgtagaggttataggtacgcttgctacttcacttgcctttttagccacagcatgggccgcttatgaggcaaggcatagtgcaaaggcggcaatgagagcgaccaggctgacggcggcttcgcttcttgaaatgaaaaaatcttcttttaaggaatggtacggcatattacttgaacagcataataaattacttgaggatgttaacaaaaccttactggatgatagtcagtacaatttgaaattgaatataaaagtcgtcaagggcgtttattactgtgcaacaaaaaaccctgtttatattaagtatgttaaccacattattttaattctaaattatgtagataaagacttctatctgccgtcatctgcggatagtgaaaagagatcttacatagaacaactgcgcaacagcattagtccaaaagtaagtctgctgattgctatttttggtcttaatgtcgacaatagcaaaacctacgacgcaaagaaactttatcgtctcctgaacaaatacaacttcttcgaaaatgaacttttctttgaagatgcaatatctaaagttcattacctggacacctatgccgctgatatattcaataaagaataccaaaaagacgtagagtcttatgttgatcgcatgattgttggtgattcggcctgtaataccaatgcgataaactgttatcataagcttacgtttgcagttctttggtcttacaacaacccctgccgacaacatttgctgcaaagatttaatgacctacctatgcatatgcgaaactacattgagctgaaaatggaaattgcagccgaggaagtggctaaattaaattctacgctgcgttattttgtcggctgggagcttgaaattgcagctaacaaagtgatagtgctcaaggatgaaaaacagataaagcggctaataaaactcaacgagaagcactctagacagaccgatatcgtgttaaccaatggctccaccattaaattcgctaatgagattagaaattatctgtctcgttatgcgttatataacgcctattttgaacttagctctaatcaacacaaagaaaaggtgattggcgaaattgtggttgaagttgaaaaaatggtcgataaattcaaagcagaacttgattcattcggttttaattaa

SEQ ID NO: 38947 - DNA, 609 bp, Escherichia coli
atgactactataaccgataagaaacagtatccaggcgagcaatatcttaatgagctgatcaccaacatagagtttgctgcaagggcaccagttgaagtcgtgagagcgatggcagcagagctacagaagcggcgcgaagctgatagtgcagaacctgtaagccaaacttgcaagttgcctcccagatcatccaacgaagttaacgacgcggcatggaaattacacaacatgttgacagaacatggccctctgaacgggcgtcagttcaataatctgaaaggttgcttctatgaggcatttaaggtcgcaatgcgcaactatccggttactcctgatggttggataagctgtagtgagcagatgcctgtaatcggcgagctaaattggagaactagttttcctttgctggttacgtgtgagatcggcgttatacctgcttattacggctttgtgagcgttaatggtgataggcattatggctttatggagagtcttaaatacggagacgataacggcaaccatcctcaaactaatgaatatggtctgattagcaatgtcacacactggatgccgctaccagaacctccgcaggagtcgaagagtgaataa

SEQ ID NO: 38948 - DNA, 462 bp, Escherichia coli; identical to SEQ ID NO: 13343

SEQ ID NO: 38949 - DNA, 387 bp, Escherichia coli
atgcggatcagtaacgtcgaatggcttaaaaagcgcatagccttcatcagaaagctgggagaaaaaacggcacggcaacggcagattatcgatctgctggatgatgaagcttcgctcagtgaaactgacagacgactgctccacgttctggcaaccgctgaaaaaaacgcgttgcaggaacgggatgccgcacagaaaaaggcggttcaggcgcggatttcagggcagaaaaaccgcagggaacgcaatcacaaactatttctggcggctggtctgatgattgacgcgggactggttgatacaaaaacgggtgagttgaattttgaccacgaaaaattactgactgcgctgaaacgggtacgctacgatctggaaacatcggcgtga

SEQ ID NO: 38950 - DNA, 936 bp, Escherichia coli
atggcaacgtatcatctcagtgtgaaatttggcggcaagggtaaagcccttgctcatgccagttacatcacgcgggaagataagttcagccagcgccaggatctcgagcacaccgaacacggcaacatgccggaatgggcgagagatgaacccgcccatttctggcaggctgcggatgcgttcgaacgtgccaacggttcaacgtacagggaaattgagatcgccctcccccgcgagctgaatgaagcgcagcggctggcgcttgtccgggattttgtgaagcaggaaacgggcgacaaacatgcatggacgtttgcgatccacaatccgaaagccagcattgacggcggcgaacagccgcacgcccatatcatgatgagccagcgcgtcaatgacggtattgagcgcagtcccgaacagtatttcaggcgctataacgccaaatttccggcgcgtggcggcgcgcgcaaggactcagggcataatttaacccctacagaacaaaaacaggcactgaaagccctgcgggagcgctgggagcgtacgcacaacgcgcatatgaaacgatatggctttgagcagggttttattgatagccgctcactgaaagcacagggtatcgaccggaaaccggaacagcatctcggttttgaagcagccggacgactggacgacagccagaggcaggatattaaagacagccggacgttttcagtcgtggatgtgcctgaacaggcgaagcatatcgaccacagcgaccgtagctggatgaatgccagcggtatcgaggtaaaccggaaggaactggtcagatctctgacgcatgatatctcgcagcagtacgggcgggagatggctgcacgggtcacaaaacagggaaatgttgaaatagagcgcgtgaaatccctgtcacgcggattttccataagcaggtaa

SEQ ID NO: 38951 - DNA, 531 bp, Escherichia coli
atggcgagcaccgaagaaaaacttctcacgctcctgctgtcggcggagcatctgaaagaggccgcaaaagagcagcagaaagccgtggcggattcgctggcggtggcaagggaaaccctgaaaggctaccgggaaatatcggacagtgtggcgcagcaggttcgggatgaagtccggcaggaagtgcagaaaatggatattgcggggctgatcggcgagcgtatcagcgctgattttcagcgtctggaaaaatccgtcgggaacatgaaaatcaatgcggacgcgctggacaaggaaatttccattatccgcagtaacatcatcgcggagtacaacacgctgcggggttacagctggaagtggtttgctggggttgcggttgcctttgtcgtactgatatttgccacaagctggtttgtgaaaacggaactacaggacaattacaacgcgtctgctgccgtctatcagaaagtggcagaccttgaaaagctgctgacaacggaactgaaaccggaaaagaaaaagaactga

SEQ ID NO: 38952 - DNA, 423 bp, Escherichia coli
gtgaagctaaaattcatacctatttttttatttatcgttacgttacaagccgctcattccagtggaattggtagcacgcccccccctcaagggaaggtgatatacacaatgaattgcacttttgtcgatgataccggtaaggctattggtaagtcgcaaaaatacatcctgcgaaaggggggggatggtcgtgagcaaatggagataactccacaagaaaacgcacatgtccccccccccatatacatacaaaaaacaagtggtgcttacaccaatggtgggttcaaaaccttctactggaacaatacagtacggatgaccgtgatcaggggcgataaaaccactgtggaaatagagtttattgattcccctgcgatttcgatagcgaaagccacatgcgacaatcctgtttatttaccataa

SEQ ID NO: 38953 - DNA, 324 bp, Escherichia coli
atgagcaattacgaattacagattttcgttgataacgacaccgctctgatgattcaggctttcagtgatgcaggtatcgcaattaattttgataaattactaaagctgatggctgataatgcagaaaacatctctgactttattcagtcggtggagtttaacgagcctcgaatgatgctaccaattgcagacagcgacatgaaaagattggttatcgagcaaacgaacaaatacagtatttccccagagcaatttttgaaaggtgctgtgacaatcctgtacggcgacaatattttggttacggattctgtgagggttcactaa

SEQ ID NO: 38954 - DNA, 279 bp, Escherichia coli
atgaagaaacacactttgacccgtatttcagaagaagcctttcacgagcttacccgaattaaacagacaactaacctccctcatcaaactgttatgcagcttgcaattgctaaagaggttactgagtcggatttactgaaatatccagtctctaaaggtcgtaaacacatccgaattagtcaggacgctttagctactttgaaggcgcttaacggctttaagattgatattgcccgtctattgagtcttaaaattcacaagctgtctctggaggtttaa

SEQ ID NO: 38955 - DNA, 525 bp, Escherichia coli
atggtgactaggtataccaaggcatggcctgaagaagttataagatacatcaatgaaaatattacagcagattttgaatctggaacattatttagaaatggtgtaaaaatcgagggttcacttgtaaatcctaaaccaagacaatatctggcttttggttgtcggattaatggtaagttcagaatacttaaggtgcatcaggttattttctatctatatcatggtaaacaagctaaactatggattgaccatatagatggtgacccgctaaataatgctattagcaatcttcgcgaggttaccaaagagcagaatcaggcaaacatgatacccagaaagaaaacaaaatcaggttacaagggagtacacccaagagtggataacaaggggttctgggctacaatacgctgtaatggaaaatctcattatctgggtcagtttaatacagcagaagaagctgcaaaagcctatgatgctgcatcactggaattgcatggtaaatatggacacaggaattttagctga

SEQ ID NO: 38956 - DNA, 618 bp, Escherichia coli; identical to SEQ ID NO: 9629

SEQ ID NO: 38957 - DNA, 297 bp, Escherichia coli
atgagcgaaacatcaacagtatctttctccactgctttgtcatcactcaaagatggtaagcgcattgcacgtgccggatggaatggcaaaggcatgtatctgcaactggttaagccaccgcaatcggccactccgaacgagtggcgatttgacgttacatgcggtgacgagtatacatttgtacctggcgttaaacttctaccgtggattgggatgaaaactgctgacggttgctttgtaccgtggctggcatctcaaaccgatctgctatctgatgactggattgtaattcaataa

SEQ ID NO: 38958 - DNA, 372 bp, Escherichia coli
atgagcaacatcgacaaacaggcgctgcgcctaacagcagaaaaggcaaaagataacttcatgccgaactttatggtccccactcgggatgtgctggcgctgcttgatgagctggaagccaaagactcaagcatctctactcagcagcatgaaatacgtacacttcttaatgctctagagcaagcaacggagaagcgaaactctgacattcctggtcagaaacgactgattgggtggcgggcatcagactacaccgacgagacatctgaccctgagttagctaaaaactgggccgctgcaattggtgtactgcctatttttgaaggtgatgtgaataccaagcttagcgccgctggcatcaagggggagtag

SEQ ID NO: 38959 - DNA, 969 bp, Escherichia coli
atgtgcgaactcgatattttacacgactctctttaccaattctgccccgaattacacttaaaacgactcaacagcttaacgttggcttgccacgcattacttgactgtaaaactctcactcttaccgaacttggccgtaacctgccaaccaaagcgagaacaaaacataacatcaaacgaatcgaccgattgttaggtaatcgtcacctccacaaagagcgactcgctgtataccgttggcatgctagctttatctgttcgggcaatacgatgcccattgtacttgttgactggtctgatatccgtgagcaaaaacggcttatggtattgcgagcttcagtcgcactacacggtcgttctgttactctttatgagaaagcgttcccgctttcagagcaatgttcaaagaaagctcatgaccaatttctagccgaccttgcgagcattctaccgagtaacaccacaccgctcattgtcagtgatgctggctttaaagtgccatggtataaatccgttgagaagctgggttggtactggttaagtcgagtaagaggaaaagtacaatatgcagacctaggagcggaaaactggaaacctatcagcaacttacatgatatgtcatctagtcactcaaagactttaggctataagaggctgactaaaagcaatccaatctcatgccaaattctattgtataaatctcgctctaaaggccgaaaaaatcagcgctcgacacggactcattgtcaccacccgtcacctaaaatctactcagcgtcggcaaaggagccatgggttctagcaactaacttacctgttgaaattcgaacacccaaacaacttgttaatatctattcgaagcgaatgcagattgaagaaaccttccgagacttgaaaagtcctgcctacggactaggcctacgccatagccgaacgagcagctcagagcgttttgatatcatgctctga

SEQ ID NO: 38960 - DNA, 975 bp, Escherichia coli
atgctgacacaggcaatggactatgaccggattctggcaggctcccgcagccatcagaccggtgtaaatggtgaaaataacagcgtccgtctcagcattcagggcggtcatctcgggcacgataacaacggtggtattgcccgtggggccacgccggaaagcaacggcagctatggcctcgtccgtctggagggtgacctgctgagaacagaggttgccggtatgtctctgacgacaggagtgtatggtgctgcaggccattcttccgttgatgttaaggatgatgacggctcccgtgccggcacggtccgggatgatgccggcagtctgggcggatacctgaatctggtacacacgtcctccggcctgtgggctgacattgtggcacagggaacactccacagcatgaaagcgtcatcggacaataacgacttccgcgcccggggctggggctggctgggctcactggaaaccggtctgcccttcagtatcactgacaatctgatgctggagccacaactgcagtacacctggcagggactctccctggatgacggccaggataacgccggttatgtgaagttcgggcatggcagtgcacaacatgtgcgtgccggtttccgtctgggcagccacaacgatatgaactttggtaaaggcacctcatcccgtgacaccctgcgcgacagtgcaaaacacagtgtgcgtgaactgccggtgaactggtgggtacagccttctgttatccgcaccttcagctcccggggtgacctgagcatgggtacagccgcagccggcagtaacatgacgttctcaccgtcccagaatggcacatcactggacctgcaggccggactggaagcccgtgtccgggaaaatatcaccctgggcgttcaggccggttatgcccacagtgtcagcggcagcagcgctgaaggttataacggtcaggccacgctgaatgtgactttctga

SEQ ID NO: 38961 - DNA, 861 bp, Escherichia coli; identical to SEQ ID NO: 9954

SEQ ID NO: 38962 - DNA, 246 bp, Escherichia coli
atgagcgtatccggctttatgggatatctgaaagggaaaagcagtctgatgctttacgagcagtttggtgatttgaaattcaaatacaggaacagggagttctggtgcagagggtactacgtcgatacggtgggtaagaacacggcgaagatacaggattacataaagcaccagcttgaagaggataaaatgggagagcagttatcgattccctatccgggcagcccgtttacgggccgtaagtaa

SEQ ID NO: 38963 - DNA, 978 bp, Escherichia coli
atggcgatagccgaacccaattttattgaccgcgatcctgcgcaaattaccagtgagatgattgcgcaatacgaagatgccagtggtaaaaaactctatccggcacaggctgagcggttgctcatcgacctgtttgcctatcgtgaaaaccttgtacgcatcgccattcaggaagcggcgaaacaaaacctggtcgcgtattcccgcgcgccaatgctggattatttaggagagctggtgggcgttcaccgtttgcctgcgcagccagcaaaaacgacgttgcagttttcggtcgtcagtgcgtataccagcaatatcctgattccccaggggacgcgggccagtgcctctgatagcgtgatgttcgccaccgatgaagatgttctgcttccggcctggagtttgcatatcgccgttcctgccaccagcctcgcagcaggtgaacagggtaacggctggcagcctgcacaaattagcgctctggtcgacaggattggtcattatgacatcaacgtaaccaacctgactgcgtcaacgggcggctgcggtgaagagagcgatgacgcattgcgccagcgtatccaactggcaccagaaagctttagtaatgcgggcagctatggcgcataccgctttcatacgctttctgttagccagtcgattattgacgttgcagtactggggccggacgagggattgccagaaggctgcgtggagatctacccgctaacgctgtttaccaccgccgatcaggagacaacgctggctgcggcgcgtaaagcgattagcctctggacgcaacagcggcagaaacatctggggcaagacattgtgccaaaccagataatcaaagtgttacaggtcgatggcgtctatgacgttgcgctgaacttgcctacaaaacgtattttgcaggcgcatgaatgggcggaatgcactgcaatagacgtcacgatcgccggagttagcgatggataa

SEQ ID NO: 38964 - DNA, 171 bp, Escherichia coli
atggacgttatcggcaccaccggatcaccgttcattgtcggatctaaaaaatccgctcaaaagatcatgttttcctgggcgttttccaccgttttttatgttgcttatttgttaatgaaatctcgttttcagtttcgcctcattttcgacgcgaaagccctatttttgtga

SEQ ID NO: 38965 - DNA, 273 bp, Escherichia coli
atgagtgcatttgctttcagaaccacctttaaaccgactggcgaccagcaaaaagacgctattactcatatcgaagttatgcaggaacgagcagtaaaagcctttgtttcctggatgagcagccaggagggtacagaatttttaagcactttgcaggaaatcacaacagaacttgattcacttatttatgcggtagagtcccacacccctgttttcagaaagaaagctagtgaactggaaacgcttttagctcattacaaaacattgctgtaa

SEQ ID NO: 38966 - DNA, 300 bp, Escherichia coli
atgactcgcttaccttttattgaatcaaccacgcaacagatttttatttttaatactgtgacgctttgtactattgggttaatccatatagagactggtaaagaatatgttgtagtatttacagataataataagattcgggattacaaaaccggaattgttcctcagtttggcgaaatgaagccgagtgatattgatttaatacttttctacagggccgaatatgaaaaatactttgatagtttaaaaataggtgatgaagccttaaatattaatgaatatataaaatgtatgcaatag

SEQ ID NO: 38967 - DNA, 672 bp, Escherichia coli
atggataaaatatcgaatctttttaaatggatatttagcttgaatcctgttgaagcggtggttaacgatcctactcagaagctattaaatagcatgcgggttacgtcaaaatgcaggtataacgcgtcgatacgattaaaaagacaaagtcaattatcttttttttcaacaacagtactatctttggggctgattttaattcctttactccaaaatgccgatatacatttacacctcccattaaaagttttgaatatgcttcagatattccttgctgtttctgttctggtttactctgtgattataggaactgcacattatgaaattaggtcaaaacaacttaacgaatgtggtgataagatcaaagatcttataagaaaattaagattgggaaataacaaggaagaattatcaacatatatacaaatgtatgattctgtcagtactgaatcggaaaaccatgctagagttgattttttgcttgcttcgttagagatgaaaactgattataaatacaccggccttcttcgattttggctctatattcgttctatttttctttacatattcccgtggttaatacctttgacactagtattgtcagaaataatatttatttgtgacatgcttggagtaacttatatatctactccgttccttacaggagagtga

SEQ ID NO: 38968 - DNA, 774 bp, Escherichia coli
atggaactggatactgaatttcgttaccccaatgttatagatttcttcggtacaaccctttttcacctttgtcatttcacaactatagatctccataattacgctacatataataaatattctgagaataatattgcgaaaagtaataaaaggctgtgtgaagaaattgaacagcgaataaaggaaagtgataagaaataccacgaggatattatcgatagctaccatcaggagatgcaggaatttggtgatatttatccccctatgcaccgtaaggcgatggttatcacgctgtataacttcttcgaacatcaaatcaaaacgttgtgcgccgaaataaacatgctgcttccaaaaaatatgagtgaatcttattcattgagtaacgcatgtattaaagagtatcgtaaatttctgcgacgagaagctatttttgatatgaatccgggcggggaattgtggaaacgctgggaggatatgctgaaagtggaacaaatcaggcatgtgctggttcactccgaaggtgagatagagaaacacagggcggagcggcttgctgatatagaaagctactgtaaacaaaaaaaagggattaggctaattcgacaccgtatcatcattgatgaaggttatgtggcagggcttatcaccgaacttatctcactgtttgagctattagacaggcaggtgaaggtcttcatccgtagatacgaaagcgagcatggtagctacgaagttccgcttccgcagggagcatcacgaacaccactgtga

SEQ ID NO: 38969 - DNA, 303 bp, Escherichia coli
atgaagataatcgctatcaagacgcttagggatttttggacggcgaatcctgatgcagaacagccgctaaaggcttgggtagatgaagccagtaaagctgagtggaaatctccagcagaaattaaggagcaataccgcagcgccagtattcttaagaacaggcgagtggtatttaacattaaaggaaatgactatcggttaattgttgctattgcataccagcgcgggtggatgtttattaaattcatcggtacgcacaaagagtatgacaaaatagatgctgagacagttagcctggagtaa

SEQ ID NO: 38970 - DNA, 249 bp, Escherichia coli
atggcatggtatatagatagtaagaacgttaagaaaaatacaaatgaaaaggctaatgcaaaatacgaaaaaatttggaaaccaggagaaaaacctgatcatgctggcatttatagatgccaggcatgtggttatgaagatttaattaatcgccaatgtaacaaacttccaccatgtagcaactgtgagaagaaagcacacaagaacaatacgtggaagctactcgtaagagcggttgatgcagaataa

SEQ ID NO: 38971 - DNA, 165 bp, Escherichia coli
atgcgaaatgaaaaaaatcgctcagaatgcgatacagcgcgttttagagggtatttacaaaacagtcgttgccttgaggaaattttgatcaagattgaactcctgtccggatcatgccgacagatcacagcaacaaggccgctaaaaattgttgagctgcgttaa

SEQ ID NO: 38972 - DNA, 159 bp, Escherichia coli
atggttcagaaaattttgtcggataaggttatgaatgaaagaacaaatgcgtattactcttattatcttggagagcgtaatatctccgtactgccccttaatgtttatgatcccccggaacgctttatcgcttacataaaaaaaacagagaaaatctga

SEQ ID NO: 38973 - DNA, 294 bp, Escherichia coli; identical to SEQ ID NO: 13522

SEQ ID NO: 38974 - DNA, 1068 bp, Escherichia coli
atgaataaacaagtaattatttctgactggatcaacaaccctaacagcctgttaagcactgatactggctacctattacgccatgttaatggtcgtatggtcaaaagcgatgagcacgaaacctttttctttgttgaagacgatgggcgtatctatgaggatggttactcttatgaagcccaaactggttgtatccctgcggagctggtggacgtaacagaagatctgcgcaaagcatggcttgaacagcagcagcgcggagatgattacgtaaacacctatcaggaacgccagaacgcgcgtcttgcccgatatattgctcgtgcagaaaaagccagaaaagaaggtgcggtagcgcataagcgagcgcatgacctgttggatgtgatcccgttaggccagccgattttagttgaccattatagcgcgaaaggccatcgccgccgtttgtctaaagctgatgcgttattcagaaaagcgtttgttgaatgcgaaagtaaagcatcacactacgagagcaaagccgcaggtgttggtcgtaatggaatttcgtctgatgatcctgatgcgctatttaagttgcttcgtaagctgcaaggctgcatgaagtcacacgtcaaaatgaaggccgcaaataaggccattcgcaaatacaaaaaagaccaaatacagcagctttctgcattaatcgatctcaggtttacagaaagcgaagccaaagagttactggccggagatttctgtgggcgcatcggattcccttcatacgcactgagcaacaataacgccgaaatcaaacgactacagagccgtattaaggagcttgaatcggtcaagtctgtaacaggagcacagcgcgaagaatacgacggcttttctatggagatagatccagaggataaccgcatcctgttttatttccctggcaaaccagaggcaaacattcgttcgctgcttaaatcacgcgcctttaagtggagtccaacccgtaatgcatgggttcgcaagattactccaaacgccctggctgatgcccgatatctaaaagaatcgctattgaaagcctga

SEQ ID NO: 38975 - DNA, 279 bp, Escherichia coli; identical to SEQ ID NO: 31935

SEQ ID NO: 38976 - DNA, 1437 bp, Escherichia coli; identical to SEQ ID NO: 31936

SEQ ID NO: 38977 - DNA, 171 bp, Escherichia coli
atgacctttgatgattttatttttgcttgtgtgtttgtatttgccatgattcatagcttttttacgctaaagtattttaggtttcttatgaaatctaaattaattttaggaggagttacaataattcatatgttaacttttttctatttttttatgctgctctatgaataa

SEQ ID NO: 38978 - DNA, 177 bp, Escherichia coli; identical to SEQ ID NO: 21779

SEQ ID NO: 38979 - DNA, 1083 bp, Escherichia coli; identical to SEQ ID NO: 36941

SEQ ID NO: 38980 - DNA, 246 bp, Escherichia coli; identical to SEQ ID NO: 22343

SEQ ID NO: 38981 - DNA, 582 bp, Escherichia coli
atgcaaaaaatcataaataagggtaagtcagaaaaagaatctatattatcgaataatcattataatttgcatggaaaaaatctattctttaacgttgaagagattgatgcaattagagaaatatatgattccgggacttacgatgcattgacgcgagcttctgggtgtcgtgtttttgataaaaatatcaggatgctgagtaaggattttggatatttatgcctgtttgatgtagataagtttaaaaccattaatgacaagtttggtcatttatttggtgatgaagtactaataagacttgttaatcttattaaggatgaattacccctcagcaaaggtgaagtttatcgatttggtggcgatgagttcgctattatttatcatgataaagatataaatcaaatatcaagaattttgcacagaatagtccatttctcaataggtggattgaattgtagttgcagtattggtgttgccaatactgacgagtgcatgaataacattgaacggttgaaattactggcagatgaacgattatacaaaagtaagcaaaatggaagagcacaggtaacctggtgttaa

SEQ ID NO: 38982 - DNA, 900 bp, Escherichia coli
atgacagagcgtgaactgtccattatccgtgcgctgggtgaagaattcgccacggtgctggcggatttacagcgcacatttgaggagaagatggccgcacagtcgggggcgtttgaagagaaactggcttccctgtctgctctgttacagaagcatgtgacggtggatgaggtgcgccctgttctgcaggcgatgatgaatgacgccgtgggggccattccggtaccgcgcgatggtcgtgattatgatccggaggtgctgcagcaggcggtgaatgatgcggtcgcaaatattccgcagccggcagacggtaaaagtctcaccccggatgatgtgcgtccgatgctcgagcagatggtgacggatgctgtgagtcatatccccgttccgcgcgacggtcgtgactacgatccggaagttctgcagaaggcggttctggatgcggtgagtgccctgccggctccacaggacgggcgtgatgccacggcactggaaatattcccggcgattgatgagcaaaaatcctttccccggggcacgtatgccacacaccagggcggactctggcgggcgtatgaaaaaacgcacgggatgcggggatgggaatgcctggttgacggggtggccgatattgacgtcagcatgaccggcgaacggtcgttcactgtggtggtccggcagagcagtggccagtgtacggaaaaaacattttccctgccggtgatgctctatcgcggtgtattcagaaccggcgaaacctaccaccccggcgatacggtgacgtgggggggctcgttgtggcactgcaacagcatgaccggtgataaacccggagaagctcattcatcaggctggaccctggctgcaaaacgagggcgggatgcaggaggtggaaagtga

SEQ ID NO: 38983 - DNA, 1035 bp, Escherichia coli; identical to SEQ ID NO: 21868

SEQ ID NO: 38984 - DNA, 495 bp, Escherichia coli
atgaaccgtgttctgtgtgtggtgattattgtcatgctggtagcctgtagtgtgcttagtctggggctgaatcattaccgcgataacgccatcacctacaaagcgcagcgcgataaaaaagtcagtgagctgaaactggcgaatgccactattactgacatgcagcagcgccagcgagatgtcgctgcgcttgatgccagatacacgaaggaattagccgatgcgagagctgaaaatgaaactctgcgcgctgatgttgccgctggtcgtaagcgcctgcgggtcaacgccacctgccccggtaccgtgcgtgaagccaccggcacctccagcgtggataatgcaaccggcccccgactggcagacaccgctgaacgggattatttcatcctcagagaacggttgatgacaatgcagaagcagctggaaggggcgcaggaatatatccgcactcagtgcactaagctggctttttattatccggaggatacatga

SEQ ID NO: 38985 - DNA, 534 bp, Escherichia coli
gtggcgaccgtcatcacttccggtcagcacgtcgtgcgttttccccttgttgtcagttacgcggagataatccccggagaaagtcgacacacggctgtaagccacacccgccatcgcatacgcgctgaaccattcattcacgcgcacagacggccccgccattacgctgaaccagcggttacgcacggaatcttcatgccagcgggtatcgctgtagtgcgttttttgctcatcctcagcattggcataactgaaggacgtaatcagccccagcgcgtccgtaaactcataacggtatttcacgttaatcccgttcagattatcgctgccgggagcgttcgtacgggcatgaagataccctgcgctcagtgtggactgatgttcagacgcccatgcaggcgcactggatacggacagacagatggctgcggacaaaatggctgcacaaactttacgcataattacctctcgcttttctgcaataaaaaaggcgccatttctggcgcccgtattggggttataaaattcagctaa

SEQ ID NO: 38986 - DNA, 336 bp, Escherichia coli; identical to SEQ ID NO: 33100

SEQ ID NO: 38987 - DNA, 234 bp, Escherichia coli; identical to SEQ ID NO: 31319

SEQ ID NO: 38988 - DNA, 195 bp, Escherichia coli
atgaataactctcggttattccgtttgagcaggattgttattgcgttaactgccgccagcggcatgatggtaaataccgctaatgcgaaagaggaagcgaaagccgccactcaatatacccaacaggttaatcagaattacgccaaatcattaccgtttagcgatcgtcaggattttgacgatgcccagcgctga

SEQ ID NO: 38989 - DNA, 564 bp, Escherichia coli
atggaaaccctgggcctgtcgtccgggggcgataccaaggatatttttctgcggcagctcgtccagcaggtgtcacatattgatctcctgctgaaaaaggactggtaccttctggaaaccaggccagaacgtccgttttacgtatcagacaatcccgtagtgcttaagaacagcaatgacttcggtccgtacggtaatcttggtctggccgttcgcgggatacagatttacctccccctgtcatcgacgctgatgctggccatgtattgcccctccatccgtgaacagatggttcgtcaaaagcagcatcttcaacatctgctcgccagggcgccgcatcttatcccccgtcacattcggccttttgaaagactggaacatatccggaggtatacggactatcttcttatgccgcttaccccggagcatgtcacgcattacaattccctgcaggtggagttcgcggagcagtacgtgttctgcggtgaaaaggatttctctctggttgagagaatgctggccgatagtgaacgctaccggactggcccgcggtttacgttttag

SEQ ID NO: 38990 - DNA, 204 bp, Escherichia coli
atggctgtatccagtggattatctgaacacagcagtatttatcgctatcagcgcgaggggcgtcatgccgtccgtcaggagattcgtggctttttcagggaagcggcagaggtctggcagaatgcggcccggctggcaccctgtgaagcatggcgggattttgctctgaagagggcatctgcatgtcggtgtaagtgccgataa

SEQ ID NO: 38991 - DNA, 2754 bp, Escherichia coli
atgcagcagaaaggttcgaaatggtggaagtttgacttccatacgcatacacctgcgtcaatggactacggtaaagctgaccaccaaataaagcacactatgactcccagacagtggcttttagattatataggtcatggtattgagtgtattgctgtaacggatcacaatacaggatcatggatcgatattttaaaatctgaagctgaaatactaagaagcgaaggtcactccatttatatatttcctagcatagaaattacagctcatgggaatatacatatattaggaatatttgatccagacagaacatcaagttatatctcgcaaataattggtgccaccaattactccggaacggaaggtgatagtgatgcagtaacccaaagcagcccacaggaagttattgacattattatcgagcgtggtggcgttgcaattcctgcacatattgacaagcctagcggtctatgcaaagtgcattcatcaggtgcaaccttaaagcaaatattaacaaaagcatcagctgttgaagtaattaaaacgcatgctgaatatgaagctgcccaaccaaactcaagcccattgaatgggtatatatcccttaatacaggcctacccgaagtacttggttctgactctcatcacccaaacacagttgggagagcattcacgtggataaaaatgggaataccatctatagaaggtctaaaattagctttatttgatggaagcgactcattaaaaaggtctgatcaattccccgattcacctaatattttcgctgataatagaatcacatcaataaaagttaataaaaccaagtactgtggaagaaacaaagagtttcaaatagaatttcatccatggttaaactgtattattggtggtagaggaagtggcaaatcaaccatcttagagtttatcagaacagcattagggagagaaaatgagcttgagcaactctcatctaatagagaaatgtataactcgtatattaatctcacaaaaaaggccaagagcagagaagatgatggagtctttctggatgatagcagcattcaaatagaatatctgaaaggagaaaataaatacttattagattggaaatatcctgcttcaaaagtgctcataaatagaatagacggtaataacatcatctcagaagaaggggatgtaacatctagatttcctgttaagatatttagtcaaaagcaaatatacgaaatttcacgatctccaaattatcttttaaatctcattgatgaatctcacattgtcaatataaatgattggaaatataattggggcattgaatgcaatacgctttcacaattaagaaaagatgttaaagatcttagagccaatatactaactaaaacaaatctaactggtcagttaaatgatgttaatcaaaaaatagcctccattgaaagatctagtcatgcttctgttttagcaacttatcaaagaacattaaaccaagtaaatgcgatcaatcatttcgcttcaaagaatatagaatctctcgaagatttattagagcacattcaattaacaaaacctgaatcgtttattactgatgacgaactctttaacaccgaaaatgaaatagaagctaagaataaaatcaccactcttcagcagaaaatcgatagctcgattacagagttcagcggaagtgtcgatacaataattagagaaataagagaattaattcaatggtttgattcatcacctctgaaacaagacatctcaagtcaccaaactcaatatactaatttaatatctaccttacaagccaatggtgtaaataaccccaatgaatacgaagcgcttatcaatacaagaaagcaaatcaaggaaagattagataaaattgaagtcgatgaaaaaacaattgaaacaaaaaaatcctcaataactgaaagttacagaaaattagtagaactacgcaaagagctcacatctcgcaggagacaattcttagttgaaataaataacaacaacactaactttaaagtcagcgttgatttctgtggtgataaacaattcttagaaagtagtttcagaaacgccattgataaaaaagattccaccttcagtaacgaaatttataatgaagataataatggattcttgaatatctttaacgcacagattaaagaaatctctgaggacatggatgcaataaaccaaaaaattcgaattctaaaaaatgaatttcttagcaaggattcaaatacaatacttgatgttaaattgagtaagaggttctctgattttaaaaatgatctaactgacgaggttataacctctctcatttgctggttcccaagtgatgctattactgtcaaatataatgatggtagaagattcaaagatttgtcacaaggttctgcaggacaaaaagcagctactgtcctagcatttttgctttcttatggcgatgatccaataatacttgatcaacctgaagatgacttagataatcaattagtctatgagctcatagttaagaaaataaaggaaagtaaaaacaaaagacaaataataatcatcactcacaatccaaacattgttgtaaatggtgactccgaattagttatttccctaagtcagcaatcaggaacaacagattttctgtctttaggaggactccaggatcgtgaagtgagacaaaccatttgtgatattatggaaggaggcaaagacgcatttagtcagcgttacagaagaattgtcactgcctaa

SEQ ID NO: 38992 - DNA, 567 bp, Escherichia coli
gtgaccaccatgacgctacagcaggcttttgaagactgcctgaagaataaaaccgccttgctgaaccgcaaacaggagcttgccgatgccgaacacgaataccgcgaacttattgctagcggtaatgacagccgcgtcagaagtctgcaaaccctgcgtgacattatcgacgtgaaaaagtgggaaattaatcaggcggccggtcgctatattcgctcgcatgagaacgtgcagcgcatcagtatccgcaaccggctgaatgattttatgcaggcgcacggcgcagagctggccgccgcgcttgcgcctgaattaatgggttataacagccagaatcccgccgtcactcgctgcgtgatgcagcattcggtcgattacctgcgagaagcgttgtcggtgtggctggccgccggtgaaaaaattcattattgcgcacaggataatgacattttaacggccatcggattcaggcctgacgcggcttcgcgggatgataatcgtgaaaaatatacacccgcacaaaaccagaattacgtgaataaacgcgcagaactggccgtgcagtag

SEQ ID NO: 38993 - DNA, 264 bp, Escherichia coli
atgatgcactgtccgttctgcaaaaaagcggcgcatgcgcgtacaagccggtatctctcggataacgtcaaacagcgctaccaccagtgcaccaatatcgaatgctcatccacttttcgcagcatcgagtcgattgaagaaattatccggttaccgcctgaaagctttaaacctcagacccagccggatatcccgatgtcgccccgtatggtaaagggctgctacagctcaccgttccgccataatcaggagaaacgccagtga

SEQ ID NO: 38994 - DNA, 732 bp, Escherichia coli
atgaccaccactatccctgattacctgacaccggcattccagcaactggacgcggccagagccgaccatcttgaacacgcccgtcagatggatgacaccaccacggccattgcccgaactgccgaacagaaagtggagcttgaaaaggaaaatggcaacgaggccagcggatggcgcgcggcattccgtgccggtggggcaatgctgacggacgagctgaaacagcagcatctggcgcgcgtggcctcccgcgagctggcgcaggaatgcgacaggctggctgaggtgctggcttatgacaaagaccgcctgaaagcctcctgtgatatctcggccagaaagtatcgtcaggcgcatcacaacgtgctgagcgaatacgccggaaaggagctggataacgcgctgcgtcagacgtgcggagcgcttgtccgggcgatgaagctgaaaatgctggcgctggggaacccgcttgcgaacaccgtcgggattcagggctatgtcgaacccgataaagcggtcatgcaggaggtgcagacgtggcttgagcgtgcggtgagggactgtcacatccgtctggcggatgagccggtactgtttaaagccgggctgtcggctgagacactggcacatatgaattacggcgtggcagtgacccacggtcagcgtcagacctactttaacaaactgcgtgagcgtgaaactgacctgaaagcgcgggggctgctggaatga

SEQ ID NO: 38995 - DNA, 228 bp, Escherichia coli
atgaaacatcccgcgatcaccctgaaagacctcgaatgccttgagcacctgcgcaacgtcggccagctagtcagtgacctgtcgcaggcgcaggacagcgccaccctttgccatagccccgcgcagcgtttgcagctctcctccgtggtgtacctcatgacctcccagctcgacggcgtggtcgagcgctgcaaccagcgctggctgaccggggaggctaacgcatga

SEQ ID NO: 38996 - DNA, 2334 bp, Escherichia coli
atgaaaatgaacgtaaccgaaaccgtaaaactggcgtgcggccactggccgcgcattctcccggcgctgggggtgaaagtgaataaaaaccagcatcaggcctgcccggtgtgtggcggctctgaccgctttcgttttgacgataaagaggggcgcgggacgtggttctgcaaccagtgcggcgcaggtgacggcctgaaactggtcgaaaaggtgttcggcgtctcgtccgctgaggccgccgggaaggtgagcgccctgaccggcagtctgccgccggttgccccggagtttatcgccgccgctgaggccgaaaccgacgccagccgcaaagccgctgccacgcttgccgcctcgctgatggacaaagcacgcacgaccaccggcaatgcctacctgacccgcaagggctttcctgcgctcgagtgcctgacgctgaccaccacgcacaaaaccggcggcgtgaactaccgcgccggtgatgtggtcgtgccgctgcaggacgagaccggcgcactggttaacgttcagctcattaacgctgacggcctcaaacgcaccctgaaaggggggcaggtaaaaggggcgtatcatcttattgaagggaaaaaagaggcgggaaaacgcctgtggatagcggagggttacgcgaccgcgctcaccgtgcatcacctgaccggcgaaaccgttatggtggcgctctcgtccgtgaaccttctttctctggcgagccttacccggcgtcagcacccggcctgtcagattgtcctcgctgccgaccgcgacctcagcgggaacggccagacgaaagccgcagcggccgcacaggcctgtgagggcacggttgccctcccgccggtgttcggtgactggaatgatgcgtttatgcagcagggggaagacgccacgcgcaaagcgatttatggtgcaatcaggccaccggctgatagtccgttcgacaccatgagtgaggcggaatttaccgccatgagtaccagtgaaaaggcaatgcgggtgcacgagcattacggggaagcactggccgtggatgcgaacggccagctcctctcccgctatgagggcgggacatggaaaatcatcccgccgtcggactttgcacgcgacgtggccgggctgtttcagcgcctgcgcgccccgttctcgtcgggccgaattgcctccgtggtcgacaccctgaaactgattattccgcagcaggccgccccggcgcgccgtctgattggttttcgcaacggcgtgctcgataccctcaccggcgtattcagtccgcacagcaaatcgcactggctgcgcaccctgtgcgacgtggattttaccccgccggtggagggcgaaacgctggaaacccacgcgccaaacttctggcgctggctcgaccgtgcggccagcggcaatgcagcaaagcgggacgtgatactcgccgcgctgtttatggtgctggcgaaccgctacgactggcagctctttctcgaagtcaccggccccggcggaagcgggaaaagtattctcgccgaaattgcgaccctgctcgccggggaagacaacgccacgtcagcgaccatcgagacgctggaatcaccacgtgagcgcgcggcgctgattggtttctcgctgatacgcctgcccgaccaggagaagtggagcggggacggtgcaggccttaaggccatcaccggcggcgatgcggtgtcagtcgacccgaaataccgcgacgcctattcggcttatatcccggcggtaattctggccgtgaacaataacccgatgcgcttcactgaccgcagcggcggcgtgtcccgtcgccgggtcattattcatttcccggagcaaatcggcccggaagagcgcgacccgcagcttaaggacaaaatcgcacaggagctggccgtcattgttcgccagcttatgcagcagttcagcgacccgatgactgcgcgtacattgctccagtcacagcagaactccgacgaggcactcagcatcaagcgcgacgctgacccgacgttcgatttttgcggctatctggaggcgctgccgcagacgaacgggatgtttatggggaacgccaatatcatcccgcgacagccccgtaactatctctatcacgcctatctggtgtatatggaggccaacggttacaagcatgtgctgagcctgaaaatgttcgggctggggctgccgatgatgctcaaagagtacgggctgaactatgacaagcggcacaccaaacagggtacgcaaaccaacctgacgctcagggaggacagcaacggcgactggctgccgaagtgcgacgaatccgcagcgacataa

SEQ ID NO: 38997 - DNA, 270 bp, Escherichia coli
atggaatacctgtttatattccctatccttaaacaatgcgtaggcaaggagaagatctttttgacaaccatttttgaaaaatattttatttttattagtcttttaaatatggtattttgtgaacagtgcatctttcttgcaatttcacgctgcgtatacccttcaatagccaataaagtcaaaaacctattcatcattcatatcgcaaatataatttttggaaacttaagacctaattatttacttattacgttgcaatatttaccatag

SEQ ID NO: 38998 - DNA, 909 bp, Escherichia coli
atgagtaaagatattaaacaagtaatcgagatagcaaaaaaacacaatctttttctaaaagaagaaacgatacagtttaatgaatcagggcttgattttcaagctgtttttgcacaagataataatggaattgattgggttctaagattgcctagacgggaagatgtgatgcctagaacaaaggtagaaaaacaagctttggatttggtaaataagtacgctatatcctttcaggcaccaaactggatcatttacacagaggaactaatagcttataaaaagttagatggtgtgccagcaggtacgatagatcataacataggtaactatatttgggagatagacataaataatgttccagaattatttcacaagtcgctaggcagggtgttagcagagcttcatagcatacctagtaataaagccgcagcgcttgatcttgtagtacacacaccagaagaagcaagaatgtcaatgaagcagcgtatggatgcagtaagagcaaagttcggagtaggtgagaatctatggaacagatggcaagcgtggttgaatgatgatgatatgtggcctaagaaaactggactgattcatggagatgtacatgccggacatactatgattgataaggatgccaatgtgactggattaatcgattggactgaagcgaaggttacagatgtttcgcatgactttattttcaactatagagcttttggggaagaagggttagaagctttaattctcgcttataaggaaattggtggatattactggcctaaaatgaaagagcatattatcgaacttaatgcagcatacccagtttcaatcgctgagtttgcattagtgtctggaattgaggaatatgagcagatggcaaaggaagcattggaagtacaaggttcgtaa

SEQ ID NO: 38999 - DNA, 840 bp, Escherichia coli
atgacagaaagaataattcgttttaatgatgtttatatttgcactgagagttttggagatactaatgatccaactatcttattaataatgggagctacttcatcaatgatttggtgggaagaagacttttgtaggaagctaagcaatcaagggtttcatgttatacgttatgataatcgggatgtaggcagatcaattacttacgagtatggtcatccagaatatacctttgaggatttggctgatgatgcaattcaggtactagatgcgtatagggttgataaggctcacatagtcggtatgtcgatgggtggaattattacgcagatagtagctcttaaacatcccgatagagttcttacaatttcactagttatgacatcgaattatgattctagtcttcctaagaaggatagcaaagtaacagaagtttttgccaaaattaacatcaataactgggaagataaagaggaagtgatcaagtatgttatggataggagtaaagtcctcgtaggaactaagcatccatttaatgaagagaaaataaggaaattagctgggaaggattttgatcgtgctagtaatatggagagcatggaaaaccatgaatatgtaaaaggatggggattatatttatctagaacccatgaaattaatgttcctacactagttattcatgggactgatgatcctattatacctcatgagcatggagcgcatctttctaaaattatatctaatgctgtgctagttaccctggatggtgctgggcatgagctacactatgatgattgggatgaaattattaatgctttatccaagcatgctgcaagtttataa

SEQ ID NO: 39000 - DNA, 618 bp, Escherichia coli
atggaggtgttttatgttgtggctaaatttacagagttagaaaaagaaaaaattcgtgaagaattgcttaaagttgcatatcgattttttgtagataaaggctttaagaatacttctctcgaggatattacttcatcagttggcattgcaaagagttctttttatatattttttgaatcaaaagaaatactatatatggaattgttagcacatgagggagagcaaattgaaaagcaggtttggccaaaggttatagctgcaaaggatatacgttcagctataaagatatacttaaatgagatggctttggaactagaggataagattttaacacaaaggctggtttacgaccttgaggaatacaagattgtatctagaaagctaaatccagattatgttggctcagagcatctaagaagcatcgttcctcttgtggagtttataaagttacgtcaagactctaatgaaattatcgatgaagagccaggcattatagctggagttttaagagcagcttggttaataggttctcaaaagggagatttgcagcaatacaattatgaaagaattaaagagttattattcgaagctgttgctgatcgagtcactcgattttaa

SEQ ID NO: 39001 - DNA, 657 bp, Escherichia coli
atgcacactaacgagggcaaaaatataaatggagaaagattactatcaaaatcattgctagaagaatcctattcacctctacctggaagtcctaaatatggtcttggatggtctttaagttctgcaaatgttaaaccagcacgtatttctcatagtggggcgttatctacaattcaagcgcaacaagatattgtaccttcaagtggatatgctgtagccgtaatgcttaatagctttacgacaacttttgaacatgcttatgagataagttcgggtattataaaattgaccgaaggacaaaaacctaatattaaagttcctatgcctaaaataattgatttatttcttggtctaatgacattaatatacttattcttaggtataaaaggtattttgcgaagtaaggagtggtcgaatagaagaaaacttcatcctactttgagatattatcttcgtctaatgcctcaaataattccagttttgtttatagggtggttgttttttattgttccaaacctacaaaataatagttctacaattaaggatgctattggtatttggccagctgcaatgttatttttggcagtagttttcttaattggaactatagttacggttaggagagtatattatagagtaagattaaatagaaattga

SEQ ID NO: 39002 - DNA, 252 bp, Escherichia coli
atgctgttatatatccttgagataaccttgctgctgccttttcaggcgtttggtattgcgctcgacacagtcaaaaccctggcctttgaaaccggcagcgatgtcaccactcagctcgattttgccccctggcaaatgaatgccattgccctgggctatcagttcgggtatctgatgttgccgtttattgccgctgccggcatatggatattgatgaacagggagctgctggacactttgcgctcgcaataa

SEQ ID NO: 39003 - DNA, 279 bp, Escherichia coli
gtgggtgacagcaaaaaggcactggcagagctggaacagaaggagtttccccaggtgggtcaggtcacctgtagtatcggttttgcggctgtggaccctgcccagccaccggccaatatcctcgacaacgccgaccaggccctgtattacgccaagggcaatggtcgcaaccggccctgccactacgaaagtctggtggaaaccgggcagatagctaggcgagacaatatggaaggcaacgccagcgtcgattttgatattgatgcactgtttgggtaa

SEQ ID NO: 39004 - DNA, 768 bp, Escherichia coli
gtgggaatcaaaaacaccagattaatttctaacattagcaatgttgggattaatgttgtatctccaaagcatgaaagaaaatactttacagcattaggtataaaaccaagaaaaaaaggagtctttatagttgaagataaattctcccatttattcctcaagtgtttattgaatcgttcagcttctgatatcgcgtatgattatcatatagtaagttttaaagatggtgagtctgatatagaaaaagtagtaaaacactttaacccacacaaaaattttggctttagtttttttgcagtttttgatgcagatatgcgtgaaaaaataaataaccttgtcggtaaggttataccagtcatatccttaccatcaatcgatggcttaaacccagaagaagaaatatggagagttttctccaataatataagtcatgtagctcaaaaattgggggttgagtctgatgatttacttcaatactatgagcaatgctcgtctttggatcatcacgaccgatttatgaatttagcaacgtaccttaacattaatgaagaaacattatttaatggtgtatttcctgtttggtttgataataatttagaattggtgaataaatttatcttttcgataattgttaatatatctgagctaaatcagcaagatatagaaactcttgcatcatcgatggggttggagtgttttcaatttaaagaaaaaacaggaaagacagagcttgtattttttgatggtaaagacttattattaaaatga

SEQ ID NO: 39005 - DNA, 1218 bp, Escherichia coli
atgctttcaataggtgcaattttaaaaaatgaatacccattcattgttgagtggattgcttaccatatggctcttggcattaatgatatatatattgccgacaatattagtagtgatggaagtagtgagcttttatattttctagataaagcgaatattatcaaaaggattgactatccgacacaagatggtattcccccacaattgggtgcgtacaataaaatattgtcaatgcttgataaagatagatgggttgcatttattgatgcagatgaatttatttcaccaaatgactatgaagatggtttaaacaaactgatgccgctattaaatgatcaggcgattggtgcaatatcactcaactgggctgtatatggctcatctcattcaattttacctgatgacggtcttgttatagaacgattcgttaagagagctgctgatctgcatcctgttaataggcattataagtcaatagttcgtgtttctgatgttatcaaagcaggaccaacaccccatgcttttattattaattcagataagaaatttgttatgccaagtggagaagaacatcatagttatgatggaataagtgaggtgattgactggtcagttatcagacttaatcattatgtaattaagtcaaaggctgaattcttgaataaaaaggtcgctcgaggtagagctacaacactaaaaaatagtctcggtagaaatctgcaattttttaaaaatcatgatttgaataatattgagcaacatattccattatggtttctgagaaaagtaaaatgtcaaatcgcaaccattaatgagaaattgcttgattgtggatatcagccgctcatagaaagcagaagtgaaccactttataagactactaaaagtatgggggttggatttattgatacaattaaaaaagatggacgtgctatagttctaaaaggttgggcagtagataatgataaaaaaccatgtagtagtattgtaatggttataaataactcttttttaatacgcccagactcactatcattttatgatcggcctgatgtagaaaaagctgggattggtaatggaattgggtgcgggtttatatgttcgttgtcgcttcctacacaacttatctcaagcgttcagatatatactttaaatcaggctggattagttagtttagaatttccactcaatgaagaattagtttcaaaattggtttaa

SEQ ID NO: 39006 - DNA, 345 bp, Escherichia coli
atgaattcggaggtttgtttgcatctggtgaaagagcggtccgggattctgctgcccggggaagtatcagaaaggcatttctggttattgattgaaatatccgggatgcacagtgagaaagtgattaatgcgctcagggagcatcttgttatgggatatacccgcagggaggcctgtgagcagcacggtgtttctcaggggtatttatcaggagcgctggttcggattcagcacctcagtcagacggtgaataatctgcttccttattatgtttctggtttggcaatgaaccatgaagaggagggtgatcggtcagtaaagcgtggtggtgactggcgggtctga

SEQ ID NO: 39007 - DNA, 768 bp, Escherichia coli
atgaaaatcagacatcttgcagcgctcgttggcatactggcggggttgccggcttccggcgtaatggcagccggaaaccaggaaagcacgaagactacgtcaaaggttttttccctgcatctgggggccacaagggtgatttacaacctggattcatcgggggcctcactgacggtaatgaatgacctggattatccgatgctggttcagtctgaggtgctggcagagaatcagaaggacccggccccctttgtggtgacgccgccgcttttccgtctggatgcacttcagtcgagccgtttgcgaattgtccgtaccgggggtgtttttcctgaggaccgtgagagtctgcagtggctttgtgtgaaaggcattccgccaaagcatgatgaccgatgggcagaagagaaaggtgctgataaaaagaaagctgacaaggcaaccctgcaggtaaatctttccgtcagcagttgtgtgaagctgtttgttcgtccgcctgcggttaaagggcctccggaggatgcgggcggaaaagtggagtggacaaaatcaggtaataaactgaaagggaataacccgacaccattttatattaatatttcagagctgagcgttggtgggaaagaggttaaggagcatcgttatatttctccgtactcctcttacgaatatgaaattccttctggtgcatcaggaaaagtcagctggacagtgattacggattacggcggaaagagtaagccgtttgaatcggaattaaaaagctga

SEQ ID NO: 39008 - DNA, 2589 bp, Escherichia coli
atgcacaggaataagtcatcttcaggtttatctttatattgcgtaaaaacaaaaattacagcggttgctctctctgtgatggcggcctgtacccttctttacaccgggaatactgaggcccgcacatactcctttgatgcttccatgcttaaaggtggcggaaagggggtggacctgacgttgtttgaagaaggtgcccaactgcccggtatctatccggttgatattatcctgaacggttcgcgggtggattcgcgggacatggcgttccgtacggagaaagatgcggagggtaagacttatctgaaaacctgtctgacccgggaaatgctggcccgctatggtgtcatgacggaggaatatccggagttgtttcacggggatgacggaaaggaagctgaagcctgtgctgagttatccgttattccacaggccacggaaacataccagtttgcgtcacagcagttgctgctgagtattcctcaggtggccctgcgcccgccactgagggggatagcgccggaggccttatgggatgatggtattcctgcttttctgctgaactggcaggcaaataccagtcgttcagaatatcgtggatacgggaaatcggttactgacaattactgggtcactcttgagccgggcattaatcttggtccctggcgggtgcgtaacctgacaacctggaacaggtcatccggtcagccggggcagtgggagagtgcctatattcgtgcggagcgggggattaacagtctcagaagtcgtctgacgctgggtgaggattacacgccttcagacatttttgacagtgtgccgttccgtggggtgatgctgggggcagatgagagcatggtgccttataaccagcgtgaatttgcgccggtggtcagaggtattgcccggacccaggccaggattgaggtgcgccagaatggttatctgattgacagccggacggtggccccgggcgcatttgccctgacggacctgccgctgacggggtcaggtggagaccttcaggtaacggtacaggaatctgatggtactgctcaggtgtttacggtgccttacaccacaccggccattgcgcttcgtgagggatatatgaagtacagcattgccgggggggagtaccgttcttcagatgatgctgttgagcattcaccgctggggcagatgagtgtcatgtatggtctgccatgggggctgacggccttcgggggagcacagatgtcatcgcattatcagtcagcggctctggggctgggatggtcaatgggcagactgggggcggtgtcggttgacggcattcattcccgcggtcagcagaagggacgggatacggagacgggagagacatggcgtctgcgttacaacaagtcatttgaacttacgaatacagatttgacagcggcgagatatcagtatacgtcctcaggattccacacattgtccgatgtgctgagtacatttagaaatgataattttcgtgcatatagttatagtggggacaggagtcgccggacaacattacgccttaatcagtctctgggatctctggggtatatgagcttttacggtagccgtgatgagttccgtcataaccgacagaagcaggattctttcggcatgtcatatggaacgtcatggaagaatatttcgtggtacgttaattggtcacgtaactatagtacaaatgcatattatcagagagggcatatagaggatagtatcaatctgtggatgaatattcctctggggcagtggattgggggtagagataacgatattaatgttacaactcaaacgcaaagaactacggggcagaatacttggtacgaaaccggtttgaatggtcgcgcatttgaccgtaggttgtattgggatgtgagtgagcggatagctcccggaagtgaaaataatgtagacagtagccgactgaatttgaggtggtttggtacctatggtgagttggcggggatgtacagttacagcagttatattcgccagatgagtgctggtatatcaggaggtatggtgctccacaatgaaggtatcactcttggtcagaaaggagaggatacggttgctctggttgtagcacctggagttaatggcgcttcagttgggagtttgcctggcgttaggaccgataccagaggttacactcttgtgaatcatgtatctccataccaagaaaatcttattacactggatccgacaactttcccggaaaatgtggaagtatcacagacagatactcgtgttgttcctacaaagggagccgtggttcgggcgaagtttatcactcgagtagggggaagagcactgataactctgtcacgtagtgacggctctcgcctgccttttggagctgtggtgacagaggaaggaaagaaaggtcaaatgcctggtggggcaggggttgtgggggataatggagaagtgtatttgagcggactggatgaaaccggacagttgaaggttcaatgggggcgtaacagttcttgccgtgcaaattatcgacttccagaggagaaagaagcaactggtatttttctggtgcgcactgtgtgtatgtga

SEQ ID NO: 39009 - DNA, 420 bp, Escherichia coli
atgaagaaaatacagatagtatgtagtggtattgtactggtggttatatccagtctggcgcaggcagttgaactgagtcttaataccagtgatggaaggagtggcgagttaaaagacggtacgaaggtggcaacaggaaggattatctgccgaggcacctatacaagttttcatatctggatgaatagcagacaaatgggaaatattcctggtcactatattatactgggtagacatgacagtcataatgaaatgcgggttaggctggatggcgcaggatggttgccatcggtaagtgatgggcaaggtatggtcagtaccgggatacctgagcagcatacatttgatgttgtgattgacggaaatcagctgcttgggcctgatgaatatatattatcagttagcggagaatgctcataa

SEQ ID NO: 39010 - DNA, 513 bp, Escherichia coli
atgaatttaaagaaaatagctatcgcaagcagtgtctttgcaggtataacaatggcgctaacttgccatgctgtgacagtaacagccactcatacagttgaatcagatgctgaattcacaatagattgggtcgacgctgggccaacgactacagatgcaaaagatggtgaggtttgggggcaccttgatatgactcaaaccaggggaacaccaacattcggaaaactccgcaatcctcaaggagagacttcgccaggaccgttgaaggcgccattcagttttaccgggccagatggtcatactgcaagagcgtaccttagttcatacggcgcaccgattcacaactacgcaggggataaccttgctaatggggtgaaggtaggtagtggaagcggaaacgatccatttgttgttgggacaacaagtcgactaactgcaaaaatcttcggagaccagacattggttccaggagtctaccggacaacctttgaattaactacttggaccgactga

SEQ ID NO: 39011 - DNA, 132 bp, Escherichia coli
atgccattgatgcagagtttaaaggaacagggctggttcgttatggaacaacatttgtgcctgaggaaagggggtgtagtatctgaggcaacagaagtttgtgtggggggggcggtttattaccatgcctag

SEQ ID NO: 39012 - DNA, 2682 bp, Escherichia coli
atggtcacgatttatgttgacggtgaaaataagactcataaaattaccgactggacgctgtgggctggaaatgacgacagagaggttatgctgacctgtcattttcgcagcgggagaaaatatactcgtccgctttctgtatgtcagataacgccaactgtaaatttgcgaaatgttttcctcgaaaggaaagggaacgctgtaacatcccgggctgaacgggttattatatatggtgataaatatgctgctgtttattaccgcgagggtgaacgaccctacatcatgaaaacaaccggtcttgactttcaacagtgttcagcatttacagagcatgccgtgtttaattacttgtgtagggtggctaatgaacgtattttttatgcccgtggtaataacagaaatatcgatgagaatatccttaggcagataaggaaaatagttcctcatcctgataccgccttgcatgcatactgttcaggacagagtaaaaaacgtgattcgccatggggtttgatttttccgtttggtcttaatgaaagtcagttgctggctgtcgaacgggcattttcctcacagatttcagttattgaaggaccacctggaacaggtaaaacacagactatactcaatattgttgctaatatattaattcagaataaaacagtggcaattttgtccaataataactcagctgtcagtaatgtttatgaaaagatggacaaacagcaactgggatatgtggtggcacgattggggagtacggagaacaggcaacagtttttttcaacgtcgatttcgcgttctgaggaagtcttacctgactcaccgtctgcaaatgcgattgatgatgtacttcaacaagtgaaaaaacacctgaatgccattaaccaggtcgcttcgttaaaagcagaaattaatgagctgaatattgagtataaatacctgcagcaatggcagagtcagaatcttcgaccggaggagcttttttctcacaaataccgattttcctcacaaaaaacaaccgacctgatggcttatattcattacctttctgacaggcggattggattcagaaacagaattgatttgttgttaaacttcaggatactgaaagtcaaaccattgatgattccggagagaaggctggcactatttacttctcttcagctttcttattatgaaaaaactatccgggaaaaacaaatttctctgaatgaatatgaggaagtatttaaaaaatctgattttaaaattttactggggcgcctgacatcatggtctatgctttatttaaagcaacatctgcgaagaaatgtttcaacaagaagttcattctcggcagagacatacagggatgaatttgaccgttttataaagcgttttccggttattggtagcagtacgcattcggttattaactctatcggcaagggggcccttcttgattatgttattattgatgaagcctcgcagcaggatattgttccgggcattctgggactgggatgtgcccgtaatgtaatcgttgtaggggatcgtaagcaacttccacatgttcctgtattactcccgaacagcccatctccaccggcagaatactataattgtgagaaatatagtctacttgattcggtttgtatgttgttcaggaacatggtgccagtaacccttcttaaagagcattatcgttgtcatcctaaaatcattcaattttgtaataagcagttttatgataatgctctgataccgttaacggttgattccggtgaagcctcattatctctggtcatcacggcaaaaggaaaccatacccgtaatttttcaaatctcagggagcttgaatctctggaaggtcattactgggatgaagaaagtagcaggggatacattgccccatataatgcacaggttaatctggctgaaaaagtgctgcctgctgattttgtgaaatcgacggtgcataaatttcagggacgggagtgcgatgaaattgtgttttccactgtgctggataagaagcgcagcagccagcacagtcggaacatcgcgtttgttgataatcctgaactggtgaatgtcgctgtttcaagggcccgaaataaatttacgctggtgactggtaacgatgtatttgaacgccacgctggacatattgcggcgctgattcgttacatcaaatactacgctgatgacggagagattttcgagagcccggtcatatcagcatttgatttgctgtacagtgagtatgacaaatcactggaacgactgaatagtagattgaattcaaatgattcacactttaagtcagaacagattgtggcctgcctgttgcgggatatcctgtcgcaggatagttatcggagtatgatgtttcattcacaaatagcgctgaatcagttggtgttgctggagcggggggattttacacaccgtgaacagttattcatgcgtaaccgggccagttgtgactttgttgtttactataaggtcgggaagactccattaggggttattgaagtggatggaggttatcatctgaccagtgttcaggctgaacgtgatgaacttaaaaacagtatactgaagaaatgcggcctgccattgctaagattacgtactatagacagtgatatagaagggaagttgggagcgtttctgtcaggcctgacaggctaa

SEQ ID NO: 39013 - DNA, 129 bp, Escherichia coli
atgcagatggtgaacgattcaaatatcattttgcaggaagtattcactgcaatagaattaccccctgataaagtttattcactaaggaattattcaacagaaccattccctgttagctttgagcaatag

SEQ ID NO: 39014 - DNA, 156 bp, Escherichia coli
atggaattacaggactggcgaaaagaacctcgtaaaaactattcgaatgaattcaaacttcgtatggtggaactggcatcacaacctggagcttgtgttgcacagattgcacgtgaaaatggcgtcaatgataatgttattttcgagcctgtttaa

SEQ ID NO: 39015 - DNA, 549 bp, Escherichia coli
atggctcatgcccggagaaaaatccacgatgtgcatgcaagagcgcccaccgacatcaccacggaagccctgcagcgtatcggtgaactgtatgccatcgaggcagaggtccggggctgttcagcagaacagcgtctggcagcaagaaaagccagagcggcaccactgatgcagtcactgtatgactggatacagactcagatgaaaacactgtcgcgtcactcggatacggcaaaagcgttcgcatacctgctgaaacagtggggggccctgaacgtgtactgcagtaatggctgggtggaaatcgacaacaacatcgcagagaacgccttacggggagtggccgtaggccggaaaaactggatgttcgcgggttccgacagcggtggtgaacatgcggcggtgttgtactcgctgatcggcacatgccgtctgaacaatgtggagccagaaaagtggctgcgctacgtcattgaacatatccaggactggccggcaaaccgggtacgcgatctgttgccctggaaagttgatctgagctctcagtaa

SEQ ID NO: 39016 - DNA, 135 bp, Escherichia coli; identical to SEQ ID NO: 30527

SEQ ID NO: 39017 - DNA, 876 bp, Escherichia coli
atgcgcgccgaggtgcagcggcattatccgcacatctggcaggagctggaggggctggcgcagggactggaggccactgttgatcaggtctttgcctggaactgccgtggcgatctggtgcgctcaacgtcggatggctgtacgacggtggccggggtaaacgccgcaggcgagcggattatcgcgcataatgaagacggttttcctcagttacgggatgaatgcttgctggctaccattactccgagtcgcggtctgagctttacgagttttgcctatccggggtcgatttgcggccacacctttgcggtaaatgaaaaaggtatcgttaacacggtgaataacatccgtgcagtgtatcgtccgcagggattaccgcgtcagatcctggctcgcgcctcgctgaatgcgaacaccctcgacgaggccatcactatacttaccggccagccgcgatccggggcgtttcaccatacgctcgggcagctgggcgatgcgcggctgttcagcgttgaggccaccggtcaaggctgttccgttctacccctgacgacggtaaccgggcatgccaaccatctggtgcatgcggcactggctggcgttgagcagatcgttaccgacagttcagcgtcgcggcagttacgcctcgtgcagtggcgggaaacgcaacctccgtttgacgccgcggcggcaaaaaccattctctcagatacccatgacgcagaactgccaatttaccggctggctgccgacgatccggatgaggagaacaccctcgccacggcagttttcaccctcgatgccaaccacgtcaggtggcaaattttcgacattaaccgcgacgatgctaaatttcatggagaagtgcgtgggtga

SEQ ID NO: 39018 - DNA, 507 bp, Escherichia coli
atgggcggaatggaagatgcttttttcttccttctgcttttttgcctttccgcaaaatcaataagttcgcccatttttataccctccggttatatcttcagatcatcaagtgataaaccactatcaagcagctctttgagccatgtgggtcggcggccagtcccggaccaggtattttctgcgttcctggggtcgcggtattttgctggtctatgttctctggggttggctacgccctgcatcttcatggcttccaggctaatgccagcgtccaattttgcagttagccaggccgggcgcttccctataccagtccacgtattaaaagggttatccgggtcacgatacacgggttcgccttttggtcgtttttctgatttcaggggaaccagcatcaccttccttccttcagcggttttcttttcgtttcttcttgacacgatctcattagcccttatcataaacaaaagtcgtcgaaattacaattacgcggtgaaacataaatga

SEQ ID NO: 39019 - DNA, 783 bp, Escherichia coli
atgaatgatcaacggattgaatatgttttttgtttggctccagccaaagagaatgtattgtcatcatactatccgtttaaaaaatcgccagagacaccagttgaacagttactctccatttgtactgatatagtttatcctttagatatattaagagatatcggtgatagctcatattctaaagttgatacgcactggtctgattttgctgcattgcaggtggctaaatatatagataatatcttaaataaaaacaacacggtcctcgataattctattttccctttttacattaaaaggagttatggcgatttaggaattaagacaacccctccgatttcgcaggatatattgaaggctgatttctctggtattgataattatattgtttatgataacggggttaataatagaggatgggtgagagtatttgaaaataatcgcaaaatagatgatagtgtcgtggttttttttggtgattcttattctataaatatgcttccatattttgtaaataaatataaaagagtaatccatgtattttctggtgcgagtgtggatcttgatgtggtggctcatgaaaagccatcaaaaataattattcaggtcgcttctagatttattgtgaagccacctaaaaacaatttctgttttacttctgaaattgttagaaaaatatacaagaaaaagattaataattttgagtataattcttgtccttcgcttttattttatcatgaaaaaatgagtaaattatataatactgaatctgcaccctcataa

SEQ ID NO: 39020 - DNA, 837 bp, Escherichia coli
atgaaaaagactctgattgcactggctgtggctgtttcggcagtatcaggtgcggcgcatgcgtggaccactggtgattttaatggttcatttgatatgaatggcacaattactgctgatgcgtataaagacaaatgggaatggatggttgggggcgctctctccttcaacaacactatcaaggaaatgacaggtgacagtaagctgctgaccatcactcagtctgaaccagctcctattcttttagggcgcacaaaagaggcgtttgcagcatcgattgttggtgttggtgcaattcctttaattgcgttcagtgattatgaagggaaaggagttgccttacagagttctggggataacggtaaggggttctttgaattgcccatgaaagatgatagtggaaataatctcggtagcgtaaaagttaatgttacttctgctggcctgttttcctatagtgaaatatcaacaggtttagttggtataacttctgttgccagtggcgataatacaagtatttattatggtggtctggtgtcgccagcaattagggcgggtaaagacgcagcatcagctgtgtcgaaatttggcaactataatcatacacaattgctgggccagcttcaagcagtaaaccctaacgcgggcaatagaggacaagtaaataaaaatagtgcggtctcacaaaatatggtgatgactactggtgatgtaattgcatcctcttacgcacttggtattgaccagggacagactattgaagcaacctttactaatcctgtggttagcaccacccagtggagtgctccgctgaacgtggcagtaacttataactaa

SEQ ID NO: 39021 - DNA, 651 bp, Escherichia coli
atgaatgcacgaaaggcggtactggcagataatccggaattgatcctgcgtgtgctacagctgagatttgacgagtcactgtcgtacccgcgcatttctgcgcagaccggagtcagcaaaaccgccattttttctctggtgaggcgatttcaccagatattcgctgactggcctctttccggtgaatattcctgcatgcaactggcccgggctcttttccctgggcgatacccttcagccccgacagtgactcagcctgtgaaaacagagaaaatccgccggaaccgattttcaccggagtttaaatggaggcttgttcagcaaactcttttacccggtgcctgtgtcgcacaaatagctcgcgagaacggaatcaacgataacctgctctttaactggcggcatctctggcgtaacggcggcctgcagccgcccggcgaacatgaaacatcgctacttcccgtgacgttaacgccggagccggataataaaatcccggcaccagtgcagatacctgaacagataaatacactgccagacagtctgtgctgcgagctggttctgccggccggaactctcaggctgaaaggtgaactgacaccggcgttattacagacacttatccgcgaaatgaaagggagcagccactga

SEQ ID NO: 39022 - DNA, 348 bp, Escherichia coli
atgatatctctccctgccggttcgcgtatctggctggttgccggtatcaccgatatgcgaaatggctttaacggcctggcctcaaaagttcagaacgtcctgaaggatgacccgttctccgggcatctgttcatcttccgcggacgccggggtgaccagataaaagtgctgtgggctgacagtgacggactgtgcctcttcaccaaacgcctggagcggggccgcttcgtctggtcggtcacccgcgatggaaaggttcaccttactccggctcagttgtccatgcttctcgagggcatcgactggaagcacccgaaacgaacggaacgcgctggaatccgtatataa

SEQ ID NO: 39023 - DNA, 189 bp, Escherichia coli
atgtccataggttcaattgttattcgtgatatcatacaaaacttctcttgcttaagagcgggtgttaatctttcatatttagaggataaagatactcactcccttgatgagcttgcagatcttatgcaggataaaaatattgatgttaagtttcttgtggaagatctagcggaaaactggaaggagtaa

SEQ ID NO: 39024 - DNA, 207 bp, Escherichia coli
atgatgacgctggcggggaaaaatctccgccttttccagccggtccccggacagagcacaaaggatgtcgccggcggctccgctttacccggccatgcggggcatggccttgtgggttttcagttatgtagcctcagcgtcgtgtgcgggctgtgccgtgcctccatcgtagccgggcttctgcgggcgggttgcaaggtaaggtga

SEQ ID NO: 39025 - DNA, 849 bp, Escherichia coli
atgaataatgatgagctggtcaccagacgtgcgcaggcgattgccgaagacaggtgtttctcgaaaggacgtctgcgcgatgaattcagaatgaagccagcccccggtgctgagccggttaagtggtataaaaatacttatggtggcaggttcgctgtataccgaattgcagactgtgttccgatgcgtgagaaacgccctctgacgagtaaacaacagctggctggccagcggctttccgttttatcccgactaaacagcaccagtggccggatggcacggcaggcatatgactggctgagtctggcaccgctctttctggatactgaaacgacaggactggataataccgcggaagccctggaaatcggcctgaccgatgcggccggtcaggtggtatttgaaaccaggctgaagcccacggtcgccatcggggcgcaggccgccgccgtgcatggtatcagtgagcaggcactctgtggcgcaccatcatggacagatgtggctcggcaactgcgtcatgcaatcggggaccgaccagtaattatctttaatgcccggttcgatatccgcattctgaaacagactgctgccgcacatagcgatccggctgactggctggaagaactgacggtatattgtgcgatggagctggctgcaggatattatggggccaccaaccgctatggcacgatttcactggccagtgctgccagccaggccggactgacctgggaagggcaggcacactcagcgatcgccgacgcacggatggcggcaggggtggtaaacgctattgctgcatatcatctggaactgctgcaggaacaggcccggctgaaaatctga

SEQ ID NO: 39026 - DNA, 261 bp, Escherichia coli; identical to SEQ ID NO: 22235

SEQ ID NO: 39027 - DNA, 396 bp, Escherichia coli
atgtcagcagaaccaatttccggtacggccgttgctgctggtggcctgatgggtgccagcgtttttggtattgcaactggtattgattacggcgttgtattcggggcatttgctggcgctgttttctatgttgctacagcggtgaatattagccgtctcaagctgattggctatttctttacatcgttcattgttggagtgattggagcgccgttagttggctcatttcttgccaaatggaccagctacaacgatcgtcctctggatgcgcttggtgcggttattgtggctgcattgaccattaaaatcctcacgttcgtaaacagccaggatctcggtagcatctttggaatgctttcccgcttacgtggagggggttcaaatggtaagcagtga

SEQ ID NO: 39028 - DNA, 267 bp, Escherichia coli; identical to SEQ ID NO: 7253

SEQ ID NO: 39029 - DNA, 453 bp, Escherichia coli
  misc_feature (275)..(284): n is a, c, g, or t
atgatcggtcagacggcaaaccacttccagcaagcgccgcttgcccgtggcctggaagaaggcgactccggcttcaatcagatgaccggcgcagtaaagttcatggcactccgccagattgctccagcgttcttcgggcgcttttaccgtaaagtaagtattgagatagccatcttcgcactgggcggaagcgatcagttcaatcacctcgtcggcggttttttccagttcggcgtccggcttctggcacagcgaccaggctaccgcttccagcnnnnnnnnnnggatacgatcgttcaaggcatcccactggtaaggaatcaccacgtcgcggaccagttgttggtactgaccgaggaacggatcgctgaccgtcagtttatgcagatcgacttccgaaatgttcatcttgtgctccttaaggctgtacatgacgctgacgcaggtcgctag

SEQ ID NO: 39030 - DNA, 660 bp, Escherichia coli
atgctggtcatgtctttcctgctgattaacgtctttaatattcgcggcggtgggtatatgtacttcattacctacgtcttacaaggcagtacgggctacacgtcgctgttcttcactatggtcaccttcgcctccattatcggctcggtgattgtcagcccgttaacgcggcgtttcgataccgtcaaaatttactactacaccaacctgctcctcgccgcgctggcggtgttgatgtggttcctgccttctggcccggcttatcaaacgctgtggctggcggtgatcctcggtaatggcgtgattcttggcttcacattgccattgcacttctcattgatggcctttgccgatgactacggcgagtggaaaacccgcgtacgttcttccggcatgaacttcgccttcaatctgtttttcatcaaactggcctgggcctccagcgccgggatcatcagcctgctgtttatttttgtcgcctaccagccaggcgtggaaaaccagaccgccagttcgcttggcgggatcacagcaatggaaacattgctgcctgcgctgttccacctgctgctggcgatggcgatccgcttttgcaaactcaataaccctatgatgtcacgcattgctagcgacctgcgtcagcgtcatgtacagccttaa

SEQ ID NO: 39031 - DNA, 516 bp, Escherichia coli
ttgcgtgccgtggctgcgggcagtcgtctgagtttttccagtacagcgcgcaactataacggcacttacagcgcccagcgtcaggagctggttgaatctactgatggctacctgatcctgcaggactggtttattggtgccgtcacccgcccgatgtatcgtgcctggctgaaacaggctgtggcatccggtgttatcaggctaccccgcgatctggaccgatcttcactgtataccgcggtgtattccggaccagtgatgccgtggattgaccctgttaaggaggctgaggcctggaaaatccagattcgtggtggagcggcgacagaatcagactgggtacgtgctggtggtcgtaatccggatgatgtcaaacgtcggcgcaaggccgaaattgatgaaaaccgcaagctggatctggtatttgataccgatccggccagtgataaaggaggcagcagtgccgcaacgaaacgacaggagccgcagcacaccgacgaccagtccgaagaataa

SEQ ID NO: 39032 - DNA, 786 bp, Escherichia coli
gtggtctatgatgaatggcagttgccacgcgtggcggaatccattccattatttggtcagagcggggacgatcgatatatcgccgtcgataagatgatccttaagggcatcgacgtgctgccccatgcactgattaataacgtcgaagagaaactgggctttaaaggtgaaaaactgcgcgaatatgtccgctggctgtcggatcgtattctgagcaagcgcaccagcgcacgctaccacccaaccctgcacatcgatgtatacggcactatcggtctgatcttcgatatggatccgcttcgctgtgcgcaatacatcgccagcctggaaaaagaagcgcaaggcctgccgctctacattgaagggccggtcgatgccggtaacaagcccgatcaaattcgcctgctgaccgcgattaccaaagagctgacgcgcctcggttccggcgtgaaaattgtggccgatgaatggtgtaacacctaccaggatattgttgatttcactgatgccgccagttgccacatggtgcaaatcaaaaccccggatctgggcagtattcacaacatcgtcgatgcggttctttactgcaacagccacagcatggaagcgtaccagggcggcacctgcaatgaaactgatgtcagtgcccgcacctgtgtccacgtcgcccttgccgctcgccctatgcgtatgctggtaaagccagggatgggctttgacgaaggcctcgatatcgtcttcaacgaaatgaatcgtactatcgcgctgttgcaggctaaggattaa

SEQ ID NO: 39033 - DNA, 303 bp, Escherichia coli
  misc_feature (124)..(133): n is a, c, g, or t
atggccagactgattaaaaacattgatacgataagccacggctcgctaaaagcgggccgtttgcttaatgggctaatggataactccagaattgccgaactgattgcgtcaggacatgctattnnnnnnnnnnacgcggggttgattacgcgaacggaggcgggtagctgtgtattcgaggttgagtttgaggatgatggcggcaatgaggaaatggttgctgatgattcatctgaatctgtagctacttctgataccagtaatgcgaaaaaatcaacgcaaaaaaaaggtaataagaagtaa

SEQ ID NO: 39034 - DNA, 183 bp, Escherichia coli
atgatagtggttctggcgaaagtagtgaggggggaaaacctcggtatggtactcgtgataacacaacaaataattttggttctggtgaatcagatcatgacaattacaaatttaacacatccacggatggagagcatgcacattcagttaatgttggctcacactctcactctgttattttag

SEQ ID NO: 39035 - DNA, 273 bp, Escherichia coli
  misc_feature (178)..(187): n is a, c, g, or t
atgcgttttggttttaccgtcgttgttatattcagtaatggtggttttagtcgcgctgtcggtacgactgcttttgctgatttgatcatgcgcttcacggtaaacatagtttgcgcgcgcaataacgttcttactgattttttgctgcaagcccattgccagttcatcgttataaggnnnnnnnnnntaccgattccgtccagctattgcgaatatcacgtaatcccatatcaagaatattcccgccatagtaacggttataacctgcggtaa

SEQ ID NO: 39036 - DNA, 231 bp, Escherichia coli; identical to SEQ ID NO: 7660

SEQ ID NO: 39037 - DNA, 849 bp, Escherichia coli
atggatagaccaatgccgtctctacgttcagcttacgtttgtaatttgtcgccggagttccagcctccaaagcaccatacgcacaagctgccgctggtgttatctgatgctttacagcgcattaatgggcgtgatcttacgtgtgaggttgcgttctacgttaatcaaccgtcagagcggaagcgccggataaacgagcatcgtcgtcgggcgattaatgctgtgatcgctgcgattttgcaccatgtaaacatcatttctaagcgggttctggccagtgctgaggcgttggctgatttttgcggcctgtctaccgtatccgaagctgggaacaagtctataacgcgctgtacaagggcattgtcgcaactgaaagcgttaggttttattgattatgaacgtcgctgggatcgggtgaataaacagtattggccagcgaaaatagagattcgtgatcaactgctggaaaccgttggtattactgaacaagcatggagacgtgcggttagccagaaacttaattacttcaatgcgaagaatagcgaacggcttaaaaaagcgataacggaggctgattataagcgtattgttattcaggagcagatggagaatgtatggcatcagaggaagacggccagagagataaaggcaaaacagaaagcagcggagagagctgcgcgtcttgttcgggaaaagggagaggccgaacttcgtcatcaaatcactagagaggttagccaggaatttgctgatggcatgtatcctggagctgaccttgcatatttacgatccctcgttgagcagcgttataacaggttaagaaagacctggaaatcactccaacattaa

SEQ ID NO: 39038 - DNA, 144 bp, Escherichia coli
atgaatctgtccggcatggctgaggtcatccaccaccgactgcaccgtggcgttatcggggatattccaggtggcatcggaggcgagagtgacattcgtggggtcaatggcaccgttcagcacagtgctgccggtcagctttag

SEQ ID NO: 39039 - DNA, 642 bp, Escherichia coli
atggcctgcagcaccatatatccctgcggtcacagacataccggcaacctctgttctcagcaggtcaccctccaggcggacgaagccatagctgccgctgctttccggcgtggccccacgggcaataccgccgttgttatcgtgaccgagatggccgccctgaatgctgagacggacgctgttattttcaccgtttacaccggtctgatggctgcgggagcctgccagaatccggtcatagtccattgcctgtgtcagcatggaggcatacagggggacttctgcacgataagcattttcactgcgcagataccagctctcatcactgtcccggttgagggagtagttaaaggcaccggcctgcagcctgttcccctggacaaaggccccttcctccgtggtggcaccgttaatggcttccaccacctgaatacccttaccgctggtcgccagccccgacgcactgttgccggcgttcaccaggttcaggatggtttttccggttgccctgccgccgtcaatgaccagtctgtcagcattgttctgtgccatatccgggcgtacacgcaggctgatggtgccattctgcccgttcaggtttttcactttcagagtcgccggcacaaatgtccctgtgcgtga

SEQ ID NO: 39040 - DNA, 144 bp, Escherichia coli; identical to SEQ ID NO: 39038

SEQ ID NO: 39041 - DNA, 390 bp, Escherichia coli
atgtttattgctcaggtcgggcatgagtctgggggcttcacccggttgcaggagaatttcaactacagcgtcagcggactggctaactttgttcgggctgggcgtctcactcagggacaggccaacgcattggggcgacgcgcaggcgaaccaccattgccacttgagcgccagagagcgattgccaatctggtgtacagcaaacgcatggggaacaatgcccccggcgatggctggaattaccgtggccgcggacttatccagagcaaaggttgcatgaagtataccggcgatattgcacgtgtaactctgattatcaatggtggcaggaatggcatcgacgaccggcgcgcgcggtacgtcactgccagtaaggtgctggctgtatga

SEQ ID NO: 39042 - DNA, 261 bp, Escherichia coli
atgcaatcaccattacggaatgtgcgtaaggcgcacggatttactttgcagcatgttgctgcgggcgttcaggtcaatccagcgacgctgagtcgtattgaaagactggaacaaattccatctatcgatcttgcagaacgtctggccaatttttttaagggtgaaatcagcgaaatgcagattctttatccggcacgttttcaatctagccaaaaccagaatgggtttaaaccacaggaacaggaggtaagccgtgggtaa

SEQ ID NO: 39043 - DNA, 504 bp, Escherichia coli
  misc_feature (215)..(224): n is a, c, g, or t
atggatctgtcatggcggaaacagcggttatcaatcacaagaaacgtaaaaatagcccgcgaatcgtccagtcaaacgacctcactgaggcggcatatagtctctcccgggatcaaaaacgtatgctgtatctgttcgttgaccagatcagaaaatctgatggcaccctacaggaacatgacggtatctgcgagatccatgttgctaaatatgcnnnnnnnnnngggaaggaagtggttttttatcgccctgaagaggatgccggcgatgaaaaaggctatgaatcttttccctggtttatcaaacgtgcgcacagtccatccagagggctttacagtgtacatatcaacccatatctcattcccttctttatcgggttacagaaccggtttatgcagtttcggcttagtgaaacaaaagaaatcaccaatccgtatgccatgcgtttatacgaatccctgtgtcagtatcgtaagccggatggctcaggcatcgtctctctga

SEQ ID NO: 39044 - DNA, 276 bp, Escherichia coli; identical to SEQ ID NO: 7622

SEQ ID NO: 39045 - DNA, 597 bp, Escherichia coli
atgatggtccctttaccatcatcaacccccaaattaaacaacatagcacccacacggttattattacttggctttcctataaatggtaaacctaccccaccacgccccctgatagagtatattcgccttgattctctcggcttagtaaagcgatatacctctgtcgtaaaatgcccaccagagtcaatacaaacggaagaaatctgtaattttcgaccgtcacggaatgaccagctacggagtaagtattcatcaagttgtttccagacaacatcttgtgcgggatcacctgggaatattttatattctatcccccatgactccttaccttttccccaaccgaccaattcacaaactaaatacgtgtcctgtacgtcaacaccagcacttaacaataaaacatcatctggtaaaaactcttcaaaccttattctgcgttgcaacaagtattcaggatcgatatcgtctttagcatcctctttccatggctcacccagcttaaggttaataaactccattaatccatttttatcgcggtttctggttgcttccgtaaattcttcaaccagctctgacaatgcaacccacggggagtaa

SEQ ID NO: 39046 - DNA, 210 bp, Escherichia coli
atgtacagcagagtgttaaccatatggctgatgacgatgttgatcgcgagctgcgggagtcgtggaagcgtcccggtggtggttgataccgcctgtgattgggtaaagcccatctacctgactgatcacgacatcgatgttatggaccgccagacaaagaaagatattctggctcataacatggcatgggaaatcaactgtccaaagtaa

SEQ ID NO: 39047 - DNA, 327 bp, Escherichia coli
  misc_feature (250)..(259): n is a, c, g, or t
gtggtgtggaatatcgtctggaacgcgacggcggcgtttatcgccgtcattatcatcagcttgctgctggatgagtccggcttttttgaatgggctgcgctgcacgtctcacgctggggcaatgggcgcggtcgcttgctgtttacctggattgtcctgctcggtgctaccgttgcagctctgtttgccaatgatggcgcggcgcttattttgacaccgattgtcatcgccatgctgctggctttagggnnnnnnnnnnacgctggcgtttgtgatggcggccggattcattgccgataccgccagcctgccgcttattgtctctaa

SEQ ID NO: 39048 - DNA, 372 bp, Escherichia coli
  misc_feature (311)..(320): n is a, c, g, or t
ttgtttagccgtgtactcaatgaatatgtcggtacggaagctattccgcttgccgatattcttcgtgatgatcgtccggtaggcgagtgcctggttgaggtattaaaagaagcggcgcgcagatatagccaaaacggcggctgctctggctgtatggttcttgaaggtattcatagtcatgatccacaagcgcgtgatattgccgttcaatattatcacgccgcagaaacgaccatttatgactatatcgccaggcggcatccacaaagcgcacaatgtgtgactgattttatgagtaccgtgatgtcagnnnnnnnnnntgcaacagctgccctggcgggggaagcgataaaaactcttctcaaggagtga

SEQ ID NO: 39049 - DNA, 192 bp, Escherichia coli
atgcgtcaggccgagcgggcgataaatcgactcttcaacatagcggtcaagtggctgaccggtaaccgactcgacgataaatccaagcagcatataatcgacatcgctgtagatatgcttgctgccgggctgatactccagcggcgtgcgcttgatcatctccagcgtctggcctttatcctgggaatataa

SEQ ID NO: 39050 - DNA, 444 bp, Escherichia coli
gtgatcaaaaacccggatatccaggtcgggagcctgaaggagcaaccttcggaaataaccgtcaccctgctgaccgaaccggacaccaatactaatgcggagggtgaatcagccgccgtggatgtgcaactggtgtacctgactgacgactcaaaattgctggcagccgactatgaccagatagccagtacgccgctaccggatgtgctgggtaaaaactatatcgaccaccaggatttcaacctgttgccggacaccatcaaaaccctgccgccggtaaagctggatgagaaaacgcagtttattggtgtcgtggcctatttctccgatgaccaggccactgaatggaaacaaatcgagacggtggaaggaaccggccaccattaccgcctgctggtgcatgtacgtcaaagcagcatcgaaatgaaaaaagaggatgaataa

SEQ ID NO: 39051 - DNA, 162 bp, Escherichia coli
atgcaataccaatgcatgagcacctattgtgacattgtttcctatacgcactttgccaccaagaatggtggcattacaaccaatggtcacattatgccctataacaatatccatatcattaaattccccgcgaagtccaatagttactccgggcttaattga

SEQ ID NO: 39052 - DNA, 441 bp, Escherichia coli
atgcccagccaatgtattgcctgcggtgcctgcgcctgtgcttgtccggcaaatgcgctgactatccagaccgacgaccaacaaaatacgcgcacctggcagctctatctggggcgttgtatttactgcggacgttgtgaagaagtgtgcccgaccagagccattcagcttaccaataactttgaactgaccgtcaccaataaagccgatctctatacccgcgcgacgtttcatctacaacgttgcagtcgttgcgaacgcccatttgccccgcaaaaaaccgtcgcactggctgcagaactgttggcacagcaacaaaatgcgccacaaaaccgcgaaatgttgtgggcgcaagcgagcatctgcccggaatgcaaacaacgcgcgacgctgatcaacgacgatacagatgtaccgctggtggctaaggagcagctatga

SEQ ID NO: 39053 - DNA, 444 bp, Escherichia coli
atgccatttaccgccgtgctgtttggcggcggtgcgctggcgctggccgggatgccgcccttcaacatttttcttagcgaatttatgaccgttaccgccggactggcgcgtaatcacctgctgattatcgtcctgctgttattgctgttaacgctggtgctggcgggcctggtacggatggctgcgcgggtgttaatggcgaaaccgccgcaggccgttaaccggggtgaacttggctggttgaccacctcgccaatggtgattctgctggtcatgatgctggcgatgggaacgcatattccacaacctgtcatcaggatcctggcgggcgcttccactatagtcctctcagggacgcacgacctgcctgcacaacgtagcacctggcatgattttttgccttcaggcaccgcatctgtttcggagaaacacagtgaacgttaa

SEQ ID NO: 39054 - DNA, 348 bp, Escherichia coli
atgtggacggtactttttagccagcgatttgacgactggctaaatgagcaagaagacgctcttcaggaaaaggttttggctgatttgaaaaagctacaggtttacggacctgagttacccaggccatatgccgataccgtaaaaggttctcggtacaaaaatatgaaagagcttcgcgttcagttttctggccgtccgataagagccttttatgcgttcgatccgattcgccgggccatcgttctttgtgcaggagacaaaagtaacgataaacggttttatgaaaaactggtgcgtatagctgaggatgagtttgcagcacatctgaacacactggagagcaagtaa

SEQ ID NO: 39055 - DNA, 297 bp, Escherichia coli
atgggggaagcaaaagagaaatgggcggaacggattgcattactgcgtgaatatcaggtgaacagcaagatgatgcagttgaccggtaacccggaggtcaaattcctccactgcctgcccgcgtttcatgacgaccaaacgacgcttggcaagaaaatggcggaagagtttggcctacatggcggaatggaagtgactgatgaggtcttcgaatctgccgccagcattgtttttgatcaggcggaaaaccgtatgcatactatcaaagcggtgatggtcgcgacgctcagtaaataa

SEQ ID NO: 39056 - DNA, 297 bp, Escherichia coli
gtgctgacgttgtggggaagcgataaaatcgttgctaccggcgtggcgattatctgggggctaacttttgcattggttcctgtcggctggtcaacgtggatcacccgctcactggccgatcaggcagaaaaagccgggtctattcaggtggcggttattcagcttgctaatacctgtggcgcggcaatcggcggttatgcgctggataatattggtctgacttcgccgttgatgttgtccggcacattgatgttgctgacggcgttattggtcaccgcaaaggtgaaaatgaagtaa

SEQ ID NO: 39057 - DNA, 360 bp, Escherichia coli
gtgctggcggataacggcctgtgggcggcgacgctcggtaccggattcctcaccgccttcctctcttctattatgaacaatatgccgacggtactggttggcgcgttgtccattgatggcagcacggcgtctggtgtcatcaaagaggcgatggtttatgccaacgtgattggctgcgatttggggccgaaaattacaccgattggtagcctggcaacgctgctctggctgcacgtactttcgcagaagaatatgactatcagctggggatattacttccgtacagggattatcatgaccctgccggtgctgtttgtgacgctcgccgcgctggcgcttcgtctctctttcactttgtaa

SEQ ID NO: 39058 - DNA, 174 bp, Escherichia coli
atgatgtttacgatactcaagctgggcgataaagggggtaatgccgatgcctcctgctatccagacctggtgggagcaagggagagtaaaatcaaactttccccatggcccttcaacgaaggcggactggccgatttttatcgaggatgcaagggtagaggtataatcccctaa

SEQ ID NO: 39059 - DNA, 123 bp, Escherichia coli
atgcaacaacgtactggctgtacggcgcatatcgtgtacggtgaaatcctgaatatgctcaccatcttcatttattattttcaccgttctgtcgatcagagagttcagcgcggcattagataa

SEQ ID NO: 39060 - DNA, 270 bp, Escherichia coli
atgagccgcctcagggtccagaccaaaatttgtatctttcaggtagcctggaacattgaacacgccacccataacgacgatatttttgaccgcgtgaacaatctgcgggtaaagctgcagggcgatggctacattagtgagggggccggtagcaaccaacgttatttcgcctggattacgacagatgagttcacctattgcttcaggcgcatggggttctacctgctggcacaatgctggagcaggaacattcgaccagagttgccgtaa

SEQ ID NO: 39061 - DNA, 342 bp, Escherichia coli
atgaaacaggcaacaagaaaaccgacgacacccggagatattcttctctatgaatatctggaaccgctcgatttgaaaatcaatgagttagcagagttactgcatgttcatcgtaatagcgtcagtgcactgatcaataataatcgtaaactcaccactgaaatggcattccgtctggcgaaagtttttgataccacagtcgatttttggctaaacctccaggcggcagttgatctttgggaagttgaaaacaacatgcgtacccaggaagaattgggacggattgaaacagtggctgaatatttggcacgccgtgaagagcgtgcaaaaaaggtcgcgtag

SEQ ID NO: 39062 - DNA, 300 bp, Escherichia coli
atgaccacggtcattggcgtgacggtatacgctgctgatgatctccctggcctgcactgctgttgcccggccaccgcgttcgacaatccggtcacacaaatcacgaaccatcgatgtggtaatttcagccatcattttgttgccaagaaccggaagtatgtcacggtcgatcactgcctgcttcattgcgcgggtactttcagccaggatgacgtgtttcatataactgtcggtatgtaccgcaaacgtttcggcaccacgaatctttttgataccgtcacgtttagccgcagccggtga

SEQ ID NO: 39063 - DNA, 240 bp, Escherichia coli
gtgcttacacagctactgggcgctgaagcggaaaacatcgacctctttgatcgactgcaactggaacacgttatcgctatctgccgtcaggcaaagtcgctttccgctgccggacgccagctttttgacgtttcgcgccaagggaaagccagcgtcaacgacgcggatcggctacgcaaatacctggcgcgttttaatctgacgtgggaagccgtgcaggatcagcacagctccagttga

SEQ ID NO: 39064 - DNA, 126 bp, Escherichia coli
atggctcaacattgctttatgccagccgttcagttgctgacgttgcaggcggttgtccatatgcgcaccgataaatccgatattcttataaccctgttccagcagatgttcggtcagtttatgtga

SEQ ID NO: 39065 - DNA, 123 bp, Escherichia coli
atgttcatcttcagaaaagactttggcaatttcgatatgtcgagtctgcacccaggaaggcacgttattttctgcgccatctactacaccttgctgcatcgcagtataaacttcgccaaatga

SEQ ID NO: 39066 - DNA, 210 bp, Escherichia coli
atgcacctgataactcaaaaagcattgaaagatgctgcggaaaaatacccgcaacataaaacggagttggtggctctggggaacacgattgctaagggatatttcaaaaaacctgagtcattaaaagcagtattcccttctctggataacttcaaatatctggataagcattatgttttcaatgtcggggcaatgaattacgtgttgtag

SEQ ID NO: 39067 - DNA, 174 bp, Escherichia coli
atggctattgtcggcgccgcggtggttccggcaattcagggatatattgcagatatgttccactcacttcagctttcattcctggtttctatgctctgctttgtctatgtcggagtctacttctggcgtgaaagcaaagtacgtaatgcactggctgaagtcacagagtcctga

SEQ ID NO: 39068 - DNA, 213 bp, Escherichia coli
atggcaaaacgctggagcgaaaagttccacggacagcgcgatatccagacacaactgatgtcccatcttgactacgcgctggctcatactgactggcatgcagagcgtcaggcgggcgacggtgatgccatcagccgctggacgccatatgacaagcccgtggtatcagcacagaaagaactgagcaaactgcctgtctaccagcgggtttag

SEQ ID NO: 39069 - DNA, 183 bp, Escherichia coli
atgactaagatgcgaaataacgccatatttttggcacaagtgtacttcctgacgcagtgcccggcgcgcttcgcgggcaagctgtggtttgtgattaacaacaatcccggttacctgctggcgcttacaggcagctatcaggcagcttttgcgttgattgaggctcaggcccagctccgctaa

SEQ ID NO: 39070 - DNA, 201 bp, Escherichia coli
gtgataaggcatttaggtggcacggatattcaagcgggaaatcaatcctttggtggaagttcggctagagaggtagcccgttgggagggcgcacttaacgaactgttatcctttgattatgtgattgaaagaggggcaaaaggacaaatgtattatgttactcataaaggctggacatttcttgaatctttaaatgaataa

SEQ ID NO: 39071 - DNA, 231 bp, Escherichia coli
atggtggagcagctccggctgcgtcagaaccgtcagcgcctgcaggtgataaccctgctccagttggtgatccatcacaacaggaaggtgataagccacaacctgttgctgatggcgataaacctgctgatgacaaaaagcctgaaaacgataagcaggatgaaaaaaaggacggcgataaaccagagggtgcgcctgagaagtacgagtttcaggctgccgaaggcgtag

SEQ ID NO: 39072 - DNA, 417 bp, Escherichia coli
  misc_feature (5)..(14): n is a, c, g, or t
atgtnnnnnnnnnnctatcaagtggtagatattccacaagaagaagctagacaagaagccaagacacaacaagaagctactgttaaagctgttcctgatcagcttcaacctacggaagataataaacagccttcttttgatgttcttgatgattggaatgcgcctttgccgtgggagacggaagaaacacctgtttcatcaagtgaaaaggtagctaatgataatgaggaggatgtgttagagaattttgcctctcttatcatccagaagaaagacaaaagaacaggaggagcatcctttatagaatttgcaacatcgttagcctataagcacaggttaaagctaccaaatggtattgaggcatattttgctaagaaacatcccaaagtatatgaagactttgatattccattttaa

SEQ ID NO: 39073 - DNA, 327 bp, Escherichia coli
atgacgacgttaactcaatgccagcagcaggtgctggatatgctgatttcttatcagaaagaacgtggcttcccgccaaccaatcaggaggtggcaaccatgctgggataccgttcagtgaatgcagcggtggagcatcttcgcgcactggagaaaaaaggcgtcatcacgataaagcgtggtgtggcccgggggatcacgcttcataccgtggtgaaggacgacgacagcgaggcggtcgggattatccgctcactgcttgccggtgaggaaaacgccaggctgcgtgcagcccactggttacatgagaggggcctgaaagtatga

SEQ ID NO: 39074 - DNA, 462 bp, Escherichia coli
atgggaagacgaaggaaaaatcctgaacacgaaaaattacctccaaatgtatacccaaataaatatagttatgtatggaaaccaacatccagagaatctgtcacactaaccgccatcaaggatggtttagctgctttatggaaaaagtatgaggaaactgtaaataatcgcgatcgtgcaatgacattcggtcgcttgtgggaaaaattcctcgccagcgcctgttacagtgaccttagtccaagaacacaaaaagattatctgcaacatcaaaaaaagttgcttgccgtattcggtaaggtaccagcggattccataaaaccagaacacatccgtcgatacatggacaaaagaggggagcagagtaaaacgcaagccaaccatgaaaaagcagtatgtcccgtgtttacagttgggggtatgagcgagggtacgtcaaggctaacccatgtgcaggtgtaa

SEQ ID NO: 39075 - DNA, 258 bp, Escherichia coli
atgcgcacatcaggaaaacttaataatcagaagaagcagcataaccgcgccattgaccttacagagcactggctgagagtggcgataaaaatcatcgaccgcaacacgggggaaggatacgcgaaagcacatcccgacctgataagcgcattcatgaccacagcagcggcaaactttgccacgctgacagaacgggagatcgcagaagcagaacaggtaacaaccatcaacgttaaaaccggagaggtggaatcatga

SEQ ID NO: 39076 - DNA, 270 bp, Escherichia coli
atgccacaacgaacgtttttaatgatgttaatcgtcgtctgtgtaacgatactgtgttttgtctacagtgggcaagacagtgctaagaatttgtggggaaaacatagagactccatgcggcgtcctgagatagacggcagacaggcattctgcctgaaaagaaaaagccggttcagagaaaaccggctgacggattatcgtctaacagttgatagctacctcaaaatacttctgcaacaggaacaccggcaactttttcccactctttaa

SEQ ID NO: 39077 - DNA, 552 bp, Escherichia coli
atgagtgatgaacgtcgtaaattatggctatacttatatcctgatgagccacagcaaaaatccgcaatagaaaccattgaagaaatacctcaaagacaacgttctgatttcttcagagatagtattgttgcaggtattgcattatcaaaactcgataaacgattacctgcacttgtatctatgttactacagcaagatagtaatatagatactcttgtacgtattttaaaaatactattccccaagcttgatattgactcaacggaagataaatctacactctgtgccgttgcttggcaaaaaagatgtcgggatgaattacaacaaggcacaccatggtctgcctggtttgcgattagtgaggatgaatataatcatcatcttaatcatccagaatcaaacagtcaggtacgtgcattatgggcttatgatgaaaacgagcagaaaaaggatatacaggataaagagagaacgccctttccggaggccaacaccaatacaagttcagaaacattgagtaatgctaaaaaattatttggtaattcaaattaa

SEQ ID NO: 39078 - DNA, 972 bp, Escherichia coli
atgattaagatattctgtgatgatggttctacagcggttaagctggcatggtttgaaaacggggaactaaaaaccctcattagtcacaattctttcaaggaaggctggaacacatcaggatttggcagtgagaaaacttataattacttagtcgatggagagaaatatgcgtttgatacacataacccatcagcaatagtcacaaccaatattgagtttcaatatagtgtagaaaatcgtctcgctgtacatcacgcactactacaaacaggaatggagcctggggatgtagagctttgggttacattacctgtatctgaatatttcactacagatatgcaagagaattcggataacataagaaaaaaaatagaaaacctgaaaaaagaaattacactgaataaaggcagcgtattttcgatcaagaaagttcatgtattacccgagtctctacctgcagcgttgacctctctcgaagaggataaagtcagtgatcttgaaacgtcccttgtcgtcgatcttggtggaacaactcttgattgtggcgctatagctggcagatataaaaatgtaacacaagtatctggagaacctggtcttggcgtaactctggtaacaacggcgacaatgaatgccctgaaacaggcaggaacgcataccagctactatattgcagatcaactggttagaaacagaaatgctgatgatttattcgaaattgttgttaatgacagcagtaaaatagatgatgtgaaatcagtaattgaaaacagtattacaagactttcagacagagttataaatcatttacactcgtacaaagggataaatcgtatatacatgactggtggtggtgcggaactaatctaccctgcaataaaaaaagcattccccttattaaaggataaagtaaaaattttaccagatgcgcaattagcccttgttatttctattgctgaaataaatcgataa

SEQ ID NO: 39079 - DNA, 483 bp, Escherichia coli; identical to SEQ ID NO: 21028

SEQ ID NO: 39080 - DNA, 1041 bp, Escherichia coli; identical to SEQ ID NO: 21019

SEQ ID NO: 39081 - DNA, 279 bp, Escherichia coli
atgcttaatactgtaaaaatatccagttgtgagttaatcaacgccgactgcctggaatttatccggtcgttacccgaaaattctgttgacctgatagtcacggacccgccgtactttaaagtgaagcctgagggctgggataaccagtggaagggcgacgatgattacctgaagtggctggaccagtgtctggcgcagttctggcgggtgctgaaacctgccggaagtctttacctgttctgtggtcatcgcctggcatatctgatatcgaaatcatga

SEQ ID NO: 39082 - DNA, 912 bp, Escherichia coli
atgctggacaaaattaccggaaaaacgccggtggcggcctatgtctccccgatcgttgaaggaaaagtgcttcgccatcgcggtggtgaaacccgcgtgttacgtccgggctacgtcaagcccaaacacgaatttaattaccagcaggcggttgagcgccttcctggtgaagatccggctcagctgaacgacccggcctaccgtcgtctgcgtatcattaccgataacctcaaacaggaagagcacgccattgtccaggtggaagaaatgcaggcggtgaatgccgtgctgtatggcaaatacaccatggaaggggatcagtttgatactgtcgaggtggatttcgggcgctctgaaggaaataacattgagcaggctgacggtaaaaaatggtctgagcaggaccgtgatacgtttgatccgacgcatgatattgacctctactgcgatcaggccagcggccttgtgaatatcgccattatggacggtacggtctggcgtctgctgaatggctttaagctgttccgcgaaaaactggatacccgtcgcggctcaaattcacaactcgaaacggcagtgaaagacctgggggcggtggtgtccttcaaggggtattacggcgatctggccattgtggtggcgaaaacgtcttatgtggcagaagacggtaccgaaaaacgttatctgccggagggcacactggtcctggggaatacggcagcagagggcattcgttgctatggtgccattcaggatgcgcaggcgttgtccgaaggtgtggtggcctcttcccgttacccgaaacactggctgaccgtgggcgatccggcccgtgaattcaccatgacgcagtccgcaccgctgatggtgctgccggatccggatgagtttgtggtggtacaggtgaaataa

SEQ ID NO: 39083 - DNA, 147 bp, Escherichia coli
atgcagaagtggatgccattctggatgagcggctgggcgtaccagcggttccggagccggaaggcattgcggatgacagtactgtttcagatggcgtcgggtctcagcctgacggtagtgaagagcctcagcctgacggcgaaatga

SEQ ID NO: 39084 - DNA, 504 bp, Escherichia coli
atgatgacagaaattctgcttaagcaggcaatggtggggattgtcgggagtatcggcagcgccattggcggcgctgccagtagtggcgcatcggcctcaaccggcacagccattcaggcggcagcggcaaacttccattttgcgaccggaggatttacgggaaccggtggcaaatatgagccagcggggattgttcaccggggtgaatttgttttcacgaaggaggcaaccagccggattggcgtggggaatctctaccggctgatgcgcggctatgccaccggcggttatgtcggtacaccgggcagcatggcggagagccggtcgcaggcgtccgggaagtttgagcagaataaccatgtggtgattaacaacaacggcacgaacgggcagataggtccggctgctctgaaggcggtgtatgacatggcccgcaagggtgcccgtgatgaaattcagacgcagatgcgcgatggtggcctgttctccggaggtggacgatga

SEQ ID NO: 39085 - DNA, 348 bp, Escherichia coli
  misc_feature (327)..(336): n is a, c, g, or t
atgatcatcaacctgtggttgggagcacacctggttatttccggggatttaagtattggtcagttaattgcttttaatatgcttgcaggtcagattgttgcaccggttattcgccttgcacaaatctggcaggatttccagcaggttggtatatcagttacccgccttggtgatgtgcttaactctccaactgaaagttatcatgggaaactggcattaccggaaattaatggtgatatcacttttcgtaatatccggtttcgctataagcctgactctccggttattttagataatatcaatctcagtattaagcagggggaggtnnnnnnnnnnggtcttaattga

SEQ ID NO: 39086 - DNA, 483 bp, Escherichia coli
gtgttgcaggacaatgtgctgcttaatcgcagtattattgataatatttcactggctaatcctggcatgtccgtcgaaaaagttatttatgcagcgaaattagcaggtgctcatgattttatttctgaattgcgtgaggggtataacaccattgtcggggaacagggggcaggattatccggaggtcaacgtcaacgcatcgcaattgcaagggcgctggtgaacaaccctaaaatactcatttttgatgaagcaaccagtgctctggattatgagtcggagcatgtcatcatgcgcaatatgcacaaaatatgtaagggcagaacggttataatcattgctcatcgtctgtctacagtaaaaaatgcagaccgcattattgtcatggaaaaagggaaaattgttgaacagggtaaacataaggaactgctttctgaaccagaaagtttatacagttacttatatcagttacagtcagactaa

SEQ ID NO: 39087 - DNA, 675 bp, Escherichia coli
gtgatggttgccggtggtgccgaagagttatgcccttcagaagcagcggtgtttgataccctttttgccaccagccagcacaatgatgcgccgaaaaccacaccttcaccgttcgatgaaaaccgcgacggactggtgattggtgaaggcgcaggtacgctcattctcgaagaactggagcatgccaaagcgcgcggcgcgaccatttacggtgaaatcgtcggctttgcgactaactgcgacgcggcacatattacccagccgcagcgcgaaaccatgcagtattgtatggagcaatcgctgaaaatcgccgggttaagcgcacaagatatcggctatatttcagcgcatggtacggcgaccgatcgcggtgatatggcagaaagtctggcgacagcaaccatttacggtgataatgtgccgctctcctcgctgaaaagttattttggtcatacgcttggtgcctgtggcgcgctcgaagcctggatgagtctgcaaatgatgcgcgaaggttggtttgcgcctacgctaaacctgaataaaccagacccgaattgtggcgcgctggattacatcatgcatgaagcccgcaaggttgattgtgagtttttgcagagtaacaactttgcctttggcggcattaatacatccatcattattaagcgctggccctga

SEQ ID NO: 39088 - DNA, 348 bp, Escherichia coli
ttgcagctccttgccgcttaccccggagaacgcagaataaagctgggagaggatccacttcgcctgcgcttcgccaccattttgcaggcgggcgcgggtgtcggggtcaatcaggccgttgcggtgctgccagaaaaacgctccccacgcctgctggctggcggcatccattggccctttaatgtcgccgagcgcagcggatttttgcagcagcgtcagccactcctgagccaccctgggattagcctctttaccggggctgaccagccacaccagttggcggtccagacgctgcataaagccgtcattcagcgccggaggaatatcgcccatcgcctgtttgggtaa

SEQ ID NO: 39089 - DNA, 255 bp, Escherichia coli
atggcgggtatggcttacagccgggtgtcgactttttccggggattatctccgcgtagctgacaacacggggaaaacgcacgatgtgctgaccggaagtgctgacggtcgccacagcaacacgtctctggcgtggggcgctggcgtgcagtttaacccgaccgaatccgtggccattgatgtcgcttatgaaggttccggcagtggcgactggcgtactgacggtttcatcgtgggtgttggttataaattctga

SEQ ID NO: 39090 - DNA, 396 bp, Escherichia coli
atgaagcacagccgcagtcgtgaccttatgttacagatggacaggctggttcagctgatacaggactccctgaatgaagaactggcacaggtactgtttcactatctgctgaatggcagtgaacatgtgacggtgacgtttttgcagacgctggcgcagcgtctgccccagcacgaggacaacattatgacactggctgaacgcattgagcagaaaggtattgccaagggcattgagcgaggactggcacaggggattgagcagggtaaactggaagggaagctggaagggaagctggaaactgcctgcaatatgctgaatgccggaatggaccgtcagacggtgctgcagatgacggggctttcaaatgaccagctgaatatgctgaaacactga

SEQ ID NO: 39091 - DNA, 552 bp, Escherichia coli; identical to SEQ ID NO: 11816

SEQ ID NO: 39092 - DNA, 720 bp, Escherichia coli; identical to SEQ ID NO: 4899

SEQ ID NO: 39093 - DNA, 324 bp, Escherichia coli; identical to SEQ ID NO: 10084

SEQ ID NO: 39094 - DNA, 324 bp, Escherichia coli; identical to SEQ ID NO: 9185

SEQ ID NO: 39095 - DNA, 510 bp, Escherichia coli
atgaagatattcttcagatactttctttttttagcactgtgctcttgttgttatatagcaagtgccggtaccgatgatcacgtcggctatgttgttgggaataattacggtgttggtccatcaggccaaaaatggcgagagacaggtcctaatggagatgttaccgtcaaattccggtatggctcagtcaccaataatttagttttttataaaccaacccaacttggcccaaccggggtgtcattaaaatgggcgcagttagattccgcttcaggtggaggtttcctttactgtaacaggagaggtagcacaagcggcgggccaatgcatattgaaaataaaatggttgattccggtaaaagttatggcggacataaactctttaagacatctgttccaggcctgtattacacgttagcaatatcaaacatttggtcaacatatacatatactgatatcaacccatcaggcatgtatattggcgattctacgagccaatcttttaactag

SEQ ID NO: 39096 - DNA, 894 bp, Escherichia coli
atggaattgtttgcaataacagataatacagttggcacacgcattgtaaaaattgttactgacaggccgactcaaaatgtaatcacacagctattcaatgaacaaaaaactttttttgaagaacgctatacagaaggcgtagaattttcaggtggctacatcactagtggagatgagttttttgtcattcctgactttgatgatgttatcgctgtattagatgctattaataatcccacaactatccctccatgggagccggaagaaatatcagtcttcaatataatcgctctgttttcaggctatcctgaagaggatggaaaacctgcaactgccttaatccaaagcttcgataaaaggcaagttattgataacagaagaacaattttccaaaaaccatttcaggcaagcaataccttttgccagtctactgagcatggtatagtcatcgacaataagctaacagctattcttgcaggtacagaattaaagtttaaaagcttccatatgctccgcaggatatttgatgtagatgcttatttcagagaagccactaatgaagaattaacaagtttttcttctcatgaaaaattttcagtagctccgggttttgatttaacaacaattgctgactctgttattagaaagaaagtttccttgattaataaatcaagaatacttgaggactactctgtgactgagttaagaatatcggcggctgaaattggtgttgttctagaaactgaaaaaatcggtgaattagaaaaaataaaaatgccgcaaataagaaaagatgtaaaaagattattgcattttttagatgaggactatttcacatcccatataaccagaacgctatatcgcgcaaactctaaacgtcgagaagatgtttaa

SEQ ID NO: 39097 - DNA, 516 bp, Escherichia coli
atgttaaataagcttgccaaatatcttcttactgccagctcagttgctccggtattttttaccttagcttttctttcatgtatatcaaaacactataaatttatgattgcttacttatcattgtgtgcaattatacttttactgtgtgttttgattgttaaatacgcaattaaatataattctgtaaccagtaaaaaattaactaccgcctctccagcagataaggagataacaaattatttcttaacctatttatttcccttaatcagtggtccagatgcatttatggatattaggattgcttctttctttgctgtgagtttatttttttacatcagtttttcaggttcctacagtttcaacccattattatcattttggggatataaatattatgaagccgaagacgatacaggcgtaagctttgttatattatcgaaaaagccactgttaaaagcatcaggcaatcgtgttaatttgattaagcttactgattacacatatatagcaatatag

SEQ ID NO: 39098 - DNA, 312 bp, Escherichia coli
atgcgcgataaattcattgatgccattcatagttgtttaaaaattcagctaactttttattcaaaagaagataacgcgacaatcacaagattaactgcgcctatggacttcggtcctagtcgtagagctcatgataaaagtgacagattccatttttgggattacgaaagcgataaaaaaagtcatgttctcagtttgcaacctgaagcgattgtatctctagttgtaatccctcaaaactttcatccgcaagagtttgttagctggacgccaaactggtttattgccagagattggggccagtactcttaa

SEQ ID NO: 39099 - DNA, 720 bp, Escherichia coli
atgaacgcacgttcacgggcactggttcccctcagcacagagcaacaggccgcatggcgggcggtggcggagacggaaaaacgccgccatcagggaaacacgctggcggaatatccgtatgcgggagcatttttccgctgtctgaacggaagccgccggatttcgctgtctgacctgcgatttttcatgccgtccctgaccgcagaagaactgcacggcaaccgtcttcagtggctgtgtgccatcgatgtgctgattgaaacacagggcgaggtctgcctccttccccttcccggcgatgcagcagaacgcttgttcccgtcggtgcggtttcgtgtcagggaacgcagtcgccataaatccgcgctggtcatgcagaagtacagccgccagcaagcgagggaggcagagcagaaagcccgtgcgtaccaggtgctggttgctcaggctgaaatcgaactggcatttcattcaccggaaacagtcggaagctggcatgcacgctggagtgaccgggtggcagagcatgacctggaacccctgttctggcagtggggcgagcgttttccgtcactggccggaatggaacgctggcagtggcaggatatgccattctggcaggttatcgcggaagccagtctggcagccagagaggccggtcatgctgtccgtgagatggagcggtggatggtgccgaacaaactccgggaggcagcgtga

SEQ ID NO: 39100 - DNA, 435 bp, Escherichia coli
atgaaaactgaactgaccctgaatgtattacagaccatgaacgcacaggaatatgaagatatcagggctgccggaagtgatgaacgccgtgagctgacacacgccgtgatgcgggaactggatgcgccggacaactggacgatgaatggcgagtacggcagcgagttcggcggctttttccccgtccaggtccgtttcacgcctgcccacgaacgttttcacctggcgttatgttcaccgggtgatgtctcccaggtctgggtgctggttctggtgaatgccggtggtgagccgtttgcggtggttcaggtacagcggcggtttgcaccggaagcagtcagccattcactggcactggcggcgtcactggatgcgcaggggtacagcgttaacgacatcatccatatcctgatggcggaaggaggtcaggtatga

SEQ ID NO: 39101 - DNA, 279 bp, Escherichia coli
gtggcctatttgactcagtttgatattccttgtgcaccggttttaagtatgaaagaaatttcacttgatccctctttgcgccaaagtggcagtgttgtcgaagtggaacaaccgttgcgtggaaaatatctgacagttggttgtccaatgaaattctctgcctttacgccggatattaaagctgcgccgctattaggtgaacataccgctgctgtattgcaggagctgggttatagcgacgatgaaattgctgcaatgaagcaaaaccacgccatctga

SEQ ID NO: 39102 - DNA, 159 bp, Escherichia coli
atgctacaacaatgcctgcctcttcttatttctccggagatccgaaaaacccaagttacggatcttcctctccccccacacaacgccacctcctgtcagcacaacatgtggtatctcattcagctgctcatgacactatatgttgtgtcatctccctga

SEQ ID NO: 39103 - DNA, 651 bp, Escherichia coli
atggggataccggcaatatctcacccacctcgtattctaatgctttatggctcagttcgtgagcgctcatacagtcgactggcgacagaggaagcaggccgtttgttaactgcaatgggcgcagacgtccgcatttttaatccatctggccttccacttcctgatgatgcaccggaatcacatccaaaagttatggagttgcgtgaactggttcgctggtctgaaggaatggtgtggtgctctccggaacgacatggagcgatgactggtattatgaaggcacaaattgactggataccattatctgaaggtgctgttcgtccttctcagggaaaaactctggcagttatgcaagtgtgtggcggttcacagtcattcaacacagtcaaccagatgcgcgtgcttggtcgttggatgagaatgatcaccattccgaaccagtcctcggtagcaaaagcctggcaggagtttgatgatgatggacgtatgaaaccgtcaccatattacgaccgcatcgtggatgtgatggaagaattgatgaaatttacattgttgacccgggcaaatgcagcctatcttgtcgatcgctacagcgaacgaaaggagtcggcagaagaactttcccggcgggtaaatcagagcaaaatttga

SEQ ID NO: 39104 - DNA, 546 bp, Escherichia coli
atgagtgatgtaacggcattcaacaactgcataaatgtgttctggcggcaacatgaagcagaactatctcgttttcttacatcgaagaccggtgatagcgaaaaagcagcagaccttctgcaagagctattcctgcgtgcccgcgctcattcagacagtttctgcgagatggaaaatccacgagcctggctatatcgggcggcgaggaatctgctgattgatgggtaccgtaccaccagggagttcgttgagctggaagaagataccccattaacagacgcatcctctgatgtaatctcaacgctggatatttgcctgcctgaaacattacaggctttacccgaagatgaacggtggttgattgaagagtccgaccttaaccggcgtccccagcagtctctggccgatgaactgggaatcacgcttacagcatttaaatcccgtttgctaagggccagaaagcacctgaaagagacgatgaaagaactctgccagattcaggtggatgacacttcccacgtctgctgccacaaaaaaatgaattaa

SEQ ID NO: 39105 - DNA, 180 bp, Escherichia coli
atgtcaaaaattgagatctttgaagcagcaggctgctgcgcaaccagtagcgttgtggtcagcgacgaagcagtcaaatggaacgccagcgccgaatgggcgaaaaagaatggtgttgatattggggagcccgcagaattcggaaaaaatcgtacgctaaggttttccgggcatccgtaa

SEQ ID NO: 39106 - DNA, 369 bp, Escherichia coli
atgaaaaataatccccttaaatcaaacttaatcttagtcagaccgaggatctatattaacgacaacatctcgctggggccggggaaggttgaccttttaagggcgattgatggctttcactctctttctgcggcagctaaagatttggggataccttataaaagagcatggctcttaattgacactttgaataagggaattggtcagccagttgtaatcacttccactggtggtaacaaaggtggtgggacagttctgacgccattggggcgaagcctgctgacctggtatgaccaggctgaggcccacctcaatgagcaatctcagcaacagttaatagaacttgaaaagattctttttggaaaatga

SEQ ID NO: 39107 - DNA, 813 bp, Escherichia coli
atgtcctcagaatcaaaacggaacggaaaaggttttttatcaggcacgttaataggtgctttaggcggcttaattggcctcggtggcgctgagttccgccttcccgtcctgatgggtagtttcaaaatgccgacgcttgaagcggttatttttaacaaagcgatgagccttactgttgtcgctgttgcgttgatattccgcacaaaatccatcgccgtcgaccagctgtttgctcatcttgatattgtcatcaatttgctggccgggagccttatcggtgcatggtgggcagcaggaagagccataaaaatgtcccgtatctggctggacagaaccattctgctcctgcttgttatcctgtcattcgtcatgctttcagaagcatggatgcctctgcatgatagctccgctggattattccagcccggaatcgcgaccattattgcgggtgttattgcgggtttcttcatcgggaatgttgctgctctgctgggtgttgcagggggagagctcctgataccaaccattgttatcctttttggggcagacatcaaactagcaggcagtttgtcactcatgatcagtttaccgacgatgattgtggggttctctcgctacactaatgcagatgctttccagatcctgagaaaagagaaaaaactttttgtgtggatggtcatcggttccgttataggtgccgctattgggggccttatgctcggtatgttcccggtaagagtacttatgactctgttaggcgcggtacttcttatttccgcgatcaaaacctttaagcatacccggcaaagataa

SEQ ID NO: 39108 - DNA, 537 bp, Escherichia coli
atgaaaatcgttaacgcagaagaaaagcacatccccgctatacgcgatatctacgcccatcatgttcttcacggtaccgccagctttgaaactgaacctccggatacccacgagatgcttacccgcctgaaaaagatccgcaatcaggcgctaccgtgggttgtcgcgttagaggaagaaaaggttatcgggtattgttatctcactcgttaccgtgaacgctacgcctaccgccacactctcgaagattcgatttatattcacccggacgcacagcgtcgggggacaggaaaagcgttgctgcgctacgtcatttcctgggcaaaaactcacggctatcggcagatgattgctattgtcggcgatagcaataatcaaggttcgctgaaagtccatcagcaggttggatttactgagattggtacgctgaaaaatattggcttcaagcatggtcgttggcttgacacagtgttgctgcaacgaaatctgggcgaagggaacagcacgttaccatcggattcaggcatgatgctctga

SEQ ID NO: 39109 - DNA, 1698 bp, Escherichia coli
gtgggtaaaacctctatttcctgcgccacggcgatccgtctggcagaacaggggaaacgggtgctgctggtcagtaccgatccggcctcaaacgtaggccaggtgtttagccagacgattggcaataccattcaggcaatagcctctgttcctggattgtcggctcttgagattgatcctcaggctgctgcacaacagtaccgggccagaatcgttgaccctattaaaggcgtcctgcctgatgacgttgtttccagcatcaacgaacaactgtcaggtgcatgcacaacagagattgcggcttttgatgaatttaccggattactgacagatgcctctctgctgacgcggtttgaccatatcatttttgataccgcgccgacgggtcacaccattcgccttctgcagttgccgggcgcctggagtagctttattgacagcaatcccgagggcgcgtcctgtctcggcccaatggcggggctggaaaagcagcgtgaacagtatgcctatgctgttgaagcgttgtctgatccaaagcgtacccgactggtattagttgctcgtctgcaaaaatccacgttgcaggaagtcgcccggactcatctggaacttgccgccatcggccttaaaaatcagtacctggttattaatggcgttctgcccaaaactgaagcggcaaacgatacactggctgctgcaatatgggagcgtgaacaggaggcgctggccaatcttcccgctgatcttgcaggtttgccaactgacacattatttctccagccggtcaatatggtcggtgtgtctgcgctcagcaggcttctctccactcagcctgtagcgtcgccatcctcggatgaatacctgcaacagcggcctgatattccgtcactttctgcgttggttgatgatattgcccgtaatgaacatggcctgattatgctgatgggtaaaggtggcgtggggaaaaccacgatggctgctgccattgctgtcaggctggccgacatgggatttgatgtccatctgacaacatctgatcctgcggcgcatctcagcatgaccctgaacggtagccttaacaacctgcaggtcagcaggatcgatcctcacgaggaaacggaacgctatcgtcagcatgttcttgaaacaaagggaaaagaactggacgaagcgggaaaacgcctgctggaagaggacttacgctcaccttgcactgaggaaattgctgttttccaggccttttcacgggtgattcgtgaagcgggtaaacgtttcgtggtgatggatacggctccgaccggacacacgctgttgctgctggatgctacaggcgcgtaccaccgcgaaattgcgaagaaaatgggagaaaaaggccatttcaccacaccgatgatgctgcttcaggatccggagcgcactaaagtgttactggtcacgctgccggaaaccacgcccgtgcttgaagcggcaaatttacaggccgaccttgagcgtgcaggcattcacccctggggctggattatcaataacagcctttccattgcggatacccgttcgccactgcttcgtatgcgggcacaacaggaacttccgcagatagagagcgttaaacgccagcacgccagccgtgtcgctcttgttcccgtactggcgtcagaaccaaccggcatcgacaaactcaaacaacttgctgggtaa

SEQ ID NO: 39110 - DNA, 348 bp, Escherichia coli
atgtccttcttcagcctggtcacggagccaggtattgtgctgccgtttaacggtctggcgcataaaataccggatttacagtccatgctttttgcaacggccataaaagcattctttatttcagcgttgattcttaagttcatattaacctgtgccatttatcacctcgtcattactacgtatacacagtatgtgacgattcagatatcgtcaccagggtatgccgcatcagcggcatgtaaggcggcactctgttattacatatggcacaggagtaaaaccgccgaagcccggcgtcagccggtactgattgatagatttcaccttacccatccccagccctgctaa

SEQ ID NO: 39111 - DNA, 354 bp, Escherichia coli
atgttgcaactaacaccacttcagttatttaaaaacctgtccgatgaaacccgtttgggtatcgtgttgttgctcagggagatgggagagttgtgcgtgtgtgatctttgcatggcactggatcaatcacagcccaaaatatcccgtcatctggcgatgctacgggaaagtggaatccttctggatcgtaaacagggaaaatgggttcactaccgcttatcaccgcatattccttcatgggctgcccagattattgagcaggcctggttaagccaacaggacgacgttcaggtcatcgcacgcaagctggcttcagttaactgctccggtagcagtaaggctgtctgcatctaa

SEQ ID NO: 39112 - DNA, 363 bp, Escherichia coli
atgaaaacgttaatggtatttgacccggcgatgtgttgcagcaccggcgtctgcggtacagatgttgatcaggctctggtcgatttttctgcagatgtgcaatggctcaaacaatgcggtgtacaaattgagcgtttcaatcttgcgcaacaaccgatgagctttgtacagaacgagaaggtcaaagcgtttattgaagcttccggggcagaaggtctgccattgttgttactggatggcgaaacagtgatggccgggcgttacccgaaacgcgctgagctggctcgctggtttggcattccactggataaagtgggattagcgccttcaggttgctgtggtggtaatacttcttgttgttaa

SEQ ID NO: 39113 - DNA, 279 bp, Escherichia coli
atgattaaattccggctttatattccccctgtaattctcggttttgttatcgtaccattattggtatggccgacggttattgccttagccgtacttatattcacgttaacttttctggcggaaataatattctcctttccgctcctggttgtgcgtatttctcttcaggaattacaacttgagttattggttgaatatgcactttttttcagtgtaatgggtggcatcgtagactggccccctgaatctccagacaaccaatatcacttaaataagtga

SEQ ID NO: 39114 - DNA, 768 bp, Escherichia coli
atgccccccactcctgccatgcaggcattaattgagcagatatatcatatttttcgtcgttatccggcgccgaagcaatttgtggtttgttgtgaatattgtctgagtcaacaggaacaaaaagcattacggaatacatcgttgcgagcgattccttattccttaatcaatgcctggaatagtagtccaggacctgatccgcaaaacagcgatgaggttcgttattttctgcctcgtttactggagtttgttgcgcaggggcaatttgacaatattcacgaagtattttctctacggcgtataaaccttgccagtaaagaaaactggcgtgaggatgaacgggaaatattgcagcaatttgcttgccagtatatgactgattgggtatccggggatgaggctgtcgaattacagtacaagctggaaatgtttttccgtgccgatatcgctctttcgccattgcttgatgccattatttcagttcccggattttggtcggcagcgtctcttgcctgtttattgaatacgtatcgtgacggttatatcagagataaccaggacgatatcgataaagccattaccgcccaaatcaatgcctgggccttcaacaatcaatccatcctgaaagaacgcgcgcggcaggcgattgagaacccgcttaagcagcccgaacagggcacacagtatcagatctgggaagacgactggatgattgatgagtgtttatgcgcgatgtatgacgcatcatccgaatcaccaggaaaataa

SEQ ID NO: 39115 - DNA, 1743 bp, Escherichia coli
gtggcgcttgaggatgcgagcacgacgaaaaaggggatagtacagctcagcagtgcgactaacagcacttccgagtcactggcggcaacgccaaaagccgttaaggccgcgtatgagctggctaacgggaaatacaccgcacaggatgcaacgacagcacagaaagggatagttcagcttagcaacgcgaccaacagcacatctgaaatgctggcggcaacgccaaagtcggtaaaggcagcctatgaccttgctaacgggaaatatactgctcaggacgctacgacagcacaaaaaggaattgtccagctcagtagtgcaaccaacagcacatctgaaatgctggcggcaacgccaaagtcggtaaaggcagcctatgaccttgctaacgggaaatatactgctcaggacgctacgacagcacaaaaaggaattgtccagctcagtagtgcaaccaacagcgcatctgaaacgcttgccgcgacaccgaaagcagtgaaagcagctaataataatgcgaatggtcgggtaccttctgcccgtaaggtgaatggtaaggcgctttcagcggatataacactgacgccgaaagatattggtacgcttaactcaacaacaatgtcattcagcggtggtgctggttggttcaaattagcaacggtaaccatgccacaggcgagttctgttgtttcaattacgttgattggtggtgcgggatttaacgtggggtcacctcaacaggcaggtatatctgaacttgttttgcgtgcaggtaatggtaatccgaaggggattactggtgctttatggcagcgcacatcgacagggtttacaaattttgcctgggtcaatacatctggtgatacttacgatatttacgttgcaatcggaaattatgcgactggtgtaaatattcaatgggattataccagtaatgccagcgtgacgattcatacgtcaccagcatattctgctaataagccggaagggttaacggacggtacagtttattcactctatacgccatcagagcagttttatccgcctggcgcaccaatcccgtggccatcagataccgttccgtctggctatgccctgatgcaggggcagacttttgacaaatctgcatacccgaaacttgcagccgcttatccgtcaggcgtgatccctgatatgcgtggctggacgattaagggcaaacccgccagtggtcgtgccgtattgtctcaggaacaggacggcattaaatcgcacacccacagcgccagcgcatccagtacggatttggggacgaaaaacacatcgtcgtttgattacggaaccaaatccacgaataacaccggggcgcatacgcacagtctgagtggctctacggggtctgccggtgatcatactcatggtaatggtattcgttggccaggaggcggcggttctgcgttagcattttatgatggcggtgggttcacttatgtccaggattcacagtatcaagtaagcccggggacttcttcccgtagatcgtattatcaacgtattcagacacagtcagcaggtgctcatacccactcgctgtctggtactgcagcaagttctggcgcacatgcacatactgtaggtattggtgcgcatacgcactccgttgcgattggttcacatggacacaccatcaccgttaacgctgctggtaacgcggaaaacaccgtcaaaaacatcgcatttaactatattgtgaggcttgcataa

SEQ ID NO: 39116 - DNA, 915 bp, Escherichia coli
atgttaaacaagatccaattacctgatgaaataaaaaagaataccgttaccaatggtaactcgatatcattaataaaaaaactcccatcacaatatgcacatttaatactcagtgatatcccttatggaataggagcagaagactgggatgtgctacataataactcaaataacgcatacctaggttcaagccctgcgcagaaaaacgcaggtgctatttttaaaaaaagaggaaaaccaataaatggatggtcagaggctgataagaaaataccattagaatatcagcaatggtgtgaagaatgggctactgaatggttcagagtattaaaaccaggtgccagtgcaattatttttgcaggcagaagattttctcatcgatgcatatgtgcaatggaagatgctggattcaatcttcgcgatataattgcatggatgagagtaaaagcccctcacagagcccaaaggttgagttgcgtttacgaaaggcgcggggatacattaaacgcagaaaaatggaatggatggcgagttggaaatctacaaccaacctttgaacccatactatggttctctaaaccatataaaattggcggcacaattgcagataatgcaattattcatggtgtcggtgcttataatcaagatgcatttgtagcaagaaatggcaaacctgaaaatgtcattacagctggattttccagcaatgaaagtggattacacccaacacaaaaacctgtagccttaatgaaaacacttatagaattaacaacacaaaaaggtcaattagtcattgacccttttagtggcagtggttctacattggtagcagcgaaagatttaggtagggattatattggtttcgaaataaaccctacatatgtagagaccagtataaagagattaaacaaataa

SEQ ID NO: 39117 - DNA, 975 bp, Escherichia coli
atgatgcctggtggtatgattttgtttgtaacactggaaggttgttggaatatggatttaacaaatattgaatttattaatgatgccgcaataaataggaggcgttactggactaatgaaattgtcaaattaagtgggcattttgttaatgactccagtagggttgaggaggaaattatttatgaagtttccaaatctggatctcaggctttattggaccaccttcgattatgcacagccattcctgaatcatatgagcatgattcaagcgaagaaaagttatattcaaagtatacagacgcattgatttctgaatgttttaagttttttggtttgaatagcattgtgttaactgagagggctgatgcggcagatgtagaagttgtatgtgatagttattcttttgttgctgatgctaaagtttttcggttaagtcgaacagctaaaaatcagaaagattttaaagttcaagcaatggatggttggaggaatactaaagatttcgccatggttgtttgtccaatatatcagcttccagttaaatcaagtcaaatatatcaacaagctattcttcgcaatgtgtgtgtgtttacttatactcatttagctgttctggtaaagtatgctgacattgttggtagtgatgttaggatattgttagaggaaatattcagatctgtcatactcatgaatccaagtaaggatagtgtgcagtactggactatgattaatagaacgatgttgaattatgataagagaatagaaaaactttggattgatgagcgaattgctacatcagagggtatctatgtgctgaaaaagatggcaatagaatacctctcttccgagagaggtagaattctaagcatgagcagagaagaggctgtaagagctttgattaaaatgaataaaattgaaagtagaattgagcagattaaaaaagtgacagataataatattctgtcacttaaatga

SEQ ID NO: 39118 - DNA, 228 bp, Escherichia coli
atgactaagctagatgccacgcgctttagccgtcatgagggttatgaggtgttagatttgattaattccttccaggccaaagggggtggtgctctgacgctaaaatcacagcagattatcgagtggatgctacatgaacgcctgccatccaatatccaggggcgagctcaggttaaagcgtgggtggttgataacttctcgcaaatgaaggatggttatccattctga

SEQ ID NO: 39119 - DNA, 495 bp, Escherichia coli
atgaccaaaattaactatcaggcactgcgtgaggcggcggagaaggcaacgtggggagactgggactcatataaaccacaccgtggcgcacgtggttatgaggtccgactaagtagtcaggccattgcgcaacacgttctgaaaaacaacgctgaatttattgctgcctttaatccaaagattgctttggcactactggatgaacgggaaaggaaccagcaatacatcaaatcccgcgaccaggagaacgaggaaattgcgctaacggtagggaagctgcgcgttgagctggaagctgcagagaagcgcattgcagaactggaagcgcgggaaatactgctcccggaacgtagcagtatgcttcatcgaacagattttcacgatgattaccaaacggtaatggcatacaaagtttctgaagtcatcgctgcaatccgcgccgctggcattcgcatcaaaggagacgcaggagaacaaaacgatgaaaaaccgtaa

SEQ ID NO: 39120 - DNA, 1275 bp, Escherichia coli; identical to SEQ ID NO: 5020

SEQ ID NO: 39121 - DNA, 870 bp, Escherichia coli
atgagcgctggaaaaatggtgacttacgatcaactaatgctgcctttgatgaaagcgctggttgaacttggtggttcaggcagcatcgacgagatatacgaagaggttgtcgagcttgagaaatttgatgaggatactttggcggttctgcacaaccctgaaaaaagcagccaaactgaggttggatatcggttagcttgggctagaacctatcttaagaaagctggataccttgaaaattcatctcgtggcgtgtgggctcttacagataaagccagacaggaaccggaaattgatagcagagaaattgttaattttgtaagagctctggaccgcaagcttgaacagactagtactacgccatcggcccccgaactgtcgtccgatgactccccagaagaggctatgcgttggcgtgaaaaactgcatcatgtgctaattgaagaaatgagccctgatgcttttgagcgattaacacagaggttactgagagagtcaggattcattcatgttgaagtgactggccgcactggtgatggtggtatcgatggtaaaggaattgccagaattaacggcttgatgagttttcatattgcttttcagtgtaagaaatacaaaggctcagttggggcaccagaaatccgagatttcagaggggcaactgtaggacgagcagatcgtggcatgtttattaccacaggcagttttacaaaagctgctattgaagaagctaatcgtgatggcgttgctccgattgatttggttgatggtgatcagttagccgataagcttaaagaacttagtttaggtgttaaaacagagctggttgaaaaagtaacagttgaaccagactggtttttaagtctttag

SEQ ID NO: 39122 - DNA, 2751 bp, Escherichia coli
atgagcattcgtcgattttcgtcgcgcacccataggctcgacagtagcttcttgctggagcacctcaaaggtgctcgcagctataagcgtattgccggttactttactagctcgctgtttgaagtggccaatgagctgatcgagtctatccccgatgtaaagatcgtttgcaatgtggatatccatcccgatgacttaaaggtggcacagctgcgcgaaactaagatgattgggcgctggaatgagcgagatattgaagctgaaagcctgctgaaccgtgaccgctatcgtcgcttggacagcttccttgccaaacatggccaggtcatccgcgttgcgcccgacagcatttgcggttttcttcatggcaaggctggcgtaattgaactagccaacggcaaaaaaattggcttcattggctccatgaacgaaaccagcagcggctggcaacgtcactatgaaatcctctgggaagacgaatcaccagaaggtgtgcagtggattgagcatgagtttgagtatttatggaatgccgcgcgcccattgcctgaagcagtgatccgagaggtgaaacgccgtggctatcgcagagaggtgatttttgaagatattgtcgaagacgatgatattgcacctgctgcgctgattgagtccccattgtatcgccaaggtttctctttgcagccttggcaacaaggctttgtcggcgaatgcgttcgccattatcacaaccacggtatcgtgcgtttactgattgccgacgaggttggcctaggcaaaaccctgtccatggctacggcagcgcttttgctgtgcttactgagcgacagagagaacaagaagcgtaaacctgtcatcatcttcgccccagccacgctctgcgagcagtggcaagtagaaatgattgataagctggggattccctgtgcccgctggcaaacccagaagaaagcttggttagatcctgaggggcgaattatttctccttcaggacaagaacatattgccaagtgcccgctgcgtgtaggtattgtatccaccgggctaattatgcgcgactcattggagaagcaacacctgctggggttacgctttggcgtggctatcttggatgaagcacataaggcgcgaagcaggcaaggcttcggtaaagatgcgggtacccacaatgaattactggcctttatgcgcgagattgccgcgcgatcagatcacgtcattcttggtacggccacacctatacaaacccgccccgaagatttgtgggacttgattggtatcctgcatcaaggcaggggtaattttgtgctcggcaacgattttgccaaatggcaccgtccaccagaggtgctacctattttatccggtgagcagcgcgttacagaacccagcttcgcttgggagctgcttcgctcaccactgcccgtcgtcgattcaaccaacgagcagtatgcacgccgcttattcagctctcttcgtcaggatcttggattaattaatcaaaacgacaagtgggacattaagagcacactctctgatttgtcagatgattcgctggaataccttgaagatgaactgtatagaaatatatcaggtgccagtttttttcagcgagaaaatccttttattcgccacgtcgttttacgcaaacgtgtaacgcttgaagatgcggggcttctgccacgtataggcgtcgacttgcatcccgaccgagaattgtcgaaggaagttcaccaatttaacagcttgttcgagggtaaagcactgcgaacaagcgaggacttcaggcaagcctacgccgaagctagacactttgctaaagctcttgctcaaagtggcaaaggcagcgggtttatgaaaaacttgatggaacaacggatttgctcaagtatcgcggctggattgaacactgcacgaatgctgctggaaggcaggactgttcgtgaagaaagtgacgaccaactgatagaggtcaaagccgaaagcccggatgaaattgccgttctcgaacgaatgatcgcccggcttgagcgaattgaagaagacccaaagctcaacgcggtaatccattaccttgaaaacgagaggtggctaaagtttggcgtcattatttttagccagtactacgacacggcaaaatgggttgcagattcgctcgcagagcgttacccagaccaagcggtaggcctctatgccggcgcaggtcgcagtcggctgtaccaaaagggtgatagcgtcaatattgaacgggaaacactgaagcgcatggtggccgagcaccagctcgaaattatggtggccaccgatgcagcctgcgaagggttgaaccttcagacactgggcaccctaatcaatatcgacctgccatggaaccctactcgtttagagcagcgtattggacgcatcaagcgctttgggcaggtacgcgaaaaagtcgacatgctaaacctcgtcaacgaacaaactgtcgacgaaaaagtttatgaaaagctgtccgaacgaatgcaagaccgatacaacctgtttggctcgctgcccgataccattcgtgatgaatggattgaggacattgaaaccatgggcgaaaaaatggatgagtatatcaacgcccagaaacaggccaatggattcgacctgcgatataccgataccatgtctccatccgaaaaagattggcgggattgctccatcgtactctcgcgccgagattttactgagctgatgacatccggatggagtgaaagcaaatga

SEQ ID NO: 39123 - DNA, 3003 bp, Escherichia coli
atgacagaattaacaccattcgaactcaaggatgcgcccgcactcattgaagcagtctatccagcacaaaaaatttcattcgaagcgcaaaaagagcgcaaagccaatcttggtcaaacacttacaggtttggggtcatactggaaaggcagaaaaccgctaatccttgttcgctcggtggtgctgggcacactcttaccccaaaccgaagatactgaaaaagatctcgaaatattcgaaatgttgatgggctttgatatcgaaagcctcgctaagcgcgcgctcattcaaaatgacattaaacccgcagaaatcgctgcacgcattcagctgcacaacccttgggattattttagtcacaacgtcaaagttaccgacgatagtttcaacgaaatcgatacactgcaatttcccatcaatagtgatgcgctcggtttaaagctgcgctggcgtcgcgacattgaagagaacgaaaagcttgcactttatcgtgactatttagaaacgatcgaaggctacgaggcaaaggcaagtctttgtaaaagaccggaagaggtagatcaggagtggctctatggacacatttggtccaccgtcaatcggcattatcaaagcctcaacattaaggctaaatcacatcaagaactgatagaacagcttggccagcttcgttatgggcatcgccccaaagtggctgacaccttcagtggtggtggctcaattccgtttgaggcagccagattgggatgcgatgtatatgcatctgatttaaacccagttgcacttatgctgacttggggcgctatgaatgtcatcggtgcctcaccagaaaggaagcaagaaattgaagccgctcagaaaaacgtggcaaacattgtcgatcaagaaataaccgctttaggcattgaacatgaccaccggggtaatcgtgcaaagtcgtacctctattgcttagaaaccaaatgcccagaaaccggctggatggtgccgatgtcccctagctgggttatttcaaagttgaagaatgtaatcgcaaaactggttcccgatcataaacataagcgcttcaacattgaagtgatcacaaacgccagtgcggctgaaatgaaagcggcagatcaaggcaccgtaagagatggcgctttggtgtatgagttggatggaaaaacctatcgcactccaataaaaaccctgagaggcgactataaagacgctaatggaaatacgaaaaaccgacttcgtctttgggagaaggaagattttgctccgcgtccggacgacatttttcaagagcggctctatgccattcattggataaccaaagacactttagatcagggccgccaagaaacattttttacaggtgtcactgaaaaagatttagaacgggaggcattagttaacgatatcgttcacaagaatatcgcgacatggcaacaatcaggtcttattccagatatgccgattgaagatggagaagagacgactcgattgaagagagaaagggggtggtcacattggcatcatctcttcaatggccgccagcttttgatgtatgcaatgtatttcaaacattcaacaccagaagactatatttttaacgcgaagactctggactggaatgcgcgaattgccaactggatgatccattgggaaaagacgaacaacgttttttataaccaagcgcttaatacattttttaattacggtatccgctgctttaccagtcatgaggctggtcgatcatttggttttgcaaatgcaccaattcctaatgtaacggtaagaattaagaatcatgaagcatcggcattaactgagtcaaacgacgtttatatcactgatccaccttatgccgatgctgttcattatcacgaaatcaccgagtacttcatcgcatggctacgtaagaatccacccaaaccatttgatgaatggacttgggattcgcgccgtgctctagccatcaagggctcaggtgacgactttcgcaaaggcatggtcaaggcctataaagccatggctgaccatatgcccgacaacggcatgcaatgcgtgatgttcacccaccaggataccggggtttggtcggacatgatcggtattttctgggcatccggattgcaggttgttggtgcatggtatatcgccactgaaaccagcaccgagctgaaaaaaggcggttatgtacaaggtacagtgatactaatgctgcgtaagcgtcctgccggcgaaaacgcgggctttaaacagcgactgctccccgctgtgcgcgcggaagtgaagcgccagatagaaaccatgatgcacctgaacgatgaggtaaaagacaagctgggtgagccagtctttaacgattccgacctgcaaatggcgggttatgcggcggctctcaaagtgctgacttcctatacccatattggcggtgaagatgtcaccagctttgccctgcggccacgcaccaaaggtgaagtaacggttgtcgatgagatcgtgcaacaagctgcggaagctgcaaacagcttgttggtcccagaaggcttgtcgaacgatacctggcaaaaaatcaacggcattcagcgtttctatttgcgcatgatggacattgaaactaccggtgcatctaagctagacaactaccagaactttgctaaagccttccgcgttcaagattacgcccgggtaatgggtaatatggcagccaataaggcccagcttaagcggatccctgagtttgcttctcgcgacctgacagatagcactgaaatcggctccacttggctggggcacttggttattggtttgcaacagattctcaatgagaaagagccgcagacggttatccgtcagttgcaggcagacttaccagagtttatggaagtacggccgatattgatcgacatgttgacctttattgagaaaaaggcgccagaaaaggccactcgagatgcggctgaagtgttaggcgcgcgcttgaagaatatgcgtgccttgggtcagtga

SEQ ID NO: 39124 - DNA, 1101 bp, Escherichia coli
atggcaaaggcaccatcaaagacaagcaatacagcggtgaagcatgcgacgctgggctttggtgtgcccgctacaagcgatccacatcactttaaagttatcattcccaaatcaaatagtggtcaagtgcaaatcaatgagtaccttggtctacaagctcagagtgacgagtttgccatgattgaaagggtattacttgatcgttcccgttggacggctatacgctcagaagttcagcgtacatttaacgttaggctgaaaagctatggcttaagcacaagctcatggcaagtaggagaaaacgtcgttgatcgccttttgggcaaagagttatgtgttctagcatgggccattgaaggaatggatgttgaaaacattccagttgctgtgcgtaattggttggcattagtaccggaagaacgctggtggttattcggtatgacagcaagaagcacaggagctgcagaagaccgtgacgtcggttggcgtattgcactgcgtcatgccctaggtgatattgttcaggctgaacaggtagaattttcccaaagcaaagatgcaaattattctcgtgaagtaacacgagcacaagatattaaagaaacatcagaaacctatatcgagaagcaactaaataatggttctgacttattgcttcatctctcgtctgagaatggcaaccctttgatgccattagctcctgcaagcactaaacttgaccaagatgatttagctataggcgaagaaaatttatttttgtttgaagcaaagcatgccaaagcgatcggacttcctgttggcaacaagagtagccctgagtttttagtgaaaaaggggtctaccgcaaacatcgcaatggccaaatcattacgtccagctatacgagatttacgccaacagatgctggaacaaagaatattagttcatcaaggggaagtttattctttctctcaagattatttgttcaaaagccccagcgctgccgcttgtgtaatagccggtaatccgcgcagcggcatggatgcttggaaagatttgcaaggcaatagcctaaaagacttaggctacggcaaaaaaactgaacaaccgccgttgcaatag

SEQ ID NO: 39125 - DNA, 3126 bp, Escherichia coli
atgatcaagacagttaagcaggcatgtcgttttaatcctgtgatccaggattatcgaatgagccaaggaattgagaacctggctgatctcattaacgacgcaggtgatggtaaagagttcttctctcgcaactatgttactcatggtatggaacaactcttccgcgagggtatgcttcgcctatcaggcaaatcagaccaggcagtgtttgaacttacacaagcaatgggggggggtaaaacccatatgatgatcgccctaggcttgctggcaaagcatgcccatctgcggcctgatgtattacctgctgatttaagtgagcgactggattttggcaatgctcgaattgctgcttttaatggtcgtaataaccccgacaactacatctggggcgaaattgctactcaattaggcgaagcagagaaaataaaacctcattggatcaatggacctaaatcagttgaccagcaaaaatggaaagagataatcggtgatactcccacgctgattatgatcgacgagttgccaccttacctcgataacgccagcacccaagtatatggttcaggcactttggcaaatatggtggtttacagtctaagtacgcttatgagtgcagcacttgagctgcctaactgctgtatagtcattgccaacctatctggtagctatggtgcgcaaaccaaaacactaaaagaagctatttctaatctgcagcaagaaacccgcaggcagtcgatgaccattaccccggtgcaactgtcaggtaatgaaatttatgaaattttaaagaagcgccttattgatgaactgccggatgagcaaactatcagcgatgtcgctgaggaatatgcgcagcaagtaaaaaaagcggaagacggtggctacatcattgcgtctagcatcgagcaaattgccgaacaggtcagagagacctatcccttccacccttcgttcaagcacttggttgcgctctttaaagaaaatgaaggcttccgtcaaacacgcggcttgatgcagtttaccgctcgcttgctgaaaagcgtcgagcaacgccaaacagatgacgtatttctagtaggcactcagcatctagacctaaatgatgaacaagtcaaagacgagattgaacgaatctcgccaaaactgattccagctgttactcgagatattgcagataaaggtgattccattgcggaaagcatcgatgccgaacaaagcaacgatgctgccagtcaattaatgacactgctattggcatcctcactatcacgtgctgtgggggggcgcattggtctgtcagaaagtgaagtaattgaattcctggctgcgcctaaccgcaaagctgatgaattcttagaagcccttcaaaagctgcgtgagcaagcttggtacttacaccgtgaagaccagcgtttctttattaaagaaaccgaaaacctctctcgccagatagagcgtaacgctaaggaaattccccagcccaaaattgatcaagctctgattaaccggctcaagggaattcttcaacctaatcgccgcaacgtttatcaggaggttcagattcttccgcgtatggacgaactcaagttgagtggtcctcgtgtattgattgtgataaagccagatggcaaagtaccacctaatgaactcatcaacttcttcgagttccaacaagaaaaaaacaatctattggtgcttactggccaagacagtatcatggcagaggctgtggaagaacgcttgcgcgagctctatgctattgagcagatagagaaacgtctcaaggctggcgacactttatttgaagaagctcgagaccgactcgaagaagcggaaggccgctttaccaaagcactttccgccgcttacaacaccattcttttccctggcatcgatgagttcgatggctctgaacgactgctcaaagttaccatagacaatggtttgaaagtgggcgaaggtgatcaatcagctgaagtacaaatcgaaaacctgatggctgacccacgggctaactacaaactggccgctgatctgaaagatgacttcgggcaatacttcgctatggccgaatctgaactgtggccttccggtgctaacaaccgtcgaaccccatggaaagatgtcgtcaaccgcgccaaatgcaatccgggctggccttggatgcctggcagtagtggtatggacacactgaaaaccgaagccctgaaacaaggtcgctggcgcttgggcgaggacggatacattgaaaaaggcccattcccgaaagaaaaaaccagtgtcaacgtatcgctattgggaaccaatccagataccggtgagtctttaatcagcctgacaccgagaaatgctggcgaaagtcctgtcatctattattcaacctcagctactgtgtcgattgctgacccgcacgtggatgatttagaaaattttgctaccactgaggggacgctttatttccttgtggttgatccaacgggcaagtacgaaaacggtttgccgactcgctgggtggccgacttaaaagtacgacaccaaattgagccttccgccgatcagcgtaaggtcaccctgcagtgcacaccgaaagccgacatgttctacacgttggatggttcaaatcccaaagatgggcaaccctataccgctccgttcgaagtggggttagaagcggcccgattgctagtttatgctaaatcaaatgaagcaaccaaaacagccgactttcagatcccacacagtggagacaagactgtgcaaattcatgacaccaagcctgctcgcatgaatggcggcaagcgtgttctattggatagcacggaaaaagtattcgctgtgataaaccgttataaagaccaagccaatacgcgctttaaaggtgtgcggatcgaaattggcgaaggtgaaaacacagtgggtattcgctttggcgaacgtcagatcaccgccgcaatgatcgaggctactgttaatagtttgcgcgatgtattaaatgaagctgatgctaatgtttcgattgcagtaagagatggcatcgattttgagaacggttttgaagccaaagagttcgccaaattagttggtattgagttaaaacctggagacattgctcaggacgagtaa

SEQ ID NO: 39126 - DNA, 210 bp, Escherichia coli
atggctaccatcaaaactgcgacgcttaccatccgagtcgatcctgacttgaaggaggcgttgagagtagctgcgcaagcggaacatcgttctatcgctaacatgatagaagttctaatacgcgagcattgcgataaaaatggtatagccatagagcaagcccaagattcagatcaacgtgggagcgttaagcatgatcaagacagttaa

SEQ ID NO: 39127 - DNA, 234 bp, Escherichia coli
atgcttccatggatctttaagaaagcactcgaacgtgatgccaaattcaatgatgcgggcagaaacgaagatttcgccctgaagtggtcaacaaaaactggccaccgagttagagttttttccagtatcgattttccgattcgtttggtggtaacccaccattatattcgtgcggtcttagtgcgctgtaatatccaacgatatagtccgttattgcgtgagctgcatcgctga

SEQ ID NO: 39128 - DNA, 312 bp, Escherichia coli
gtgtttgatggcggcttcctgcagcgttttgtcaaagcttcccaggaactctttcccgttatctgtgatgatctggctgataccgacagggaacagccgggctgcacggctgaaaaagtgattgacgatatcactgttgagcgacggcacagccagcgccagtacataatcgctgtgttcgtcgatcatggtaatgatatagcgacgcatttcacccattctgagctcaatggcgtccatcccaatgagctctcctgtctttaccggacggtagtgctttggcctgcgggggggtggtggttcgctttttga

SEQ ID NO: 39129 - DNA, 1074 bp, Escherichia coli
atgcaactggaagtcccccgtgatcagtatgccggcgctgttgaaaccatgaggaataagatccgcgaaggtaaagtacccggtgtaaccgatcccgcagaagcgtcccggctgattcgtcggggacatctgacttatactcaggcccgtaatatcacccggttcgggaccatcgaatcggtcacttatgatattgccgagggttcggttgtcagtctggcggccggagggatcagttttgccctgacggcatcggtcttctggctcagcaccggcgatcgcgatgctgccctgcagacagctgctgtccaggcaggaaaaaccttcacccgcacactggctgtctacgtcacaacccagcaacttcaccggctcagtgttgttcagggtatgctgaagcatattgatttttcgacggccagcccgactgtccggcaggcgcttcagaaggggaccggtgcaggaaatatcagtgccctgaacaaagtgatgaagggtacgctggtgacatctctggcactggtagctgtcacaaccggccctgacatgatcaaaatgttgcggggacggatctccggtgcgcagttcatcaggaatcttgccgtggcatcttcctgtgtggcaggtggtgctgtcgggtcagtggcgggcgggatactgttcagtccactgggaccatttggtgcactgacagggcgtgtggttggcggtgttctggggggaatgattgcctccgctgtatcaggaaaaattgccggagcgctggttgaagaagatcgcgtcaaaattctggcaatgattcaggagcaggtgacatggcttgccggcagtttcctgctgaccggacatgagattgaaaatctgaacgcgaatctggcccgtgttatcgatcagaatgctctggagatcattttcgctgccggtatacaacaacgggccgcgaccaacatgttaatcaaaccactggtggtcagtatcatcaggcaacgccccgtcatggaatatgatgcatcccatctcggcaatatggttaaccgactggaagaaacattacccccggagttaccggcataa

SEQ ID NO: 39130 - DNA, 2124 bp, Escherichia coli
atgaaagtaactgcaaacggtaagaaatttaccttccctgatggtacgagcacggaagatattggtaccgccattgatgagtattttgctggtcaggctgttcagcaacaaacagttaatcaggccaataatgaaccagcacgtgaagaaccatcattgatgcaacaagctggcgattggctcacaggtggtcaaagtgcagggcaaattgcagagcaggctggtcgtggtctggtaaacataccatttgacgtattgcagggcggcgcaagcctgattaatgcaatcagtcaggggcttggtgggccaaaagtattggatgatgtctatcgtccagtcgatcgaccgacagacccttacgcgcaagccggtgaaacaattggtgggtatctcctgccaattggcacagcggcaaaagctgctggagcgccagcaaagctcgcaggagacatcggttccgcaggaaacatgattgcaggttctcttgctgatgctgcaaatcaggagggtgattttgcacaaaatactgccattaacggtggtatcaatattggtgctcaaggcgttctttcaggtgtcgggcgcgttattgcgccaagggtttcacaggctcttggtggtgcagcactgaattctgctaatgatgtttccaggatggcaaagtcaggtgctgggcgtcagtcaattgccagacaggccgctaatgtgtccgaagatgtagcaaaagcggctgagtctgctggaattgatataaacgcattaacaccaggaatgcgatctggaagtcgtggaattgcacaagccgaaggcgcattggcatcaacaccaggaattgttcaggacgcccatcaggcagcatttaacgaaatatcatcaaagttaagtcgaaaccttgatgaatttggggccgcatctggaacggcatcagaaaaaagtgcggctataaaacaaaggattcttcaaaatcttgatcagatgaaggatgccgagcgcgcggcatgggatgacgtgcggtcaacaatgccaaatcaaaaagcaagaatgctaaatggtaatgccgttattcaggcagagcgatctgccggcataccgcttactcctgaaatgaaacagtttgttcaggcaaacaatcaaggtggagtaacatttgatggcatgaaagcatggagagcgaaatttgctgatgcggagcaaaaatataagcgtagcggagaggcaaatgcggcaaggagagcaggggaaatacgccgggcaattactgatgatatgcgcacaatggcggaaaacggcggatttcttgatgactggcaaaaagctaatgatctgtctaaagcgagattatcagcacaagagagtgcagagtctgttttcgggcgtgatttggcaacagatgcactgattacgaatggagtaaaatctcttcaatcatcgtcagctaaaggtctcaatggtcctgctggattccattctatgatccgcgctctgccagaatcagagcgtgttcctgctatatcatcaatgttgcaggatgccatctcgcatggtgtacgtggtggcaaagctgatgccgcaggaattaaccatatcgcagagatactcactccacaaaatgtaaaagccattagccgatattcctcagagcttggaagaattgctgatgcatatggcactcttgcaagagcagcagtgaaacctcagcagtatattgaaagaacagggagaactgccaatgtactacgcgatctggatgctggtttatccaacgtcacatcaacagtgttaaatgcaattgccaactcaacatcaggtgccattgttggtggcgctggaggaggcattgcaggcgctgccgcaggtgctttagttggcgctgggttaaaaggcgctgtatctaaaattgccaccacacgtagtggtcggtatgcgatagagaaagcagttcaggaagcaactaaagcagtaagagcaggcggaagcaaagaagcattagtggcggctgaacgcagatttatggcaaataaagctgccgtaaaagcgatacgtgatacagtcggaaacgaagagtttcagcaattagcgagggctgggattgtggcatcgctaagcggaatgacacaggagtaa

SEQ ID NO: 39131 - DNA, 1173 bp, Escherichia coli; identical to SEQ ID NO: 9028

SEQ ID NO: 39132 - DNA, 570 bp, Escherichia coli; identical to SEQ ID NO: 12745

SEQ ID NO: 39133 - DNA, 1020 bp, Escherichia coli; identical to SEQ ID NO: 28988

SEQ ID NO: 39134 - DNA, 141 bp, Escherichia coli
atgattgcaaaggttcttcttttcgctacctctgcggccaaaaggcttgtcataattgttgtctcttcgattatgtacaatcatatgtacaaagaaaaattcatgccgctgattgtacattttggaggtatcagagcatag

SEQ ID NO: 39135 - DNA, 1281 bp, Escherichia coli
atgaaaaggaaaatattaattctttccgctgtcctcatttctcctttttcacatgctgagtcatgggaaagcattactaaatccacttatcaaagctctgcctacgctgaaagtaagcaaataaccaatcaggatggctctaagtcaacggtttactatattgatgctgctatgcaggcctccgcttgtcagggtgctaaatccagtgctcagagtgtatttactcaggttaaaccaacttatgagggtatctggcctgattctgaattccgtcttgtttttactggtgattgtacttacagcgattcaccagggcagaaggataaatattggtctttaacggcttatattgttggtgatattcagcgttctgttcctgatgaaaaacctactgacccgacaccagaagaaatttgtgaagcgaagccgccagaagaaggtgtatttaataatgttgattcatatgatggtggtcgttatatctactataacggctgtgaatatgaggctactggtgtcattgtttgtcagggtgatggtactgtttgcgctgcaacatggaagcctacaggtactgtagctgacccctctgataaaccctcaaccccccaaaatggtggtggtgagtctggcggtggtgagtctggcggtggtgagtccggtggcggtagttctggcggtggtgagtccggtggcggtagttctggcggtggtgagtccggtggcggtagttctggcggtggctttagtggttccagtctttctaaaggtgatattcagtctgctatcgaaggtgcttcacccaaaatagccagcgatattcatgataaattaacggagaaagacacttcatcagatgataaaaaaaatgccgatgaacaaactaggaataatataaatcgtcttgacgattccattaacaatcttacgcggggggctggccgttttgctgacccttcaggtggtgattctcgttatggaaagggcgactctgaattagatggcgcttctactttggctgattctgaattgggaattgaaaaggattctcacggtgctttatgggaagcatttttaaataaaggtgctatgctgcctaatttacccaatggtaacggctgctctgattttattatttttcccggagaggtttatcagattgatattggttgcgataaattactgactattaaagatgttctttcatgggttttttattgccttacgttctggtatgtctttacttctttaacttcattgcttcgcaaagggggtgagtga

SEQ ID NO: 39136 - DNA, 243 bp, Escherichia coli; identical to SEQ ID NO: 11595

SEQ ID NO: 39137 - DNA, 183 bp, Escherichia coli; identical to SEQ ID NO: 11598

SEQ ID NO: 39138 - DNA, 276 bp, Escherichia coli; identical to SEQ ID NO: 11599

SEQ ID NO: 39139 - DNA, 693 bp, Escherichia coli; identical to SEQ ID NO: 11600

SEQ ID NO: 39140 - DNA, 171 bp, Escherichia coli
atgaagcatggcggcgcggcaggcgttccagccatcaacataatcaaacgtattgctatcgtctggctcgatttcatctggcactatcagcaccggctggacggtgacattggcaaaggcagcacgcaacccggttttaatttcttcgatttcatcagagccaagcgatga

SEQ ID NO: 39141 - DNA, 225 bp, Escherichia coli; identical to SEQ ID NO: 11866

SEQ ID NO: 39142 - DNA, 960 bp, Escherichia coli
atggcacgaaaattaataatattcggcaacggtcttggtatggctttagatcctgctcatttttccttagacagggcgttggcagaaatttggcatcgatccaatttcttaaacgatgtccataagcaacttatcgaacgttgtcttcagcggcaaggtccaccggcaggggaacatgagttggatacccttcaccaagctatcacatattgtaaggctcttgcgcaaattggagaaggaaacgagcattggcttactgacgatggactaaacttccccgaaatcaccgccacttatatccacaaagttgcaactagtttgcataattacggtgaagggttgccgcaaagattcgaaaatgcgctagtggaatttgtaaaaaatacacgcactcatattgcgacattaaactatgacaaattattatacaactcattcatagataatgatatattcagcgggtatgatgggtatctggttgatgggatgttaggccacggattttccgccgaagcgctcgaacggaaatataatcgtaggtttggttattatttgcatttgcatggctcaccactatttgttaatcagggtgagaccgtcttaaaactttcacgttctcaacttacggttgacagggatgagcctagcgaacatatagtgttaacgcatataaaaaggaaaccgtcagttatagcagcatctaatgttctttctacgtactgggattatttgcagtttgcattatttgaatcagaagaaataatactgtttggttattctggcctcgatgaacaccttaacctgcttattcgaccttacctaacctctaagcatttaagagtaattgagtggagcggtgcaggtgaacaaaatgaccgtgaggcatactggcaatatttgttaggacgggaagttactgtaaccaggttggataacatcactgacttcatcaattggtag

SEQ ID NO: 39143 - DNA, 222 bp, Escherichia coli
atgggtgccggatacaaaaaaggccgcaggctgttacccctgcggccggtttcgggcgcatattgccatcacggcagcctgacgcccgttttcaccttacttccggttacgccaccagccgacaatcgctgcggtaataattcccgccaggatcggtgctgccaggtcgtgccagaaaatcatggcaaactgcgcgagcgtcatatagccgccttgttgtaa

SEQ ID NO: 39144 - DNA, 228 bp, Escherichia coli
atgttgaaaaccgatgctatagctttttttggcagcaaaacgaagctcgcgaatgctgcaggggtgaggctggcaagcattgctgcatggggggaactggttcctgaaggccgcgcgatgcgcctgcaggaggcatccggcggggagcttcagtacgaccccaacgtttatgacgaatatcgtaaggcaaagcgagcagggaaggtgattcatgaaaatcaggcatga

SEQ ID NO: 39145 - DNA, 462 bp, Escherichia coli
atgcaaaaactagcaaccttgatggtgagactaattgttcttggtgtaatttgctttattttttcctcagaggataaaaacacttactctataatcgaacagtcttcagctggtattattggtgccaccttaggtggcatcatcgctggtatatcagtaatttttagcatgctaatcaacatctgccctcaaaataataaacatgtatttgatgattattttgtcaagctggaatcagatttgaaaatcctgattttttgtcttggtgcatccgtttttattccttatttaagggagatgaacatacctttgctagaatatccaaaatgggagttttttatgtcaagagcgcgattatttaccacgtttgaaatattatccattgcattatcattaaatataacactggaggtcattagctctatgattatggttgtaaaaaaagcattacaaaacaaataa

SEQ ID NO: 39146 - DNA, 885 bp, Escherichia coli
atgtatttttttgctttacgcgtactattaaagcccagagatccagatttgtttcagcatagtggcgaagagcgatgtattgaacacttcgagcaagcgatcgttcacgcatcaaaaaatataaaacgagtgtcacaaacaccatctgtccataaaaactggcagtatagattaaaactttctgtcgccccgactgatggcgtcatggcaggtttgatttcgaaacaaaagaaactgcatggttacaatgaggactttcaagaatacaatgttccaagtttccctcctgtagtatggttatgggatcgtcaagaacaagttattttaattgaacgaaaaaccactgtttttaaaagtgctcacaatgcggcaatgatgtttgaggaattatctaacaatgattacctcgtcgaaaaaggattacgcatatttattgaaccttgtctggagaaggacaacttttgggttgaatatgacaagttaaggcatattgagcaagtgacatttgctcttgttatgccaaatatttttggggatagtaaaaaagcactaacagacgccttaaacaaaatagaagatgataccaatgctactgctctaaccacaacatttgaaaataaagatggaaatcttaatcttcgtgattccacatgggcaaatgttttagttgattggactaatgatggcggaggaagttggcagataaaagggaaaaagagtcctacagccaaaagtattactttaaatagtgagcctacagcaaaattaatttttgtagatggttctctttcagaatgcacattaagtggttattctgcaaatgacgtaaaggacattatttccctagtaagaaaagattatcggtttgaaaaatgcaaaaactag

SEQ ID NO: 39147 - DNA, 144 bp, Escherichia coli
atggatacctgttttaagctccttcagctcaagttcgaccagaagctgactaaccgttgtatcggactgacgttacacatcagcgcctcaaccgtttttgaggttcttgcacgcttcaaagcctcttctctgtcatggccatga

SEQ ID NO: 39148 - DNA, 264 bp, Escherichia coli
atgctgaaggcaaaaccccatccggagctggcttaccgtgcagtcctgggtctgctggcacttcagaaaaaatacggcccggaacggctggaaaaggcctgttacgttgccctgcactataacgccccggacagacgctttatcgacaatctgctgcgtcatcatcgggataacgttgagcttccgttatcccgccagggcgaacaacatccggcatatgcttcagagcatgaaaacctgcgtggtcctggctactaccactga

SEQ ID NO: 39149 - DNA, 135 bp, Escherichia coli
atgcataacgagaattaccatgaaatcagaataactacctgcaaagaacataaattgcagactgttataatgcgcgctgttcatcttgacaatgtcagggctattctgttacttattccagttttacaggggtaa

SEQ ID NO: 39150 - DNA, 243 bp, Escherichia coli
atggaaaataaaaaatgtaaaaagatgatctcaataaaaacgatactcatgaagaaaaaactatggatgaaatttacgtttttaccttgtttttctacctgttatctgcgtgatgataaccatcatcagtggaaaactgtgttatttctattgggtgttttttggataaatatcgtaaaaaaagtaatgttaagtcagagaggtttgtatgaaaataacaagcgaaaatattttttatgttag

SEQ ID NO: 39151 - DNA, 777 bp, Escherichia coli
atgaaggatttctttccttctataaaagaagagttgatagctaaagcatttcaatattacatgaacttctctcctgaagtttcttcattaatagccaatctatcaacacttgaaggctcacttgttcaaggaactaaattaagtacggacattgccaacttaatatttttagaagaagaggctcttatcagtgaggaagtcagaaaattaggtggaaattatacgagatatgtcgatgacataactattagtttcgaatcgggagttaataatgaagatatttcaaaaataaaaacaatgattttgtcaatggtgctcaaaagtggaattagattaaatagaaaaaaatcaaaaattttgagaaatggtcagtccaaaatcgtacatggtgtaaaagtaatcaaagagcttaggccaacacaaaaaagaaaagataatataaggatgtgtctttttaatttgaagaaaaaagtgattgaaaaggaaagtgttatggatgttcttacgatgtattttaaaattagaggattaataaatacattaaagcagcaaggtgataaaaatcatgcagagtatataaagcaagctaatcagattatagctggcgttgataaaaaggatgcaataaaatcaataaggcaaataagaaaagttagagatattaagaaattaaggtttttgtattcaaagttaaaaccattaggtaattcatctaaaagtgtatcggccattttagatgttgaatatgaaaactgtaaaagcaaacttaataaataa

SEQ ID NO: 39152 - DNA, 969 bp, Escherichia coli
atgcgggatctattctttttctttgaagttactacagccctcaggggctgtatcttattcgtactcatgattgcattttctggtgagtcattcgccatgatctgtatgaacaatacaggagggacttttgatggtaatggttcgcagagtttcagaattagattatctccggaggtaaaacccaatcagccaatttctgttctcaatgtagctgatttcgttaaatgtatgaatcaggactattcaggaggaaataactatgattatgtcaaattgacgagcggaagtggattttctcaaaatattgaagctaaaacatatggatatatagagtattcaggaaaagagtatagttctccgataacaggaaatggaactcgttatttttctgtttatctgccggggacatggcaaggaatccctgcaaagttaattctctatcctgaaccgggagtctttgggaaactgatccacgccggggagttggttgcaattttaaatgtgcaaaaagaggcaacttatgggcaggatgctggtatcaataattttacatggagattttattcagatactgatgtctacatccagacggggacatgcagtgtgtcctcgcataatgttcaggttactttgtccgactatccggcaggtccggtacctgttccgttgactgttcaatgtaatgaatccagacaggtcagttacactctgtccggaaaaactgatcggaataacaacagtatattttctaatacactggcaaatggtgccggtggtgtggggattcagcttctggatagcgctggtaatgcggttgctgctggacagaagaaatatctgggacaggtaggaccatcaacatctctcaatattggattaagggcatcttatgcactgaccaatggacagactccacctactcccggacgagttcaggcgttagttgatgttaccttcgagtataattag

SEQ ID NO: 39153 - DNA, 963 bp, Escherichia coli
atgcggaatctgttctttttcttttctacagccctcaggggctgtattttattcacacttataatggcatattcccagccatcgtttgcactgttgtgcagaaataaccagaccgggcaggtttctgacgccggagattttgagtttcgggttcatgtttctcctgaaatcaaatccgatcactctattactctactggatctttatcagttagtttcatgtcagaatgaagacagctctggaaataactatgactatatgtatgttgaagcaggaacagcactttcctcatcgttagataccaaggcatatgggcgaattgattttacgaagtacctctcaggttatggtcagacattacccctgcagcaggatataaaggttacggagtctttctggcaatatggggcatggaaaccatttccgtcgcgggtttatttgtatcctgaacctggaatattcggaaaactgatacatgccggagacctcattgccactatcaaggtcaggaaagagtctacatatggccaggatgcgggcgtacggcacttcacctggcgattctatgcagaaaatgattcatatatagagtatggtacctgccatgtttctgcacatgatgtcaaagttaatcttccggattatcccggagggccggttgctgttcctcttactgtacgttgcgaccagccacagtcggtcagctataccctgtcaggtcctgcgacaggaagtggtggtactgtattcgcaaatacggcaacatcaggggccggcggtgtgggtgtacagttgtcggacaacgcggggccggttccggccggacaatcgaggtctctgggacaggtaggcagctctcctgtgagtctggggctgaaggcttcttatgctctgaccggtcaggtaagtccgacgcccggtgctgtccagtcagtgataaatgtgacttttagctataactag

SEQ ID NO: 39154 - DNA, 153 bp, Escherichia coli
atgaatatttcttttggatgttttgattttatagtttttgatggtgaatggttcttcttagagatgaatgcaaatggtcaatgggcatggctagaaaatgaaacgaatattaatgtgtcaagtgagttagtgaggtttttaaatgaagtataa

SEQ ID NO: 39155 - DNA, 372 bp, Escherichia coli
atggaaccagtacatcgtatattagataatatatgtaatatttaccttattgagcccttggattatttgccttttgtttatttaatgaatgagtcatatttaatattgactgattcaggggggatacaagaagaagcgccttcgttaggtaaaccggttttggttatgcgtgatactactgaacgccctgaggcggttgaggctggtactgttgtattagtggggacttctaagataaaaatagtaaataaagtaacggagctattaaacaatgctgatatctacaatgctatgtctctgttacataatccatatggcgatggaacagctgctcaaaaaattcttaatgtgctcgcccaagagctaatttaa

SEQ ID NO: 39156 - DNA, 396 bp, Escherichia coli
atggtaagcgcgctgtatgccgttttaagtgcgttgttattaatgaagttctcttttgatgtcgttcgcctgcgaatgcagtaccgcgttgcctatggcgacggcggttttagcgaactgcaaagcgctattcgcattcatggtaacgcggtggaatatattcctatcgcgattgtgttgatgctgtttatggaaatgaatggcgcagaaacctggatggtgcatatttgcggcatcgttttgcttgctggtcgtctgatgcattattacggttttcatcaccgtctgttccgctggcgacgttctggcatgagcgccacttggtgtgcgctgttgctgatggtgctggcgaatctttggtatatgccctgggagttggttttctccctgcgttag

SEQ ID NO: 39157 - DNA, 624 bp, Escherichia coli; identical to SEQ ID NO: 31165

SEQ ID NO: 39158 - DNA, 924 bp, Escherichia coli
atgattattcccgagatcgccattaacctgagctgcgtattaccctatcacggctcttattttgctgcggcgtcgctggcagagcctatgtgctgcattattggcgcttatcatgccaattatcacaccacgcaatatgtttatgagcatcgcatgggcgtcaaacctggcggcaatattgcactgctggcgtgtgctggcccaatgggcattggcgctatcgattacgccattaacggcggcatacaaccgtcgcgggtggtggtggtcgatatcgacgacaaacgcctggcgcaggtagagaagctgctgccggtggaactggcggccagtaaaggcattgagctggtgtatgtgaataccaaagggatgagcgatccggtacagatgctgcgggcgctgacaggagatgccgggttcgatgacatttttgtttatgcggcgatgcctgctgtcgttgagatggctgacgaattactggcggaagatggctgcctgaacttctttgccgggccgacggataaaaacttcaaagtgccgtttaatttctacaacgtccattacaacagcacgcacgtcgtcggtacatccggcggttcaacggacgacatgaaagaggcgattacccttagcgccacgggacagttacagccgtcgtttatggtgacccatattggtggccttgatgcggtgccagaaaccgtgctcaatctgccggatatcccaggcggtaaaaaactcatttataacggcgtgaccatgccgctcactgccattgccgattttgccgaaaaaggcaaaaccgatccgctgtttaaagagttggcgcggctggttgaggaaacgcacggcatctggaatgagcaggccgagaaatatctgctggcgcaatttggcgttgatatcggggaggccgcgcaatga

SEQ ID NO: 39159 - DNA, 750 bp, Escherichia coli; identical to SEQ ID NO: 31507

SEQ ID NO: 39160 - DNA, 534 bp, Escherichia coli; identical to SEQ ID NO: 19237

SEQ ID NO: 39161 - DNA, 234 bp, Escherichia coli; identical to SEQ ID NO: 11589

SEQ ID NO: 39162 - DNA, 312 bp, Escherichia coli
atgcctggtatctacgtccgggagacgtggttcatcagcctgagttacgtcagccggggaatcattatctggtctataacgacaaattcattaagattagcgattcctgtccggctaagcccccttcggcggactaagacttatccatcggacgagggaagaattccacctcagagactcaaaaatcgtttaaatgatgtggaagcgatcgtcaatgtcaccgatgagctttctcatatgcacaccacagtgttcaggagacacggaaaggtaccaggcggcctgctaacgagtggtttcttcactaattag

SEQ ID NO: 39163 - DNA, 141 bp, Escherichia coli
atgattcatggtgaggatgtagttctgaacgttattgtcgatatcatcaagatcgccgaaattacgtccgtagagagaaaagttactgcggaatgtatcgttccattttacgtcatagataccgccgcccgttcccgctaa

SEQ ID NO: 39164 - DNA, 252 bp, Escherichia coli
gtgctttatatcggcataaccctgcgactgaaagatgaagcaacccgctcgcggctgagtgagtatttgccggaagtccgtagccgtttgctgttactgttttcgcgtcaggatgctgccgtactggcgacagaagaaggcaagaaaaacctgattgccgagattaaaaccacactttccaccccgcttgttgccgggcaaccgaaacaggatgtcaccgacgtgctgtataccgcttttattctgcgataa

SEQ ID NO: 39165 - DNA, 159 bp, Escherichia coli
atgcaggaagggcatttcccacctggcagcatgttgccaaaaatcatcgccagcctgacgttcctggaacaaggcggcaaagaagtgattatcaccacgccggaatgcctgcctgcggcgctacgcggcgaaacgggcacccatattattaaaacctaa

SEQ ID NO: 39166 - DNA, 201 bp, Escherichia coli; identical to SEQ ID NO: 37026

SEQ ID NO: 39167 - DNA, 189 bp, Escherichia coli
atgacgattgcagagcgaattcataatgatggatatataaaaggggaacagcgcattcttcgattgtttttgcagaatggggtagatcctgaatggatacaaaagattaccggactttcggcagagcaaatgcaggcattaaggcagcccttgcctgagcgtgagcgctattcatggctcaagagctaa

SEQ ID NO: 39168 - DNA, 207 bp, Escherichia coli; identical to SEQ ID NO: 6172

SEQ ID NO: 39169 - DNA, 231 bp, Escherichia coli; identical to SEQ ID NO: 21217

SEQ ID NO: 39170 - DNA, 588 bp, Escherichia coli
atggatcgtatagttagttcttcacatgaccgtacatcgctgcttagcacccataaggtgctgcgtaatacctattttctgctgagcctgacgctggtgggtatgtatggtttgatgttcctgacctacaaaacggcgaataagccgaccgggattatctccgcattcgcctttaccggttttctgggatatatcctcggaccaattctgaacacctacctgtctgctggaatgggtgacgtaatcgctatggcactgggcggaacggcgttggtgttcttctgctgctctgcgtatgtgctgaccacccgcaaagatatgtcgttccttggcggtatgctgatggcgggtattgtggtggtgctgattggtatggttgctaatatcttcctgcagctgcctgccctgcatctggcgatcagcgcggtcttcattctgatctcctctggcgctattttgtttgaaaccagcaacatcattcatggcggtgaaacgaactatattcgtgccacggttagcctgtatgtttcgctgtacaacatcttcgtcagcctgctgagcattctgggcttcgccagccgcgattaa

SEQ ID NO: 39171 - DNA, 720 bp, Escherichia coli
  misc_feature (707)..(716): n is a, c, g, or t
atgaaaaaaattgctattatcggtactgttggcataccagcatcatatggcggatttgaaacattagttgaaaatttaacaagatacaattcctcgggagttgaatataatgttttttgttcatcgtttcactacaaatcccaccaaaaaaaacataatggggcccgtttaatttatattccgcttaaagccaatggatggcagagcattgcgtatgacataatttcgttagcatattctatttttttgaagcctgatgtgattctgattttaggggtttctggttgttcatttttgcctttcttcaaactcttaacacgcgctaagtttattactaatattgatggcctggaatggcgaagagataaatggaattcaaaagtgaaacgtttcttaaaattttcagaaaaaatcgcagttcaatattcggatgtcgttattacggataatgaggcaatttctgagtacgtttttaacgagtataataaagatagccgagttattgcctatggaggggatcatgcatggttaaatactgaggatgtatttacaacaagaaattataaaagcgattactacctttctgtatgtcgtatcgaacccgaaaacaatgtagaattaattttaaaaacattttcaaagctaaaatataaaataaaatttattggaaattggaatggcagcgagtttggaaagaaacttaggcnnnnnnnnnnttag

SEQ ID NO: 39172 - DNA, 507 bp, Escherichia coli
atgaaggcaattgacttatttgcgggggctggagggtttagtttatccgcccacaatacaggcgctatagatgttgttgctgctatagaattcgatagcgcggctgcaaacacctacagaaaaaatatgttagaaaggcttgagcataagaccgaacttttacaggaagatattttactcgtaggcccaaaaaagttaagaaaaaaaataaagctcaagaaaggcgagcttgatatgatacttggtggacctccgtgccaaggtttttccagtcatcgaattaatgatgctggtgttgatgatcctagaaataaattacttttaagggatttcgattttgtttgtgaatttaaaccaaaagcttttttggtagaaaatgtctccggtttgttatggaagagacatgaagcccatttgaaacgctttaagtttttggcttccaaaaatggttatactttaattcattgtgatgtattaaatgctcgtcattgcaggtgtcagaaatga

SEQ ID NO: 39173 - DNA, 225 bp, Escherichia coli; identical to SEQ ID NO: 2570

SEQ ID NO: 39174 - DNA, 564 bp, Escherichia coli
atgaccagcaaaggaatccgcctcaatgatgatatgtattacgaatgtgaccgagcagagtttgaagactggaaggtgatagctcgctcgaatggacgttggaagctggaagccaggattgaccaagataacgcctcctttatctatgtgcgccttcgtccaagcgaaggttttactcggtgtacgctgatgacgcgctcgtctagctttgaggagcgccatagagcagatgtactgtactttgaggattggaaaaaggtttcgaaaaaacgttctaaaccgaccagtaaatccattgaaaggcacaatcgaagaaaaaccatcacggcgaatgctagggaagaacttaaaaaagaacctgctctcaaaacaaaggcagaaaaaaccctcggcataaaagagcggcgacgagaagccataatggaagccaggatttccagtgatgatagtaactatacggagccttcagaaaatcagtcatcagttgataaattagctgctgatagagccagcaaggtcgtgtcgttgctgaagagggagcggggttctaatagtgaaacttga

SEQ ID NO: 39175 - DNA, 276 bp, Escherichia coli
atgtcactgacccgggcatatttcggggagctgcaggcatccattgagcaggatattaaccagcccgtccgccaggaaatcgatgcctttttctgcgcattcagggagaaagttgaacaactgcgtaacacgctgattcagagctctgaagatcataaacgcgatcagcaggcacaggaacggcttaccaggagacttcaggcattaaatgaaagggttcctgagctcattactgacagtaaggcgctgagggaagagctggagacaatgctgtga

SEQ ID NO: 39176 - DNA, 303 bp, Escherichia coli
atggcaaaatcaagagcggaaaaattggaagagttgcgtcagaaggaagctcagataaaggcgcaaatccagcaattaaagcaaagagagcagacagaagaacgcaagaaggatacccgccgaaaaatcctaatcggtggagccgtactagcaaaaataaagcgtggggaatggaattatcagcagttggtcagtcttctggacaatgagctgaaaaatgacagagaccgggcactgtttgatgaaatgggtttaaaggcagttgacgccagaaaagaatcttttaaccccggtaataagtga

SEQ ID NO: 39177 - DNA, 2484 bp, Escherichia coli
gtgaaaaaaaatatactggccgggattttcttcgtcgcaatgctattgccagtatggcacgcagcggccgaaacattcacccgctgccatccaaatgagacagtctgggcaatgatccaagatgagcagctaaaaaacatcgccagactacaggaaacaaagcggtgtcaggccgttaatgacacttatgaccagtggcgccaaaatttccaggcgatgggagatgcagaaaacgccatccgcagcgcccgcgatcatcagaactggaacgccgtaaaatccacgttcgataacattgctccccagattaatagcctgcatgcactggcagaaaaaaattcatcgttactgggcgcgggtaacatcctggcgcttttcggcggtgatctgaattacctgtaccagaatgcagggctcgttgctccggccagcgctgacggactgactgataacgtcagtcaaatgctgactgaaccggataaacaggtcaaagctgcaggtatcgcgcaacagctggtttatcagactcgggttcgggcacagagctttatccaaggcgtggcacagaacgccggtaacgaagcccagaaagagtatcgtgcgcaatcagataagattgtcgaagataaagcccataatttcaaaggtgacagcgtggaaggatatttcggcggcttccttgcccggataagccaggtatatgctccagttctgctgttccttatcatcgttggtattattggtgcacttaccgcacggcgggtaaggctggatgctttcacggcatcagtgaaagcagtcatggccgcagcggtacccgcagtggcactggcgctgatgctgatattcatgcctttcctaccatcatgggtattgtacgcggcagcgctggccgtaacattcgccatttattcccacagcaaaaaaattcttggagggctggcctctcgctgtgggcgtttccccgcactggcctccgggcttcgctggatgggcggttttgtgtctggcctcgatgctgacagaaagcaggaaaccggcgcggcatccatcaacccggcatcacatcacactcacggctcatcacgctggggaaccgctgcagaaatgcgggaaaataaccacctgttaccaacggaaaagcaagccggattcaccctggcacgagaactgtccccaccgcccggagtggatggaaaattctgtttcaccgggcacgttgtgactgttgcccctacgggcagcggaaaagggattggcgcagtaattcccaatcttctgacttatcagggttcagcacttgtctttgatccaaaaggggaaaacgccgaggtgacaggtcgtcgccgtcgtgaaatgggtcagagcgtccatgtaatagacccattcggtataaccagcggcataaaagaatcagtgaacattctggatcgtctcgatgtgaccagcccggattgcgtcgctgaatctgcagttctggccgaaagccttgtggtatcagagaaaggcggtgacggtaatcattttgatgaatcagcccgaaccctgttacaaggcctgatgctgcatgtttccggattaccggatgagtcccgacgtaatctcgcggaactacgtcgactgatcaccagtgatgaagaaaacctgttagccctgctggccgatatggccgcaagtgaagacgttgctttcggcatccccgcccgagcggccaacacgctcatggggatggcagaccgggaacgtggctcagtattgtctaccgcccgtaaaaacacagcatttctggacgacccgcgtatagcagctgcgctgtcacactcagacttcaacctgtcagccatcaaagctgaaccgatgacagtttatcttgtgctaccagctaatcgcattgcagcaaatacccgatttgtaaggctgtttatcggttctgtgatctccgctgtaacagaatcgaaggcgaagccagctcataatgtcgcattcatcctcgatgagttcaacgtgctgggctatatgaaatcaatcgaggatgccgtaagcctgttacgtggctacgggctgtctttctgggtcttcctgcaggatctgtcacagctgaaaagtgcctaccctaaatggcagacgtttctggccaactcagcgaagacgttctacggcacagacgactatgacactgcaaaatacgtcagcgacaccttgggtaaatcgacggttgaatttgaaacccagaattcaggccgcaactctggcggcggagtttccgggggtggcggctcaatgaatcgtggccgttcatctggctcaagtcagcagtttgctgggagggaattactgacacctgacgaagtaatgaggcttggaccaacccgaccaattgtgattctgaaaggggaatacccttatcagctcacacgtattaactatctgacagacccagaatacacgggtatggcagaccctaacccctactacagcgcatga

SEQ ID NO: 39178 - DNA, 264 bp, Escherichia coli
atgatatttggaatcgttgtcggcgttctgttagctctgatgtttggccgggtcttgctcccggccttaaccgccgtcgcctttgtgataggcataccgatatacttctctttccgctttgtctgtgcctttatctgggctctggtgacgcaaaacagaagacacagtgctatgccaatcgaggcacaaaagaccaccaatcctgaaacactaccggataacgtaatcaactttagccgcgaaaaagagaaaagggttaagtag

SEQ ID NO: 39179 - DNA, 363 bp, Escherichia coli
atggcatggcacagtgtgtcacaagcacaaaacatgacggggaaaagtcgcaggaccctttatcgtgatatggcgtctggccgcttgtcatggcgaactaatactagcggccatcgcgaacttgagacatcagaactgatccgtgtttatggcgagattaaaaacgatggcacagctgaacggcacaccgtgtcacagcctgatgtcacagtatccggtagtgacatcagggatgaattgcgtgccttacggcaggaagttgcagaccttaaatctatgcttttgaggctggaacataaacaggaagagcagcctgaaactgcggctccgtggtggcgtttctggcagaaaaaatctacttaa

SEQ ID NO: 39180 - DNA, 495 bp, Escherichia coli
atggcaggtacggtatggaatgatgttaatacagggcgtgaagttttctcgatgacacacctgcaccctcagctgcataaggttgaggtttctggggtgcaggctgagattgagattagcttcgggtttcatgtatttactgaccaaaagcaagtcggaaaggtaatgagtttcagaggtgaaactcggcatttctgccaggaaagatacgaaggaagtaagactatcgtgcagcggatactgtcagcgatagaaaacggagagtacataacggcctttatttccaaggggcaagggcagcggtattaccaccttaaccatcatgatgacttcattctaatggagataagaaagcctgaaggtaaagataattttcttcgcatacatgttgttacggcatatacgctggatgaatgggggacggtcaacaaaggacggaatttgaggttcaggtatgttttggagcagaggttacaggggaagaaaatcgtataa

SEQ ID NO: 39181 - DNA, 519 bp, Escherichia coli
atgtcagtcagggcacaaagagcagggaaacgtaaccagtctgaaagaagaatcgaactgataaatacattatgggaaggggaggaaattgaaacatgggatcgtaatgaccgacctcgaaacgatggcttcataacagtacctcgttatcttccattactaggtgttcttatggatgagttatcaaagggaagcccactttcaagtacctacctagcgttgtggttcagggtttcagacgaaggcctgattgagataagggataagactgtgctggctttagaatcaggctttgccagtggaaggggggtaacaacatggacggggagaatgcggaaattaaaagagctgggattcatatcatgccgggaaggtagctccggtgagttccacaacgtgttgattgttcatccgctggttgcggtaaagaagctactggatgaagggaaaataacgaaagggaaaacctataacacttttgctgaacgggtaatcgaggtgaagtcctcatgggagtaa

SEQ ID NO: 39182 - DNA, 198 bp, Escherichia coli
atggcgaccattaatctatcactactggaacatgactgcggcgaagccgcccgcgaagctcttctcagcggcgttcctgtctattacgccgatgagacgacaccagaaaactgcgttatcaaagaatatccggatggccgcagggaactggtgagcttcatgactggtatggagaaactcgttggggctaatacatga

SEQ ID NO: 39183 - DNA, 420 bp, Escherichia coli
atgagtgaagaacagcgccggcgtggcttcatgaaggctgaggcaagcctcagactggaaggtatagatcccagtggaagtccccactacgagtcggttaaagcgagaattatttcgggtgagataacctatgatcagggacgagctgaaattctggctttccataccgggaagcgtgcggagccgacaactgcgggggaaatgctcgcagaggaatttttaaaacctctgaacatgtctcagggggaactggcgcaggctacaggaattcctgagcatcatatcgatgatattatcagtaaccgccgtcgcctcagtgctgaggagtcttacaagctggccgaacagttccagaccgataaagatttctggctcaacctgcaggctttgcatgacgcatggctgacgcaccagaaatag

SEQ ID NO: 39184 - DNA, 1824 bp, Escherichia coli
ttggcaatttttcatcttagcgttaagacaatcagccgtagtgctggccgttcggccactgcggcaattgcttatcgtacaggttcaagaattgttgatgaacggactgggattatccacgactacacccgtaaatcaggcgtcgagcattcagagatttttctccctcaaaactcaccagattgggcgagtaatcgggagactctatggaatgcagttgaacagaaagaaaaccgtcgtaattcaaccgttgccagagaatttgaactcgcatttcctgcagagcttgacggaaaacagcgtctcgagctgcttcgtgatttttgttcttcgctggttgagcgtcacggaatggcagtggatgccgctatccatgctccgggtaaagagggagaccaacgtaatcatcatgctcacgttttatgcagcacccgccgactgtcggaggaaggtttcaaggataagacccgtgaacttgatgattttaagagcggcgaagtcaaccactggcgttctgcatggtcagaaatgacgaaccgtcatctggaaaaggctggccgttcagagcgtattgaccatcgttcacttgaggcgcaacgggaatcagctatttctcagggggattcagccaaggcagcaaagctggatcgggttccgactattcatatcggttacgcagctgcgcagatggaaaagcgcggcttagagaccgaacgaggcaatgaatatcgccagattatattgcgtaatgctgaaatccagccgctttcacgggcaattcagctgattgataactggagggcaacccatgacaacaacagcagagcaggacatggaagcattgctccagtccctgaacgagacaaagggcgagataagcgaggagtccgcaccgctcagtcctacactggccgcgttggagccgtcccgccgcccagcgcaaggggtcgcctgcgcaacctgtccgaactcgatatggttcgcttcggagaacgaagtgagatgttattgccgggcaatgtatctcgtgacgtggagcaccagagaaccgacagaaatcagcctctgcgacgggaaaacactgtaaccagcaagtcaaaacggccggaagttatccggcttgaatggcagagtttacgccgggataagctgactttcgttcaggataaggccggacggattgccgcccgtggggcggcacatgttgaacgccagagacaaaaaatatcctcacatgagcgacaaagaccagaacagcccagcggcctgataggaatgtttaaacgcagcgcctatgaacaggccgccagtacctggcagaccatcaaaaatggcctcgatcgtcgtctggtgcagctgaaaaatcgacttggctttgtcagagactacatgcgtaagtctggcgcttatgaaatgtctacgccgggagaacggttggccgaccagctggccgcgaaagaaaatccgatcttggctgggcagataaaatcgctcaatgctcagaagaacgcggaagatatggctgcataccgtacccgcgtacagtcccgcaaacaggagaaagctgatatgaagctggaaactatcgaagaactcaaacaacgtggtgatgcccggagagataaagccgacaaagccgaacgtgcagagctggaaaaagcgtctcatcaggcttcactgcagaatgaaacgctcagcgaagaaacaaaagaactggagtccggggagaaagagaaactcagcaagcgtgatcaggttctggagaagtttaaggcaaaagtcgagagggataagcagaatgaacgtggtggccgtgggcgttag

SEQ ID NO: 39185 - DNA, 720 bp, Escherichia coli; identical to SEQ ID NO: 7724

SEQ ID NO: 39186 - DNA, 414 bp, Escherichia coli
atgcataaatcagaaaatgaaaaaatagattttattctggatgagcatgagcagatattcagaaaacagggttctttgtgtatggcactgggtaagggctttttagttatagctattctttgtggtgttgccacattctgtgtttctggcctgtatctgaaatccctgtgcctgtccgttgcctgctgttgtggggtattcagtcgtatttttaattattacagcgtaccggaggaatcacgcatggtactcagtcgtcaggaattactccggcttatgcgtctgactgaagacgtaccagatgtgagacaggaactgcttaaccgtttgttgtccggtaaaaaactgactggtcgggatgaacaggatatccggcgtctctggcaggaaacgcagaggaaacactatgcataa

SEQ ID NO: 39187 - DNA, 2631 bp, Escherichia coli
atgagtaataacccacttgaggccgtcactcaggcggttaactccctcgtcacagcactgaaactgcctgacgaatccgcaaaggccaatgaagttctgggcgaaatgagcttcccgcagttcagccgtctgctgccgtaccgtgattacaaccaggaatccggtctgttcatgaatgacaccacgatgggctttatgctggaagccattcccatcaatggggcgaataagtccattgtggaggcactcgatcacatgctgcgcaccaaactgccgcgcggtattccgttgtgtatccatctgatgtccagtcagctggttggtgacaggattgaatacgggctgcgtgagttctcctggtcaggtgaacaggctgaacggtttaacgccattacccgtgcctattatatgaaagcggcagcgacacagttcccgctgccggaggggatgaatctgcccctgaccctgcgccattaccgggtgtttatctcgtactgttctccctcgaagaaaaaaagccgggctgacattctggaaatggaaaatctggtgaaaatcatccgtgcctcttttcacggcgcaaaaatcaccacacagacagtggatgcacaggctttcatcgagattgtcggggagatgattaaccataatccggactctctgtacccgaaaagacgtcagctggacccgtattctgatctgaattatcagtgtgtggaggacagttttgacctgaatgtccgggctgattacctgacgctgggcctgcgtgagaacggcaggaacagcacggcccgcatcctgaatttccatctggcccgtaacccggaaatcgccttcctgtggaacatggccgacaactacagcaatctgctgaacccggaaatgtccatttcctgcccgttcatcctgacgctgactctggtggtggaagaccaggtgaaaacccacagcgaagccaacctgaagtacatggacctggagaagaagtcgaagacctcctatgccaaatggtttccgtccgtggagaaagaggcgaaggagtggggggaactgcgccagcggctgggctccggccagtcttctgtcgtgtcctacttcctcaacatcacagccttctgcaaggacaataatgaaacggcactggaagtggagcaggacatcctgaacagcttccgtaaaaacggttttgagctgatttcaccgcgctttaaccacatgcgcaatttcctgacctgcctgccctttatggccgggaaagggctgtttaaacagctgaaagaggccggtgtggttcagcgcgcagagagctttaatgtggccaacctgatgccgttagtggcggataaccccctgacaccggcaggtctgctggcgcccacctaccgtaaccagctggcgtttatcgatatcttctttaaggggatgaataacaccaactacaacatggcggtctgtggcacctccggggccggtaaaaccggactgatacagccacttatccgcagcgtgctggactccgggggctttgccgtggtgttcgacatgggggatggctacaagtccctgtgtgagaacatggggggcgtatatctggacggtgaaaccctgcgttttaacccgtttgcgaacatcaccgatattgaccagtcagcggagcgtgtccgtgaccagttgtcagtgatggccagccccaacggtaacctggatgaagtgcatgaaggtctgctgctgcaggcggtcagggcctcctggctggccaaagagaacagggcacgtattgatgacgtggtggatttcctgaaaaacgccagtgacagcgagcagtatgccgggtcaccgaccatccgcagccgtctggacgaaatgattgtgctgcttgaccagtacactgccaacggcacttacggccagtattttaactccgatgagccgtccctgcgggatgatgcgaaaatggtggtgctggagctgggcggactggaagaccgtccgtcactgctggttgcggtgatgttctccctgattatctacatcgagaacaggatgtaccgcacgccgcgtactctcaagaaactgaacgtcattgatgaaggctggcgtctgctggacttcaaaaatcgtaaagtcggtgagtttattcaaaaaggttaccgcacctgtcgccgccataccggtgcctatatcaccatcacacagaacatcgtcgactttgactctgacaaggcctccagtgcggcccgtgcggcatggggtaactcctcctacaaaattatcctcaaacagagtgcgaaggagttcgcgaaatataaccagttattcccggatcagttccagccactgcagcgcgacatgattggcaagtttggtgcggccaaagaccagtggttcagttccttcctgctgcaggtggaaaaccattcctcctggcaccgtctgtttgtggacccgttaagccgcgccatgtacagctctgacggcccggattttgagtttgtgcagcagaaacgcagggagggcctgagtattcatgaggcggtgtggcagctggcgtggaagaagtcagggccggagatggcttcgctggaagcctggctggaagaacatgagaaatacaggagtgttgcatga

SEQ ID NO: 39188 - DNA, 1194 bp, Escherichia coli
atgtcaccagggatcgaagatacgccccaaaaaccactgtcctgctggccacttgcgttcagtgccgggcttctcggtatcggacagaacggtctgctggttgtgctccctgttctggtcatacagacaaatctgagtctgtctgtatgggctgccctgctgatgcttggctcaatgctgtttctgccatcgtccccgtgctggggaaagcaaatttcccgtactggcagtaaacctgtggtgttgtgggctctgggaggatatggcataagctttaccctgctagggctgggaagcgtgctgatggctaccagcgccataacaacagcggtgggactgggaatattaatcatcgcccggatcgcctacgggctgaccgtgtcggcaatggtgccagcctgtcaggtctgggcattgcagagagctggagaagggaatcgcatggccgctctggcaaccatcagctccggcctgagttgcggcaggctattcgggccgctgtgcgcggcagcaatgctggccattcatcctctggcgccactggggctgctgatggcagccccagtgctggcgctgctgatgctgctgcggttgcccggcacaccaccacagcccacaccggagtgcaagagcgtcagtctgaagcgggattgtctgccttatctactttgcgcaatattactggctgcggcggtgagcatgatgcagcttggactttcgcctgcccttactcgccagttcgccacggataccaccgccattagccaacaggtggcctggctgttgggtctgtccgcagtagctgcgcttatcgcgcagttcggggtactccgtccgcagcgcctgactccggtggccctgctcctgagtgccggagtgttgatgagtggtggtctggctatcatgctctccgaacagctatggttgttttacccgggctgtgcagtgctgtcatttggagcagctctggcaacacccgcttatcaacttctactgaatgataagctggctgatggcgcaggcgcgggctggctcgctaccagtcacacacttggctatggactgtgcgctttgctggtgccgctggtatcgaaaacaggtgtcgcaatcgcgctgattatggcagcattatttgcaactatattatttaccattgtgtctgtatttatctggcattaccgtactatcaaataa

SEQ ID NO: 39189 - DNA, 822 bp, Escherichia coli; identical to SEQ ID NO: 15325

SEQ ID NO: 39190 - DNA, 426 bp, Escherichia coli; identical to SEQ ID NO: 6184

SEQ ID NO: 39191 - DNA, 351 bp, Escherichia coli; identical to SEQ ID NO: 6245

SEQ ID NO: 39192 - DNA, 321 bp, Escherichia coli
atgtcagcacaagaaaaaacagtacagattgattcttttgatgcgaaatttttagatataaatacatccgatgttagtgaaacggtaaaaagagtggagcatgaaatagagaaaacgaaattaagttgtcgtgtatatactgagtacaggagtacagctttagctggttctttatggtcaccaaccgtaattctgggagtggcgagtgcagtagcaataggtgttcataatttatctacatggaaccccgattatgaaatcggtaagaactatattaaacggagattatcggtaaaatataaaaaggcagaagtattgtga

SEQ ID NO: 39193 - DNA, 270 bp, Escherichia coli
atggcacaggttaatatgagtttaagaatcgacgctgaactgaaggatgcttttatggccgctgcaaaaagcatggaccgtaatggctcccagttaatccgggattttatgcgccagaccgttgaacggcagcataatacctggttccgtgaccaggttgcggcaggacgtcagcaactcgagcacggcgatgtgcttccccatgacatggtcgaatcctctgctgcagcatggcgggatgaaatgagcaggaaggttgccggtaaatga

SEQ ID NO: 39194 - DNA, 138 bp, Escherichia coli; identical to SEQ ID NO: 20576

SEQ ID NO: 39195 - DNA, 792 bp, Escherichia coli
gtggcggcaggccgtgccgttctccgtcaggcggggctggccgggggagacagtcctgcacggtttattgctccgggacgtaaatatccgcaaccgtatgtggcactgccggcttttgaccgtaacggcaggtccgccggtatctggctgaacccgctgaccacggatgacggaaacgggctgcggggattcagcggtgaaggccgtgtgaagggcagcggggatgcgcagttcgtggccctgcagggcagccgtaacggagagagcctgctggctgataatatgcaggatggcgtccggattgcccgtgataatcccgacagtggtgtggtggtaagaatcgccggtgaaggccgtccgtggaatcccggtgccatcaccggtggccgcgtgtggggggatattccggataacagcgtccagccgggagccggaaatggtgaaccggtcacggcagaggtactggcacagcggcaggctgaagaggccatccgccgtgaaacggaacgccgcgcagatgaaattgtcaggaaaatggcagagaacaaacctgacttgccggacggcaaaacagagctggctgtcagggatattgccgggcaggaacgtgaccggactgccacttctgaacgggaaaccgcactgccggagagtgtgctgcgtgaatcacaacgggaacgggaagcggtccgggaggttgcccgggaaaatctgctgcagaggcttctgcagcagatggagcgggatatggttcgtgacctgcagaaagagaaaaccctgggcggagactga

SEQ ID NO: 39196 - DNA, 216 bp, Escherichia coli
atggccgctgcaaaaagcatggaccgtaatggctctcagttaatccgggattttatgcgccagaccgtggaacggcagcataatacctggttccgtgaccaggttgaggcaggacgtcagcaactcgagcgcggcgatgtgcttccccatgacatggtcgaatcttccgctgctgcatggcgggatgaaatgagcaggaaagtcgccggtaaatga

SEQ ID NO: 39197 - DNA, 588 bp, Escherichia coli
atgcaggtcagcagaaggcagttctttaagatctgcgctggcggtatggcaggcaccacggcagcggcactgggttttgcacccagcgtagcactcgcggaaacccggcagtataaactgctgcgcacccgcgaaacccgtaatacctgcacctattgttccgtaggctgtgggctgttgatgtacagcctcggtgacggagcaaaaaacgccaaagcatctatcttccatatcgaaggtgacccggatcacccggtcaaccgcggagcactttgtccgaaaggcgctggcctggtggatttcatccactccgaaagccgtctgaagtttccggaataccgtgcgccaggttctgataaatggcagcaaatcagttgggaagaggcgtttgatcgcatcgccaaactgatgaaagaagaccgcgatgcaaactacattgcgcaaaacgccgaaggcgtgactgttaaccgctggctctccaccgggatgctgtgtgcttccggtgccagcaacgaaaccgggatgctgactcaaaaatttgcccgctccctcgggatgctcgcggtcgacaaccaggcgcgtgtctga

SEQ ID NO: 39198 - DNA, 417 bp, Escherichia coli; identical to SEQ ID NO: 16762

SEQ ID NO: 39199 - DNA, 822 bp, Escherichia coli; identical to SEQ ID NO: 15325

SEQ ID NO: 39200 - DNA, 1530 bp, Escherichia coli
ttgcaacagtgccacttcgacgactacctgctgccggccgagaagttcgccgcactcaagcgcgagcaggccctgcccctggcgatcaacccgaacagcgaccagtacctggaagagcgtttgcagctgctggacgagcagttggccaccgtcacccgcctggccaaggacaacgagctgcccgatgccatcctcaccgagtcagggctgaaaatcaccccgctggatgcggcggtgccggatcgggcgcaggcgctgatcgaccaaaccagccagttactgccgcgcatcaagatcaccgaactgctgatggacgtggacgactggacgggcttcagccgccacttcacccacttgaaggacggggccgaggccaaagacaggacgttgctgctgtccgcaatcctcggtgatgcgatcaacctcgggctgaccaagatggccgagtcgagccccggcctgacctacgccaagctgtcctggctgcaagcctggcacatccgcgacgaaacctattcggcggccttggccgagctggtcaaccaccagtatcgccacgcctttgccgcccactggggcgacggcacgacctcatcctccgatggccagcgcttccgcgcgggtggccggggcgagagcaccgggcacgtcaacccgaagtacggtagcgagccgggacggctgttctatacccatatctccgaccagtacgcgccgttcagcacccgcgtggtgaatgtcggcgtccgcgattccacctatgtgctcgacggcctgctgtaccacgagtccgacctgcggatcgaggagcactacaccgacacggccggcttcaccgatcacgtctttgccctgatgcacctgctaggcttccgcttcgcgccgcgcatccgcgacctcggcgaaaccaagctgtacgtgccgcagggcgtgcaagcctacccgacgttgcgcccgctgatcggcggcaccctgaacatcaagcacgtgcgtgcccactgggacgacatcctgcgcctggccagctcgatcaagcagggcaccgtcaccgcctcgctgatgctgcgcaagctcggcagctacccgcgccagaacggactggccgtggccctgcgcgagctgggccggatcgagcgcacgctgttcatcctggactggctgcaaagtgttgaactgcgccgccgcgtgcatgccggcctgaacaaaggtgaggcgcgcaactcgctggccagggcggtgttcttcaaccgccttggggaaatcagggatcggagcttcgagcagcagcgctaccgggccagcggcctcaacctggtgacggcggctatcgtgctgtggaacacggtgtacctggaacgcgccacccaggggttggtcgaggccggcaagccggtggacggcgagctgctgcaattcctgtcgccgctgggctgggagcacatcaacctaaccggcgattacgtctggcggcagagccgcagactggaagacgggaagtttcggcccttacggatgcccggaaaaccttag

SEQ ID NO: 39201 - DNA, 642 bp, Escherichia coli
gtgatcgttctttcagacaatgatgtcattttgaaactagcgcagtgtaatttactccgttaccttcctgagattttggaagaggatccgcgaagcatctatgttagtccgacggctcgttttcaattattaccgcgcaatactgataaagccattaagaagtgcggtagtgtggctatttacgaaaatgtggaaagatttctaggaagtgtgcaagttattgatgaaatcagaaacgatgatttgctgattaaacttggtgagataccacacatagatgtcggcgaacaacagcttttagctgcatgcgttgagcaaccaggagctttgttcatgacaggtgaccgtcgatgtttgcaggctgtgatggacaatcagactattgtcgctacggttcatgcgcgtctaattgactcagtaataacctatgagagtgctcttttgctttctgttcgcgttttaggatttgagactctatatcaacaactacaaacgaacccgaatccagatgcaatgctgaggatggctatgcgttctcgcagctcagaagatgtttgtggctgcttcttttcttatacgcgccctgtatacgattatctggcctttaaacaacatttaccggatcgtgcttggttgctttaa

SEQ ID NO: 39202 - DNA, 996 bp, Escherichia coli
atgactactaagccaatgagtcgactatatgaaaaaatcagcaaggcggggtttagccgttcatttatacgcaaagtcttaccttcatggtgggacgacagcctagctgatacaccttcaggtaagcagtacgctagccttcatttggctcgtgtttttagtttgtctccagaaagtctcaaggatggttctgaatctgcgtctttcaaccttggtggaaatcatcgctttaaacatcgtgtaaatcttggtgaggaagacctgaatgttgctactgccgttgcatattctgcggcgaggattgtagcagagaatttcagtatcccgtttaatccaaacgcagaacttaattggcaggcagtgagggataaactgctcagcgataaaaagtgggtggatttggcttctctgattggtttttgccattcgttaggcattcctgttgtctacattaagaactttccaacgggtgcggcaaaaatggctggccttgcattaagtgtatctggtaggccagtaattgttttaacccaagctaaaactcatggatttatgctatttgatttggctcatgagcttggtcatattgcactaggccatctcaatgatctcaatgggggggttcatgttgatcgcaaaattgaagcgcagtctactaacaatcttgaggtggcagctaacaaatatgcctttggtttgattggtggaaaagagactttgagaatagcacctacaaggggctatctcacaggtgaaaaattggctagagctgcgctagcatatggtacacagcattgcatagagccaactcatgtagctttgaactatggtcacaatttagggcactggggagtggctgttaacgctgttaaaagtatttgcgtgggacaaccgacggaccaatctttagctaggcagctcatgatggatgccatcgatcacgaaaatattaatgacgacgacttagaacttttaacgacgctatgtggggtttaa

SEQ ID NO: 39203 - DNA, 1191 bp, Escherichia coli
atgagtgattatcatcacggcgtgcaggtgctggagattaacgacggcacccgcgtcatttccaccgtatcaaccgccattgtcggcatggtctgcacagccagcgatgcggatgcggaaaccttccccctcaataaaccggtgctgattaccaatgtgcagagcgcaattgcaaaggccggtaaaaaaggcacgctggcggcgtcgttgcaggccatcgctgaccagtccaaaccggtcaccgttgtcgtgcgtgttgaagacggcacaggcgacgacgaagaaacgaaactcgcgcagaccgtttccaatatcatcggcaccaccgacgaaaacggtcagtacaccggactgaaagccctgatgggggctgagtcggttaccggcgttaaaccgcgcattcttggtgtgccggggctggacaccaaagaggttgccgtcgcactggcatcggtatgccaggaactgaatgcattcgggtatatcagcgcatggggctgtaaaaccatttccgaggtgaaagcctaccgccagaatttcagccagcgtgagctgatggttatctggccggatttcctcgcatgggatacggtcaccagtaccaccgccaccgcgtatgccaccgcccgtgcgctggggctgcgcgctaaaatcgaccaggagcagggctggcataaaacgctgtccaatgtcggggtaaacggtgttaccggcatcagtgcatctgtattctgggatttgcagaagtctggcactgatgctgacctgctgaacgaggcaggcgtcacaacgctggttcgccgcgacggtttccgtttctggggtaaccgtacctgctccgatgacccactgttcctctttgaaagctacacacgcactgcgcaggtactggccgacacgatggctgaggcgcacatgtgggctattgataagcccatcaccgcaacgctgattcgcgacatcattgacggcatcaatgccaaattccgcgaactgaaaaacaacggttatatcgtggatggcacatgctggttcagtgaagaatccaacgatgcggaaaccctcaaggccggaaaactgtatatcgactacgactataccccggtgcctcccctcgaaaacctgaccctgcgccagcgtattacttcaagatacctggcaagtctggtcacctcggttaacagcaattaa

SEQ ID NO: 39204 - DNA, 819 bp, Escherichia coli; identical to SEQ ID NO: 6059

SEQ ID NO: 39205 - DNA, 570 bp, Escherichia coli
atgttactcaccgatctccttcacggtaatacgcaccaggagcagggctggcataaaacgctgtccaacgtcggggtaaacggtgttaccggcatcagtgcgtccgtattctgggatttgcaggagtccggcaccgatgctgacctgctgaacgagtcaggtgtcacaacgctgattcgccgtgacggtttccgcttctggggtaaccgtacctgctctgatgacccgctgttcctctttgaaaactacacccgcaccgcgcaggtgctggccgacacgatggctgaggcgcacatgtgggcggtggacaagcccatcaccgcaacgctgattcgcgacatcgttgacggcatcaatgccaaattccgtgagctgaaaacaaacggctatatcgtggatgcgacctgctggtttagcgaagaatccaacgatgcggaaaccctcaaggccggcaaactgtatatcgactacgactataccccggtgcctcctctcgaaaacctgaccctgcgccagcgtattaccgataaatacctggcaaatctggtcacctcggttaacagcaattaa

SEQ ID NO: 39206 - DNA, 123 bp, Escherichia coli
atggggcttgccctgcctgtggtggaaaagatcgttttcgactggacgataaagcggggcgagggacgtggttttgtaatcagtgcggtcatggcgatggtcttgatctggttcgtctggtga

SEQ ID NO: 39207 - DNA, 183 bp, Escherichia coli
gtgcgctatcgcgatatggatttcatccagagcgtgttaaacggcatggcaagccgtcgcccacgtctggatgccctgcgtgactcctggtacgatttagacgcccattacgatgctctcgaaacccgcttctggcagttttatccgcggatgatggagcaggcgtcacgcaaggcgttataa

SEQ ID NO: 39208 - DNA, 327 bp, Escherichia coli; identical to SEQ ID NO: 16555

SEQ ID NO: 39209 - DNA, 2160 bp, Escherichia coli
atggcgatttatcatctcagcatgaaaatcatctccagaaacagcggctacagcgccgttgcttctgctgcctatcgttccggttcactgatgcttgatgagcgtaccggactgactcacgactacacccgcaaaagcggtgtggctgaagctgtgattctgactcccgcgacagcccctgcctggtgtacgaaccgtgccgaactctggaatgccgttgagaaggccgaacgccggaagaactcacaacttgcgcgggaaattgaactcgccatcccccgcgaactaccgcaggatgccgcacgggaaaccgttctcgcctttgtcagagaaaactttgtcagtcagggcatgattgctgatgtggcgttccatcacatggataaaacaaatccccatgcgcacatcatgctgaccacgagagctgtcggacctgctggattcggtggaaaggtcagggactggaacgaccggacacatgccgagacgtggcgtgcatcatgggctgaccatgcgaacagggcactggcgaacgccggttatcaggaagagatagaccatcgttcatacgagcgacaggggcttgagaaaacgcctggtattcacctcggaaagtctgcctgtgcgatggaaacacgcggtatcgaaacagaacgcggcgaacagaatcgtctgattaacagacttaacctggaaatacagatttcccgtaccgaactcagaaacagcgggctgacagagcctgcccgccgtgtggctgaccttctgaatatcgtgcttcctgacaacgcaacttcgtacacactacgtgacatcatcgaagcgttgccgaaggacagtaatgcggcatggaaactcaccagtaatgccatgtcgatgatggcagatatgcaggcgacgcgcagacgctgggaagagctgaacaccgaacgaaaggaagcgatgagccatgctgccagcctgaaaaaatcatcgccgttttcgtccggtttttcccgtattcccctgatgcaatgggcggcaccggaataccgtagcgaacagggaaaaatccagtcgctgagccagcaaatggaaaaattgcgacagcattaccggaaggtggagaaacaggacattcccgcgagtcagacggcatttgaaaaacagtggcagcagtggggggcatccggccttgcagctctcagagtccagttgcttaaacgtgaagaggaattgcgccggaaggagcaggaggatacagaacgtagtcgcgcggagcgacgagcggaacagctcaggaaaaatgacaatgccgttatggattcaggggtactgagcgcagtcgttacggggtatggcgaggcccccatgcctggtaacggggaaatgacctgttaccttctgcttcacaaccggaacggagaatacacgctctgggggaacgagctggagaaataccgcaccagaatctttgagcgtgttgatttaatgcgtgacaggagtggttatatctgtgaccgaagcgaaatcggtcaacatccaccactgcaacgtgtttattcctctgcgacctttgagcaacttctgacgcaggtttgccagacatggccgcaatatacccgcaatctccgccagccgaagacatggccggagtctttctgtcttggagaagaccgccagccagccatgccatcactggcagcaaggaaggtggattttacgcagggacgtctgctaccgacgctgatgccggtaatgagttctgtcgaccgggaaacccgccagcttcagcttttgctggtcatgggcgtggatgactctctgggcggtgttgtccggcttaatggtacgctgtatcccgcgtttgccgttccctcagccgataacagccagctggtcatcagtgcactgaccgataaggggttacggtatgcagggtatggtgttgccgtaaatcacgatgcagacagccacatatcacctgcgccggaacttatggagtttcatctgaaaacccgtgaggcaccgctttttgctgccgtcaacacaccagaaaaacagccggatcatctgttccgctcgctgggttttaatcgtacctgggacgaatggcggcgcgaggaagatgcacgaacacacgccaccgagaggagacatgatcgcggttggtcacagtga

SEQ ID NO: 39210 - DNA, 126 bp, Escherichia coli
atgattgatgatgtttgttttagcttgcgggtaataatcatcgggggacagatttatggtaaggaaccatcatcgttgctggtttcgttgagttatccacagttcctgaatattcgcacgcattaa

SEQ ID NO: 39211 - DNA, 549 bp, Escherichia coli
atgaagagtgaagtgttgtccgttaaagagaaaattggttatggcatgggagacgccgccagccacattattttcgataacgtaatgttatatatgatgttcttttataccgatatttttggcattcctgccggatttgtcggaaccatgtttttggtcgctcgtgcactggatgcgatttccgatccttgcatggggttgttggccgatcgaacgcgctctcgctggggtaaatttcggccgtgggtgctgtttggcgcactgccattcgggatcgtctgtgtactggcctatagcacgccagatctcagtatgaacggaaaaatgatttatgcagcaattacttacaccctacttaccttactttataccatcgtcaatatcccttactgcgcattgggtggtgtaatcaccaatgacccgactcagcgtatctcgctgcaatcctggcgttttgtgctggcgaccgcgggaggcatgctctctactgttctgatgatgccactggttaatttaattggtggtgataataaaccactcggtttctag

SEQ ID NO: 39212 - DNA, 174 bp, Escherichia coli; identical to SEQ ID NO: 8853

SEQ ID NO: 39213 - DNA, 672 bp, Escherichia coli
atgattaagattgagaatttgacgaagtcatatcgcacgccaacgggtcgacattatgtgtttaaggatttaaacctcgaaatcccttcaggaaaaagtgttgcctttattggtcgtaatggtgcgggtaaatcaacgttactgagaatgattggtggcattgaccgccccgacagtggaaagatcatcacctgtctcttatacacatctgacgctgccgacgaaggcttaggtcagggaagtttaaccggacgcgaaaacgtaaaatttgttgcgcggttatacgcgaagcaagaagaactgaaagagaaaattgagtttgttgaagaatttgccgaacttggcaagtacttcgatatgccgattaaaacttactcatcaggtatgcgatcgcgtttaggctttggtttaagcatggcatttaagtttgattattatatcgtcgatgaagtaacggcggtcggtgatgccaggtttaaagaaaaatgcgctcaattgtttaaagaaaggcataaagaatctagctttttaatggtttcacatagtttgaattcattgaaagagttttgtgatgtggcgctattcatacctagagatcatcagacttgtctttatcagaatattaatgacgcaattaagttatatcaaaatgatgaaaatttgaacatttag

SEQ ID NO: 39214 - DNA, 1074 bp, Escherichia coli
gtggggcagcgaatacctgtaacgcttggtaatattgcgccgttgtcgctaaggccgttccagcctggacgaatagctctggtgtgcgaaggcggcggacagcgtggaattttcacggctggcgtgctggatgagtttatgcgcgcgcagtttaatcctttcgatctttatctcggcacatctgccggggcgcagaacctctcggcgtttatctgcaatcagcccggttacgcgcgcaaagtcatcatgcgctataccacaaaacgcgaatttttcgatccattgcgctttgtccgtggaggaaatcttatcgatctcgactggctggtggaggccaccgcaagccagatgccgttgcaaatggataccgccgcgcggttgtttgacagcggcaaatcgttttatatgtgcgcctgtcgtcaggatgactacgcgcctaattactttttaccaaccaaacaaaactggctggatgtgattcgcgcctccagtgcgatacctggcttttatcgtagcggagtgtcgctggaaggcattaactacctggatggcgggatcagtgatgcgattccggttaaagaggcggcaaggcagggcgctaaaacgttggtcgtcatccgcactgtgccgtcacaaatgtactacacgccgcagtggttcaaacgcatggaacgctggctgggtgacagtagcctgcagccgctggtcaatctggtgcagcatcatgaaaccagctatcgtgacattcagcaatttattgagaaaccaccgggcaagctgcggatattcgaaatttatccaccgaagccattacatagtatcgcgcttggcagtcggattccggcgctgcgtgaagactataaacttgggcgtttatgcggtcgttatttcctcgccacggttggcaagctattaactgaaaaagcgccgcttacctgccatctggtgccagtggtgacgccggaatcgatcgttattccgcctgcgccagtcgccaacgatacgctggttgccgaagtgagcgatgctccgcaggcgaacgacccgacatttaacaatgaggatctggcttga

SEQ ID NO: 39215 - DNA, 1590 bp, Escherichia coli
atgacgttgtctccttatttgcaagaggtggcgaagcgccgcacttttgccattatttctcacccggacgccggtaagactaccatcaccgagaaggtgctgctgttcggacaggccattcagaccgccggtacagtaaaaggccgtggttccaaccagcacgctaagtcggactggatggagatggaaaagcagcgtgggatctccattactacgtctgtgatgcagtttccgtatcacgattgcctggttaacctgctcgacaccccggggcacgaagacttctcggaagatacctatcgtaccctgacggcggtggactgctgtctgatggttatcgacgccgcaaaaggtgttgaagatcgtacccgcaagctgatggaagttacccgtctgcgcgacacgccgatcctcacctttatgaacaaacttgaccgtgatatccgcgacccgatggaactgctcgatgaagttgagaacgagctgaaaatcggctgcgcaccgatcacctggccgatcggctgcggcaagctgtttaaaggcgtttaccacctttataaagacgaaacctatctctatcagagcggtaaaggccacaccattcaggaagtccgcattgttaaagggctgaataacccggatctcgatgcagcggtcggtgaagatctggcacagcagctgcgtgacgaactggaactggtgaaaggcgcgtctaatgagttcgacaaagagctgttccttgcgggcgaaatcactccggtattcttcggtactgcgctgggtaacttcggtgtcgatcatatgctggatggcctggtggagtgggctcctgcgccgatgccgcgtcagactgatacccgtaccgtagaggcgagcgaagacaaatttaccggcttcgtatttaaaattcaggccaacatggacccgaaacaccgcgaccgcgtggcgtttatgcgcgtggtatccggtaaatatgaaaaaggcatgaagctgcgccaggtgcgcactgcgaaagatgtggtgatctccgacgcgctgacctttatggcaggtgaccgttcgcacgttgaagaagcatatccgggcgatatcctcggcctgcacaaccacggcaccattcagattggcgacacctttacccagggtgagatgatgaagttcaccggtattccgaacttcgcgccagaactgttccgtcgcatccgcctgaaagatccgctgaagcaaaaacagctgctcaaagggctggtacagctttccgaagagggcgcggtgcaggtgttccgtccaatctccaacaacgatctgatcgttggtgcggttggtgtgctgcagtttgatgtggtggtatcgcgcctgaagagcgaatacaacgttgaagcagtatatgaatcagtcaacgttgccaccgcccgctgggtagaatgtgcagacgcgaagaaattcgaagagttcaagcgtaagaacgaaagccaactggcgcttgatggcggcgataacctcgcttacatcgctaccagcatggtcaacctgcgcctggcgcaggaacgttatccggacgttcagttccaccagacccgcgagcattaa

SEQ ID NO: 39216 - DNA, 678 bp, Escherichia coli; identical to SEQ ID NO: 21477

SEQ ID NO: 39217 - DNA, 123 bp, Escherichia coli
atggttctaattcaaccggaatacttttatagccaggaatgccacttaatggatcgtggttatcaagtgttagcatgtgattcgattctgggaaataggtcaccagtgagcggtcagccatag

SEQ ID NO: 39218 - DNA, 435 bp, Escherichia coli; identical to SEQ ID NO: 21500

SEQ ID NO: 39219 - DNA, 684 bp, Escherichia coli
atgtcccgttttgtccttggtaactgcatcgatgttatgacgcgtatccctgataacgccattgatttcatattaactgacccgccatatctcgtcggttttcgtgaccgttccgggcgcaccatcgccggcgataaaaccgatgaatggctgcaaccggcctgtaatgaaatgtaccgcgtactcaaaaaagacgcgctgatggtgagcttctacggctggaaccgcgtcgatcgctttatggccgcctggaaaaatgcgggattcagcgttgttggtcacctggtcttcaccaaaaactacacatcgaaggccgcatatgtgggctatcgccacgaatgcgcctacatcctggcaaaaggccgtccacgtctgccacaaaacccgctgccggacgtgctgggctggaaatattctggcaatcgtcatcacccgacggaaaagcccgttaccagcctgcaaccgctgattgagagcttcacacacccgaacgcaattgtgctggacccgtttgcaggcagcggctcaacctgcgtcgccgccctccagtccggacgccggtatatcggtatcgagctgcttgagcagtatcaccgtgccgggcagcaacgccttgccgccgtgcaacgggccatgcagcagggggccgcgaatgatgactggtttatgccggaggctgcgtaa

SEQ ID NO: 39220 - DNA, 210 bp, Escherichia coli
atgcggcggggtaacgttgaattgcagggaaatgaaaccggctcgcatgtaccaggtgtacagcgttttaagctcgctaaatccggtgtcatcaatgtcagccagttcagcgcgaatgaaattagcgatatcagaggccagcaggtcaatatcggcgcgcgacatatccgggaggcggttatatctggcaaccatattaaccatgcgtga

SEQ ID NO: 39221 - DNA, 312 bp, Escherichia coli
atgactatgggcatgggcgcggcactgatggaggagctggcggtggatgaccgtttgggctacttcgttaatcacgatatggcggggtatgaggtgccggtccatgcggatatcccaaaacaggaggggattttcctggatgataccgaccccatatcctccccgatgaaggccaagggtgtcggtgagctgggcctgtgcggcgtgagcgcggctatcgccaacgcggtgtataacgccaccggtattcgggtacgcgattatcccatcactctggataagctgctcgataagctgccggatgtggtttaa

SEQ ID NO: 39222 - DNA, 141 bp, Escherichia coli
atgcggaatgtagagctgatgcaggccggagagttcacggtgaatcaaatcacccccaacaaactgggatacggcgctggcgcggttgagcttatggtaagcctcaatgctgaggtgttcacgggcgtcatgacgcgctga

SEQ ID NO: 39223 - DNA, 252 bp, Escherichia coli
atggtgagtttactgtcgctggtggcgatcgccgttttcgtatcgtctctggtggtgcgcgtggtcagggtttgcgcctgcgccagatgggtgacactgatggtgtatttcccggcgatggcgttacccgcagtggtggcactgaatgcggtggtgctgctggtagtgctggtggcggaaaaaagatcggctttagacaatgcagtattggcggtctggaaagtcgtcagcgcgcttttcagcgtaccgtag

SEQ ID NO: 39224 - DNA, 192 bp, Escherichia coli
atggttattaagacacaacgagataataatgatgccagcgtactgtgcctattcatacattatattcaaatgcattacccccctgttactgtcagatgttttatgcgcagtaacaggcatttgtgttttagctatcttttgatattgagcttcatttatataataagtgatctgattatcaccatgttgtaa

SEQ ID NO: 39225 - DNA, 186 bp, Escherichia coli
atgctctgccacctggtgcgccggaagtgtcgtcagtatctgcaggtcatactccttccaggggggctggatggtatttccgtcttcatcggtgaagctgttgctgacttcctgccagtccattttcagctgcatcgaccgggcgagtgtggtcagccgttcctgcaggagggtgttttccggtaa

SEQ ID NO: 39226 - DNA, 231 bp, Escherichia coli
gtgatttttcaaaagattgcccgcttacttaaatccgagatcaatggcaattcatggcatgttggtgatttgttgccgtcagaagcggaactcgctgttcgttataatgtttcgcgtaataccctgcgtaaggcattatccctgctggaaggcgaaggaattattcacagaaagcatggttcaggaacatacattcaaaaaagaattttgttgcacacattgatcacatga

SEQ ID NO: 39227 - DNA, 243 bp, Escherichia coli
atggataaaaaggcattgctttttgaaatgatacgaaaacggagcgaaaagagcttttctgatggtggtgatgggtttgttttcgcttctatgcttgcttttgatgttgggttaaatagcagaattgttaaaaggatgcttgattctgctgtccgtgatgggcttttggaagtggttgggcgaggagtaggaagggaacataagtatcggactacaaagatatttaaccagttaatctattga

SEQ ID NO: 39228 - DNA, 1914 bp, Escherichia coli
atgagcaaagtaaaaatcggtgaattaataaactcacttgttagcgatgttgagtcaatagataactctgaccgtcctcaaggggaaaaaacaaaaaaaataaaggctgttgcattaaaatttaaaaatgcattatttaatgacaagcgaaagtttagggggaaaggattagaaaaaagaattacagccaacacattcaatgcctatatgagcagggccagaaaacggtttgatgataaacttcatcatagctttgaaaaaaatatacatcgcctatctgaaaagtatcctttatataatgaggagctattgtcatggctttctctacctgctgccgatattcgccagagaatgtcaactttacaggcaaaattaaaattaattctccctttatcagaagatttatctaatatcagaattggtgataacaaaaatcataataagttattaaaattatcaaataaatataaagagtggcaattcgcaatttctgatttaactagcgataactggaaagataagcgcgattatttatataaattactacagcaaggatctgccttgcttgaggagttgaatcagctaaaagttaaccatgagattctctatcatcttcaactaagccctgccgaacgcgcatctatccagcaacgatgggcggacgttctgcacaataagaaacgtaacgtggtggtcattgattaccctaaatatatgcaagctatttacgatattataaatagccctgctacattaaataatctaaacactcgttcaggtatggctcctttggcatttgcacttgctgcattgtcaggaagacgaatgattgagattatgtatcaaggtacatttactgtttctggtaagtataccgttgattttttaggccaagctaaaaaaagaacttctgatgatataaccagaaaaatatatacattatgcgaagcaaaaacatttgtttatttaataaatgtacttcgctcatgcccagcagcatctgattttgatgatgtcgttaaaggttatggagataacgacacacgctctgaaaacggacgtattaatgccatattagcaaaggcttttaacccgtgggttaaatcatttttcaaagatgaccgccgtgtttataaagatagtcgtgctatttatgcccgtattgcgtatgaaatgtttttccgcgtagatcctcgttggaaaaacgtagatgaggatgttttctttatggaaattttaggccatgacgatgaaaacactcaattacactataagcaattcaagctggccaacttctcaaagacatggaggccaaatactggaaacgaaaataccaggctggaagcattgcagcagcttgatgacgaaatgcctggattcgccagaggagatgccggggttcgtctgcataacacagttaagcagctggtagagcaggacccctctataaaaatcacgaacagcactctaagagcattcaaatttagcccaacaatgattagccgatacctggaatttgctgctgatgctctggggcaatttgttggcgaaaatggacaatggcagctgaaaatagatactccagaaatcgttatgcctgacgaagaagagctggaagcaatacctgaacagacggatgaattatcagatgatgacgatctggatgacgacgaaattgagatagaggaagaggaagaggaagaggaagaggaagaggaagagagcgtagaagaacagcaaccgcccgcgccttcttcacctgtatctaagccggtatttaagcctgtgagaaatattggtgatggttcatacgttgttgagtttcattataatggccagaattatgcttggtccggcagtgcaaacagccctatgtcagcaatgcagttagcatggctgacatatttcggataa

SEQ ID NO: 39229 - DNA, 165 bp, Escherichia coli
atgagcgcgttagcagtcttttcctttcaggaagagcatcaggttcgtgtagtgatgattaacggcgaaccgtggtttgttgcatctgatgtgtgtatggcggcgggtattgattctacggccatcagaaagttggatgaggacgaaaaggggcaggcgaggtag

SEQ ID NO: 39230 - DNA, 234 bp, Escherichia coli
atgaatcaggtaaaaatgaacactgttggcctgctggaatcgttggatgaacgtctggctcaggtctatgcgctcgtatcatcagcccaccggacaatctccagttgtgaggcgtcgatttatctctcagaagcagggaaactccttcaaattgcgtgtgagctaacacacgaagcacaggggtattcagcgtcgctctcgtcgcaattgctgcacgataaggaggctgaatga

SEQ ID NO: 39231 - DNA, 165 bp, Escherichia coli; identical to SEQ ID NO: 33920

SEQ ID NO: 39232 - DNA, 288 bp, Escherichia coli
gtgaagagttttatttttgttttatgttttgccttttctgctgcggtttatgcccaggaagatagcatttctgttattgactcatcagcagagcttgcatgtaaaaataatcccgatgctgcatcaaaagaatcatgcaaagaactgctcctttcgacggctgcttttgcttctgaaaatgcaaaattttattcagccttttgtcgcggctatgttaaggaagaagataaagaaaaatgtgatgatgccggtaagttagttaggtatttccaatctcttaatcagtaa

SEQ ID NO: 39233 - DNA, 396 bp, Escherichia coli
atggctgttcaatcatacaaacaccaatccctcttggataagggatacattcgcatcaagctaagtcgttctcagcataaggccatttttagggtaaggaaaattcgtatatgggatacgtatgcgtattactataacggtgaagaggttattgttgagcactttcttgccagatggtttgtagccctgatttttgtcccttttctgttaattggcactttggcagacggttttcctagcacatggcaggagctaaagaaatgccttttcccgcatagatacggtagcctttcggcagacagctggcgagttatacctggtaaacattctgtggatgagcaaccgattgttgattactggttgaagcgtatggctgatgctaaaaaagttgattga

SEQ ID NO: 39234 - DNA, 327 bp, Escherichia coli
atgtctactactgcatttttggacaaacttgattaccgtcagctgcagttctgccgggatgaatgcgatcgacgcattaaggctatccaggaggaagaaaaaaaggtcgcctgggctgtaacagatcgtggccttatctttggctggttccgtacggaggattacctgaaagcagtggaattattggcgcgtaaggctgctgagcgttgggaacgagcagacaaggaaaacccggagacgaagtatgaactgaatctctacatcgagggcaaccgtctaccattgtcagagtataacgctttgtttgctgatggtgagtggggttaa

SEQ ID NO: 39235 - DNA, 192 bp, Escherichia coli; identical to SEQ ID NO: 34317

SEQ ID NO: 39236 - DNA, 420 bp, Escherichia coli
atggcaaaggcttttacaccagaacagagggaagaactgaataaacaaattgtggaactcgtgcgcctgaatggacgaggaacggttaggcaacttgcggatgaaactggtattagccgatgtgctgttagtcgtttatcaagagagcttgctgccagtggtgatttgtatatctctggctccgggatatttctgtctgcacaagcacgcaaggactggcaaaacgcccgtaaaaaactatcaagagtaaagccgaagacatcggtagtggttgatccagaccttatctggtcattacctgacggagaaatacgtcgttacgacaggcgcttgaacatgatttgtcacgattgccggaaaagtgaagttatgcagcgtgtgctggctttttatcagggaaattttcaggaggtggcgtag

SEQ ID NO: 39237 - DNA, 291 bp, Escherichia coli
gtgaatatcgacaccacgataacgatcgatacggccctaaataccggtctggcacttctcggttggctttacatcatgtcccgtgcatggcgatggcttggttccatttttctaaaacagtggaaaaaacggcgcaaacaggagagacgccagaaagcgttagaggcgttctatgacgcatttgaacttagccgcattgagcctggaacaacagccaggatagcgacaaaaggtgacctgatgatagtgatgttccgacaggagagagcagagaaaggagaatcagcatga

SEQ ID NO: 39238 - DNA, 222 bp, Escherichia coli; identical to SEQ ID NO: 27559

SEQ ID NO: 39239 - DNA, 243 bp, Escherichia coli; identical to SEQ ID NO: 39227

SEQ ID NO: 39240 - DNA, 204 bp, Escherichia coli
atgacaacaagaagacttattcgcctgccggaagtgatgaataaaacaggatatagcaaagcatggatttatcgacttattagcaggggcgtattcccagaaccgataaagattggaataagagccagagcttttgttgaaagtgaaatcgatgaatggattgaaaacattattcagttttcacgtaaacacgctgatcaataa

SEQ ID NO: 39241 - DNA, 1167 bp, Escherichia coli
atgtctttgaaaaagttattgcaagattgtgttacgagaggtcaagaaatgacccaagcaattgctatcgctcaattcggtgatgatagtcctgaagctcggcgtatcacccgccgatggggtataactgaagtagcagatttaattggtgtaactcctcaagcaattagagatgctgagaagagcgggcgtttacctgcacctgactttgaaatgagaggaagaattgaacgtcgtgctggttataccatagatcaaatcaacagtatgcgagcagtttttggcaacccaaaccaacgaccacaagataaaaaccctgttgtgcttgccgttatgtcacacaaaggcggcgtttataaaacatcgtctgcggtacatcaagctcaatggttagcattacaaggtcatcgtgttcttttggttgaaggtaacgatcctcaaggcacggcctctatgtatcacggttatgttcctgatttacatatccatgccgaggatactttactgccattttacttaggagaacgcgataacgctgaatatgctataaagccaacatgttggcctgggctagacattatccctagctgcctagccttacatcgtatagaaacagatctcatgcaatatcatgctcagggtaaattgcctcatcctccacaccttatgctgcgcgcagctattgaatcagtttgggataactacgatgttatcgttatagatagtgctccgaacctcggtacaggaaccattaacgttgtttgtgccgctgacgttattgttgttgctacacctgcagaattatttgattacgcttctgttctacagtttttcacaatgcttctcgatctattggaaagcgttgacctaggtggatttgagccaaccgttcgcttacttctgactaaatatagtctcactacagggaatcaatcacgatggatggaagaacaaataagaaatacatggggatcaatggtattacgtcaggttgtacgcgttaccgatgaagtaggtaaaggccagataaaaatgagaacagtatttgaacaagcagcaaaccaacgttcaacattgaatgcatggagaaatgctgtttctatatgggaccctgtttgccgagaaatttttgatgatctaataaaacctcgctgggagaacgaataa

SEQ ID NO: 39242 - DNA, 966 bp, Escherichia coli
atgaaacagcgctctcttctaaaaaatgctccagatattaatcgcattatgagtaataatcatcatgcccctgaacatcagcccgtatcacctatggttggtgatttaaaacgtcaactgagttcattaaccggtaacagcataactttgccagtatgcggacgtaatgttaactttaagttagagacaattcccgcagataaagttgaaatggcaacaatggtatggctaggtaatgaacgcgatcaagatttattaaatgaatcctctctagccgatttaatcccatcttttctaacgtctggacaacaaaatccagctttcgccagaaaagtatctggaatcgttgaagtcgctgacggctcacgtagaagaaaagcagcgatattaacaggatgtgactatcgcgtcttaattggtgatctcgacgatgaacagatgcattggttatcccaaattggtaacgattatagacctattagtgcatacgaaagaggaaagagatacttacgcaagctaaatgactttgatggtaacgttaaagcattagccgaggctgaaaatatagatagaaatattatcactcgctgtattaatacagctggtctaccaaaagatatattagctatcttcaatcatccaggagaactgtcagctcgtgctggagattctttgtttaaggtttacaaaaaaaacatggctgccatgagcaatgctgctcatcatcttctagtaattaaaaaaaacggcgaggatttagaagcttcacggattatacaaatattatctgactctgttctggttggcgacgaggaaaaaacaaaagacgagaaaaaatatggggaagggatcacggctagatataaaggtaattttgtaactataaaaattgatagccgcaaaatatctaaagaaatactaagcagaattgagttgttactagaggaacaatctactgataattaa

SEQ ID NO: 39243 - DNA, 216 bp, Escherichia coli
ttgtcacgttcaggctctgctgacaacttcgcatggagccttggcgcgggtgtccgctatgacgtaaccccggatatcgctctggacctcagctatcgctatcttgatgcaggtgacagcagtgtgagttacaaggacgagtggggcgataaatataagtcagaagttgatgttaaaagtcatgacatcatgcttggtatgacttataacttctga

SEQ ID NO: 39244 - DNA, 249 bp, Escherichia coli
atgcatccagatgatttcaccactgaaactttccgggatgagacgattacctgccgccagtcctttaagcgcggcgttcagggccttacgcggggcattctgctccagaaatgcatatgccagatgagcgtgtatatcaataaagtcaggctcccgttgagcaaggcgtctgagtttgttgatgtaactcgtctcgctgatttcatcagtgtcgtatgcatcgagcacttcttcaaactcccccagtaa

SEQ ID NO: 39245 - DNA, 180 bp, Escherichia coli
atgaataactttgacacaagaagactccacacaatccatatgtcgcttcaagagatcgctgataataccttgcaaatagctatggcaacgtactctgatgaaaacaagaaaagtcttatcgcaccactaatgaaaagacatgcagatctagtcgctgaagctcaggaactattgaaataa

SEQ ID NO: 39246 - DNA, 672 bp, Escherichia coli
atgataaaagatgaactttatgaattagtcttaaccgatgatcctaaaggaaaattatatgtgagagactcagagaagattgaagagggcgtcagtacaacagagtttgttgtagggtatggtgctatttcgatggtaaaaaaatcagagtcgatggcggcaaaaggattagttggactggagcgtgtagatcttatccgagaagttgtatttgaaaatggacattatgattgggaatgtgttgttaatgatgttctgccaaatatatgcaaaggcaatgcgcgtatacctgtttttcacttcttcaatcacgctaatttaattaatcccgatgggagtataattaacgaagcgggactctcaggtggagtattatcacgattaaatatcactccagtaagttttcaatcacaaggatgggataaacgacgttctgaaaacattcctgaagttagagttggtgtaaatgagttatatcttgcttatgatttcggattttttttgaggatgatgccctatatggagccagggttaatcaagcgtgacatagatgagcttcttaaaatattgaagaaacatatcgatgaagctatgagtattcaagctttgtcaagcaatttctgtcgattagtctgtgtatatgactacataaaaaatagcaaccgtttatag

SEQ ID NO: 39247 - DNA, 1017 bp, Escherichia coli
atgaggttcaataacttcccaacacttagtaaaattgatactgaacttagaaaaagtattgcgtttgaaagctatagcgttcccgaggatttgataaatatactcaatgaggtatatcagtcttcttcttacaataatcttaaagcattttctgtaaaaaatgaaattttctatttcagattgaatgagaacggaacatacataagggaggattactttagctcgggtgagtattttattttgaatttatttagaatgattgagctcaaaagaaaattcattgtcatagatgagatagatatatcactagactcttcggcgcaagtccatcttatagcagtgctaaggaaatattgtcagagacactcggtgaatattgtattcacaacacattcacttgctttaatgcaaacgctgaatgatgatgaattgtactatatgtgcgaaggtgatgctggaactacaattacaaatcgatcatataattatataaaaagtacgctttttggatttaaaggatgggataagtacattcttactgaagatgaagttctgcaaaatttcttagaatatataattaatgctcctgggaatgattacttctacgaatataaaataatatatgttggtggaggaactaatgtcattgatttaatgcgtcgtaatgagagagagagctttctcacgactcaacagaatgtgatctcagtgttagacggagatcaattaggtcaaaggcatgctcgaggtgaaaatattttatgcatacctttccaaagcgttgagaaggatttctatcaagcatacggccaagatgaatcgatcccgagagttacaactagaggtaacgataaacttgataagcaagtttatcgaggggtagtgaaaacctataacaacggctgggatgaaactagggtttttgaataccttgagaggttaaagcctgatgaatgtgaggctttcaggcaaaaaattagagcatttctccaaagaaatatttcggcagagggttga

SEQ ID NO: 39248 - DNA, 357 bp, Escherichia coli; identical to SEQ ID NO: 19135

SEQ ID NO: 39249 - DNA, 138 bp, Escherichia coli
atgcaacagcggctgtactgcacagggattatttatcagttgaaacaggacaggatgtgtaattgtaataccgtcacacgcgacgctatcacaattaccacctggtcagggctgcgccccgacaccctgctagtctga

SEQ ID NO: 39250 - DNA, 1410 bp, Escherichia coli
atgctgaaccgtgaatggcaggtggtacagagcattctgtcaggagaccagccgcaggcgcttcacggcagccaggggagaggaaccacgctgggaaatcagttagaggtgataccggcagaccggacgtggcgtccacggctgcaaagcaaaccgaaggtggacgggccacagagcgccattgtcaccgggcctgcgggagaggaaatcttctgtgatgaacatggccgggtacgggtgaagtttcactgggacaggtataacccggcaacggaggcgagttcgtgctgggttagggtatcgcaggcgtgggcggggccggggtttggtaacctggcgataccgcgcgtgggccaggaggtgattgttgacttcctgaacggggacccggaccagccgctggtcatggggcggacgtaccatgaggacaaccgttcgccggggagcctgccggggacgaagacgcagatgacgatacggtcgaagacgtataaaggaagcggttttaacgagctgcggtttgaggacgccacggataaggaacaggtctatattcacgcgcagaagaacatggacacggaggtgctcaacgaccggaccacggacgtgaaacatgaccatacggaaaccatcggtaacgaccagaagataacggtggtgaaggggcagacggttcaggtcgggaccagaaaagaagggggccacgaccagagtatcacggtggcgaatgaccggcgcataacggtacgcaacgaccagacgctgaaggtgacgaacgaccggacggtgagcgtgagtcacgatgacagtctgtatgtcagaaatgaccgctgggtgacggtgaaagggaagctggagcacaggacgacggggaaccatatcagccaggtggaggggaagcacagcctggaggtgaagggcgatctggctgagaaggtgagtggcgcgctggggataaaggtggacggggaaatcgtgctggagagcagcagtcagataagcctgaaggtgggcaggtcgttcgtagtgatacactcgggcggcgtggatatcgtcgggccgaagataaatctgaatggtggggggagtccggggacgccggtgtcaacacttcagccaagcgtgctagaggttctgacagatgatgaaggtgatgataaaggcgaatgtgagaagaaccgtgactctgatgctggttcaggaggcaatgacgaccagctggataatcctaaaaaatattacttacgcttccattttacagatgatagcagtattccgtatgcgaatactaaatatatcgcatactttgcagatggtacaaaaagagaaggtatgatggatgatgatgggtatacagaagtatttataaaagatattgaagaggaaataaaagttcatttgcttatttaa

SEQ ID NO: 39251 - DNA, 309 bp, Escherichia coli
atgaagccaggattcgtctcttatatacgaacattattgaccataatatttcttagctggggcgtcattcctgaggttttcgccggttgtaacatttctggaaatggaggaaatccggcaacagtacaattctccgtgcctgcgttggttgttaatagcgatgccgttcctggaacgattattgcgacagtaaatgcgaacagtccgtcaatttcagtttcctgtacggcaaatggtgagatctggcaaggatataccgtattgacaaacggtgatatgcgtactgaggtaatgactccaacttactga

SEQ ID NO: 39252 - DNA, 2577 bp, Escherichia coli
atgtttgattttgccactgcatggttgcttcaaaataaggtattactgcccggagcaaccacactagtacgtctcatcagtgaaattcgtgaaagggcaaatcagcggctgtggaaaaagctggccgcactgccgaacaaatggcaggcagctcaagtgatggagcttctggtcattccggaaggtcagcgtgtatcagcactggaacagttgaaaaaaggccctgttacagtcagtggacctgcgtttaatgaggcgctggaacgatatatccgattacgaagtcttgagttttcccgactgaacttttccggtctgcctgccattcaactgcgtaatctggctcgttatgctggcatggcgtcggtaaaatatatcgctcgaatgccacagcagagaaagcttgctgcacttactgcattcgttaaagcacaggaaataacggcattagacgatgccgttgatgtgcttgatatgctaattctggacattatccgcgaagcaaagaaaaccgggcaaaaaaaaagactcaggacactgaaagatcttgatcaggccgcattgttactggcgcgggcatgtgcattgttgctggatgataatacagatgtcccagatctcaggcaggttatcttcaagtgcgtacccaaaaacagactggcagaatctgtaagcaaggttaatgaacttgctcgtccacagaacaataatttccatgacgaaatggttgagcagtacggtcgggttaaacgttttcttccggcggtgttgcgggacctgcatttccgtgcggcaccggcaggtgaacatgtactggctgcgattcattatctggcagaactgaatggttcgaaaaagcgcatccttgatgatgcgcctgaacatattatcaccggtccctggaaacgcctcgtatacgatgcggagggacggatacagcgtgcaggttattcactatgtttgctggaacgccttcaggatgcactgcgccgccgggacatctggcttgaaaacagtgatcgctggggagatcctcgcgagaagttgttgcaaggtgaagagtggcagactcagcgtattcctgtctgtcgggcactgggacatcctgtcgatggacgtaaaggtgtgcaacaactggctattcagctggatgagacctggaaagccgtggcatcacgatttgaaaagaatgcggaagttcatatctgtaatgaaggtaaatatccatccctgactatcagttgtctggagaaacaggaagagccaccatcattgcttcgtctaaataatcggatcaaacagctactcccaccggtagatttaacggaactgttacttgagatagatgcccagacaggatttacacatgagtttgcgcatgtcagtgaatctggtgctcgagcgcaagatttgcacatcagtttatgtgcggtattgatggctgaagcctgtaatatcggactggagccgctgataaagcacaatataccagcactgacccgccatcggctcagttgggtgaaacagaattaccttcgtgcagaaacgctggtcagcgccaatgcccgcctggttgattttcagtccacactggagcttgctggtcgttggggaggtggagaagtggcatcagctgacggcatgcgctttgtcacaccagtgaagaccatcaactcaggatctaacagaaaatattttggttctggacgaggcatcacctggtataacttcgtatctgatcagtactctgggttccatggcattgtggtacccggtacattacgggattcgatttttgtactggaaggacttcttgagcagcagacagggctgaatccagttgaaatcatgacagacactgcgggtagcagcgatattattttcggtctgttctggctactggggtatcagttttccccccggcttgccgatgcaggtgaggcggtgttctggcgggtgaataaatcggcaaactacggagtactggataagttggcccgaggatatgcagatctgtcaaaagcggagagtcagtgggatgagatgatgcgaaccgctggttcgctgaagttgggtacaattcatgcgtcagaactcattcgctctttactgaaaagctcgcgcccatcaggactggcacaggcaattatggaagtagggcgtgtaaacaaaacgctatatctcctcaattatattgatgatgaagattatcgtcggcggatcctgacgcagcttaatcgaggagaaggccgccacgctgtggctcgtgcgatttgttacggacaacgcggagagatcagaaagcgttatcgtgaagggcaggaagatcaactgggggcgctgggcctggttactaatgcagtggttctgtggaacacgctctatatggaggaagcgttgagctggatgcgccgtaatggcgaagaaattatagatgaagatatcgctcggctatctcccctgatgcacgggcatatcaatatgttgggccattatacattcacgttgccagaggatattttaaaaggggaactgagagctctaaatttaaatataaacaacgaattatctccttaa

SEQ ID NO: 39253 - DNA, 177 bp, Escherichia coli
atggctacatacggcggtcagtttacgcttacgctcaagctgctggaagcaaaaggtcagaaagtggcgctgaatgaggcgatgggcagcacgcaaagcattatggttgggtcggatggtgagttgtacggcgcatccgactcgcgcttggtggatgatttaacggcggggtattaa

SEQ ID NO: 39254 - DNA, 276 bp, Escherichia coli; identical to SEQ ID NO: 5786

SEQ ID NO: 39255 - DNA, 2118 bp, Escherichia coli
atgagtaccacaacacgtaaatttaaaaccgttatcaccgatacgggtgccaaaaaattagctcaggcagccgcgccagatggtaagcctgtccgcctgactcatatggccgtgggcgacggtggcggcacgttgcccacaccagacagtaagcagacccgtctggtgcatgaggtgtggcgacatactgttaatcgcgtcatcctggacgcaacacatcagaaccgcattattgcggagctggttattcctcctgaaacgggcggattctggatccgggaaattggtgtatttgatgagcacggcgatttaatcgcggtgggcaatactgccgaaagttacaagccagccgttgccgaagggtccggtcgtgcacaaacatttcgcaccattctgaccgtatccagcactgccaccgtggtgcttaccgtggataacaccatggtgatggccacagtggattacgtggatgacaaactgaaagagcatgaacagtcacgacgtcacccggacgcctcgctgaccgcaaaaggctttgttcaactcagtagcgccactaacagcgtgtctgaaacgcaggctgcaacgccgaaagcagtaaaggccgcgtatgaccttgctaacggtaaatatactgcgcaggatgccagcacgacgcgaaaaggccttgtccagctcagtagcgccaccaacagcacgtctgaaacgcaggctgcaacgccgaaagcagtaaaggccgcgtatgaccttgctaacggtaaatatactgcgcaggatgccagcacgacgcgaaaaggccttgtccagctcagtagcgccaccaacagcacgtctgaaacgcaggctgcaacgccgaaagcagtaaaggccgcgtatgaccttgctaacgcaaaatataccgctcaggacgccacgacggcacaaaaagggatagtccagctcagtagtgccaccaacagcacgtctgaaacactggccgcgacatcgaaagctgttaaggcggtaatggatgaaacgaacaagaaagcgcccttaaatagtcctgcactgaccggaacgccaacaacaccaactgcgcgacagggaacgaataatacccaaatcgcaagcacggctttcgttatggctgcgattgccgcccttgtagattcgtcacctgatgcactgaacacgctgaacgagctggctgcggcgctgggcaacgacccgaattttgcgaccaccatgactaacgcgcttgcgggtaagcaaccgaaagatgccaccctgacggcgctggccggacttactactgcggcaggcaagtttccgtattttacggggaatgatgtcgccagcctggcaaccctgacaaaagtcgggcgggatattcttgcgaaatcgaccgttgctgccgttatcgaatacctcggtttacgagaactcggcacaagcggggagaaaataccgttactcagtacagcgaatacctggaccaatcgacaaacattcagcggtggcctttctggggaactgtccggcaatgccgctactgcaacaaagctgaaaacagcacgaaaaattgctggagttggttttgatggttctagcgatatttcaattagtgccaaaaatgtcaatgcatttgcactccgacaaacaggtaatactgttaatggtgatacatccgttggatggaattgggatagtggtgcatataacgccatgattggtggtgcatctgcattaattcttcactttaatataaatgctggtagctgtcctgccgtacaattccgtgtgaattataaaaatggtggcatttcctacaggtcggctcgtgatggttatgggtttgaattaggttggtcagatttctataccacgacacgaaaaccttcagcgggagatgttggtgcatatacgcggacagaatgtaactcaaggtttattacaggtattcgccttggcggtctgtcatctgttcagacatggaatggtcccggctggtctgacaggtcaggttatgtcgttacgggttcagttaacggaaaccgtgatgaattaattgatacaacacaggcaaggccaattcagtattgcattaatgggacgtggtataacgcggggagtatttaa

SEQ ID NO: 39256 - DNA, 132 bp, Escherichia coli; identical to SEQ ID NO: 7548

SEQ ID NO: 39257 - DNA, 4560 bp, Escherichia coli
atgtcacaaaacgtagagtttatcctgtcgctggaagacaaacagtttacagcgtcaatcgatcgtgcggggaaactgcttactcgatttggtgagcaggtaacaaagcctgctcaaaaaatccaaacctttgaacgctctttgggttcggtcgcccgtatcattggcgttctggaaagcaagctcgattctacggcagataaactacaggatgtagctgccggttttgagcttgcttcagatgctacgcgtaaaatgcgtggcaacatcaccagcctcaattctggtcttaaagccctgattgagcgcgtcgatacgacaacttcttcagtagataaactcaccgcgtcattacgtaaagtgcaatcagagctaaatgatttctctgattgggcgacctatgcaagcaaaagtgcaagccgctttggtacggaggttaaagaagcctctgcgtccgtgagtggcatgaatacgcgccttaacaccacgacgaagcgactcagtaattggggtgtcacaacgagccaggctgccgagggactgaaaaaggttcgtgagcagatggacgaagttatcgggcgtcagcaactgattagcaagccggtacgtgttcgtacatctggaagtggtggtggtagcgggcaacgtagcggcgcttctggccacagcggtaaaaataacgaaggaggtatattctctggccttcgtggcaacattttcctgcttggcgagatcggagatgcagccagaacggttactgacatcatgtttgggtggcagaagcctattgttgaagctgcggccgaaatggaacgtatgcgggtgatgcttcgagggttgaataaggagaagtccaacccgggccaggctgccgctgatgatatgaagtacatcgtagacatggctcaaaatgcgccgttcgcgatgcaggcgttaacagactccttcgtgaagtttcgttctgctggcttagatccaaccgatggttctctgaaggcgctggtggactccgttgctcgttttggtggtgatagcgaacttctgaagcgtgcatccattgctgttcagcagatgtctggtaaaggggttgtatcgatggaagagcttcgccagcaattaggtgaggcgattccgacagcaatgaacgcaatggccaaggctgctggtctgacaatgggcgagttaactaaagctgtagcatctggaacggtagaagccaaaaacgcactggcacttatgttcaaagagttgaagatgcagaacgagggagctgcgtccgaaatgatgaacacatttaccggtacgttggcgcaaatgaagacagcctttacgctgttcgcggacaaagtaggccagactggttatttgtcttctttaagagagggaatgaaagaactcacctccctgatgaatagcgcagagggtacatcttttgctcactcgttgggaagcggattgacgacggctattgatggtttgcgtgacctggcgaaatggctgattaaaaaccaggagcttgttgtcactttcggcaaagccgtcgctgtcacgatggccttcagactcctcaaatcggggatttctggtgtcattggcactgctaatagcatgatcagcacctttgctacggtatccaccacaatacaggggacatttgatcttgcgacgacagccgttaaacgcttcaatcgagcctcacgcatgggactatctaccatccctgcattgatttttgctattcgcaatgcatttgctggcttgactgcgttcatggctgcaaaccctatagggttcttctttactgctgcggtaacggcggtttcgacgctgatctggcacatgagcagtctgaggaagaaagtcgaagacgttgtaaacaaagtcagagaaatccctgaagcgatgacgcaggcagatcgcgcgatgctggaaagcgaactgagcaagaaagatcgagagatctccagactggaaaaagaagtcgagactggcaaaaccttgcatttttcagcatacacgggaccgtacgaagttggtgtcgatgttgacgacagcaaaaagaaactggaaaaagcgcgaaaagaaagagaggaagtcgccaaagctcttgatggcggcatagccgaaaccatcaaacaaagcattactaagaaatatagagaggatattgatgcggtcaaccagaaagggaatgcattaatagcctcagtcgccaaagagatagaaagactcaccaaaagcaatgagaaaattgccgcgcggtcggacttgtccgaccacgaaaaaagcaaattaagggcagaaaacaacgcagaacttggacgtttgtacgcccaggccgacgagcaaaaactcaaagggtataaagctcgttatgagaaggggcttggtgaactcgccacatactctgaagagctcaaaaaggcccgagagtcgaacgatatgcaggggcaaaaagaagcccagacaaagatagacgccaccaccgaggctttgaagattgtaaaagaggggatggagaaccttgaaatcagtcttagcgtgaaagctggggacggcttggtttctattaatggcggtaaaattggtgagttttcaagcacaccagttgatgctaattccaaaactatgactggtttttggaaacagcagatggactctaaaaggtatcaaagagtcaatctcgatggtaccgcattatacgacttacaaggtcaacctgttgttggacctcgacaactcaaggagcaattaagacagaagaaaatttacggtgatgtgaaattagagcagttgtcagaaaatgaccgcatcgcagtaattaagactctgacaaaagctcgtgaacttgatgcagaagcagcagataaggcagcaaaccgtaccgcaaaagcagccgagagagcagcaaagaaagaacaggcagcgcaacagaaactggcggccggatatcagaaggctctggataaagccgatcagcttatggggcaaatgggtgaaagctctaaggctacggtatcgtttgatcagtctcttcgcgatacaacgaaatcgctgacagatttggctaatgcggttcctaacgagttcatcactcaagagatgatcgacaaggcgaaaaaacgtcttgaagacctcaaaaatgcgacacctgaatatcgcgagatgtttaatcgccgcaatgttgagcagatgatctccacttgggcaccggaggcggattccattattagtgctggctatacgccgtctcgtgaagagaaagttgctgatttcgaagaaacctataatcgcaaccttaaagcgttgatggatttacgtaaagctgcgattgagtcaggcacagcctcacaaagccagattgagttgttcgataaaaagatcaatcaacttattgctgctggcaataccgcgcttattaaagagacggggactgcgacgcagaagttggcactggaatacgaaaacctggcagagcagatcgaaagcacctggactgatttgtttagtggcttaactgatgtcctgactgatttcgttattaacgggaagatgagcttctccagcctatctcagtccattttgaaagatatcaccaatatggtcgtgaagtcgcagatcacgctgcctctaatgaacatgttggggatgggaaccaccgcagctggtagttcacagagtggtaatttgctgaccggggttgcttccgccgttgccaatcaaggtgtgcgcataagcaacactgttaatggcgacaagtcggtaggagaagccacgaaggagacgtccagttcggtaactggattggggcaaacgacacagcagaccaccagcgcaattggcactgcaacaaatgcgattggtagctgggtatcagggctatttgatagcactgaagccaaagatgccgagacaaaagccgtgaaggactccatcttctcgatgcagaacctcagttctgttaccggcgcgctgtctgccgcgtttgcaatgcttggagctaatgcttccggctctggtaataagtggttgaatttcggcgcaacagttgcatctggtttggtttcagtatgggctggtggtggattcgatggattgatgtccggttcttctggctcaacttccgggttcaacaatctgaccagttctgctgccgatggcacgaatggtattcctgcaattccgaagtttgcaaatggtggcatattcggaaaagacggcgtgatcccgctccgggcataccagaaaggcggtatcgccaactcacctcaattggcgttgtttggggaaggcgatatgaatgaggcgtatgttccattgcctgatggtcgaacaatccctgtaacgctcagtaccgatggtatgagtggaggaggaaatgttctttctccggtatcaattgagatcaacgtccatagtgacggtagcacgacagaatccggcgatacagaaagcatatggaacaatgccgctcaacggatgaaagcaatcgcgcttgagactatcgctcaagagaaacgccctggcggatcactcaacccaaacactcaacgtaactaa

SEQ ID NO: 39258 - DNA, 576 bp, Escherichia coli
atggctctttcaaatacacaacttcacacgatattggataaagcttcatatgtatcaaatgggacacttagcgaaaataacattcagatacaacgggggaaagaaacgaaagataaaattcacgctaaaggtttctacttcggaaagagttcagcattacgagaatcttattcaaaaaacaacccttactacatttatttaatttcaccagacaatgaggaaagacgagatgattattcattggtcattttccctttccagataaaagaaatacttcctgtgatcgaaagtatagatggtattaccccaggatatattcagttaagctcaaacttcaatacgttcaaaattcacaatcgcttaaaaagtgattcatattgtggcgtaggctactctataaaggttgagaacgaagacagtctatgggaacttattgtgcagatcaagaaaaggcttgagttacctagaggagataagaacagactatcgacgctacctcagaatggattacctaagacaaaagaggaaaatacacctcaaaagctgattgtagatctgctcaacaaacgctcataa

SEQ ID NO: 39259 - DNA, 243 bp, Escherichia coli; identical to SEQ ID NO: 34324

SEQ ID NO: 39260 - DNA, 774 bp, Escherichia coli
atgagcgcgttagcagtcttttcctttcaggaagagcatcaggtacgtgtagtgatgattaacggcgatccgtggtttgtggcgaatgatatttgcaatgctttaagcatccagaatgtcacacaagctatcgctcgattagatgaagatgagcgatctatgtttaacataggccgtcaaggtcaagccaatatcatcagtgaatcaggtctttacacgctcattctccgctgccgtgacgcggtgaagcaaggcacaacagcttggcggtttcgcaaatgggtaacgaacgaagtcttgccctctattcgtaaaaatggagagtacgtttacatcgagcctgagccaatgcgagcagcggagccgttgaactggaggcagaaagagtatctgcgagggctgattaacgatatagcacaaagttttcagtaccgaaatgcctggattagcggtgtatggttagctttgcgtcgggcgtgtcgtaatccatccccgaaccccataacggttgatgatttgccagcaattacggcagaactgcgccggattttgacggctgctgagtcggcattggggaacatgcgcacgtatgaacgagagttgttgcgtgatgttgttcgtgggggtaggcggagtatgtcgtgtggtgatttacccatcaccgatattaactctgatctggaaaaggcgttacccgcgcattttgaactggcagttcaaaaacttgagcagttatccgcgcagctaaagccagcagaaatcaccaataaatag

SEQ ID NO: 39261 - DNA, 327 bp, Escherichia coli
atgtctactactgcatttttggacaaacttgattaccgtcagctgcagttttgccgggatgaatgcgatcgacgcattaaggctatccaggaggaagaaaaaaaggttgcctgggctgtaacagatcgtggccttatctttggctggttccgtacggaggattatctgaaagcagtggagttattggcgcgtgaggctgctgagcgttgggaacgagccgacaaggaaaacccggagacgaagtatgaactgaatctctacatcgagggcaaccatctaccattgtcagagtataacgctttgtttgctgatggtgagtggggttaa

SEQ ID NO: 39262 - DNA, 192 bp, Escherichia coli
atgggtaatcagtggatattatctttgtgtctcttgctttgtgtgttccagcaatggttttggttcatagatcgaaagtctcacaaggaaaacatgaaggccaggaaggcgatgtttcgtggtgaacaactcgcgcagacttatcgtatgtggaaacgtttctatcgtgatttttcggttaacggggagtaa

SEQ ID NO: 39263 - DNA, 291 bp, Escherichia coli
gtgaatatcgacaccacgataacgatcgatacggccctaaatatcggtctggcacttctcggttggttttacatcatgttcagtgcggggaagtgggcggcctctgtttttctaaagcagtggggaaagcaccgcaaacaggaaagacgccagaaagtgttagaggcgttctatgacgcatttgaacttagccgcattgagccaggcacaacagccaagatagcgacaaaaggcgacctgatgatagtgatgttccgacaggagagagcagagaaaggggaatcagcatga

SEQ ID NO: 39264 - DNA, 690 bp, Escherichia coli
atgaaattttccaaattttctgagttggtgaatcgtattttgtccaacaaccacagccatcgtcgcgatatggatgtaacaatcgttattcattcgcctggcagcattggttcaacaccctcagttgaggttcagtcaattcacgctggttttgattgggattccgggaaagtgctgattttcccagcacagccactgaccacgctaacaccagaacagattactgatattactgatagtgtgcgcaaaggtcagtcctggcacgcatatcaggaatacaagaagcataaagagcagttggaaaaattatcgattgaacttgataccgcaaaacagcgcattgcagagctggagagcaatcgcgcggcgctggcggcggagcctgtagcgtggcgatatcgctacgtgaaaaaaggcgttacggactctcagggggagccgtgggttggtgactggaaatatgtaccgacaacagaggattgcaacgacaggccgagctatgagattcaggccttattcactgccccgccagtcccggtgacatcagaaggactggttaaagccgtgcgtttctatgaacaagttaagcgtgaaaatccgccagtcgaaaccggagcatggaaagacgcgattgactgggtgctcaaagaggcctgccaggttgtaaacactggcatcaaaggagaatga

SEQ ID NO: 39265 - DNA, 210 bp, Escherichia coli
atggctattgccgcaagttacaccatgcatctctattgtgactgccgtcagtgcacggaaggtgtatatccagtgccagacttcggtgagtatataggtacgtcatgggctggctgtgcaaaagaggcgcgcaaggatggctggcgaataagcaaagacaaaacgcgtgcttttgcgccagggcataaagttttgaggattaacaaatga

SEQ ID NO: 39266 - DNA, 396 bp, Escherichia coli
atgaccactattaccaaagagcgactgctgacaatcaagcagtggcgcgaaacatacggaccgggtagcaacgttgtactgccagcagaagaagcggaagaactggcacgaattgcgctggcatcgctggaagcagatccagttaaacgagttaactcagatcagatgcgccgagtctgcttagaagctaatcgccatttagataaatatgacgcgatggcgaaagaggtaaataagttgcttggacgcatcgccccgccagcgccggtagtgccggaagaaatcagtacgacccacacaatgctgcccgccatgagtgatcagttgatggcgttcggttatgtgaaggggtggaatgcctgccgtgccgctatgcttcagggaaaaggagagtga

SEQ ID NO: 39267 - DNA, 453 bp, Escherichia coli
atgaccactataaccgataagaaacagtatccaggcgagcaatatcttaatgagctgatcaccaacatagagtttgctgcaagggcaccagttgaagtcgtgagagcgatggcagcagagctacagaagcggcgcgaagctgatagtgcagaacctgtaagccaaacttacaagttaacttttgagcaatggctggaacagcagcacggcaaaattgatgttgattgcggctgtgtgagcactgaaatgcttctgcactggatgcgtgtggcgtatgaggctggcaactctccggtaactccggatggtcatgttcagttttctgtttcacttcctgcagcgtttggtggagataaatattttattgatggtgtatttcaacctttgagatatgagcgtgactgtgaaagggcggttgtggccgctggcggtgtagttaattgggttaagtaa

SEQ ID NO: 39268 - DNA, 243 bp, Escherichia coli; identical to SEQ ID NO: 34324

SEQ ID NO: 39269 - DNA, 288 bp, Escherichia coli; identical to SEQ ID NO: 34326

SEQ ID NO: 39270 - DNA, 966 bp, Escherichia coli; identical to SEQ ID NO: 34337

SEQ ID NO: 39271 - DNA, 783 bp, Escherichia coli
gtgaaggcgatgtatgccgccaccatcgagagtgagctggatacgcagtcagcgatggattttattcttggcgcgaacagtaaggagcagcgggacaggctgaccggctggattggtgaaattgccgcgtattacgccgcagcaccggtccggctgggaggcgcaaaagtgcctcacctgatgccgggtgactcactgaacctgcagacggctcaggatacggataacggctactccgtgtttgagcagtcactgctgcggtatatcgctgccgggctgggtgtctcgtatgagcagctttcccggaattacgcccagatgagctactccacggcacgggccagtgcgaacgagtcgtgggcgtactttatggggcggcgaaaattcgtcgcatcccgtcaggcgagccagatgtttctgtgctggctggaagaggccatcgttcgccgcgtggtgacgttaccttcaaaagcgcgcttcagttttcaggaagcccgcagtgcctgggggaactgcgactggataggttccggtcgtatggccatcgatggtctgaaagaagttcaggaagcggtgatgctgatagaagccggactgagcacctacgagaaagagtgcgcgaaacgcggtgacgactatcaggaaatttttgcccagcaggtccgtgaaacgatggagcgccgtgcagccggtcttaaaccgcccgcctgggcggctgcggcatttgaatccgggctgcgacaatcaacagaggaggagaagagtgacagcagagctgcgtaa

SEQ ID NO: 39272 - DNA, 504 bp, Escherichia coli
atgatgacagaaattctgcttaagcaggcaatggtggggattgtcgggagtatcggcagcgccattggcggggctgttggtggcggcgcatccgcgtcaggcggtacagccattcaggccgctgcggcgaaattccattttgcaaccggaggatttacgggaaccggcggcaaatatgagccagcggggattgttcaccgtggtgagtttgtcttcacgaaggaggcaaccagccggattggcgtgggaaatctctaccggttgatgcgcggctatgccaccggcggttatgtcggtacaccgggcagcatggcagacagccggtcgcaggcgtccgggacgtttgagcagaataaccatgtggtgattaacaacgacggcacgaacgggcagataggtccggctgctctgaaggcggtgtatgacatggcccgcaagggtgcccgtgatgaaattcagacacagatgcgtgatggtggcctgttctccggaggtggacgatga

SEQ ID NO: 39273 - DNA, 357 bp, Escherichia coli; identical to SEQ ID NO: 32715

SEQ ID NO: 39274 - DNA, 2877 bp, Escherichia coli
atgaccatcagtaccgggctggaactggggccggacagtgaagaaaacaccggtgggcaatggatacagaatggcgggatagccggaaacaccactgttaccacaaatggtcatcaggtcgtgctggaggggggaacagccagtgatacggttattcgtgacggcgggggacagagcctgaacgggctggcggtgaacaccacgctgaataacagaggcgagcagtgggttcatgagggcggggttgccaccggtacaattatcaaccgcgacggttaccagagcgttaaaagtggcgggctggcaacaggaaccatcatcaacaccggcgcagaaggcggcccggattctgacaactcgtacacgggtcagaaggtccagggaacagcagaatccaccaccatcaacaaaaatggacggcagattatcttattttccgggatagcccgtgacactctcatttacgcaggtggtgaccagtcggtacacggaagggccctgaataccacactgaatggcggttaccagtatgtgcacaaggacggacttgcgctgaacacggtaattaacgaggggggctggcaggttgttaaggcaggtggtgctgtcggtaacaccaccgttaatcagaacggtgaactgagggtacatgccggcggggaagccactgcagtcacccagaacacgggcggtgcactggttaccagtacggctgcaaccgttaccggcataaaccgccttggagcattctcggttgtggagggtaaagctgataatgtcgtactggaaaatggcggacgcctggatgtgctgaccggacacacagccactaatacccgcgtggatgatggcggaacgctggatgtccgcaacggtggtaccgccaccaccgtatccatgggaaatggcggtgtactgctggccgattccggtgccgctgtcagtggtacccggagcgacggaaaggcattcagtatcggaggcggtcaggcggatgccctgatgctggaaaaaggcagttcattcacgctgaacgccggtgatacggccacggataccacggtaaatggcggactgttcaccgtcaggggcggcacactggcgggcaccaccacgctgaataacggcgccatacttaccctttccgggaagacggtgaacaatgataccctgaccatccgtgaaggcgatgcactcctgcagggaggctctctcaccggtaacggcagcgtggaaaaatcaggaagtggcacactcactgtcagcaacaccacactcacccagaaagccgtcaacctgaatgaaggcacgctgacgctgaacgacagtaccgtcaccacggatgtcattgctcagcgcggtacagccctgaagctgaccggcagcactgtgctgaacggtgccattgaccccacgaatgtcactctcgcctccggtgccacctggaatatccccgataacgccacggtgcagtcggtggtggatgacctcagccatgccggacagattcatttcacctccacccgcacagggaagttcgtaccggcaaccctgaaagtgaaaaacctgaacggacagaatggcaccatcagcctgcgtgtacgcccggatatggcacagaacaatgctgacagactggtcattgacggcggcagggcaaccggaaaaaccatcctgaacctggtgaacgccggcaacagtgcgtcggggctggcgaccagcggtaagggtattcaggtggttgaagccattaacggtgccaccacggaggaaggggcctttgtccaggggaacaggctgcaggccggtgcctttaactactccctcaaccgggacagtgatgagagctggtatctgcgcagtgaaaatgcttatcgtgcagaagtccccctgtatgcctccatgctgacacaggcaatggactatgaccggattgtggcaggctcccgcagccatcagaccggtgtaaatggtgaaaacaacagcgtccgtctcagcattcagggcggtcatctcggtcacgataacaatggcggtattgcccgtggggccacgccggaaagcagcggcagctatggattcgtccgtctggagggtgacctgatgagaacagaggttgccggtatgtctgtgaccgcgggggtatatggtgctgctggccattcttccgttgatgttaaggatgatgacggctcccgtgccggcacggtccgggatgatgccggcagcctgggcggatacctgaatctgatacacaacgcctccggactgtgggctgacattgtggccctgggaacccgccacagcatgaaagcgtcaacggacaataacgacttccgcgcccggggttggggctggctgggttcactggaaaccggtctgcccttcagtatcactgacaacctgatgctggagccacaactgcagtatacctggcagggactttccctggatgacggtaaggacaacgccggttatgtgaagttcgggcatggcagtgcacaacatgtgcgtgccggtttccgtctgggcagccacaacgatatgacctttggcgaaggcacctcatcccgtgcccccctgcgtgacagtgcaaaacacagtgtgagtgaattaccggtgaactggtgggtacagccttctgttatccgcaccttcagctcccggggagatatgcgtgtggggacttccactgcaggcagcgggatgacgttctctccctcacagaatggcacatcactggacctgcaggccggactggaagcccgtgtccgggaaaatatcaccctgggcgttcaggccggttatgcccacagcgtcagcggcagcagcgctgaagggtataacggtcaggccacactgaatgtgaccttctga

SEQ ID NO: 39275 - DNA, 888 bp, Escherichia coli
atgtgtaaggctaaggtgttggctataattgttacttacaacccggaaattattcgtttgacggaatgtattaactctttagccccacaagttgagagagtaattcttgtagataatggctcaaataatagtcatttgataaaaaatatcattattaataaccttgaaattattttgctttcggaaaacaaaggcattgcatttgctcagaaccatggtgttaagaagggcctggaagcaaaagagtttgactatttatttttctcagatcaggatacttgctttcctagcgatgttattgaaaaacttaagagtacatttacgaaaaataataaaaaaggtaaaaatgttgcttgtgcttctcctttttttaaagaccatcgttcaaattatatgcatccgtcagtctgcctaaatatttttacgagtacaaaagttatatgtagtgaagtagacgatgatctttatccctcgcatgttattgcttctgggatgttaatgtctcgtgaggcatggcgcgtcgtcggaccattttgtgaaaaactctttatagactgggttgatacagaatggtgttggcgtgcattagctaataatatgattattgttcagacaccatcagtcatcatttctcatgaacttgggtatgggcagaaaatttttgctggtcgatctgttacaatacataattctttcagaaatttttataaaatacgtaatgcaatatacttaatgctgcattcaaattatagctttaagtatcgttatcatgctttttttcatgcgacaaagaatattgtatttgaaattttatattcgaaagaaaaattaaattcactgaaggtttgttttaaagctgtacgtgatggtatgttcaataatttttaa

SEQ ID NO: 39276 - DNA, 852 bp, Escherichia coli
atgaatttttcggaagaaaaaaataaagatttccccaaaaaagtacaaacttcgctatttgaagtagattgtaatgacggatgctcatttgtagatgtcttgaagacatgcgaaaatttcaaacaaaactatgactttgagtactctaacgacactcgggcaaggataaaaagtctaatagttaacgatgaccaaatctttgctgggataacactctatgagcccaaagctttggtcccggtaactccaaaagatggagaccataacgatttgcaggatgtagataattatgataaatgccatatattcttgcttgcaacagaaagcaatattctaacaatttttcaactatcaggaactcatcctttatctaagttaaaaaaaatatttagcctcatgaatatcaatgtgaatatttctgagaaactcaacaaagatgcacttggcaagataataaaagatggaatacgctccatcagcctaagtattgaaacaacaaaagaagatctagaagaggcaaaagcaacatcattaggtatcactggaaaagctaaagaagctttgtcaagattatttgagaaagagcaagatgatgacaactctttctatgggcttctgactcttgacaagagacataacccaaaactcttaaatattgcgaacaaaaatccaagcctgatcattgatgaattatcggaagagttcttcatcacaacatcaaaaggccaagcgatcaaaagctctgaaatcaaaacaaaaaaagattattacacaagaaagtatggctctaccaccataaaagcggaacacgctaaggaaattcttgagcacttcaaggatttcatactataa

SEQ ID NO: 39277 - DNA, 492 bp, Escherichia coli
atgagaggtaaagattggagttatattttttccataatcttttttatctgcctttctcttgtattaacttattatttacatgataaggttagatataacaaagagttgcttggacttgtggcaaatatattttcaatattaacagggtttctgttacttgttataaccacaagtggagacgtagcatcgtttacagaaggtaaatcaagatcagaaaagtatgcaactaagaggaaattcgaaattcggttttctcgttacatgatgcttttttacctctatcttacagtcttgtgcttaatattcttctactacatgctgctgccaccaggagacaccagtaaaatcttagcaagcaagccgcctgtgaccaacctgagtctggcacttgagtttattatatgctggctaagcataatttcatttggatgctcttttttcataccaataaagctgaaacagatttataacgaaaaactcaagcaacaataa

SEQ ID NO: 39278 - DNA, 198 bp, Escherichia coli
atgttgacagttggaaaggcatattcaactaaaaatggaaagacatttagttgtgaaaaagatattggagaaatagacactatctttccatttggtggatgggtatacaattctgatggaagcaaagacagatttgcatattacaccagaggaggtacttataaactaaccaaatcagaatatgatttaattatttag

SEQ ID NO: 39279 - DNA, 270 bp, Escherichia coli; identical to SEQ ID NO: 12542

SEQ ID NO: 39280 - DNA, 762 bp, Escherichia coli
atgcttgatattttttgctcggaatttgaagaaaaaagaaacaaattaaagacctaccttgaaagctcgggatttctttataggcattctatcatcaaaaaaatgtctcttttggatggtatggatgaaagccagaattttgagttgttgcaggcgaaacaatataatcgtgatgatatacaatgctgggagtatattagctctaagtggaccgtcgttcctattatgatgggttcgcaaagccttaaacacttttttacatggaattttaaggccgctgggatatttcagcgatatggaaaggatatgtgggatatcaacaagataattgcagttaaatctttattgtttgctagttcagtcttaggtagttgccttggggttgcaggctatggcccgttgctgccttcggagcttgcattagacaaaaagaagctaactaagaaaaaacagtcagcaagaatgggagggatatctaaggctgaattatatctcccgataaaagaagagacgataagattgctccaccaaaatgttcctgtggatggtagatggaaaaataaaacggttgcagcaaaggcaatagaggcagatttagtcatctttgtacaaaatttgaaatctcaaaaccaaaatctggatcttaatgaagaagatattattacagtcgtcaaacgttgggaacgcaatgatgaaagagtaaaggctgcatttgagggaacggtgaagcaaaaaatctctggcaagaagggctcgggttag

SEQ ID NO: 39281 - DNA, 396 bp, Escherichia coli
atgggcgcttttctcgtcggtctgcacgaacacctgttgcagcgccgcacggaccaccgactggtttgcacggctgacgcggctcagcacgttgcgcatgaagtggacccggcagcgctgccagctggcggagaacatctgcctatcgccgccttcaggctcagcagaaaggtcagccaggatgccgtttatccatgcttcctggataaccgcgttgagcgccttctcagacaatctgtgggcctccaggaagggcgggaagtacgtccctttaagcagcttcggaatacgcaggtccacagcgtgccgagctggcggggactgacggtcacgatagccgttgtggtaggtttcgcgctcatcgctgcgctagtgggctccgcgttgatgtgctga

SEQ ID NO: 39282 - DNA, 213 bp, Escherichia coli
atgaacaaatctaatgttaaaatacttcgtctttctacagtaattgacaaaacgggcttgtcacgttcaacaatctatgactggatcaatccgaaatcgccacgctatgacccaacgttcccgaaacaacgtcgtctggggctgcaatctgtcggctggatagaggctgaaatagacgaatggattttacaacgaacccgggcaatagagtaa

SEQ ID NO: 39283 - DNA, 2148 bp, Escherichia coli
atgtccaggctgactgatttaatagctaaagcgaaggccaaagacccgcaactaggcgctgatcttgatcgagaaatcaagatcctgtcatcacgtcttccctttgggcttaatttcgaacgacatagccccgaagtcgtagagttgccattgcggcctattcgcaagggagataaagtccgcgttctgccagagcgtgggtctactaagaaaggtgatcaacggttgtggcaggttaaaaccatccacaaggcgaagaaggtcgctgatctcgagttgctggacgcggctgatgtcgagactcagactgtagcgcttgacgaccttgtagttatagctgaatttcgtgacacgatctggccgggtctggttagtacgggaaaagtgcaacgcggtggagataaacctttccactcagttatcaatggcgagaactaccatgtgttaaaggcgttaacctatacacacaggggcaaagtggacgctatctatatcgacccgccatataacacaggggcaaaggactggaagtacaataatgactacgtcgaaggtgacgacatctatcgacacagcaaatggttggcgatgatggaacgtcgcttgctagtagctaaagaattgttaaatccagcggattcagtgttgatcgtcactattgatgagaaggaatatctgcggctgggaatgttgctggaacaaatatttccggaagctaacgtgcagatggtctcatcagttataaatcccaaaggagcttctcgtggaaacggatttcgacgtactgacgaatatctctattttgtgatgtttggagcttcatcacctgcacgcctccagcttggtgctgattgggctagttctgcttcaagtacaatagaggatagtgaagaacgaaaagcaccatcgacaccagagtggacctcaatgatgcgacgtggttcacacgctgcccgtgcggagcggcctgggctttttttcccaatatatgctactcccgatggaaaacgaattgttgatattggcgagagcattccgttaggagcagaactcccacaggacagacccggactgacgactatttggcctctacgttcagatggttcagaaggtgtatggcaagttgggccttcagaattacgaagccgcattgagcaaggtagggttagactagggcgagccacttcctatggttttgtcgtaaattatcttcctgacggtgcgtatgcagccgtattgtctgatcttttcgaaatacatggtcgtgctgaggatggctcactgatcgcaacaggtcgccgcgatactcgccgagttgccccctcacaatggaaaattgcgtctcataatgcctcagagtatggcacagcccttcttcgctccttgttgccgtcgagaacttttccattccctaaatcgctttatgctgttgaggacgctcttcgcttttttgttgctaacaagcccaaagcaatcattctcgatttctttagcggctcaggtacaacagcccacgcagtcatgcgccttaacaagcaggatggtggttatcgtcagtgcatctctgtcactaataacgaagtctctgccgacgaacagaaaaaattgcgacaacagggttttcgccccggagatcctgattgggaaaagtggggcatctgtgactacataaccaaaccacgtgtacaggccgccatcacagggaaaacgccgaaaggacaacctattaagggcaattataaatttatcgatgagttccccatgtctgaaggcttcgaggaaaacgccgaatttttcaccttgacctacgaagcagagaaatcggttagccacaacttggcttttagtcacattgcgccgttactgtggctacgtgctggcgcatgcggcaaacgtattgacaaactgcctgctgcaggatgggcggtgactgatgcgtatggcctgctgtcggctatggatcaggccacacccttcattgaagccattagccacgccagtgacgtgcgagtggccttcatcgtcaccgacgacgatcgtcacttccaggctgtaagcagacgtttaccaaaaggcgttgagcctgtgcgtctgtacgaatcgtacctgaccaatttcagcttcaccagtggggaattaacagaatga

SEQ ID NO: 39284 - DNA, 714 bp, Escherichia coli
atgtctcagactgagcgtcgttatgaccgcctttctgtccggctttctctgattatcagccgtctgctcgcgggtgaaacgctgaatatgcgcaaactggccgctgagtttggcgtctcggagcgtaccctacatcgtgatttccgcgagcgtctgatttatctcgacctcgaatatcaggatggctgctgccgtctgctgaccggaggccgtcaggagattcgggaggaggccgcaatgcagtttgcccgtcagtcaggcactggcgcgttgtttcctgatatggaccaccatctggtcaattcattgctgagcagcaaggactcctcgccatgtcttatctggcatccgggggcatccgtaacgtcttcccgcccaggcatcttcacacgactggtcagggcggtatcagaaaacaggaaggtaaccctgctggctgacggatgccgttgcgacaaccttgccccctaccgactgattttcagcgccggtgagtggtttctggtgggggaacaccttgcccggataaccgtttttgcactgcacacagttcactccgtgacgtttcacgcggaaaccttcacaccagacggacatttcacccgcattctgtcacacccggattttttacaggcgttacctcattttcatgtttttcattcactactcgctgacggcagttacgggcagcttacccataaggaacaggcatga

SEQ ID NO: 39285 - DNA, 636 bp, Escherichia coli
atgaaattactcacctcggcggcgctggccgccagcctctgcattacctctgtgaccccggccatcgcagaaaatatcgtgggttcagttaaggcctggcagtacatgcaggctgatggctggaaatccgctgatggatacgatgataaccgcatgcataacgagttataccaggcggtcgttcttgataattatccctggacgaatcactttctgcttcgtagcagaggcggtagttcgctttatctggcagacaagaaagctaaaactgtcaaatacatcgatataaaacctcgcgacgagtatccgttacatcttcaggttgtttatcggggaattgatgacgggagtggctgttatttcgccattgtagatgaccgaatggcaaactactggacgattgttgaagatcgtcttctctatcaggacccacctgttgaagacgtcgatgcgaaagcagctgagcttagaaaacaactcacgccggaagtcgtgatgatggtgaaggataattgtattgacaaacagcagcaggctgcactggcagctaagcgttctgaaaaagatcgagagttgcaacagtgggtggcgaaacagagcctggcggaattatgtcgtcgtaccggcaactgctga

SEQ ID NO: 39286 - DNA, 453 bp, Escherichia coli
atgaatatatttactacgcgtctgacgacctctctggtggtcatcggcactctgctgctctccggctgcgacagcaaggaagatgcaggcgtgaagacgattgcccgatttaaggacctgactccgccgcccttcagcgacgtggtggcgcataaatccgatatcgagcaggaatgggtaaaaaaggatgccttcggcacaccgctatacacggtaatgaaaactcgccagtcgccggaaggctgtgagtccggcagttattactacattgctgatatgcagcagaaaacggtgcagccgctgatagccgccctgtgtctcgcggacaatattactctgagcttccggatcgagaccgacagctacacgggtgagaaatcggtggtgtattcgcacgatggcaaggaaatggggaaactcttgctgccggataaccaggagaaccatccatga

SEQ ID NO: 39287 - DNA, 453 bp, Escherichia coli
atgaagaagctgaaaggtgttatctctgctgcagtcctgagtctgtatttgctgacaccggcccatgctgatggcggttttcagggtgccatcaaaggcggcattccggcctacacccgcgatgtaaaacacaacaaacccttctggtgtaaccagtacaaactggtgagaaagatgtgtgaagtggtttcgcaatcggaaaatgggcgcgttgccattgtcagaatggtccccaccgactggaaatgccccaacggtatctggggtgtggttgaccgttctaatggtgacgccatggagttggtcccgacggcgaaaatgtccctggagcagtactgcagcaaggcattcagtgcaggttttgtcaaatcacagaacaggaaatcactggccgacgtcgtgatgtactacaacggcaagccagtcggttctttcgaatacattgaagagtga

SEQ ID NO: 39288 - DNA, 543 bp, Escherichia coli
atgaactggcattatgagaaaaatggcgtgcgtcacgacaatgtgaccgaagccgacataaccgaacgtattcagcgcggggagctgaatgcctcaacgctggtatggcaacagggcatgacggaatggcagccgctgtcagccacgccgctggcagatgtcctgaaacaatgtgcggttccccccgcgctgcccggcaatcgtatccccggaagcgtggtctggacgctggcctttgcgcccctgattgggtatgccctggagatgtggacggccgggctgagcggaatggaatttgaagaggcgtatgccgccgtgacggaggggcaatactggtttatcacactgatactgaatattgcgctggggtatctggatgaacgacggctccgtaaatccggcgttgataccgccgcctttggctggctggcctggctggttccgttttatctgtggcgtcgggcaaaagccctcggacagaaaccggcttacttctgggtctggctggtcacgctgacagtgacagtcctgggcgcaggataa

SEQ ID NO: 39289 - DNA, 453 bp, Escherichia coli
atgaacaacatgctgaaaagtgttatttccgctgcgaccctgagtctgtgtctgctgacacccgctcatgcagaagagcaacgttatatcagtatccgcaatacggacactgtgtgggtgcctggtaatatctgtgtttaccggttccgccttgacaacggcggcagcggggaaggcttcgggccactgaccctttccctgcgcctgaaagacgaacagggtaatacactggctgtgggggagatgggcgttgagccgtttggcgacagcgatgcctcccgaactcaggatgcctcactggaacatgaatgtgtggaaaacgtcagttccgtcgaaatcatgaaggcgacggaagcctctgagggttaccagactgacctgccgctgtccgtgtttgacccgcagtattatcgtccactaccggtgtcggttgccggaggtaaggcatcctga

SEQ ID NO: 39290 - DNA, 234 bp, Escherichia coli
atgccagaacttactgtactgccttatggtccgtttacccgccagcagtcagcggctgtggcgtcacaatacaccaacgttgctacagaggatgaccagaacacacattttcgcctggtggtccgggataccgacggcaggatgcactggagggccaggaactttgagccggaggcgggttactggctgaaccgctatctcaccagcgatggcattcgcagagccacaacgtaa

SEQ ID NO: 39291 - DNA, 819 bp, Escherichia coli
atgcgactcgccagccgctttggccgtatcaatcagatccgccgcgaccgccccttaacccatgaagaattaatgcaggttgttcccagcgtcttcggggaaggtaagcacgtgtcccgttcagaccattacagctacataccgaccattaccctgctggagaacctgcagcgtgaaggattccagccgttctttgcctgccagacccgcgtcagggaccagagccgccgtgagcatacgaaacatatgctgcgcctgcgtcgctccgggcagataaccggtcagcaggtgccggaaattatcctgctcaattcgcatgacggttcgtccagttaccagatgttgccggggtatttccgtgccatctgtaccaacggtctcgtctgcgggcagtcatttggcgaggtgcgagtgccacaccggggaaatgtcgtggagaaagtgattgaaggcgcttacgaagtcctcggtgtgttcgaccgggtggaagagaagcgtgatgcgatgcagtcgcttttactcccgccaccggcacaacaggcttttgccagagccgcgctgacgtaccgcttcggggaagagcaccagccggtgacggaagcgcagatactgacaccccgccgctatgaagaccgtcaggatgacctgtggtcagtttttaatcggtgccaggagaacctgctcaaaggggggctgccaggacgtactgccaaaggcaaacgcagccatacccgcgcggtgaaaggcatcgacggcgacgttaagctcaaccgggcactctgggtgatggcggaaaaactgcagcaggcgctgagctga

SEQ ID NO: 39292 - DNA, 471 bp, Escherichia coli
atgaccgataacactctgccactgttcacacccgcagcagatgctcctgctgcggctcagcatcagattatcgctataccggtaaccgatgagaaccgcatcagcttctggccgcagcactttggcagcattccgcagtggataatccttgagccgaccatcttcgcgtggatggaccgcttctgcacggactacagcggcggcatctggaatttttacacgctgagcaacggcggcgcgtttatggccccggaagtggagaacgatgaactctggtcgctgtttaacacgatgaacggcaacggcggtgacatgagtgccgaagctgcagggattgcggtctgtctgatggctttcagccaccatgcctgccgtaccgaatgcgacgccatgacggagcactactaccgcctgcgggactacgcgctcaaccacgcggaatgcaacgccatcatgcacatcatcgactga

SEQ ID NO: 39293 - DNA, 480 bp, Escherichia coli
atggagcaacagttaccgttgtttgcccgtgaattagcccctgccgaccagcagacagtcaggaaagccttatctctgctggagtgccagctacgtgaaaccggcgcatcatttacttccagccatgccgtccgcgactggctgcgcctgcagctcgcgtcactggagcgggaagagtttaccgcgctctttctcgataaccagcatcgcctgatagcccacgaaacgctatttaccggcaccatcaaccatacgcaggtccatccccgcgaagtggtgaaggccggtctgaagcataactgcgccgctgtcattgtcgcccatagccatccctccggggaggctgaacccagcaaggcagaccgtcaggtcactacgcgtattcagcaggcgctggacctggttgatatccgcttgctggaccacctggtggtcggcggcatggagatcacctcgtttgcagatcgtggctggctgtag

SEQ ID NO: 39294 - DNA, 222 bp, Escherichia coli
atgaaaattatcagtaaacgtcaggctatggcgatataccgccagcatccgcagtcccggttgtttcccttctgcacgggtaaatacaaatggtctggcagcatctgccactacgctgggcaggaggttcaggatatcagcggtgtgctcgcggtcttcgctgaacgccgtcagaaccgcaacggcccctatgtcgtattacgcagcgtcacgctgaattaa

SEQ ID NO: 39295 - DNA, 360 bp, Escherichia coli
ttgtcgaataaaataccgacagtaaaccacgatatcactgaaccctggtgggggcttaaacgcagtatcacgccctgttttggcgcacggctggtgcaggcgggcaactgtctgcattatctcgctgaccgggccagcatcaccggacagttcagcgacggggatttacggcatctcgaccaggcatttccactgctgctcaaacagcttgaactgatgctcaccagcggtgaactcactccccgccatcagcactgtgtcacgctctatgcaaaagggctgacctgcgaggccgactccctcggctcgcatggttacgtatacctggcgatttatccgacaccagcggcaaccgcgtaa

SEQ ID NO: 39296 - DNA, 378 bp, Escherichia coli
atgcaaacccaaccactatcctcaacgcaggaggctacatcacgcccatcaccggtggagatctggcaacggcttctgagccacctgttggatcgtcactacggtctgacactcaacgacactccgttcggcaacgatggcgtgattcaggagcatatcgatgccggtatctcactgtgcgacgcggtgaattttatcgtggagaaatacgatctggtacgaaccgaccgtcgcggttttaacgcagaaacacagtcgcctcttctcagcagtatcgatattctccgcgcccgcaaagccaccggactgatgacccgaaacgattacagaacggtgaccgacatcaccaccggtaaataccgggaggtgcagccatga

SEQ ID NO: 39297 - DNA, 492 bp, Escherichia coli
atgaagctgtccctgacggtagaagccgataccctcaacgtactggccctgaatgcgggccggatcgccgtggatattgatggcattgaactggctgcgctgattgatgtggtctgtgataacgggtattccctgcgtgttgctgacgagcccagaaagctggttgttgaagatccgcttccgcccgtcgcccgcattaacagcatccagtgcagtaccgcacatatcaccgacgccgacaacaccctgctgtatatcctttcgcaccagcatgaagactttggtgagtcggaatggattagttacaccgggtcaggttatctgctccgcctggaggcgtggttatttccggtgttgcggctcaaacgccttggcctgtcgaaagcctgccgccggttagtggtgacgcttatgcgtcgctacgccgctggcattgttcatctggatgcctctggcgaagtgttgccgggctttgccaccttcgactggtag

SEQ ID NO: 39298 - DNA, 195 bp, Escherichia coli
atgccagaattaaccactgaggtagctctcaacattctgatcgactggctgcaggacaacatcgattgtggcagcgagattattttcgacaacgacgaaaacaataccgattcagcagcgctgttgccctggattgaacgtgcgcgtaaggacgttcgcgatcttcagcgtctgcaacagaccagtacagattag

SEQ ID NO: 39299 - DNA, 849 bp, Escherichia coli
atgtcagaactgactcttaccgaccccgaagtattaaccggccacaccgacgtgatttgctccaccagcattgagcgcatcgtcaccggacgtaatgcggcgctggcacagattgaagcgctgatacagcagcttgacgatatttcgacgctgacccgcagcatcggcggtggggatgcaaaggactggggaatgcggccaggtcactgttatgactgctggtttaccgaacccgctgaaaaggcaatgaaagccatcacccgtagcattgaccgcgatgtctggcgtgatttaatgaagcgttctggaatgctgtcgattatggacgctcaggctcgtgctgaatggtacaacagtctggaaaaggatgatattccggcggtcagcgaagagaatatcctgagtacctttaagcaactgcatttgaacaaaggtgaggtatttgaacgtggcgtaattaacgtcttcaaaggcttaagctgggattacaaaagtaatagcccatgtaagtttggaaagaagatcatcgtaaacgggctagtcaaatgtgaccggtggggatttgggctgaactggggatggcagcgtgaccgactggcagaccttgaacgcatgttgtatttgctggatggcaagcctgtccctgacaatcgtgctgacattacccgtcgtctcggcgatcatattcatgagaacaggcacagcaagcgttatgaggatgagatgtttgcgatcaaatactttcagaaggggacggcgcatatcgtattcaagagacctgaactggtttataagcttaacgacatcattgcccggcactatccgaggatgttagcgtgcgttaactga

SEQ ID NO: 39300 - DNA, 873 bp, Escherichia coli
atgaaacgtggcattgtagctaatcctaatgaaatgagttttcatagaaataatagtacggtctatcttggggcaggtttaactgagcaggatattaattatttctgcttttactgggatgatgtggttattctagatagtgaaaatattcactcgattgtgcctaaagaaaaagaattattagataatggggtattacgtagacctattatgaaacatgatggtatgctgaatatccaagactttccatttttatatacggaatttcagttgcagacattggatgaattcaggaagaacgagcctgctacttattggcactttcatcaaacaggggaaaatttaatatatgataaagaacagaaaacggcccttcagttgagattggagttgtttaatgttctgagaattcctgataaagatgctcatatagaagatatattacgttttaaagatgattgtcaggatgatcttaatgcgttacatgagtacttagaaaaactgtatactgaagtcctttattctagagaccctaatctaacgagggctaaaaatttttctttattacaagaggctgtagttaatcttgataaagctatcgaagggaaatggagaaatcctatcagaatgggagtcaaagccaatccagaagtagatggtgggcaggttatggaatttttaaaaccgttgtaccatgctgctattgctggtgattcaggcggtattattcccggtatggttacagccttggcaaccgcaattccaagttttataaaattccaaccagaatgggtgggctttagagataaggggcctaaagaattagcttatcttaccaaagcaacgcataaggggttgattaagagagcttaa

SEQ ID NO: 39301 - DNA, 447 bp, Escherichia coli; identical to SEQ ID NO: 988

SEQ ID NO: 39302 - DNA, 303 bp, Escherichia coli; identical to SEQ ID NO: 12738

SEQ ID NO: 39303 - DNA, 351 bp, Escherichia coli
atgccaccacgaacaccaaaagcctgccgtgttcgcggctgccgctctacaaccacagacccgtcaggctactgcgaaagccacaaaagcgaaggctggaagcagtacaaacctggacaatcccgtcaccagcgcggctacggttcgaagtgggatgttatccgcgcgtgcgtgctgaagcgtgataaaggactgtgtcagttatgtctgcgtgctggtgtggtacgtgaggcgaaaaccgttgaccacatcatccctaaagcgcatggcggcacagatgccgacagcaatctgcagagcctgtgctggccgtgtcataaggcgaagacggcccgtgaacggctgaagtga

SEQ ID NO: 39304 - DNA, 474 bp, Escherichia coli
atgaaaacattgtctcagaacaccacctcttcggcctgtgcaccggagactggcctgcaacaactggttgccaccatagtccctgatgaacagcgcatcagcttctggccgcagcattttggcctcattccacagtgggtgaccctggagccccgtgtcttcggctggatggaccgtctgtgcgaagactactgcggtggtatctggaatctgtacaccctgaacaacggtggcgcatttatggcacccgaaccggatgacgatgatgacgaaacatgggtgctgtttaacgtcatgaacggtaaccgcgctgaaatgagcccggaagcagccggcattgccgcctgtctgatggcgtacagccatcacgcctgtcgtacagagaattatgccatgacggttcattattaccggctgcgggattatgccctgcagcatccggaatgcagcgccattatgcgcatcatcgactga

SEQ ID NO: 39305 - DNA, 351 bp, Escherichia coli
atgccatcacgaatcccaaaagcctgccgtgttcgtggctgccgccataccaccacagacccgtcaggctactgcgaaagccacaaaagcgaaggctggaagcaatacaagccaggacaatcccgtcatcagcgcggctacggttcgaaatgggatgctatccgtgaacgtgtactgaagcgtgacaaaggcctgtgtcagttatgtctgcgtgtcggtgtggtgcgtgaggcgaaaaccgttgaccacatcatccctaaagcacatggcggcactgatgccgacagtaatctgcagagtctgtgctggccgtgccacaaggcgaagacggcccgtgaacggcttaagtga

SEQ ID NO: 39306 - DNA, 330 bp, Escherichia coli
atgaagaccttccgctggaaagtgaaacccggtatggatgtggcttcggtcccttctgtaagaaaggtgcgctttggtgatggctattctcagcgagcgcctgccgggctgaatgccaacctgaaaacgtacagcgtgacgctttctgtcccccgtgaggaggccacggtactggagtcgtttctggaagagcacgggggctggaaatcctttctgtggacgccgccttatgagtggcggcagataaaggtgacctgcgcaaaatggtcgtcgcgggtcagtatgctgcgtgttgagttcagcgcagagtttgaacaggtggtgaactga

SEQ ID NO: 39307 - DNA, 231 bp, Escherichia coli
atgaatatatcatatgtgaatagcaacaaaatgacatctttatctgttgagctagatgcactaaataataaagatatctcttattccaaagatttttcttatgccaaagatttctttttatatatagaaacacagttaaaaattgcaaaagatttttgtagaccaggagaggaagtatcaagatctattgcaaataaagtttttcatgcatttattgatttagttaactaa

SEQ ID NO: 39308 - DNA, 132 bp, Escherichia coli
atggaatacgacgagtccctgcgttctgaactgcgtaaagctggcttcgttactcgtgacgctcgtcaggttgaacgtaagaaagtcggtctgcgtaaagcacgtcgtcgtccgcagttctccaaacgttaa

SEQ ID NO: 39309 - DNA, 429 bp, Escherichia coli
atggcgattagccaggaacagcaaaagcgcggactggagcattgcaaaagaatgcgccttcagatcaacccagcctacagcgatgcggggaactggtgggacaacttaacaccagagtggcgcggtgtcgtgcttcatgctgctgcggttacttcaggggctggggtattcaaagcccacttaagcaaatgctgctggcgggagctttatgaacgtctgggctatcgggacatgattcaactacgccggggtatttcacgggcgcggttaacgtttgaaggtttcggcagtttacgtgacagcgatttttcgaaacgtaccgcgaaccgcccaatcaagaaggttcatccaatttatagcagcagcggggtgcagatggtgattgcgcctcatattgtccagaagctacagcaacaggggaatcactga

SEQ ID NO: 39310 - DNA, 585 bp, Escherichia coli
atgggaagatttcgaattgatccggagacagacagcgctcccgttcttgatagaatcattgaagcttacggctttactcaaaagctacagcttgccgaacaccttgatattgcagctagttcgctttcgtctcgatacaaacgaggcggactacctgcggacataatggtcaagtgcatggctgaaacgggcgtaaatcttgaatggttggcgacaggacagggacgtaaatttgatgatgatgaattagacatactcaaaatcccgcgcagcaagattgttgatggccaactctatgatgctggcatgttaatgcttgataaagtcacattcctgccaggcaagccattacctcaacagccaatttgcgttctggatggctttgtccagtacattattgaccagtcctattctgaagtttatgacgatgaatggttggttgaaattgaagggaaaacaagcgtccgaactcttacaagaattcctgtaagaaaggtcagagttagcggtgttggtatggcttttgactgtagcattgacgaaattaaagtgcttggccgcgtattgttgagaataactcaatag

SEQ ID NO: 39311 - DNA, 198 bp, Escherichia coli; identical to SEQ ID NO: 31050

SEQ ID NO: 39312 - DNA, 405 bp, Escherichia coli
atggagcaggcagatatttttcaagagatattcgaacacgttagaagtaatttatacttcccatggttttactccgaattaaaacgccataatattgcgcattatatttattatctggctactgataatataagactaattactcatgatgataatattttattagttcgaggcagtagaggacttgtgaaagttagcacatcaaagaaaccagaattaattaaagaagcagccagaaatcttatatcaggtaaatctacatttcatcaatatcgtctcactttagcaaaagcaggtgtttatcgctggattacagatatagataaaaacataaggttttactattcgtttgatcacgatcttttgtacatggaagatgttgaaaataacagaccattaatatag

SEQ ID NO: 39313 - DNA, 963 bp, Escherichia coli
atggctcaagaatttttaaagaaaaagcaggaagataatatcccgccaatcgttaaaattgatataaagtatccatccattgcaataacatcatgtgaaacaatatccgaaaaggatttaatagatataattttcaaaggtgtttttgataaaaaaagcatatgtaaaactattgatgaaagcaatttcttcattagcaagtgcaacataccaagttggcgcttaatatataactatcattcaattgaagatgatattttatatagtgctatagagcgtatggagaatgaattcaacaacagattaattgacaatactggttatatgatgcatatgtttcatttgcgattacttttggcttacatgaatgaaatagataaatcatatgacgaaatagaaaaccaatgtaagcaatatattgacgatctttatcaacaagaaagacttcagcccatgattgatgacgaatattcaattacaagcattcttaacgcttatgaaagttgtcagtactgggtacaaccagagtacgaaaataacagcagaaacataaaaaaacacctccgtgaagtacaaaaaaaagtatttcaagaccaactacccaaattacaacaggatcttctaataacattaggtaacgcacctcgaaagttcagttcacttatttgctatgattaccaaacacctgctgaatatgcttctactgaaatattacatggaattaaagttgatgaatttgtagaggcatggctatcattaccgaaaaaagagataatgattattagacaagcattaataaacagatatagccatggaaaaattgattcttttccaaaagaaaaagactggttgagaaacattgttagacatgttgagttacgagctgaaggtgaaaaaggagttaaacaattccaaattaaaagttatgttgcaggtgatcttaggaacctcatacataaatga

SEQ ID NO: 39314 - DNA, 288 bp, Escherichia coli; identical to SEQ ID NO: 30151

SEQ ID NO: 39315 - DNA, 195 bp, Escherichia coli; identical to SEQ ID NO: 30825

SEQ ID NO: 39316 - DNA, 198 bp, Escherichia coli
atgaagcaaaaaacattatccgcagaaccccgcagatcattttcaaataattttaaacttcaaatggttaaactggctttgcaaccaggagcctctgttgcccgtattgcccgggaacacgatatcaatgataacctcctgttcaaatggctcaggctctggcagaacgaagggcgtgtttcgcggggatctggctga

SEQ ID NO: 39317 - DNA, 1725 bp, Escherichia coli
atgtttttgaaacggctaatagtcagttctttcaggcttggagtgattcgtgatatcgaatttcacattggcgttaatttgattattgaccgaaacacctccagcaaagagcaaactggaaatggtgtgggaaaaactactgtattaagagctttagatttttgttttggagcagaacaactgaatttttataccgatcctgaattcaagaaagaaaattcggttataaaaaattatttgatagagaacgagattgagttttgtttaattctcacaaaagatttgaataataaaactgcaccagtaataaaaattaagcgtaaaattacatctgagactaataaaacgaaggttatagcctcaataaatgaagagtcctatacgaaggctaaagatttcaacgaggctttaaaaagaacattatatcttgattccgcgataaaaccgaccatacgagagattatgggacgtgttattcgaaatacgcatgacaagatgtcgaacgcattaaaaacgataaaaatgggttctaatacacaatatgaaacgttaaatctgtttatgtttgggttcggtaactcacagattctggatgaaaaacagtcagtgactaaagcctataaactggcgaaatccgattatgaagtaattactcgccatcgctcaaagaatgctttggaacaagctattgcaattataaatagagatattatagcacaagaagagttaatttctaattttcaagtggcagactcttataatgatatgcttgctgagttaaatgagttaaaaattaaaattagtgaagtttctatcacactatcatctttggagtttaagcaaaaattaaacgataaggctatactagatctggaaaaaagtcatgaaaatataaatacactagatctacagaagttgtacttagaagcaactgatcggttaggtaacttaaacaaagagtttactgagctactttcgtttcataataaaatgcttgtaaaaaaagctgagtttattagaaaacaaatgcagccagtgctgcaagaaatttccaaatataaagatgaactaaataacttattgactcaagaatcagagcttttaaagagtttgtcttcgcatgggacattggcagacctgcaaataatgcaaaaaaaattaaattcattatttgaagaaaaaggtgggcttgaagctggactacttcaaatccaagagatggagaacaactttaatatactgaaagcaaagtttaatgatgtgtcagatagattaaaatctaaacttgacgattttaacaaacgtcttgcgctattcaattcctatttttctttatatactaaaaaattatatcaggatgaatatattctttcctataaagattcctccggttctttcgtttttaccattgaacctttaggaactttgctcacatcaggtaatcagggagaaggaaaaaagaaagcccaggttgcctctttagattttgcctatttatctgtccaggagtctttagaagccagaacaccacgttttatagctcatgatggaattgaggcaattcatgtaaatcaaataaataagttattcgagatagcttcggggattaatggtcaatatatattggctattcttaaagacaagttggagaatattgatcaagacttcatcaataatagtgttgtgcttgagcttggggaggacgataagttttttaggctttaa

SEQ ID NO: 39318 - DNA, 237 bp, Escherichia coli
atgattatctctgatgtaacaaaaccaagccaaaccttgtattacctgggagctcggttattagaatgcatgagttcaaatgcttattcgtatgttgatattatagacttgtataatgaattcaaatctaaaaataacaactcttcattcacgcaatatatttacactttaaattggctatatttattaggcctggttgatgctaacgaaaatggagatttgatattatgtttttga

SEQ ID NO: 39319 - DNA, 597 bp, Escherichia coli
atggttggtgttactcaaaggtcagggaattactcacgtaatgtgcaggtggttgtcgattctaactctgttgatattataaagtctccatcgatttttatggatcttgttggtattttagttgattcgaatgttattgatcctcgtacaaacaatgactacgagccatatgatattgagaataaaatagacttcaatgatgttataaaacatagagaacgtattgaagggttctatctatattcttcgatgatagataaagcgtatgaaacattaaatgaaagtatgcctactgctaaggaaacggcactgaaaagcatcaattcacgatatcttgattgtcaaggagatttattgcttaaacatagagaagcgtataagagctgcaaggatgctcaggaacggaataatttaaagattcaattggtaagagagtttgcagattggataatagacagtgtaatagagcacatcattaagaaatgcttaaattctcttatggcaatgaattacacaagcgaagaaatcgaatgccatgcttcttttatcgtttatcatgcattcgtagagtgtaagattctggaaaaaccaatatga

SEQ ID NO: 39320 - DNA, 240 bp, Escherichia coli
atgatccgaattatgattagaatattttctttgacattcgttgcttgcgctggctttgctgcatatcacttcaatagtgtgccattgatgttcacttctggtagctttcttgtaacatttttaggtacatttattgttaataaaaaaagttcagggcatacaataattcaaaaaagcggtagccattcaaaaaataatcagacggtcgtttttggaaataatgaaaacaagcgaggctga

SEQ ID NO: 39321 - DNA, 435 bp, Escherichia coli
gtgttcgacggtgagctgagttttgccctgaaactggcgcgcgagatggggcgacccgactggcgtgccatgcttgccgggatgtcatccacggagtatgccgactggcaccgcttttacagtacccattattttcatgatgttctgctggatatgcacttttccgggctgacgtacaccgtgctcagcctgtttttcagcgatccggatatgcatccgctggatttcagtctgctgaaccggcgcgaggctgacgaagagcctgaagatgatgtgctgatgcagaaagcggcagggcttgctggaggtgtccgctttggcccggacgggaatgaagttatccccgcttccccggatgtggcggacatgacggaggatgacgtaatgctgatgacagtatcagaagggatcgcaggaggagtccggtatggctga

SEQ ID NO: 39322 - DNA, 423 bp, Escherichia coli
gtgttcgacggtgagctgagttttgccctgaaactggcgcgcgagatggggcgacccgactggcgcgccatgcttgccgggatgtcatccacggagtatgccgactggcaccgcttttacagtacccattattttcatgatgttctgctggatatgcacttttccgggctgacgtacaccgtgctcagcctgtttttcagcgatccggatatgcatccgctggatttcagtctgctgaaccggcgcgaggctgacgaagagcctgaagatgatgtgctgatgcagaaagcggcagggcttgccggaggtgtccgctttggcccggacgggaatgaagttatccccgcttccccggatgtggcggacatgacggaggatgacgtaatgctgatgtgtagtggcacagtaaatttggccacctga

SEQ ID NO: 39323 - DNA, 207 bp, Escherichia coli
atgacgcgacaggaagaacttgccgctgcccgtgtggcactgcatgacctgatgacaggaaaacgggtggcaacggtacagaaagacggacggcgagtggagtttacgaccacttccgtgtctgacctgaaaaaatacattgctgagctggaagtgcagaccggcatgacacagcgacgcaggggacctgcaggattttatgtatga

SEQ ID NO: 39324 - DNA, 783 bp, Escherichia coli
atgaaaatactcgttgctggcgcaacaggaagtattggtattcatgttgtgaatactgctattgcaatgggccatcagcccgtggctctggtcaggaatcggcggaaaatcaagttactccctcgtggaacagatattttctatggcgatgtttcaatacctgaaacacttaccgatttaccgaaagatattgatgccatcatttttacactcggctccgatggtcagggacgtattggcgccagagcaatagattacggcggtgtacgtaacattttgcgaatattcatggatacacctgttcgcatcgccctgatgacaacgattggcgtaactgagcggctcagtagctggaatcaacgtactgaagttcatgactggaagagacgctctgaacgcctagtcagagcctgtgggcatatctacactatcgtcagacccggctggtttgattacaacaatgatgatgagcacagaatcgtcatgcttcagggggacagacgccatgcggggacgccggaagatagtgttatctcccgggagcaaatcgcccaggttcttgtaacagctctgagcaacgatgcggcaaaaaataaaacgttcgaattggtcgcagagcgaggagaagcacagcaggatctcactcttctgtttgcagagctgcggaatgataatccacaaaaaaatgatggggttttcgatatagacaatatgccccttactgaagaacctgagtgcgttattaacgacctgaatctgtattcgaaaaattcaaaaatctga

SEQ ID NO: 39325 - DNA, 477 bp, Escherichia coli
atggcgatgggggttgctggcgtaatggtattattgcctaaagtggtcggtgtgctgatggaaggtcttaacccgattgggaaaagtgccaaagaaatcatgcaaaaacagatgggtaaagatgctgaattaaacatcggtatggattgtgcactggcattgggggatccggcgacggtcaccgtgacagtcattaccattcctttaaccatgctatgtgctctggtattacctgatattaagatcttcccaattggcgtattgatgtcaattatttatatgaccaccatgaccgtaatggtcagcaatggtaacgtggttcggtcgattatctcgaccttgttattctgcgttgtagtgatgtatttaggcggttatgtcgcaccaggggcaacgcaatttttagctggagccggtgtaggcttgcaaggacaaggtacagattttgtatttaatggatggcacttacgtcagtaa

SEQ ID NO: 39326 - DNA, 153 bp, Escherichia coli; identical to SEQ ID NO: 6412

SEQ ID NO: 39327 - DNA, 849 bp, Escherichia coli
atgaataatgatgagctggtcaccagacgtgcgcaggcgattgccgaagacaggtgtttctcgaaaggacgtctgcgcgatgaattcagaatgaagccagcccccggtgctgagccggttaagtggtataaaaatacttatggtggcaggttcgctgtataccgaattgcagactgtgttccgatgcgtgagaaacgccctctgacgagtaaacaacagctggctggccagcggctttccgttttatcccgactaaacagcaccagtggccggatggcacggcaggcatatgactggctgagtctggcaccattctttctggatactgaaacgacaggactggataataccgcggaagccctggaaatcggcctgaccgatgcggccggtcaggtggtatttgaaaccaggctgaagcccacggtcgccatcggggcgcaggccgccgccgtgcatggtatcagtgagcaggctctttgcggcgcaccatcatggacagatgtggcgcggcaactgcggcatgcaatcggagatcgaccagtaattatctttaatgcccggttcgacatccgcattctgaaacagactgcggccgcacatagcgatccggctgactggctggaagaaatgacggtatattgtgcgatggagctggctgcaggatattatggggccaccaaccgctatggcacgatttcactggccagtgctgccagccaggccggactgacctgggaagggctggcacactcagcgatcgccgacgcacggatggcggcaggggtggtaaacgctattgctgcatatcatctggaactgctgcaggaacaggcacggctgaaaatctga

SEQ ID NO: 39328 - DNA, 378 bp, Escherichia coli
atgcaaaaatacaaaatcaatcgttcaagacatgctgccttccttttgcatgttcatcttgtctttgtaacaaaataccgtcgaaagatactgggagagttacactgtgcagcattccatcagtatgcagcagaagtctgccgtgattttggggcagaacttaaagaaagtaacggagatgtcgatcatgtccacatgctgatcgaatacccaccaacagtgcagctttcggtactggttaactcactgaaagcagtgacatcccgccgtctgcgaaacgaatttcttgatttgcggggggggcatacggaaaagccgtgctctggtcgaggtcatactttgctggctcctgcggaggtgcgtcgctggaagttgtga

SEQ ID NO: 39329 - DNA, 756 bp, Escherichia coli; identical to SEQ ID NO: 22899

SEQ ID NO: 39330 - DNA, 1215 bp, Escherichia coli
atggctaaaaacaaaggtatttgtcggaataaaaaatgcagtaatcctgtttcagaatttgatgaggcaaatgccttaaggttatgcgatgatcattataagctatggaagcgaaataaagagaatcgtcgggtcaggaatatttgtcgtataatcagtaaatatgacaaaagtctggaccgggagatattttatggagtaagagatgctgcaaaaaataaaacgggaaagagaattattgaggacgcaaaaatattacatcaatgccgtgcctcaaagcaagtaagaaaaagttttcacaagggtgtgcttcggtcacgggaatggcttaatacacaggagttactgagcagaaaacatatatctgttacaggtgaactatttaaattttacataaaagatattatcagattatattgctataagtttctctacagcagagaatatcttaatgaaaacgcatacaaaaaacgatatcagagtgatattcaccccagaaaagttaatgttccgatactgcaacttgaagttgcatggataaataataattgccgttcaagtgattcaagcactgatattattatccttccgaggatgataagaagaatggttgtatttaattatacgaagataaataaacaattagagaaattgttaggggggatagcacgaaaacaaacctcagaaaggaataaaggcggtctctataccagaataaaaaaagaaagtgactttctttctatggatagatttatggtggaaatagaaaatatcataaggcctgaaaggtttccgacatcaatttatccagtcttttcacattcatttattgaacgagagcttccgctactgaatcttgctcgatcacagtataaaagagcaataagtaaaaaagtggcgaattcaattttttatactttgcaaaaaactaacgtagcattatggctacatcttgaaatgtttgctctggtggcattcattaaactgtatacaggaaaaggttttgaattcataaaaaacatgtgtgcatttatcgattataataatgggataataaaatccacacatgaagaactactgggtgaaattaagcataacattcaggttaatttgaaggtgaaccctgataattttcctgagctaataaatatatacaattcatgttttagtaaaaatatatttttatatgatattaatgatggtaattttaaatag

SEQ ID NO: 39331 - DNA, 1554 bp, Escherichia coli
atgatagttaaatttcatgccaggggaaaaggtggtggcagtggtccggttgattacctgctggggagggagcgtaaccgcgaaggcgcaacggtgcttcagggtaatccggaagaagtccgggaactcatcgatgccacgccatttgcgaagaaatacacgtccggtgttctgtcgttcgcggagaaggagctgccgccgggaggacgtgaaaaagtgatggcgagctttgagcgtgtactgatgcccggtctcgaaaaaaatcagtacagcatcctgtgggtggagcaccaggacaagggacggcttgagctgaattttgtcattccgaacatggagctacagaccggaaaacgcctccagccgtactacgaccgcgcagacaggcctagaattgatgcctggcagacgctggtgaatcaccattacgggctgcatgacccgaacgccccggagaaccgcaggacgttgacactccctgataacctgcctgaaacgaaacaggcgcttgctgagggcgtcacgcgaggtatagatgcactttaccatgccggagagataaaaggccgtcaggatgtgattcaggcgctcactgaggcggggctggaagtggtcagggtgacgcgaagcagtatcagcattgcagatccgaacggcgggaagaatatcaggctgaaaggagcattttatgagcaatcttttgcagacgggcgcggagttcgagaaaaagctgaaagagagagccgaatctacagagaaaatgctgaacaacgagttcaggaggctcggcgaatctgtaagcgaggctgtgacatcaaacgagacgaaaatcagagacgctatagccctgttcacagcctcgacagaggaatcgctggaaaaacaccgggaaggggtgaaagaggcgatgatgcagcacaggagggacgtgttaaagctggcagggaatacgggcatgatgttactggggatagtctttctcctgtttaccgcgagtggcgggacgctctggtatcttggagggaggatacaggcgaacctggaagaaatcaggaagcaggaagagacattgcagaaactgaacgcgaagacatggggcgtggagtttgtgcaggacgggaacaggaaattccttgtccttccgtacgggaaatcagcggaggtgattccctttcaggggaaagagtgggtacatctgaaggagtgacacagagtgacagagctggaaacacatttgctgaacgccttagagcagctgcaacaggactatatgcagcggctgagcgaatgggagagcgccttcgtggaattgcagaagatgttttcgcttacgcaacgggacaacgcgatgctgaacgagcgggtcatgcagttgagtcagcaggtgcagcacttgagcgagcagacagaacgcttgagccagttatacagcgagaactggagataagagaggaacggctgatacaggagcgcgaacatgtgttatccctggaacgggagcgtcagccggaaatacaggaacgcacgctggatggcccttcgctgggatggtga

SEQ ID NO: 39332 - DNA, 315 bp, Escherichia coli
atgatagggaataataacgatgattacgacgaatatttatttgatgacactgtagaagtttctttgagttgtgaagatgatgaagattttttaaaagatcaggagcaagaaaaaaaatctgttttacagaaaatgattgagtataaagatgaaagtacgcttttaggtagtttgtacgaaatatccggcgtgtttggttttactgttgttttattgttagggtttattctaacccttccatttttattagtgattagtgttgttgcgttttttattacaatgaaagaaaagaggggttcaaaaaatggcgtttaa

SEQ ID NO: 39333 - DNA, 381 bp, Escherichia coli
atgaaatattacaagcacgattcatatataagaagaaaatacacaagagagcaaatagatagattttttgaaataagtgaaaatgattttactacatataactttgaaaagttctttgatgatgttgttattgatatattaaataaacgcgaagagaataaagatagatcttttgcggggtatgtatattttatgttagataagtttaatataaaaaataaacgcattcaaagttatgaagtgtattttatgactaaaaaacagattgagaaaaacttgaaagactttgaatatgaagtttctaaaagctatgtgagaaagtggatttaccgctggatttattactatgccgtttttgtgaagagtgaaaaaaggaaataa

SEQ ID NO: 39334 - DNA, 513 bp, Escherichia coli; identical to SEQ ID NO: 27046

SEQ ID NO: 39335 - DNA, 300 bp, Escherichia coli
atgacaaaatcagtatcaaccagcaaaatgctccgtaaacaatacacttccgaattccgcgatgaagcactgaaactcgctgaacgcatcggtgttgccgccgcagcacgtgaactcagtctctatgagtcacagctttatacctggcgcagcaagcttaaaaatgccctttcttcttccgtacgtgagcaggaaatggctactgaaatcacccgccttaagcgacaactggctgaacgggatgaagaactggctattctccaaaaggccgcgacatacttcgcgaagcgcctgaaatga

SEQ ID NO: 39336 - DNA, 1059 bp, Escherichia coli
atgaaaatattagttactggtggtgcaggctttattggttctgcggttgttcgtcatattattaataataccaatgacgctattattaatgtcgacaaactaacttatgcaggaaatttagagtcgcttaactctgtttgtgaaaataatcgctatacatttattcaagcagatatttgtgatgcaaaattaattacggatatatttaagcaacatcaacccgatgcgataatgcacttagcagctgaatcacatgttgaccgttctattgatggcccaagtgagtttatccaaaccaatatcattggtacttacacattattagaagccgcgcgccaatattggaatcaactcccaacagataaaaaagccgccttccgctttcatcatatatccactgatgaagtctatggcgaccttgaatcaacaacagatcttttcactgaaataacaccatatgcgccaagtagcccttactctgcgtcaaaagcgtctagtgatcatttagtcagagcctggcaacgtacctatggtttaccaaccatcgtaacaaactgctctaataactatggtccattccactaccctgaaaaactgatccctttaatcatcttaaatgcattagaaggaaaagctctgcctgtttacggtaacggacaacagatcagagattggttatatgtagaagaccatgcacgagcactctataaagtcgttactgaaggtaagattggtgaaacctacaatattggcggtcacaatgaaaaagccaacattgatgtggtaaaaacaatttgtagcatccttgaagaactcgtaccaaacaaaccgaataatattgagaattatagtgacctgattacttatgtgactgataggccaggccacgacttacgttatgccattgatgctacaaaaattaaaaatgaactgaactgggtaccggatgagacatttgaaacgggtctacgtaaaacggttgaatggtatttaaagaactcagaatggtgtgaatcagttcaaaataataaatataatagagaaagactaggggcttaa

SEQ ID NO: 39337 - DNA, 867 bp, Escherichia coli
gtgaaaggtattattttagcgggtggttctggtacaaggttatatccaataaccatgggagtatctaaacagttacttcctatttacgataaacctatgatttattatccgctgtcagtacttatgttagcggggatccacgaaatacttattattacaacacctgaagatcaaagcagcttcgaacgtttattaggtgacggttctcagtttggtatttcattacaatatgcaatacaaccaaaaccggaaggtttagcacaagcttttattatcggcgaagagtttattggttcggatagtgtatgtttggtgctgggggataatattttctggggtcagggtttctcgccaaaactactaaaagcagcgagcacacaaacaggcgctaccgttttcggttatgaagtacaagaccctgaaagatttggtgttgtagaatttgatgcagactataacgctgtatctatagaagaaaagcctctaaaaccaaaatcaaaatatgcagtcactggcttatatttctatgataacgatgttattgagatagcaaaaaatatccagccatcagatcgtggcgaacttgaaatcaccacagtaaaccaaatttacctaaaaaataagaacctcaaagttgaactgttaggtcgaggttttgcttggttagatacaggaactcacgatagcttgcttgaagcctctagctttgttgaaaccatagaaaaacgccaaggttttaaaattgcttgtttagaagaaatagcttatcgccagcaatggttaacagcagaacaagtgttagaaacagcaaacaaatgtagaaaaaatagttacggcgagtatttgattaatcttatagggaaataa

SEQ ID NO: 39338 - DNA, 408 bp, Escherichia coli
atgaaactagtgaatacaattgaatttaagaaacttggtgatgatagaggttcgctggtttcattagaacaaaataaaaatattccatttgaaattaaacgtatttattacatctttggcactaaagatggggtttcacgtgggtttcatgcacataaagagttaagacagctcgctatatgtgtccgtggaagctgccgttttgttatggatgatggcaaaaataaagaagaaattattttaaattgtccgcatacaggtttattgattgagcctatgcaatggcacgaaatgtatgatttttcagaggactgtattgtcgtagttctagcaaacgaccactataatgaaagtgattatatccgtaattatagtgattttcttacttataataattctctagcttaa

SEQ ID NO: 39339 - DNA, 360 bp, Escherichia coli
ttgtttattcgcggcgataacgccctgtgcggtcaaaccacgtgtgagcttcagcgtcaggttaccgagtgcaaccagctggcccgcgccgctgagcgagaccatatcagcaagcatatcaccgccgctgaataccttcccgccggcgttgttcaggctgttcccttttattgtcaggccctgattacccagcagcgtgccgctgttggtgatggtctgcgtgttgacgttcagttgtgcggcctggaacaggccacggttggtcagactgttacctgtgagcgttgcctgattcgccgccatcacagtgccattaccggcaagcttcgccacgttcagcagcaggtcagtggcctgtag

SEQ ID NO: 39340 - DNA, 384 bp, Escherichia coli
atgaaacgcctttctattgttgcactaatgcttacagcattaactggctgtactgttaccccgggcgtctatatgtctacctcgggcaaaaatgtcgtcgacactggcgatcgtgatatttctaaatttgtcgatatctacccgatctcaccaaaactgttagatgagatgtacgtggctccagtgatcgccaaaccaaaccctacccttgaaaagcaactttcaacctatgaataccgtgtgggagtgggtgacgtattaaccatcactgtgtgggatcaccctgaattaactattccagcgggttcttatcgtagcgctgccgactcaggtaactgggttcattccaatggcaccatttactaccttatatcggtaacgtga

SEQ ID NO: 39341 - DNA, 765 bp, Escherichia coli
gtgaaagttgtcggcaaaacactgtctgaaatccgtaatttagtcagcagtaaactggctacctatattgaatccccacaagtggatgtcagtattgcggcattccgctcacaaaaaatgtatgtttctggtgaagtcgctaaaccaggtacattgccaattaccaatatccctctgaccgttctggaagcctttaataacgcgggtggcctcaccgaaaaagccgattgggataacgtcgtgttgacccgtaatggcaaagaaattaaactctcattgcaatcattggtacagtatggcgatatgacccaaaactatctaatgatcccaggtgatacactttatgtaccacgcaacgacgggcaaaaagtattcgtgatgggtgaagttggtcagccaaataccctaactattgaccgtgcaggtatgagtatcactgaagcactgagtaaagcaggggggaccgatcaaacaaccgctaatgcaaccggtgtgtttgttatccgtccaattaaaaaccaaacctctggtgataaagaacttgatgcgttgctaccgaaaaaaatggcagcagtgtatcagttagacttatctgatgcgaccgcaatggtgatgggaactgagtttaagctacaaccatacgatctggtttatgttaccgccgctccggttgtgcgttggaaccgtctgatcactcagttattaccaactatcgcgacctataatcagttaactgaaggtacaaaacgtattcacgactggtaa

SEQ ID NO: 39342 - DNA, 429 bp, Escherichia coli
atgtttaacaatatcctagttgtttgtatgggtaatatctgtcgctcccccactggggagcgtttattacaggcccatttccccaataaaaaagtacactctgctggcattattgccaaagatgatcgccccgcctatgagagcgctattcgtatcgctcagcagcacaatctctgtttaaacaatcatcaatcacgacgtttaaccagtgaattatgtaaagaagcagacttaatcctagtgatggaaaacgatcatattgataggatccatcaacagtttcccgaaactcgtggcaaagtcatgttattcggccagtggcttaataaaaccgagatcccagatccgcataaacgcagtgatgaaatgtttgaacatgtttatcagctgatggaaaaagccgttatacagtggcaagggaaaatttaa

SEQ ID NO: 39343 - DNA, 831 bp, Escherichia coli
atgaacccggagttttttaattttaaattgttagggccattaatcctattgttatttaaagtaacaaataagaacattatattactttgttgtggcgatgatgtagagtttataaaaagaggtaaaagtggtgaagtaccaaactggccatacatagatataccattacctaaaaaaaagtactatagccggaaagttgatctttttattaactatattgttgcgtcctccgctaataaaataattcctgtcatgtatgattatagtaaagcatggagattatcacgattttcacataaagtaacagaaaccataccattagcatgtgatggtaatctacaaaccattcctttaaaaaactttagcaatgaaaaaatagtcattatgcacggcattaatcgtgaaggattcaaaggaactaaaataataaaaaaggcattatctgaaatagagaaaaaatatggtgatagggttcaaattatattaccagaaaaattaccttttgctgaatatcttaaagtcatggagtctgctgatatcgctattgaccaaaccaaaggcaactcatatggaatgaatgcaatatatagtatgtttgcagggcatattgttttagctcctgctaatgatatgtttaaacgcgacttatcagttaaaaactgccctattatcacaataaataatagtgaggattctatttatcaacaattatcgttattgattaataactatggtttaattaataaactaaagaatgaaactcaatcatatgcgcttaccacacacgcgcctaaattaattgcagaaaaaatatcaaagtacttaaactga

SEQ ID NO: 39344 - DNA, 399 bp, Escherichia coli
atggcaggtaacaagtggcaaatcagtgatgaactctgggagaaaatggctcctctcatcccggagcatagaactcaacacccgctgggtacgcaccgcaagcgggttgataatcgcgctgcaatgaacgccattttcttcgtactcaggacgggttgccagtggaatgcgctaaatgccaccggtatatgctcgtcaagctctgctcatcgccgatttcaggagtggcgggatgctggagtatttgaacgcttctggcaaaacgggttgcttgtttgcgaacagttggacgctattgactggtcgtggctgtcgatggatggttgtatgaccaaatcaccgctggcaggctcaaaaaaacaggcaagaacccaacagaccgagggaaacggggcgtaa

SEQ ID NO: 39345 - DNA, 1026 bp, Escherichia coli
atgggcaatgagttaaaaaattttgaaaagaatttttcaatttattgtaatgtgaaacacactataggtgttgccaatggtttagatgccttaactttagtactacgtgcatggaaagaacttgggaaaataaaggctggtgatgaagtcattgtgcaagctaatacttatatagcttcgatactggcaattactgaaaatgatttagtgccagtatttgtagagcctgatgcaaatacctacaatttatctatcgaaggtattaaatcggcaattactgataaaacaaaagtcattttaccagtacacctttatggtcaaatctctcctatgcctgaaattatggcaattgcacaacaacacggtctattagttttagaagattgtgcgcaatcacatggggctagtattgaaggtaaaaaagcaggtaactggggagatgcagccggttttagtttttatcctggaaaaaatctcggagcattaggtgatgcaggtgctatcacaactaatgatgatgaattagcgaaaacactgcaagcactgcgtaactatggctcacatcagaaatacttgaatttatatcaaggtgttaatagccgactggatgaaattcaagcagcaatgctaaatgtaaaattaaaatatcttgataatgaaactctaattcgtcaaaaagtagcattaacttatttagaaaatattaataacccactaattaagcttcctttgactgctcatgagtatagaaataatcaacaaagccatgtatggcatctatttgtgattgcaacaaagcatagagatttactacaaaaacatttgactgaaaatggtattcaaacattgatccattaccctattcctcctcataaacaacaggcatacagccaatataaacaactttcattgccaattactgaaaaaatccacaacgaagttctaagtatcccaatcggaccaacaatgactaatgaagaaatatctaaagtcattgaagcatgtaattcatttgtgaaaaaataa

SEQ ID NO: 39346 - DNA, 243 bp, Escherichia coli
gtgctgccagcgcagcatctgcccaaccgcagcgacacgccggtgatcaaaatcagcgccaaatggctgagagaagcgggatttgagatcggcacgggcgttaccgtgaagatctcggaaggctgcctgatcctgcttgcagataacaacggagtacaggaactgcgcagggaactttatcaggttaaacagtctgttaaggggatgcggaacgggatgtttagtatgctgaacgataattaa

SEQ ID NO: 39347 - DNA, 483 bp, Escherichia coli
atgactttcttgccagatggacatgttgccgttgctccaggccaacgccacgcagtagctgaagcggtaacaatttggctatcacctgcgccaatttttttccacgtaccggattggcacggaggccagtgccaatccggtgtgtggagaacttccggttcctctaacggtagttacagtaatcttggatcacaccgaggatcatttactggtcgcaatacgggaagtggtacgctgtttgtttacgcctctggagggaatggtggttccgccgggggagattgtgctaacacatccagattgcagggatacgttgcaggggcattgattagcacaaatgcgagtaataacccatcttatgggaagacagcattcatctcttttgctgtccctgctggcgcaacttatcagatcacctcttatccggcccaaaactactcttgtggctcaggggtattttcagtatttggataccaaacttaa

SEQ ID NO: 39348 - DNA, 315 bp, Escherichia coli; identical to SEQ ID NO: 33595

SEQ ID NO: 39349 - DNA, 315 bp, Escherichia coli
atgtggccttttgctgttatacagcaccagatattcagccattctttgattaaacaaattcaggtcgtcaaaaagcaacaattcattgaattcaataaattgttctctaagtgtccggttaaatcgctcacaggtcgcattcattttcggtgtgtacggataggtccagatgtgtttaatcgaggcttcctgcaacgttttatcaaagtttccaaggaattccttaccgttgtcagtaacaacctgtttgatagcaacaggaaagagctttgtggccttgctgaagaaatggctggtgatatcgctgttgagtga

SEQ ID NO: 39350 - DNA, 315 bp, Escherichia coli; identical to SEQ ID NO: 33595

SEQ ID NO: 39351 - DNA, 315 bp, Escherichia coli; identical to SEQ ID NO: 33595

SEQ ID NO: 39352 - DNA, 603 bp, Escherichia coli
atggcgcgcatctgcctttacggggatttacaacgatttggtcgccgcatcgaccttcgtgtgaaaacgggggctgaagccatccgggcgctggccacacagctcccggcgtttcgtcagaaactgagcgacggctggtatcaggtacggattgccgggcgtgatacaggtgaaacggaattatcagcccgtcttaatgaaccgctggcaaatggtgctgtgatccatatcgtgccgcgtctggcaggagccaaaagtggcggtgtgtttcaggctgtgctgggggcggctgttatggcggttgctatatggatgccgggggtaggaattatggcgagtaatctgctgttttctctcggtgccagtatgacgcttggcggtgttgcacagatgctggcccctaaacccaaaacccccagcacacagacaacggataacggcaaacagaacacctatttttcttcactggataatatggttgcccagggcaatgttctgcccgttctgtacggtgaaatgcgcgtgggatcacgtgtggtatctcaggagatcagcacagcagatgaaggtgatggtggtcaggttgtggtgattggtcgctga

SEQ ID NO: 39353 - DNA, 369 bp, Escherichia coli
atgtggtcatttatcggtaacaaaaaacgtcagcgttggttgtggtatgcatgggagcctcgcttaaagcggattatcgctcatgtatttggttcccgaagcaagaaaacactggggaaattgttaaaactgctgtctgggttccgtatcgctttttggtgtacggatggttacagggcgtacaaagagacacttcctagcgaaaaacatattttaggaaagctatacacacagcgaattgagcgtgaaaatctgacgttgcgtaaccgattgaaacgacttaatcgcaagacgttagggtattcaaaatcatccggcatgcatgacaagatcattgggactttcattgagcgagagtattacgtttga

SEQ ID NO: 39354 - DNA, 276 bp, Escherichia coli
atggctaccatttcagtaaaatgccgattttgtggattaaccgaccctgttaaaaaacatggcaccggcaatggaggtcatccccgttatcgctgtcaggcctgttgccgcacttttcaagtcgattatacctacaacgcttgtcagcccggcatcaaagagcaagtggttgagcttgccatgaataatgcgggtattcgtgacaccgctagggcattacatatcagtatcaatgccgtcgtccgcactttaaaaaactctcgccacggaatgtaa

SEQ ID NO: 39355 - DNA, 315 bp, Escherichia coli; identical to SEQ ID NO: 33595

SEQ ID NO: 39356 - DNA, 159 bp, Escherichia coli
atggttacagcatgcttcttactttatagcgataagtatgccattgggtgtatccataagaactttgaattttggatacttttctggattaaaattagcatagcttcgtttagatataacaataaacgaactattaaaagatttcatcttctctattaa

SEQ ID NO: 39357 - DNA, 279 bp, Escherichia coli
atgaataaaaaaacagtgaagtgtccattttgctttaaagaaagcaaacttggtgtccgtgtttgcaccggctgtcattccaagattagttatggtgaagtttcagcatggtctgctctactgataggatttattttattagttattgcttacatcatactttatataagtcataattttttattagctttcgttatttatgtcgcatcagcaattttaataaaattatatattcgtaagaaatttgcacacagagccgttttcacacaccaacattaa

SEQ ID NO: 39358 - DNA, 615 bp, Escherichia coli
atgagtgttgtagcgactttgagagagctatcagaagtttggaagctttttggcgatatgcctgatgatactgtattaaatgttgaactcaccgctctctatcttggtatcagtgttaaaacattagctcgttaccgacaaaatggtggtggacctgaatacattcaatatcaagccgaagatagtaaagcccgtaatcagagagtaaattacttattaggggatcttcgagtatggcgaaatagccataaagttaaaaacagtatggaagcggcgcaagttcgtggacttgcatttaactcattgagcgacttcacgattcctcaacctttctggcatattgataaagacatcaattcaaacaatagaaataaaatattgtcacatgttcttataactcctgaggataaatttaaaatttacttggcagaaaagcatgtgaatattatttggatgtcaattgaagaagctttgcttttagagtggacggatttaaatgaaaggcaagtattcaatgatttgtttgttagctttttaagtaacttaatccagatttccacctctgcacaagaaaatctgattttgaatgatgtgtttaatactaaacgattttaa

SEQ ID NO: 39359 - DNA, 579 bp, Escherichia coli
atgaaaaagacaattatgtctctggcagtggtttctgctctgtttagtggcgcggctatggcaacaagtgccgctaatgattccagctacgcaaccttaaactttactgggcgggttacctccaacctttgtcaggtgagcacaaatgatgtaacccaaagcattgatcttggggaagtgactaaacaacagatcacagatagagctacaaaaaaacaatccttttctgtaactttaaataactgtgatacaacgacatctcaaatttcatatgttttggccgatggaaataataatcaaagcactgctaattaccttcaaccaaaatccaatgatactagtgcacagggtgttggtgtttatgtaacgaaaagtgatggaactgcgataactgtcggcactaaatatgacattgatgttcagaaggctaatgatggcacttccgcactaccgcagcaagtcattgctttgactggatatatcgattctgtcaccccaggtgatgctagtaatgtcgttggtggtactgttgaagctattgggacgctaaccattaaggcagctactgccgctatttaa

SEQ ID NO: 39360 - DNA, 705 bp, Escherichia coli
gtgcgtaaactctattctgtttttattctcactggagtcttgttctgctcatgtgtaggggctgcgtcctttggccctcgtgaaagcatgctaatttttgatggacggaaaaatagcagctcttatcgtctggataacacagatactcatcttccttggcttgttcaggcatgggttgaagatgttaacgaaaaacgcactgatgtttttacatctgtgccgctggtctttcgtgtggagccctcatccacatttactgtgcgtatcgtaaaaaaaagtgctgttcctgaagaccgggaaaccctgtactgggcggtctcaaactccctgccgggcggtgagcgcagtgaacaaaaagctgaagatgacaaaatcagtgcgcagctcagtcttgcataccgctttaaggtgccgatgatttatcgaccagctgcacttgctggtaagcctcagcaaccggagtccctgcagtggcatgctgataaaggggggaaaatgacagttcataatcccacacgttatgttgttcaacttaattatgtgaacgcgggcggtaaacgttatcagggtaaaggcgtttcatggtttatctcgccggagaagagtgtgacggtggatgttagtgccggcaccggcagtcgcataaaatatggcgtcgtgaatgattacggggcggtgcgcgaatatgagggaatcgtccgttaa

SEQ ID NO: 39361 - DNA, 1176 bp, Escherichia coli
atgacaaaaatgaaaaatgtttttatattactattttgcctgtcgtgggcgaaaacaacgatagcttcttacacccctggaaatcaggttattaacgttaataagagttttggtgttgcagactcaggagctgtttcaggtgattggtttaaggtaagccagctgaatatgaatacgtcagggaatatttcatcatttaactcgaatccttgttatccattaaactttttatgtacaggaggacttgtttcattagattataatggcaaggcaaattattctcttgagataacaagacatgtagccactataaccgatgacgcaggtaacaattatatgttcactcttgcgtttccaaacaaccctccagttgttgggatatatgagaacaaccaggctgttgtggggagaatatggaatacccgtgctgctattgataacagttttaattctccgcctgtttcgcaacaagatacagccaatgcatctgcacctgctcaaggatattgtggcaatatttcggtgggctgcaattatgcaattgcagcttatatgcatgctgatagtggaatgccttatctttatgcaaagctcccgaaaaatatttctgcaaagagtatatcttttaatgatgttaatttgttggagtttaaaataattgtgcgtaatcaaaaaggtgatacagatactcctgttacagccaaactgtatattagtggtgcaatatctgttccgcagagatgttatatcaaagcagataaaaacagctttgattttggaacggtttattctaatgcaaataatggaaccataaaaaatgtgtcaacatctataacaacagattgttactatgctcctgtgggaacaacgcaatctctgaagatggacgctgtttctggtggggttttaaatggcaaagcaacggtttatcaggtggcttctgaccctgctcttggcgtcgttttcaatataaataattattctcagtgcgagtcaaatactaacgataggaatttctttaaacaagaatatttgattcgaaaagtgtttactcaacaacagcaccagacctcgacagatacaataaatttttctttgtgtaagtacggtgtaccatcagtaacaggtcagaaaatcgtagtattaaagcttacgtccagatgggtggtgaattag

SEQ ID NO: 39362 - DNA, 264 bp, Escherichia coli
atggaactgcaacaggagaaaactgccgtacagtttttttgtttggactgtttatggaatctttccagtggtggcgcaggaaagttaaccggctgccaccatgggatgacgtgtaaaccgtgcacaggcgtgttcttacggagcggcactttcattaacctgtacacgaacttctattcctgcatcgtgacaggcctgcagccactgcgccacttccagcggatcgccctcccggcgtaccaccctgccttctttattccataa

SEQ ID NO: 39363 - DNA, 153 bp, Escherichia coli
atggaagaagaaagggtgttttcactcagctatgaacaactgacccggtttgcggaacaacgcatccgggaatgcaatctggacagccagggcgtgatttatctctgcgagtcagccagccagggccggagccgtgctgatcttctggcatga

SEQ ID NO: 39364 - DNA, 435 bp, Escherichia coli
gtgtttccaaggttaagtaacatcaaagactttaaagaatttaaacgtaatgtaaataaatcattgcttttaatgtttctaatctgtttgccggtgataatcataggcttgttatattcagggcttgtattgaaaatatggtttggtgagaattaccaaattaattcctttaatatattaaatgtgttattgatcggttttttcttcaatgcgctggcaatgataccattctctgcaatccaggcattaggaaaatctaaaattactgctttgattcattgtgctgaattggttccttatttagcccttttgtattttatggtcgaaaaatatgggttgctgggtgccgcaatatcctggagcatacgtgtaattttagatgctctgttattacaatggctttatactagaatgtgttctgtatatgaaaactaa

SEQ ID NO: 39365 - DNA, 669 bp, Escherichia coli
atgcagcagctgaaagcgagagtgcggcggccggttctgcgacttcagcagccggatcagcaactgctgcggctaacagccagaaagctgcgaagacgagtgaaactaacgcaaagtccagccagacagcagcgaagaccagcgaaacgaatgccaaagccagcgaaactgcggcgaaaagtagtcaggctgcagcagccgaaagcgagagtgcggcggccggttctgcgacttcagcagccggatcagcaactgctgcggctaacagccagaaagctgcgaagacgagtgaaactaacgcaaagtccagccagacggcagcgaagaccagcgaaacgaatgccaaagccagcgaaactgcggcgaaaagtagtcaggctgcagcagccgaaagcgagagtgctgcagctggttctgcaagtgcggcggctgcttctgccactgcatcagctaacagtcaaaaagcagcaaaaaccagtgaaaccaacgcaaaggcgagcgaaacagcggctgcgaactcagcgaaagcatcggcagcaagccagacggcagctaaagcaagcgaagatgcagccagagagtacgcaagccaggctgcggagccgtataaatatgtcttacagccgttacctgatgtgtggataccgtttaacgattcactggatatga

SEQ ID NO: 39366 - DNA, 258 bp, Escherichia coli
gtgctgaataagaccggtggagggtatcagattgataatccgacaccgtattacgtgacggtgattggccttggcggcagtgaaaaacaggcgaaggaaggtgagtttgaggccgtgatgctggcaccgaagtccacgcagacggtgaaatcaggaacatacagcacgccgtacctgagctacatcaacgactacggcggacgtccggttctgcagttctcctgtgcaggaagtcgctgtactgcagtaaagaaataa

SEQ ID NO: 39367 - DNA, 252 bp, Escherichia coli
atgaccagaaaaaccagagataagacagcgccaaaatataaagcgttagacatgacagagcacgccttaaaggtggcaatcagaacgatagaccgccacgctggggaaggatacgcgaaagcacaccccgaactgataagcgcattcatgaccacgacggcggcaaactttgccacgctgacagaacgggagattgccgaagcggaacaggtgacaaccatcaacgttaaaactggagagcagacagcatga

SEQ ID NO: 39368 - DNA, 471 bp, Escherichia coli
  misc_feature (459)..(468): n is a, c, g, or t
atgagtcctgataatatcggttcggctgtcaatcgcttctcaggttggccatctaatgatcctctaaaaacagataacgaatcaatgacatcacccgtggctgtgcaggtaataaagatgattgccgccatccttgacccatatcggatagtcgttggaatcgatacactttatacaacgcagcgcgaaacatttacctcagagagtcaacagctcattgaatcagcattgcaaacacttcatgtgataaatttaaataacctggaaacaaatctcgatgaggacggtcactatctggcttttggatataacgttgacactcctgacagaataaccgtttctgcttataatgaaaaaaagcctggctgctatggccaatgtcttttaatacaggatgacgaaacagacttatttaacctgataaaagttaaaatttttgaagccaggcataattatgtnnnnnnnnnntaa

SEQ ID NO: 39369 - DNA, 234 bp, Escherichia coli
atgtctcctgccgtaatccgatgcttttgtcagtcgctgttgtttattttttttggtaaaaaatgttatacatttgttgcgtatcattatgcaaccttaaccatgaatttagttagcaggaaaatggttattgaggagcttaaggataaatttctggtaaggaggacacgtatggaagtaggcaagttggggaaaccgtatccgttgctgaatctggcatatgtgggagtataa

SEQ ID NO: 39370 - DNA, 795 bp, Escherichia coli
atgaaagattttcctcgtatatattatactttgcctatggcagcaaaaaaactcggctgcacggtggatgatattctacatcttggggcaaccaatagacttgaaatatgtgcatatattggtgaaaacgacttattaataagtgagaataagtgctctgctagagtgatttttgaagatgatagcgaaagttattatgttgaacagataaaaaaacgaaatgtaatagatactgatatgtataacatatcttatttccattacaatgatgattgtgttgaggataccgacacagggatattcagactgcccggttggtatgcaaattatttaaagggattttttgcaattccgtcgcagtatcttgtggatgttgaattatcaggtccgtgcaatgctattgacgtcaaaccacaacatctttacaccataaaagcacattacaaaaagctatatttagctggaatttgggggttgtttattcctgaggaaagattagtcgttttcgaaaatgaactttcgaattttgattatgcggcaaaacctgtatatggcggaggtgatagagaatccccgaaaaccatagctaaaaaagccgagataatacctgcactcataaaactgattcctgagatgcaggatgtggatttggaggagacaccagtaaccaaaattgcagaaatgatagaggttatcgctgcgcaaagaggggttgagctacccagcactcacaggcagacatggcagaaatatttggggcgtgatattggtgacgttctgaaacgtcaaaagtga

SEQ ID NO: 39371 - DNA, 180 bp, Escherichia coli
atggcaacgaaatcagtaaatgcaaaatcgaaaagaatagatgcacgtgtcccactccatatcgttgatgccatggataaggtcaaagaagacggcgaaagtacagggcagtttgtaacagccgcattagaaggcgagatcaaacgccgccagcgacgcaaggctaaagagcaagaataa

SEQ ID NO: 39372 - DNA, 207 bp, Escherichia coli
atgctaaatcataccacacacccgcaagggcgggactcgcacaacctgaataaatatatctggcgttttatcgccctgagcacggcacaaccgcgcgtgattaccatcgaggccaccagcgaacaggaagcacgccagcaatccccggctggctgtgtgatggtattcgccgcccgtattcgtcagggggtgcgccatgtgcaataa

SEQ ID NO: 39373 - DNA, 246 bp, Escherichia coli
atgtgcaataacacccgtccggacgcagccgccgaagccatcaaaacgctgatgcacgcgctgattgatatttctgttatcgcagacaaggcgcataagcacgccaccagcgaaacagaatatgccggggctttcgttcctcactcactggctcttatgcaatttagtgctgatatggcgctgaatgaggcaaaagccatcctgattgctgattgtgaaaatggcgggggcgattatgcgaaataa

SEQ ID NO: 39374 - DNA, 219 bp, Escherichia coli
atgcgaaataaacatgatattgaagacctggcatttgaagccctgcactctgcgaaaaaaatcagggaagtcgtcaatatgtggatgaacagccttagcaccgataaatccgatagcagagaggaaattcttatttctttgttgttagacctggcaaatacacaggtttctctgacatctgatattgagctcgccgctaaaaagctgcctccggagtaa

SEQ ID NO: 39375 - DNA, 315 bp, Escherichia coli
atgaaaaagaaaaattctggctttactgccagcggctccgctcggcctgaaatccgccccggcgatattttccaggataaatacggcagcacgataacgattaaaaccgtcgatgattttcgcgtgacctatatccgcgaaggttatgcgcatccctgcgtgtcgtcgcatatgcgctttgaaagggagttcaccctggtaagcaaagcaccaccagcagaattaagcgacatcgacagaatcatgcgcgttacaggaatggaacgcattaaggcagtacgtgaaattattcgtgaacggggaaaggcaaaatga

SEQ ID NO: 39376 - DNA, 2127 bp, Escherichia coli
atgaagcgcgcaccaaacttaaagcaccagccagccgacaaaatgacggaggtaatcatctttgcaggtagtgatgcgtggagccatgcgaaagagtggcaggaatgggcaggtaagcatattgccgccgacaatgtgccacctgtcgttctgtcagatgaacacctgaaagatattaccggttatcaaattattgatgatagccgtcagtgtgtgcgtatttaccgcgcagggcacatcactgaacgtagcctcacacagatcgtcacgttgctggctgtggctggcgtgaagaccgtatacgaatacgcggggataactgacaccagcccggcggatttatccgaccagttgcctcgcctcaaagacgaatacgagcgcggggaaagtctggtgttgcccttaaagaaaaaaatcacagaaagccagggcgatgatgaattaaagccccgcgttgaaagtcgcgccgatggtgttttctgggtaacgcccaaagttgacaagcagtcaggcgaaattatccggcctgagacgtggttatgttccccgcttgaactactgggaacgggaacaatcggtaaagagcattaccgcgtgatgcgctggaaaaaattcgcaaatcatgaagtcatcacaatggcggttccgtgcggtggcattggcgaccgtgacggctggcggttactgaaagaccacggcctgaacgtgacaaccaacggcaaatacagggctatcctggctgactggatgcagttaagcggaagccatgaggaatggcagttaagcacaacaacgggctggcattttggcgcgtacatcatgccggacggttcagtcattggtgagtctgaaaaaccgatcctgtttaccggaaaaacggctgccgttaatggttattccgtggcaggaacggcggagggctggcgcgacagtgtggcgcgactggctggtggtaatccgtccatgatgctgggtgtggcggtatcgttatccgcaccattaatcgggctggtgggtgctgacggcttcggggtacatcttttcgaacagtcatcggcagggaaaaccaccacacagaacatcgcatccagtttatggggagagccggacgcacaacggctgacctggtacggcacagcgttaggtatcgccaacgaagcagaggcacacaatgacgggcttttacccctggatgaaataggccaggccggaaacgcgcgggaggtgtccacgtcagcctatacgctgtttaacggttccgggaaattacagggggcaaaggacggcggcaacagggagatcaaacactggcgaacggtggcaatcagtaccggagaaatggacgttgaaacattcctcaaaacggaggggataaaagtcaaagcggggcagcttgtccgcctgcttaacgtgccgatggaaaaagccacgcaatttcacgaatacagcaccggaaaggcgcacgcagacgcgttaaaggatgcctggacagaaaatcacggggcggcggggcgtgaatgggttaaatggctggcagaccatcagcaggaggcaaaggacacggtaagggcatgccgtgaacggtggcgcaacctgataccggagagctacggcgaacaggttcaccgtgtgggggagcgatttgccatgcttgaggcggcgttagtgttgtccggtcatattactggctggggtgtacaggaatgccgcgatgccatacagcataattttaatgcctgggtgaaggagttcggtacggggaacagggagtttaaacagatggttgaacaggcagaggcttttttagcgtcgttcggattcagcagataccttccctggcccaactctgacgagcgtgatttaccgattaaagagcttgccggatacagaaaggggagtatcagaaacgaagatgacgagttccgtttttacacgttcccgcatgtatttgagggtgagatagcacagggatttaatccgtctcattttgcccgcgcgttgagtgctgccggaatgctggaagcgggtaacgatcgccgttacaagaaaaaggcgctcggcaaaattggggggaagcagcatgttttttacgtgctgatgttccagacagaaagcgaagaagattaa

SEQ ID NO: 39377 - DNA, 651 bp, Escherichia coli
atgaatgcacgaaaggcggtactggcagataatccggaattgatcctgcgtgtgctacagctgagatttgacgagtcactgtcgtacccgcgcatttctgcgcagaccggtatcagcaaaaccgccattttttctctggtgaggcgatttcaccaggtattcactgactggcctctttccggggaatattcctgcgtgcaactggcccgggctctgttcccggggcgatacccttcagccccgacagtaactcagactgtgaaaacagagaaaaaccgccggaaccgattttcaccggagtttaaatggagacttgttcagcaaactcttttacccggtgcctgtgtcgcacaaatagctcgtgagaacggaatcaacgataacctgctctttaactggcggcatctctggcgtaacggcggcctgcagccgcccggcgaacatgaaacatcgctacttcccgtgacgttaacgccggagccgaataataaaatcccggcaccagtgcagatacctgaacagataaatacactgccagacagtctgtgctgcgagctggttctgccggccggaactctcaggctgaaaggtgaactgacaccggcgttattacagacacttatccgcgaaatgaaagggagcagccactga

SEQ ID NO: 39378 - DNA, 756 bp, Escherichia coli
atgacaggcgctttagcacatggtgctttctgggctttgattggagcagtggcttcacagcttgttccggctgaaaaactaggactggccacctcagttatttttggcggcgtttcggctgccagcgttctgggtgtgccactgtcgagttttattgcggatatggccgggtggcggagtgcgtttacggcgatttctctgctgtcacttgccgccgcctgtgctctattctggacgctccccacactgacggtgccacaaccactgaggctgcgtgtttactacgggatattcaaaaacccggtgctcctttccctctatggtgccactgcctgtattatttcggctcattttgcggcattcacttacctccaaccactactgacgaagactcaggaagtaccgacggcttcgatttctggcctactgctgatgtccgggctctccggtctggccggaaatatcattgccggaaagctgatcgaccgtcatatcaaagggctgattttcgcttcactgctcctgagcgcaggtgcgctcggcatacttggtatgaggagcgctgcaccactgcctttctggttcacaggcatactgctcgcagtttggggcgcgggtatcgccattgtattcgttgggttgcagacaggttgctccgtagcgccggggatgctgtacaaccggcgtcagccatttacgttacaatttttaacgcagcgatcggcaccggtgcgcttgtgggaggccaggtattag

SEQ ID NO: 39379 - DNA, 390 bp, Escherichia coli
gtggcttattcgccactgggccgtggctttctgacgggcagatttcagcatgaaccggttccgggaaaggacgatttccggagaacgctcccccgcttccagccggagaatcttgccataaactactccctggttgatcttataaaagctctggcagtgagcaaaaactgtaaaccttcacagatagcgctggcctggttacttgcccagggcgaaaacattgtgccgatacccggtacatgcaatctcagccatctcagtgaaaataccggcgcactggatgttcagctcagttgcgctgaactgaaggcactgcgtgccgccgtatcctccattcccgttgccggagaacgatacacgccggaaggaatgaaaggcgtgggtgtttga

SEQ ID NO: 39380 - DNA, 1473 bp, Escherichia coli; identical to SEQ ID NO: 18030

SEQ ID NO: 39381 - DNA, 1539 bp, Escherichia coli
atgtactcatacgcagacaggattcgtgcagttgagctttacatcaagcttggcttacgtgttagagccacgattcgtcagttgggatacccaaccaagaacgcattgaaaggctggtatcagcactacctgaagcatcaggatttgccagcaagccaagtgccaagagcacccaaatattcgctgcagcaaagacaggttgcggttgctcattacctcgcccacgatcgctgtattgctgccacgatgagggttttgggttacccgggtcgaggaacgttgactgcgtgggttcggcaagactgccccgaggccagccaatcgatactaggcaggtcttggccggttacaaagccggatgctttgatgtatgaaggcgtggtgcaactgtgtacccgccaatcaagcgcacaggagattgcggacaagttaggggtatgccgaggaaccttgtacaactggaaaaatcagttgcttggcccttgcgcccccgcctcgatgaaacacagtccaaagcgatcgccagtgttggatgcagcagcgctcaggtgccaagttgaatcattgcgccaggatgttcggcggctgaagatagagcgtgaacttctcaagcaggcccatgaaatcttaaaaaatggggctgacattgatctgcataggctggcaaacaaagataaggctgtgctggttgaagcgctgcacgggcagtatgaattgccagaactgctttgccatgttggccttgctagaagctcgtatttttaccatcgtgcccggctgaagctggctgacaaatacttggatgtacgccgaagcatcaccgatatcttcgacagcaactaccgttgctatggatatcgccgagtccaggcatccctgctcaaggagtgcacgggcatctcagagaaggtggttcgtcggctaatgaagcaggaggggttgatcgtggtcaagcccaaacgccgcagatataactcataccttggagagataggcgctgccccgcaaaacctcatcaatcgagacttccatgctgctgcgccgaatgagaagtggcttaccgacatcactgaattccagattccttccggcaaggtttacctgtcgccagtgattgattgctttgacgggctggtggtgagctggtccattgggactcatcccaacgccaatctcgtcaacacaatgctggatgcagccattgatgctgttcaaggcagtgagagccgccctatgattcattctgatcgtggagctcactaccgctggccgggctggctctcgcgggtgcacgatgcaaagttggttcgttcaatgtcccgcaaagggtgctcaccagacaacgcagcatgcgaaggcttctttggaaggctgaaaatggagttgttctatcccggcaactggcaatcaacgacgattgagcagttcattgaagccgtcgatacttacatccgttggtacaacgaaaagcgcatcaaggtatctctggggcgtttaagtcctgtggaatacaggcaaaaacttggcctaaccacataa

SEQ ID NO: 39382 - DNA, 456 bp, Escherichia coli
atgcacggttccggtaaacttgccgctgacgctctcgccgtccgtggcggcgcggaacggcaggcccttactcaaagccatatccgatccgacgccggctacctcgcgctcccgcaggatggcgagaaggttgcgccggtagaagacgcggctgtcccggctgcgggtggcgtcgccctgttcgatatggtgctcgcggcgctggtccatggcttcgcggacttgttgcccgaagccggttggcgcaaggtcggccgtctcgccgtggatcagccgccggtccagccaggtcgcgccgtccgatccgatctgtttgttcagatcgaccggggaaaggacgcgaacgctggcctgactgtctcggccggcgtcatgggcggcggcacggctgaccagatcatcggggatgcgccattggtcggcgtcgatccgctcgacgataccggcccggcgtag

SEQ ID NO: 39383 - DNA, 1044 bp, Escherichia coli
atgaaacgcattgcagttgatctggccaagtccgtttaccaagttgccgagagtgtccgttccggccaggtggtgcagcgcaagcggctgaaccgagaggcgttccggcgatatatacaggagcaggccgaaccggtcgagtgggtgatggaggcctgtggcacggcccactactggggacgtgtagcgcaagccctggggcatcaggtgaggctgctgcatccgcgctacgtgcggccctatcgccgccgcaacaagaccgatcgcaatgactgcgacgccatgctcgaagcgacgcgctgcaccgatattcatcccgtgccggtgaaaagccacgaccagcaacagctgcaacagttgcacgggctgcgggaaacctggaagaaaagccgcacccagcggatcaacctgctgcgcggcctcttgcgtgaagctggtatcgaggcccccgcctcgaccgctgccttcatccgcgccgccagcgagcgggttgaccagcccgagctcgcacccctgagccgtctgctgcatatcgtcctggccgaaatcaacctgtatgaacagtgcatggccgagtgcgagcagcagctcaagcgctggcatgccgacgatgacatcgtacgcaagctggatgaggtcagcggcattgggctgctgaccgccagcgccctgacagccgccgttggcaggcccgagcgctttgccagtggtcgccagctcagtgcctggctgggcatgaccccgcgcgagttcagcagtggcgagcgccgcaagctcggccacatcagccgacagggcaacgtctatgtgcgtaccctgctaatccatggctcacgggcagccttgctggctgcacaacgctgtcaggcacgcaccccggaaaagctgacgcaactgcaacgctgggccgtggcaacggcggcgcgcatcggccacaacaaggcagcggtagccctggccaacaaactggtgcggatctgctgggccgtgtggtgccatgagcggcgcttcaatggcaattggcaaagcacaaagcccgcctga

SEQ ID NO: 39384 - DNA, 447 bp, Escherichia coli
atgtttacaaaagcatgtgagtatggcattcgtgcctgtatttttgtagcgcttaattcgatggaaaaaaggcgtgtcagtttaaaagaaattgcacagtctattgattcacccgaatatttcaccgcaaagattcttcagaaactcgccaagggaaaaataatctattccgttcaaggagcacagggaggttttgagatggaggaggcgaagattagaacgatttccattgaagatattgttttggtcattgatggtgaggtagcctttacgatgtgcgttcttggtttgaaaaaatgttcagaagtaaacccttgccctgttcatcataaatacaaaaacatcaaagctgatctcaaagaaatgatcaaaaccaccacggttttcgacatggtagatcaagtaaacgacggacattcttttctgaaaatttttgaattagaataa

SEQ ID NO: 39385 - DNA, 513 bp, Escherichia coli
atgaaagtaagtttgatagttgcaatggatcttgaaaagggcattggtaaaaacaacgatttgatgtggcatttaccggccgatatgcttttttttaaagaaactacactgaatcacattgtggttatgggtaggaaaaatttcgaatcaatccctgaaaggtttcgtccacttccaaatcgggaaaatgcaatattaactcggaatacagcttttgaagcaccgaattgtactgtttttcacagcatggaaggttgcttgaaacactatgagaacgaagataagagaaccgtttttatcattggtggcggacaaatatatgaggaggctttagaaaaaaacagggttgatgaaatgtttataacctttgtggatcatacttttggtgcggatacattttttccttccatcgatttttcgctttggaatgaagaggtgctgcgtgtgcatgaagcagattctaaaaatgcgtataattttacggtcaaaaaattcactaagaagttatcctga

SEQ ID NO: 39386 - DNA, 282 bp, Escherichia coli
atggtgcgcaaatatttcggcacagacggtattcgtggcaaagccaacgaaggcgcgatgacggcggaaaccgccttgcgcgtcggcatggcggctggccgtgtctttcgtcgcggtgaccaccgccatcgtgtcgtgatcggcaaggatacgcgcctgtcgggctatatgcttgaacccgcgctcacagccggtttcacctcgatgggcatggacgtattcctttttggcccgctgccgacaacgtgcttctctttaaacagctatttatttccaatttaa

SEQ ID NO: 39387 - DNA, 222 bp, Escherichia coli
atgaaaatcatcacccgtggtgaagccatgcgtattcaccaacagcatcctgcatcccgtctatttccgttctgcaccggtaagtaccgctggcacggcagtgctgaagcgtataccggtcgtgaagtgcaggatattcccggtgtgctggccgtgtttgctgaacgccgtaaggacagttttggcccgtatgtccggctgatgagcgtcaccctgaactga

SEQ ID NO: 39388 - DNA, 222 bp, Escherichia coli
atgaaaatcatcacccgtggtgaagccatgcgtattcaccaacagcatcctgcatcccgtctttttccgttctgtaccggtaaataccgctggcacggcagtgctgaagcgtataccggtcgtgaagtgcaggatattcccggtgtgctggccgtgtttgctgaacgccgtaaggacagttttggcccgtatgtccggctgatgagcgtcaccctgaactga

SEQ ID NO: 39389 - DNA, 309 bp, Escherichia coli
atgggtgcgctaaatctgaagtctccggaacgcccactcatcagtgagtacccaaccattaatgcgttaagcatatcccggtttttcaatgagataagaaaggtttatcctgattataatcaaacagtcaacatcattctggatggtgcacgttatcaccatgctcaactggtaacagactgggctgaagtcgttaatatcaaacgcgttcaattagcacttatctacataataatagacctttgtaaaataactgtatatcctgtctcttatacacatctgacgctgccgacgaatagagaggtgtag

SEQ ID NO: 39390 - DNA, 279 bp, Escherichia coli
atgctgcataaacattgcaaacaaatcagctttactatccgggaaattatttttggcaaactctttcagctcaccattcattcccttgccgcccatatacggcggattcgccaccaccgcatcatatcgctgcgccagaatccacgcctgctgaataaacggaataaacgctttcgctgcggccttctgctggaaatcgccttcctgttccaggcgatacagcgcatccaggaataccttcagttccgcttcttcttcctgcggtacctgaatcagtga

SEQ ID NO: 39391 - DNA, 513 bp, Escherichia coli
gtgcaaataaccgaagccttaatttcagagccgggagacatccggcgttttgttcagcaggcggtggaccactggccgcatttgctggcattttacttcacactccattcggcagaaggaaacatcaacgggcaacagattcatgcattctgtactgccttttaccgacaggtgcaagaacatattactgagcgtaatcacactgccagtccagcaccgccggtggtattacgctggttgcgggaacaacatggaggagcaacaatacgatgcctgttgctgctcagccaggcgagcatttgccatctgcgggtcagtgccacagttgatgaagaatgttcgcaagtggtggatttactgcagcaggcctggcgggggataaacgctggcggacaatgtcgggtggaaaggtgttttcgggttacccggcctgatacatcagagcaatacgttgcgttaaaaacagctgttcagtctctgatgccactggttattgcaacaattatccggtga

SEQ ID NO: 39392 - DNA, 135 bp, Escherichia coli
atgaataaggttgtattgctgtgccgtccgggctttgaaaaagagtgcgccgcagaaattaccgataaagccggccagcgggaaattttcggtttttgcccgcgtgaaagagaatgcgggttatgtcatttatga

SEQ ID NO: 39393 - DNA, 312 bp, Escherichia coli
  misc_feature (289)..(298): n is a, c, g, or t
gtgttagcccgctggaaacaacctcacggtggatatatatcacccgcggcatttattccacttgctgaaaaatgcggattaatcgttccgcttacgcaaagcctgatgaatcaggttgccagacagatgaacgctatcgcgagtaaactgccggaaggttttcatattgggattaattttagcgcctcgcatattattttgccgacgtttgtcgacgagtgcttaaattaccgtgacagttttacccgccgcgatttaaaccttgttctggaagtcaccgagcgtgagnnnnnnnnnnccattaaatgttga

SEQ ID NO: 39394 - DNA, 201 bp, Escherichia coli
atgattagtacagatgacgcctatgtcacgggaaatgcagatccaatttctgcacaagtctcaggcagtgtcactgtcgttaatcataaagatacgaactacgttcgacaaggtgacattttagtttcactggataaaactgatgccactatcgcactcaataaagctaaaaataatctggcaaatattgttacaggataa

SEQ ID NO: 39395 - DNA, 1059 bp, Escherichia coli; identical to SEQ ID NO: 6660

SEQ ID NO: 39396 - DNA, 318 bp, Escherichia coli
atggctctgctctggaaccaggccgcaggaagtatcaatctggagtttatcagctactggaattccggtgtattggcagaccctgataatcacctgacccacgaagagcgctctgttttgcagaaaaaagtcaataaaactatggggcggtttggagacaggagatgccatttaacgattatagggcgttctgatgaagtccatgattttacctccgccttaattaactgttttctttctgaagaagaaattgtctggtggcaatcaggtggcgttttcgcggatccctggcccgttaatatatcccggctgaactga

SEQ ID NO: 39397 - DNA, 303 bp, Escherichia coli
  misc_feature (263)..(272): n is a, c, g, or t
atggtgttcttttccgcacttaattattgcctgacattgatatccccggcaggattaaatgatctcatttacacattaatccagacgccgctcaaacatatgggaacgaatatctttgcggtaattatcctgggggctgtgggtaatttcctctgggtgctggggatccacggacctaatacaacgtcggcaattcgagaaaccgttttttctgaggctaatctggagaatctctcctgggccgctcaacacggcactacctnnnnnnnnnncgccatatccgattacctggacttctattaa

SEQ ID NO: 39398 - DNA, 444 bp, Escherichia coli
atgctgcagggcgtaatcccgcagacggtaataatgaaccgtcatggcataacactccgtacggcaggcgtgatgactgtacgtcatcagacaggcggcaatgccggcggcttccgggctcatttcagcgcggttaccgttcatgacgttaaacagcacccatgtttcgtcatcatcgtcatccggttcgggtgccataaatgcgccaccgttgttcagggtgtacagattccagataccaccgcagtagtcttcatacagacggtccatccagccgaagacccggggctccagggtcacccactgtggaatgaggccaaaatgctgcggccagaagctgatgcgctgttcatcagggactatggtggcaaccagttgttgcaggccagtctccggtgcacaggccgaagaggtggtgttctgagacaatgttttcatgtatga

SEQ ID NO: 39399 - DNA, 1587 bp, Escherichia coli
  misc_feature (1530)..(1539): n is a, c, g, or t
ttgcttgtgaaaactccagttaacccacttttgcaatggcttaacatgttttttagtcgccgttcattatccggagctgatggacgggcgttatatgcttaccgttgtactgatacagagtacgaaagtttggcagaactactgcgtacatatgccccccgtagttatccaagaacgatattcatttcctatagcgatgttctatttagcatatatgccgcagagtttatccgccggactcatacggtcggacaccctaaatgggacacaattttagattctattgactggaaagttccgtatgttcatcgacagaagctggttaatgatggcattcgctactggaaaagaaagataagaaacctggggcaagcttcgggttatctgcatacactggcttgtgaaggtggtttacctatccgcatgattgaaaatgagagcggttatttgattacctatttcagaaggatatatcaggcgcttcgtgggcaagcatctcaatatcctgccgctaaaattgcacaagaattaggcgatacgattcctgtcacaatgcaaaacgaactggtctatgaaatagccggtgaattctgcgagactctctgccgattacttagtgagcatccacctcaaagcagtgatcccgtttctgcattacgtaagctctctccagactggcatcttcaacttccactcgttctccccgaagcgaatgctgcagagattgtaaggcgattactttctcaatcttctgaaatacgcagtgcaagtagtcttcaggttgaaagaatctgggtcgatgttgatgacagttggtattgtgatgcccggttccgattcccggccacaatgcgtacagaacagttaacctctttgtttgaatgcaatattcagccggagcagacccgactcatcatttcaggaaaatggagaaatggcggggcaaggttggcaatgctaagccgttatgagcagcaagattggcgggtcgagttattacctattgcgatgcaaaagctctctggtgcagatgcaatggccgaaatctcgttgtcgcttcatgaaggtccaattctgttaggccacacaattccaaaaggcggttatgaacttactgaagaactcccctgggtttttgaagcgatgaatgagagtgaatcgcagctaaaacttgtcggtatggggtctgtgagttccaggctaaatgctctgtttatttcgctaccgaaaaatagccatttagatattagtggagaaggtgagtttgatatcccaaggttgctgaaaaacagtgaacgcagcttaactaaaataagtggagtatttagcgttgttttacatgatggtgcagtttgtacaattcgcacccagcaactttatgattctgcgattgaatattatattaaatcgacagaagttgaactggttaaatcggattatcctgtccatcgagcctggccgaagatcggttggaaaaaggatctgcaatatggcattgtaccggagaaagaacttttttggcgttccatnnnnnnnnnnacaatgcctggcattctgtcgcatcagaaatgccaaaaggacagatag

SEQ ID NO: 39400 - DNA, 354 bp, Escherichia coli
atgaaagacccaattgatcctgaggaattagcaaatatatttaataaaaaacataaacaacacatggatgatcgtcttatccatctaattagaagcaatgctatagcatccacacctgtatatgacaattattttaataacactactgctttcagaccaaaacctgaagatatcttcaaatgtggacagacgctcaaaaaaagcaaacagaaatatggccattatggattaggggtagatcagcatcaaaaaattgataattataccatggggctaaattcctggaagatagcacctaacgaacgtggtgataaaaaaggtgtcccagggcttagttgttttcaatctcattaa

SEQ ID NO: 39401 - DNA, 174 bp, Escherichia coli
atgtgcgacaactggttgcgggtagatcgtattgagctaacggtgttcgtcgataacgcgccagcaattaaggtctataaaaaattcggctttgagattgaagggactggcaagaagtacgcattacgtaatggtgaatatgtcgatgcgtattatatggcgcgggtgaagtaa

SEQ ID NO: 39402 - DNA, 591 bp, Escherichia coli
  misc_feature (544)..(553): n is a, c, g, or t
atgaccaatctatcgggagtttatggcactctgctgccggataataacctgaattatagtgttcaggtcggtaacacccacgggggtaatacatcgtctggcaccagtggttacagttctcttaattatcgtggagcttacggtaatacgaatgtcggttacagtcggagtggtgacagcagccagatttattacggaatgagtggtggcattattgctcatgctgatggcatcacctttggacagccgctgggcgacacaatggttctggttaaggctcctggcgctgataatgtcaaaatagagaaccagaccggtattcataccgactggcgtggctatgccatattaccatttgcgacagaatatagagaaaatcgtgtcgctcttaacgcgaattcccttgcagataatgttgaactggatgaaaccgtggtcactgtcatcccaactcacggtgctattgccagagcaacatttaatgcacaaatcggcgggaaagtattaatgacgttgaagtacggtaataagagcgttccattcnnnnnnnnnngttccattcggtgcaattgtcactcacggaaagaataa

SEQ ID NO: 39403 - DNA, 207 bp, Escherichia coli; identical to SEQ ID NO: 22869

SEQ ID NO: 39404 - DNA, 657 bp, Escherichia coli
  misc_feature (640)..(649): n is a, c, g, or t
atgaaaaaattaaaactattaaataaatacagctacttacatagcataaacggagcgctcattgaagcagagcttgacgacgtttcagtgggcgaagtatgcgaaatttatgcgagctggcaagcaaatgaacgtatagccagggctcaggtcgttggctttcgcaatggaaagacattattaaaccttataggcagctctgtggggcttacacgtactgcagtattgaaaccaacgggagagcagttaaccatacagatcaatgatgcctttcttggttcagttttgaatgcttctggtcaaattatggaaaggtttgtcccggacactccaggcgaaaggggaaatttacgcctgattgatgaactgccaccgtcgtataaggaacgtcgagttattaatacaccactagagacacggataagagtcattgatggcgtactgacatgtggcattggtcaacgtgttgggattttcgcatcggctggctgtggcaaaacggttttaatgcatatgcttgtaaacaacactgaagctgatgtgtttgttattggcttgattggcgaacgtggaagggaagttacggaatgcgcggaatcgctgaaaaaatcagtaaatgcagcaaaatgtgttttggttnnnnnnnnnnacctctga

SEQ ID NO: 39405 - DNA, 714 bp, Escherichia coli
atgggagggtaccttaatgagtggaatgtttttgactcattaagcagagtaagagactttttcagattaagtagtgcagtatttacaaaattggataataacatttactctcttgaggttgatagtttttgtttataccgagattatgagattgcaagaaatagactaatgatgagagcgtcacatctatatagcgaagttcatgaatttagtaacaaacattttcatctaaatagttgggtaaaggatcatatgccatcttacttaaattctgatggcgtttttagctcatttcatctaagcgagttggaaaatatgtctcctgatgaccttcatgaagaatatgggaatatatcattatttaattgggtgcacgcttatcaatgtttagtcgagttatctaaagaagaaatgagcaaaagattttcatcgacaaaacctatacccctacagttggatcgctggctgatcgtaaaaagccgtgagagttggttatcattctttcaacgtaaggggattgcagcagatgcagcaaaaaaactgatagattattttaccttcaattcaaaatcacatgatcttaatgattgcccatttattccctgtatggacggtttatgcttaatgcctgcattaatagcaaatagctcagtgactcgctctctaatgtcattatttggttccaaaaaaatttctcaagcaagtaaagggtga

SEQ ID NO: 39406 - DNA, 465 bp, Escherichia coli; identical to SEQ ID NO: 15842

SEQ ID NO: 39407 - DNA, 714 bp, Escherichia coli
atgcctaaggtagaaattggttctattgcgatgcagttaaatcgtaaggcaattaaaaaccttcatatcagcgtgttgccacctgatgggcgtgtgcgtgtttctgctcctgaatctatgacagaaaccgcaatccgtatggcagtgatcagccgcattccttggatcaagaaacagcagagtgtttttgccaaacaacctcgccaatctgatcgagcaatggttagcggtgaatgtcattacctgtggggcaggcgttatcgtctgaatcttatcgagcgttccggaaagcatgaaatcaagctaggtcgtggtcgattgcatttatatgtcaatcccgcaacaacgcttgagaacaaggcactggtactgaactcatattatcgagatgcacttaaaacgcgaatcgctgagttattgcctgtttgggaagataagatcggcgttaaagctgcagattggggaattaaaaagatgaaaaccaagtggggcagctgcaatattcaggcaaagcgcatttggctaaatttagagcttgctaaaaagccaccggagtgtttggagtacatcctagtgcatgaattggtgcacttgcttgagcgtaatcacaatgaacgcttcaaggggtatatggacaagctacttcccgattggcgagagcgcagagatttgttgaatcggatgcccttggcgcacaacgattgggtgtactag

SEQ ID NO: 39408 - DNA, 3093 bp, Escherichia coli
atgagtaacgtcggccagcgtgaacgcatgacccaacagcgcattgttgagctgtttcaaacggatttaggctatcgctatttaggcgattggcaggatcgcgctaataataaaaatattgaagtggatatccttgttgattggctaaaaaaacgcggtgtcagcgaggcgttgatcaatcgtgctattcgccaattggatacggcagcggcactgggcgaaggcaaaaagctctattacgccaacaaagaggtttaccgcttgctgcgttacggcgtgaaagaaaaagaaggtgctggccatcttaatgaaaccgtgtggctgattgactggaaaaacccagaagcaaacgattttgccattgccgaagaagtctctatcaagggtgaaaacaaaaaacgtccagacatagtgctgtatgttaacggtattgctctgggcgtgattgagctgaaacgctcttcggtgtctgtctctgaagggattcgccagaacctcgataatcagaagaaagattttatccgtaacttctttaccaccatgcaactggtgatggcgggtaacgatacgcaaggcttgcgttacggcacgattgagacaccagaaaagcactaccttgagtggaaggaagattgcaccaacccatacgaacataaactcgattttcacctgagtcgcgtgtgtaacaaagcgcgcttgctgcaaattatccatgattttattgttttcgatgcgggtataaaaaagacctgtcgccacaatcaattctttggtattgaagcagcaaaacgccatatcgcaaggcgagaaggcggcatcatttggcacacgcaaggttctggcaaaagcctgaccatggtatggctggccaaatggatacgtgaaaatgtcaaagacgcccgtgtattgatcgtgactgatcgtaccgagctggatgagcagatagaaaaagtattcaccggtgttgaggaagatatttatcgcaccaaaagcggtgccgatttggtggcgacgctcaatcagcccaacccttggttggtatgctctttagtccataaatttggtcggcagtctgattcggaaaacgataccgcgacggatgagtttattgccgagttaaagaaatccctaccatcgggctttaaagccaaaggcgacctattcgtatttgttgatgaatgccaccgtactcaatcgggcaagttgcacgaagcgatgaagtccattctgccagaagccatgtttgtcggcttcaccggcacccccttgatgaagaaagacaagaaaaaatcggttgaggtatttggcccttacattcacacctataagtttgatgaagctgtggccgatggcgttgtgctcgatttacgctacgaagcacgagacatcgaccaaaatgtcacgtcgcagaaaaaggtcgatgaatggtttgaagccaaaactcgcggcttatctcgattagcgaaaacccagttgaaacagaaatggggcaccatgcaaaaggtgctgtccagtaaatcgcgtttgcagcagattgtgaatgatatcttgctggatatggacactaagccacgcctgatggatggctacggcaatgccatgttggtctgctctagtgtctatcaagcttgtaaagcttatgaaatgttcagccaaacagatttagccggtaaggtggctattgtcaccagttttcagccgaccgctgcgagcattaaaggggaagaaaccggtgaaggcttaacggaaaagctctttaagtacgatatttaccgcaaaatgcttgcggattacttcgagcaaccggaagacaaggccgctaaccgagttgaagagtttgaaaaagaagttaaaaaacaatttattgatgagccagggcaaatgcgcttactgatcgtggtcgataagttgctgactggcttcgacgccccttcggctacctatttgtatatcgacaagcagatggctgatcacaacctgtttcaggccatttgccgcgtgaaccgcctggatggcgatgataaagaatacggttacatcattgactacaaagatctgttccgctcgttggataaagcgatttctgattatactcaaggcgcatttgatggttatgacaaggaagacgttgcagggctgctgaaagatcgtttagagcaagccaagctcgatttggataatgcgctggaaatggtgcgcgccttgtgtgagccggtaaaagcgccacgtaacacggaagactacattcattatttttgtggtgagtcaggtctgaaccaagacgagcttattgagaaagaggctctgcgtttaacgctttatcagaatgttgccaaactactgcgtgcgttcgccaatatcgccaatgaaatgcctgatgcaggctattctgcgcaagatgtagactcgataagaacagaagtggctcattttgaaaaagtccgtgacgaagtaaaactggccagtggcgatttggtagaaatgaaacgctttgagcctgccatgcgccatttgttagatatgtatattcgtgcggatgacagcgaagtactgatggattttgaagagctagggctaattgagcttatcgttgaaaaaggtgctgatgccgtggaggctttgcctgaaagtattcgtaagaatcaggaagccatggccgaaaccatcgaaaataacgtgcgtaaaaccatcgttgatgaaaacccggttaaccccaaatattacgagcaaatgtcggtgttattggacgagctgattgagcttcgtcgccaaaaagcgattgaataccaagagtatctggagaaaatccgcgagctatctcgtaaggttatacgtccggagcagacagcggctaactatccgccatcgatggactctaatccaaaacgcgcgttttacgataattttggtcaagatgaagtgctggctaccaaaatagatagtgccattcgttataccaaaaaagcggattgggtgggagatcgctttaaggagcgagaaattgccaatgcggtgcgagaagaaacgacggggtatgatgtggatattcagggtgtaatggaattggcaaaagcgcaaaaagagtaccattga

SEQ ID NO: 39409 - DNA, 2034 bp, Escherichia coli
atgtcgaatccaaataagataacgagcttttccattaggcagctgttagcagataacgcctcctatcagatccctatgtatcagcgtaactatgcgtgggaacaaggcgaaattgaccagctgattcaggatgttgttgattatcaagtccaaaaaaagccttactacatcggcagcttagtggtgtatccacgggataatcagctatttgaagtgattgacggccagcaacgctttaccacgctcacgctaattgctttatgtttgaagcacttcagcatgttggctgaaaaagaagggacaacgtctgttaataaagttgacatgagttggtatcaaacgcctaatttatgctttgaaagccgcgctaactcaaccctcacccttgaaaaaataacagcctttagcgcctctactgctaagcatttgttactagatccagccgatattaatcagtgcaacagcgctattttaaatggctttaacttggtgcagcaggcgttatctgagcttgctaaacagcatgacctacatcagttttgtaattacttatttgattgggtcaaaatcacccgtgtccccgttccccacgacactgatttaacccattactttgaggcgatgaataatcgcggggaacagctagaaaaacacgaagtgctaaaagccagaatgctctctgtgctgcaagatgccagccaccaacaccctgagaataaaagcgcgcaggaagtgctcaataaagtgtggaatgcctgcgccaatatggagcgttatgtgcagtttggctttaaccacagcgagcgccagcagatctttggcaatgagtggcaaaaatttaccgctaacagctttactgagcttcatcacgcgctaatatcccctgaaaacagagcagccaacatcacagctgatactcatagtgatgagccagccgccaaatcactggctgaaatgttgaacacaccttataccgataaacaggcagaaacagataaaaatcaaccatcgcctgaacgctttaacagcgtgattaatttttctaactttttattgcaggtattaagggttcacagccaaaaagacatttctttagacgataagcagttaattgatcagttcgaaacgcatattttgcacgcagatgatgcagcagaaaaagttaaagcgtttgtgtttgccttattaaaatccaaatacctatttgatcactacgtgataaaacgcgatgcgacggctcaggacaagtggggcatcaagcaattaaaacgctatgagcgcaacagccaaaactacgttaatacctttgcccaaaacgatcagcctgataccgctcactcgcaattaaatcagcgcattgttttattactaagcgccttccatgtctctacgcccaccatgaactacaagcactggttaaccggcgttttgcatatcctacatcaactgcacgccaagcaactcgatgcagacaactatttaaaagcactcgaaaagctcgccagaagctttatctatgggcgttatttggctaaaacagcggctgattattacacactgatttttgataacccgaagcgctatcaacccttagcggacacgtgttttttacggtgtcgcttgcgctatggttcgattaaaaacaactttgtatttaactatttagattatttgctgtggtgcaccacccctgataaggaccaggtgtatcgtgagtttgaatttagttttagaagctcggtcgagcatttctacccacaaaatccctactctggcgaaccattagaagaccctaagattttgcatagctttggtaacctatgcctaattagccacagcaaaaacgctaagctcagcaactaccaacccacggctaaaaaagagcactttcaagcagccagcacccaaggcaaaatcgactcactcaagctgtatgaaatgactcgggttgaagtatgggatgcagatgctatccacaagcatgaaacccaaatgctgggattgtttattaaggattctgagggagaaaaatga

SEQ ID NO: 39410 - DNA, 1419 bp, Escherichia coli
atgtcaccagacacctccacacataggctgcatgagcaagttaaatcggtttatcagctcctgagcgagccacagctgcatattcctaactaccagcgcccatacaaatggacagcagacaacctccaagcgctactcaccgatttacgcaactaccgcgataaatcggcgtatcgcttgggtacggtggtgtttcatcacaactcagagcatttggatattgttgatggccaacaacgcaccctaaccttaatgctactggttaaagccattgctgaacacatgcaggagcataaagacttaatccagcgcaaagacttaagcgagcaaatagccgaactggttaccaatattgatgcttttttaagcacacaacccgacagcccccacagcggcatcacccataccaacctttatcaaaactaccaagcggctaagcgggcagtggcacagcctgagtttggcgaagcagatattgcgtttttactgcataaatgccaagtcgtcacctttgtgttgaatgatatttctgaggcgtttcagttttttgactcacaaaacagccgtggccgcgacttaaacccgcacgacttactcaaggcctatcatttacgcgagtttcccgagcatgaagcggcactcaaagccgaagccgttaaagactgggaaagccaaaaaagccacgaactagccagggtatttgcccactacctgtatcgcattcgccactgggttaataaccagcaggcccactactttagcaaagacgatattgggctatttaagggcgtgaatctgtatcaggcagcccattatccttacacccaagcgctgcgcattcagcacgagcaggtggataactacaataatcactttcagcgcaagctagaccaaaacacgctggcgtttccgtttcagctcgatcaaatcgtaattaatgggcggcgcttttttgaaatgattgcgcactaccaagcgctgattaacagcctaaccggcgaggcattaaccaaacagtccagcattcctttatcagaccgtgcacagcagattcttaacgcgctcaatagctatggggcacggcatcgaacgggcgatcgttatatccgcatgctgtttgactgtgcgctgctgtattacttcgataaatttggcaaagagcaactatcagaagcgatcgaaaagtttttcatctgggcctatagctgccgcttaaccagccacgctgtgtatatcgaaaccatggataaccacgcccgcaacagcaaactgtttaagttaatccagtcagccattagcccaaaacaagtactggcgctgcctttaaaaaccctcacccctgctgatctcaaggcaagtaagatgggcgatttggttaagctattcgaaggaatgaaatactatgtcgaatccaaataa

SEQ ID NO: 39411 - DNA, 1374 bp, Escherichia coli
atgacaaatttttcgggagaacctatttcttcaaaaacagcgaacgccgcttgcggtggcccgcagggcggaggcatggatagccgacgtaatggagtagcggaagtgagtccgaagtatctggcagaagcggcttcgaatgcaattcctgttggttataagcaaactgaagttggagtgattccggaggattggcaagtaattgtttttggagaggtgctatcaattcggcatggaaaaagccaaaagcagattgaatctgaaagtggcttgtatcctattctggctacaggtggacaaattggttggggtaatagctacctatgggataagccttctgttcttattggtagaaaaggaacgataaataagcctcgctattgcgatgagcctttttggacggtagacacacttttttattcagagatatacaatcaagccgacgctaagtttacctattacaagttctgcatgattgattggatgcaatataacgaggcatccggtgttcctagcttaaattcaagtactatcgaaaatgttgcagtagcgtatccacagaaaaaagaacaaaccgccattgccaatgccctatccgatgtcgatgcgctgattagcgagctggaaaaactgatcgccaaaaaacaggccatcaaaaccgccaccatgcaacaactcctcaccggccgcacccgcctgccgcagttcgccctgcgtgaagatggtacgaaaaaaggtacaaagaaaagtgagttgggcgaagtacctgaggattgggagatatacagcttagggcaattgatcaagggaactcagcttggaggtaattataaaaactctgaacaggaaacaggccaacctttgatcaagatgggcaacttgggtcgagggtatatcaagctcgataaattggagtttgtagttggcaaagcaaaggaagtggatcgattagaatttggagaccttcttttcaacactagaaacacacttgatttagtagggaaagtatccgtttggagaaacgagctttcagttgccttcttcaactcgaatttaatgcgaataacttttgaccctgttctaatagggagcaacttttatatgaacgcagtgatgaactctaacgatttcgtaaatgctctgtctgatattgcaatcggaactaccagtgttgcagcaatctattcgagagacttattccagttaaaagtttcattgccaccaaaagaagaacaaaccgccatcgccaccatcctctccgatatggacgaagagattcaggcgctggaacaacgccttggcaaaacccgccaaatcaaacaaggcatgatgcaagaactgctcacgggtaaaacacggctgccaatcacgtaa

SEQ ID NO: 39412 - DNA, 2457 bp, Escherichia coli
atggccattaagaaaaccgaactttactcctccctttgggccagctgcgatgagctgcgtggcggtatggatgccagccagtacaaagactatgtactgaccatgctgtttatgaagtatgtctccgataagtacaaaggcgacccttacggcatgattgtagtgccacaaggtgccagttttgacgatatggttgccttgaaaggcgacaaagaaatcggcgataaaatcaataaaatcatcagcgcgctggccgaagaaaacgacctcaaaggcgtgattgacgttgccgactttaacgacgaagacaagctcggcaaaggcaaagagatgatcgaccgtctgtctaagctgatcggtatctttgaagggctagacctatctgccaaccgcgccgatggcgatgatctactgggtgatgcttacgaatacctaatgcgccactttgctactgaatcgggtaaatctaaagggcagttttataccccagccgaagtctcgcggattatggcgaaaatcattggtattaatgcgcaaacaccacaagacgctacggtctacgaccccacctgtggctcgggctcgctattgttaaaagccagtgatgaagcgccgcgtggcttgagtatttttggccaggagatggacaacgccaccagtgccttggcacgtatgaacatgatcctgcacaacaacgccaccgccaaaatatggaaaggcaacaccattgctgacccgcaatggaaagaggcaaacggccaacttaagacttttgatttcgccgtggccaacccgccgttttccaacaaaaactggaccagcggcattaacccgcaagaggatgaatttggccgtttcagttggggcattccgccggagaaaaacggtgactacgcctttttactgcacatcattaaaagcctaaaaagcaccggtaaaggcgcggttattctgcctcacggcgttttgttccgtggcaacgccgaagcccgtattcgtgaaaacctcatcaagcaaggttacatcaaaggcataatcggtttaccggccaacctgttttacggcaccggcattcctgcctgtattatcgtcatcgacaaagagcacgcgcagcaaagagccctcagcgccactggcgaagccagtgatacagagagtggtatttttatggtcgatgccagcaaaggctttgccaaagacggcaataaaaaccgcctgcgcagccaagatattcataaaatcgtcgatgtttttaccaagcagctagaactgccgcgctactcgcgtatggtgccgctcagtgaaatcgccggtaacgactacaacctcaatattccgcgttatatcgactccagcgaaccggaagacctgcacgatttaagcgcccatctgcaaggcggtattccaaaccgcgatattgatgcgttagaacgttactggcaggtgttccccagtattcgagcgactttgtttgaacatgcccgtgagggttatagcaaagccttggttaaagcctccgaggtgaaaagcaccatcctgaaccatgacgagttcaaaaccttcgccgcacaaagcctagtgccctttacagaatgggcgcagcgttcaaacctccacgccatagcgcaagatgaatcgccaaaacagattatccatcgtatcagcgaagacctgttgcaaagctatgcccaaacgccactgctgagtaaatacgacatctaccagatcctgatggactactgggcggagtcaatgcaagacgatgtgtatgtgctagtgcaagacggctggccagcaggcaacgtgctgcgtgagttggtggtgaataagggcgaaaaactcaaagaaacccctgatttagtgattgccaaagccaaatacaaagccgaactcatccctccggcgttgatcgtcgcgcgcttttttgccgctgaacaagtcaaagtcgatacgctgcaatcgctattggatagcgccagccaagagcttgaaacttaccttgaagaaaactcgggtgaagacggtttactaaacgatgcgctaaacgataaagataaagtcaccaaagccacggtgacagcgcgtttgaaactagccaccgactcagatgaaaaagcggcgctaaaacaagccaaaaaactctttgatgccgagggtgatgccaaaaaagctctaaaagaagcacaagatgcgctcgatttagcggtgtttaagcaataccccaaacttagcatcgaagagatcaaatccctgattgtggacgataaatggctggcaacacttgaaagcaatatcatcgctgaaatcgagcgcgtcacccagcaactggccaatcgcgtcaaagaactggaagagcgttatagcgagccactgccagcccttacccaatcggtagaaaacttgagcgataaagtcgcaggtcacctaaaagccatgggcttggagtggacgttatga

SEQ ID NO: 39413 - DNA, 240 bp, Escherichia coli
atgaacgagcaagaaatttacgcacaaatcaaaaaagctctgcaagaggcacctcgcaatcaatacaccgctgagctgcatctgcaaatgatcaaatatgctgatgagctaaagaacagcacagccaaagagttttgtgaaggggtgggcctgcggagcagctttggcaccgaatttagcaaaatgcgcaatctgactcagcgcttgaaagctgccgggctcgatacagccaagctataa

SEQ ID NO: 39414 - DNA, 1314 bp, Escherichia coli
atgaacttggttgaagtggtttcagagctgtcaggtgatattaaagtattattcgatggtgagtctcataatgcatcggttaaggtgtgttcacgtattgatcaagtatatgatttccatatcttagttgaagggttgccggagtttttggcgttcgagatagttgccgatcactcaagcttcgttgctaggcttgattttgaaagggaagtcgagcttcgagcttataagttaaagggtggtgttctttggtgtaagcctgtaaaggcagagctagagttaattgcagggaattcacccagtattgtcaaagttcatgcaaacttggtgaattttaagtttgaattaagtcaaggcactggtgaaaattactcagttcgtgattctcgaagtgttgctcgttatgggtctactaaattttctctgcgctcggctagcattgaaatccgatgcactgaacagaccaagttagcgcgggaaaagcttaatcaagatggtgggttcgctattactcacaacatagtgattaattttaataacgccaaaggggtgccgattgatgagttaaaacgaatccttttggatattcatcgtgtgttggcatttgcaaacggtgcgtgggtgggtatccatttagttcgaggcttcaacaacgaaatcaatttaagttacctgtcacttaccaactcactatgcagtagacatcaaggccgctttggttggtttgacgcacatcatgggcacgtattggcatcagttgctacaaagttagtcgaagagtttgataactcaaaatcatcagacacttttgatcgagctttatattggtatatccgtgcaaacaactccgctggagtaggtattgatgcgggaattattttagctacaacagcattggaactcttagctaaatttgttaaacaaaagaacgagttaaaagttgaaattactggagataagaaacatcctagtctaggggataaaatccgcgctgcggcgttgcatctcgaaatccccacactgattggagagagtacctgtcctgaattctgggcaataaagaccgatggactgtggtctgacatcccagaagctatagccaaatatcgtaacgacttagtgcaccccaaagcgaggataaaatcacagaaccaacacgcgcttactattgagatgtggcgattatctgtttggtatctggagctctttatgctgcgcttgattggatatcaggatgtctattcaaacaggctaacggctaaatggcttggtgaggtcgagcatgtcccatgggccggtagcaaatcatcctag

SEQ ID NO: 39415 - DNA, 477 bp, Escherichia coli
atggctaagcgtttcagacgtatgtcggatagtgatatcaataccattgttgctgatttagatcgctgggctatgggcgagcttggctccaagttaacttggtctgtgctggaagagcgtttcgggtttagtcggcaatcacttcaagcaaaatcagaaattaaggcagcttatgacaacgcaaagcgagcactgtcgggcggcctggtcaaaacaaaagaacaagcaaccaaagaggccgaagagctacaggtggagctagcacgtcttagaacagaactcgaagcatacaagcaacgtgaagagctttggcggcgccgatggcagcaaattgcctttcatgtgcggcagaaaggtatacagatggctagtgtcgataaagcgccacctgacggcgcagatttgccgtcaaatacggagtcagccaaaatactgaaaatgtttgataaggaaataccgccttcggggcgtatttag

SEQ ID NO: 39416 - DNA, 2010 bp, Escherichia coli
atgtctgatggtcgctcgcaacgcagagccaaagttattccctttattgatcgtttagaacgcgatcggaatgcaaatttacaagccctagtcagcaaagcccagcttttgaagttagatggtttcgagtcggttaaatggcatgaatcgaattggaagataacatctggcagacttgtgaagctgactggaaaaaatatcaaagcagcgtcttttgtctttaccttatcaccaaaattaggcgccgagtctctagtggatagttggagtgaagtgtgtaaggcgttattcgttttaagatttcatagaaaacatcagtcaacgcccaatcagcgtaacttcataacagcagtcggttatgttgccgcggctgcaactcaattgggtcagaaactactcaacctgactcccgaagcacttgataatgcatgcgcgttaatttcaaaacattaccgcgaggcgaccgcatataacctccataaacatattgcagagttcgcagcgcattgcgatgccaacggtttgtgccgggttctgttgcaatttaaatacgcgcgaatgaagcgcccagcgagcacggacggtttaagccacaagcggcttgatgatccagaggttattgagaccaaatcggacaaattggttgatccaaaagtattccgtgtaatgggagagctttatcaaaatgtaccgaaaattcataaataccggctgtatgttttgttattgactttgcttgcgtgcacggggcgacggtttagtgaggtttcacttttaccaaatcaaacactgtctgttgatgacgaagggaacggttatatcgagtacttcccgcgtaaaacaagtcgaggagatgtattcactccgaaacgcaaattgtacctaccatcagaggtgaaacctatcgttgaagaagtgctcaacgaattagcagatctcaccgctgcggctcgcgagacggcagaagagatgcataaaacacgtgggccggatttacgctttttggagcaaattccgagtgaacagcggctctatgctagcgatataaaggaattagggattagtgatacaggattaacgtcaacgggttggcttcgtaaacaaaacctagcttggccagacgtcgatgcgcgaaccaaacaagggcaacgcccacgaaaccccattcatttcacgaataaggaaggtttgaaaaagtactgtgcccgtgatttttcgggtgcctgtctctcggccattcataccgatcaattcggtaaagaatattacctgaaagatttacttttcctccgtccactcggcctttcgagtggcacttatgctcattggcttgcgaccagttgcagccagtcaatgttttcgacattccttcgctatttccctgacctcgcggcggaatatgcatctgctagtgtcgaggtggatttcaccagtcaccattttcgacacacactcaataccttgcttgatgaaggcggtttgagtgatctactgcagacggaatggtttggtaggacgaattcacgagacacaaaagcgtatcagcatacgtcacgagaaaagcgagcgcttatgctgcgccaagacataaagaaaggactcgtcggtgggcaaatagcagagcagattcaagcgattccggttgatgttcaggatgctttcctcaaagcaagggtacaggcggtgcatgatgtaggtactggtatttgtatccataacttctcgcaaacaccttgtgagcgccatttgcaatgctcagcagactgcaaggattatgtgtgggcaaaaggcgacgctggtcgattggaagacctaaaacggcaatatgcactcacggcaattgctcgcaaaaacgccgagcagcaaatgagtagtcaaaagccaaagaaaagtgccgactggcttgcgcacaatgataaaaaacttaaaaccctaaaaaaccaattagcggacaatggggttgagcattttgaccctgagcaatatctaatagaggtgaaacatggctaa

SEQ ID NO: 39417 - DNA, 1599 bp, Escherichia coli
atgaatcagttgcttcaacaagctagagataataatgattctaggctgaatttacctgatactttttttactcgtgagggtgttaaggttgagagtgctggagatgtttgggtgttgcccttgctatatcgacacagtcggctcgacttctctcgcatccaaagcggcactcttaaagctgtagtaaaaagctgtattatcgatcaagcgacgcgagtgtcatcgcacgctggagtgcaatattggagtgatatatctgccgcaattttctcgaaacagaccgattattccctcgtctccgatctttccattgatgatcttgaattacgtttaattgcggtgatggaagccgcaataaatgaagctcgtaaaaggcaccgcctttgggcattgtatagaccaatacagtggtatatttggtgcgcggaaaattacccagaatttgggttttcggagatttatgctcacgagttagaagcgatggaaattccgggaaatccaaaaggggaggcagttagacaagaagatcctgatagaggacctcttcatagaactcttgagcttcaactcataatcaatacgttaaagcaagacaacagtatggagtatgagcacctgcaacagaaggcggctatagctctttcaattgctttcggaagaaatccagctaacctaacttttctaaaagaaacggacttaattaacctgacgcctgattccgattcaccttgctatattttacgaatgcccagaattaaaaagaggcaactagcgccaagagacgatatggtggatgaatatttggaaccggatattgccaaacacctagtggcgcttatcaacgcttcgcaacataaaaagctagtggttgatgctgatggaagtgttagagaaatcgagagacctttgtttattaaaccaaccgaaaattcttatgcattagagtcgaagcgttgggatgacgccttcaatatgatgtcgacaggtatagctaatctcatcagaggctttatcaaacgacacaatctaatttccccacttaccggtgaattgatgcacgttaccccccgaagactgcggtatacgcttgcgacagggttagcagttgagggaattagcaagcgtgagctggcgaggattctcgatcataccgatacccagcatgtgcaggtttattttgaaatggctggcagaattgttgagcaccttgataaggcaaccacaaaagccttgtctaattacctaaactttttcaaaggtaaagtagtcgatagcgatattgaggctgtcaatggtgatcgtgacgacaaatacctaatctttgttgacgaacaaaatccgacggtacagtccgatatcggcgtttgtggagaatctagcgtttgccacctcgacccaccatactcttgctatttatgccctaaatttcagccctatcgacatgccgatcatgagcaggtgttggattgcctattggcgagtcggacagagcgacttgaaaaatacgaaaatgctcgcctagggattcaactcgacgaagtgatatcggcggtagcacaagttgtgaaaatctgcgaagagggccaagagaatgtctga

SEQ ID NO: 39418 - DNA, 1080 bp, Escherichia coli
atgggaagacgaaacttaagcacaaataccctcattagaaaccttcgtgagctgtctgttttgtatcgatggttcaacgttcatcggatcgacatgcactcgagactaaaaaacggtgcgcttttctcggaagctgaatttagaggaagcttgctagagtttttgagaaaagacatggagatcgaaagcaaggttgttgccccgcatacgtttaatagtcgattagccacaatacgccagtatttcgtctgggagattgatgtctatttgtcgtctctaccctcgaatgatagccagtatgactcgatacaagagtctagaaagcgaatcatcgcgtggattgagaaaggttttattaatagtccaaagagtgctggtattagccgaaaagctttgacagaggatgaagccagattcttagttaattgtctcaaccctgagagcgctgactctttcgctttttacgagccgattaagtatcgaaactttgtcgcagtatcattgatgcttaactgtggactccgtccaggggagcttcttagtcttcgggttgaagatattaatattggggcaatttcgtcggtaactattcaacgaagaccacccgatccaaatgacgagagaaggcccagacccagtgttaagcgcagtggtcgagtattgccgcttgagggtagccactttctacggatgttagacagatacattgtcgaaatgagggagagcctagaatctaaatcgagtaaatctagtgattatttgatcttaagtgatgaaggcaacccgttgtcccattcatcactgacacaactttttactcgtctaaggagtgcatatccggactacttgccagaaatactgactccgaaagcattgcggcatacattctcgactcgaatggaaagggcattgcgagaggcaggtcttgaagaggaccgtagaaagcaagctttggcaatgttacgtggcgactcaagtttagagtctcaaacggtttatattgctcaagaaattgaagatcgggctcggcaagcattatctgattaccaaaagaaactgacaatgggaagcgatagatga

SEQ ID NO: 39419 - DNA, 315 bp, Escherichia coli
atgtgcaaactgactaaagaagaagaatacagcatcatcagtcgaacaatgacgaatattcgttcactacgcatgtatgtacgcggagtttattttgagcaattactcgacatgcaggaaaagctcaacgctgttattgaagacgccgtgaagatgctgaacgagaagcggctgaacgtaagaaacaggacactaaataccaacaggcagctaactacattatttctttggggtttgacccggaagtatgactggttccagtttctgctattgcagggacaatggaaaccaaacgaaaacccaaaggtggagtga

SEQ ID NO: 39420 - DNA, 561 bp, Escherichia coli
atgacagagcagaagcgaccggtactgacactgaagcggaagacagagggaacagcgcctgtccgcagccggaaaaccatcatcaatgtcaccacgccaccaaaatggaaggtgaaaaagcagaaactggccgagaaagcggcccgggaagcagagctggcggcaaaaaaagcgcaggccagacaggcgctgtccatttatctgaacctgccctcactggatgaggccgtgaataccctgaagccctggtggccgggattatttgacggtgacacgccccggcttctggcctgcggtatccgggacgtgttactggaagacgtggcgcagcggaatatcccgctctcgcataaaaaactgcgcagggcgctgaaggccatcacccgttcagaaagctatctgtgtgccatgaaagccggtgcctgccggtatgacacggaagggtatgtgacggagcatatttctcaggaggaggaaacgtatgcggcagagcgtctggataaaatccgccgccagaaccggataaaggcagaacttcaggccgtgcttgatgagaaataa

SEQ ID NO: 39421 - DNA, 573 bp, Escherichia coli
atgacaacggataacacgaacacgatacgtaacgattcactggctgcacggaccgatacctggttgcagtcatttctggtctggtcacccggacagcgggatatcatcaaaacggtggcactggtgctgatggtactggaccacatcaatctgatattccagctgaagcaggaatggatgtttctggtcgggcgtggggcctttccgctttttgccctggtgtgggggctgaatctgtcccgtcatgcgcatatccggcaaccggccattaaccggctgtggggatggggaattattgcccagttcgcatattatctggcaggctttccctggtatgaggggaatatcctgtttgcctttgcagtggtggcacaggtgctgacgtggtgtgaaacgcgcagtgggtggcgtacagcagcggccattctcctgatggccctgtgggggcctttgtccggcaccagttacggcattgccgggctgctgatgctggcaccggctgtaccgggcggaagacagagcggaacgtctggcgctggtcgcctgcctgctggctgttattccggcgcttaa

SEQ ID NO: 39422 - DNA, 5271 bp, Escherichia coli
atgatgagtatcgcacaggtcagatcggccggaagtgccggtaactattataccgacaaggataattactatgtactgggcagcatgggagaacgctgggccggcaggggggctgaacagctgggactgcagggcagtgtcgataaggatgtttttacccgtcttctggagggaaggctgccggacggagcggatctaagccgcatgcaggatggcagtaataagcatcgtcccggctacgacctgaccttctccgcccccaaaagtgtctccatgatggccatgttaggtggcgataagcgcctgattgatgcacataaccaggccgtggactttgctgttcgtcaggtggaggcgctggcctccacacgggtgatgacggacggacagtcagaaacggtactgaccggtaatctggtgatggcactgtttaaccacgacaccagtcgcgatcaggaaccacagttacacacgcatgcggtggtagctaatgtcacgcagcataacggtgagtggaagacactgagcagtgacaaagtggggaaaacggggttcattgagaatgtgtacgctaatcagattgcctttggcaggctctaccgggaaaaactgaaagagcaggttgaggcgctgggctatgaaacggaagtggtgggtaagcacggtatgtgggaaatgccgggcgtaccggtggaggccttttccggacgctcacagactatccgggagaccgtcggggaggacgcctcgctgaaatcccgggatgtggcggcgctggatacgcgtaaatccaaacagcacgtcgatcctgaaatcaaaatgaccgagtggatgcagacgctgaaggaaaccgggttcgatatccgggcgtatcgtgacgcagcggaacaacgggcatatacccgcacgcagacacccggaccagcttcacaggacgggccggatgtgcagcaggcggtgacacaggcgattgccggattaagtgaacgcaaagtgcagtttacgtacacggacgtgctggccaggacggtcggcatactgccgccggaagccggtgtgattgagcgggcgcgcgccggtatcgatgaggccatcagccgtgagcaactcatcccccttgaccgtgagaaggggctgttcacatcaggaattcatgtgctcgatgagctgtcagtccgggcactcagtcgtgacatcatgaaacagaaccgggtgaccgtacatccggagaaaagtgtcccccggacggccggttacagcgatgcggtcagtgttctggcacaggatcgcccgtcgctggctattgtgtccgggcagggcggtgcagccgggcagcgtgagcgggtggctgaactggtcatgatggcccgggagcaggggcgggaggtgcagattatcgctgctgaccgtcgctcgcagatgaacctgaagcaggatgaacggctgtccggtgagctgataaccggacgtcgtcagctgctggaaggcatggccttcacgccgggcagtactgttatcgttgaccagggcgaaaaactctccctgaaagagacgttaaccctgctggacggtgccgcacgtcataacgtacaggtcctgataaccgacagcgggcagcgaaccggtacaggcagtgcgctgatggccatgaaggatgccggggtgaacacatatcgctggcaggggggagaacagcgaccggccaccatcatcagtgaaccggaccgtaatgtccgctatgcccggctggccggagattttgcggccagcgtgaaagccggagaagagagcgtggcacaggtcagcggagtacgggaacaggccatactgacacaggccattcgcagtgagctgaaaacacagggcgtgctcggacacccggaggtaaccatgaccgccctgtcaccggtctggctggacagccggagccgttacctgcgggatatgtaccgaccggggatggtgatggagcagtggaacccggagacacgcagtcatgaccgctatgtgatagaccgggtgacggcgcagagtcacagcctgaccctgcgggatgcgcagggtgaaacgcaggtggtgcgtatttcttctctggacagcagctggtcgctgttccggccggaaaaaatgccggtggcagacggcgagcgtctgagggtgacagggaaaattcccggactccgcgtctccggcggtgaccgcctgcaggtgacatccgtcagtgaagatgcgatgacggttgttgtgccgggacgtgctgaaccggccaccctgcctgtgagcgattcaccgttcacggcactgaagctggagaacggctgggtggaaacgcccgggcattccgtcagcgacagtgcgacggtttttgcctccgtcacacagatggcaatggacaatgccaccctgaacggtctggcccgcagtggtcgtgatgtccggctgtattcctcactggatgaaacccgtactgcggaaaaacttgcccgccatccgtcctttacggtggtttctgaacagataaaggcgcgtgccggtgagacatcgctggaaacggctatcagtcatcagaagtccgcacttcacacgccggcacagcaggccattcatctggcccttccggtggtggaaagtaaaaacctggccttcagccatgtggacctgctgacagaggcaaagtcgtttgctgcagaaggaaccagttttactgaactgggacgggaaatcgatgcgcagataaaacggggtgatttactgcatgtggatgtggctaaaggctatggcacagacctgctggtttcccgtgcgtcgtatgaggcagaaaagagcattcttcgccatattctcgagggtaaggaggcggtcacgccgctgatggagagagtacctggcgaactcatggagaaactgacatcaggacagcgtgccgccacccgcatgatactggaaacgtccgaccgtttcacggtggtgcaggggtatgccggggtgggtaagaccacacagttccgggcggtgatgtcagccgtgaacatgctgccggagagtgagcgtccccgtgtcgttgggctggggcccacgcaccgtgcggtcggggagatgcgcagcgccggcgtggatgcacagacactggcgtcctttctgcatgacacgcagctgcagcagcgcagcggagaaacgccggatttcagcaacacgctgttcctgctcgatgagagctcaatggtgggcaataccgacatggcacgggcatacgccctgattgcggccggtggcggtcgtgctgtggccagcggtgacacggaccagctgcaggccatcgcgcccggtcagcctttccgtctccagcagacgcgcagtgctgccgatgtggccatcatgaaggagattgtgcgtcagacgccggaactgcgggaggcggtatacagcctgattaaccgggatgtggaaaaggcactgtccgggcttgagagtgtgaaaccgtctcaggtgccacgtctggagggcgcatgggcaccggagcactccgtgacggagttcagtcacagccaggaagcgaaactggcagaagcgcagcagaaggcgatgctgaaaggcgaggctttcccggatatccccatgacactgtatgaagccattgtccgcgactataccggcaggacaccggaagcacgggagcagacgctgattgtcacgcacctgaatgaggaccggcgcgtactgaacagcatgattcatgatgcacgggaaaaggccggtgagctggggaaagagcaggtcatggtgcctgtcctgaatacagcgaatatacgtgacggggagctgcgtcgtctctccacctgggagacacatcgggacgcacttgccctggtggataatgtgtatcaccggattgccggtatcagcaaggatgacgggctgataaccctgcaggatgcggagggtaacacgcggctgatttcgccccgggaggcggtggctgaaggtgtcacactgtacacaccagacaaaatccgggtggggaccggcgacaggatgcgcttcacgaagagtgaccgggagcgcggttatgtggccaacagcgtctggacggtgacagcggtttccggtgacagtgtcacgctgtcggacggacagcagacccgggtgattcgccccggtcaggagcgggcagagcaacatattgacctggcctatgccatcactgcccacggtgcgcagggggcgagtgaaacctttgccatcgcgcttgaaggcacggaaggtaaccggaaacagatggccggctttgagtcagcctacgtggccctgtcgcgtatgaagcagcatgtgcaggtgtacaccgataaccgtcagggctggacggatgccattaacaatgccgtacagaaaggaactgcccacgatgtgctggagccgaaaccggaccgggaggtcatgaatgcgcagcggctgttcagtacggcacgggaactgcgggacgtggcggcaggccgtgccgttctccgtcaggcggggctggccgggggagacagtcctgcacggtttattgctccgggacgtaaatatccgcaaccgtatgtggcactgccggcttttgaccgtaacggcaggtccgccggtatctggctgaacccgctgaccacggatgacggaaacgggctgcggggattcagcggtgaaggccgtgtgaagggcagcggggatgcgcagttcgtggccctgcagggcagccgtaacggagagagcctgctggctgataatatgcaggatggcgtccggattgcccgtgataatcccgacagtggtgtggtggtaagaatcgccggtgaaggccgtccgtggaatcccggtgccatcaccggtggccgcgtgtggggggatattccggataacagcgtccagccgggagccggaaatggtgaaccggtcacggcagaggtactggcacagcggcaggctgaagaggccatccgccgtgaaacggaacgccgcgcagatgaaattgtcaggaaaatggcagagaacaaacctgacttgccggacggcaaaacagagctggctgtcagggatattgccgggcaggaacgtgaccggactgccacttctgaacgggaaaccgcactgccggagagtgtgctgcgtgaatcacaacgggaacgggaagcggtccgggaggttgcccgggaaaatctgctgcagaggcttctgcagcagatggagcgggatatggttcgtgacctgcagaaagagaaaaccctgggcggagactga

SEQ ID NO: 39423 - DNA, 2154 bp, Escherichia coli
atgagttttaacgcaaaggatatgacccagggcggtcagattgcgtccatgcgtatccgcatgttcagccagatcgccaatatcatgctttactgcctgtttatttttttctggatactcgttggtctggttttatgggtaaaaataagctggcagacgtttgtgaacggctgtatttactggtggtgtaccacgctggaaggcatgcgggatttaatcaagtcccagccggtatatgagatccagtattacggcaaaaccttccggatgaacgctgctcaggtactgcatgataaatatatgatttggtgcggagagcagctatggtccgcattcgttctggccacagttgtggcactggttatttgcctgattaccttctttgttgtctcctggattctggggcgtcagggtaaacaacagagcgaaaatgaagtcacaggtggtcgtcagctgacagacaatccgaaagacgttgcccggatgctgaaaaaagacgacaaggactccgatatccggattggcgacctgccgattatccgggattctgaaatccagaacttctgtctgcacggcacggtcggggccggtaagtcggaagttatccgtcgtctggccaactacgcccgtaagcgcggtgatatggtggtgatttatgaccgttcaggggaatttgttaaaagttactatgatccctccatcgataaaatcctgaatccgctggatgcccgctgtgccgcatgggatttatggaaggagtgtctgacacagccggattttgataatacggcaaataccctgatcccgatgggcacaaaagaggacccgttctggcagggttcaggacgtaccatttttgcggaagcggcgtacctgatgcgtaatgaccccaaccgcagctacagcaaactggtggacactctgctttccatcaaaatcgaaaaactgcgtaccttcctgcgtaattcaccggcggccaacctggtggaagagaaaatcgagaaaacggcgatttccatccgtgctgtgctgaccaactacgtgaaagccatccgttacctgcaggggattgagcataacggtgagcccttcaccatccgtgactggatgcgtggtgtccgggaagatcagaaaaacggctggctgtttatctcatcgaacgccgacacccatgcctccctgaagccggtgatctccatgtggctgtccattgccattcgtggtctgctggcaatgggagaaaaccgtaaccgtcgtgtgtggtttttctgtgacgagttacccacgttacacaaactgcctgacctggtggagatcctgccggaagcccgtaagttcggtggctgttatgtgtttggtatccagtcctatgcccagctggaagatatctacggtgagaaagcggctgccacgttgtttgacgtcatgaacacccgtgcctttttccgttctcccagccataagattgcagagttcgctgccggtgagattggtgagaaagagcacctgaaagccagcgagcagtattcctacggtgctgatccggtacgtgacggggtatcgaccggtaaggatatggagcgccagacgctggtcagttattccgacattcagtctctgccggatctgacctgttatgtcaccctgcccggaccgtatccggcagtaaaactctctctgaaatatcagacacgaccgaaggtcgctccggagtttattccgcgtgacatcaacccggaaatggagaaccgcctgagtgccgtacttgccgcaagggaagcagaaggtcgtcagatagccagcctcttcgaaccggatgtcccggaggttgtttccggagaagacgtgactcaggctgaacagccgcaacagccggtgtctcctgccatcaacgataagaagtcagattcaggtgtgaatgttccggcaggggggatcgagcaggagctgaaaatgaaaccggaagaagagatggaacagcaactgccacccgggatcagtgaatccggtgaagtggtagatatggccgcttatgaggcatggcaacaggaaaatcatccggacacccagcagcagatgcagcgtcgtgaagaggtgaacattaatgtgcaccgggagcgcggggaggatgttgagccgggagatgatttctga

SEQ ID NO: 39424 - DNA, 732 bp, Escherichia coli
atgaaaacaaaaaaattgatgatggttgcactggtcagttccactctggccctttcagggtgtggtgcgatgagcacagcaatcaagaagcgtaaccttgaggtgaagactcagatgagtgagaccatctggcttgaacccgccagcgaacgcacggtatttctgcagatcaaaaacacgtctgataaagacatgagtgggctgcagggcaaaattgctgatgctgtgaaagcaaaagggtatcaggtggtgacttctccggataaagcctactactggattcaggcgaatgtgctgaaggccgataagatggatctgcgggagtctcagggatggctgaaccgtggttatgaaggcgcagcagttggtgcagcgttaggtgccggtatcaccggatataattccagttctgccggtgccacactcggtgtgggccttgctgccggtctggtgggtatggctgcagatgcgatggtggaagatgtgaactataccatgatcacggatgtgcagattgcagagcgtactaaggcaacggtgacaacggataatgttgccgccctgcgtcagggcacatcaggtgcgaaaattcagaccagtactgaaacaggtaaccagcataaataccagacccgtgtggtctcaaatgcgaacaaggttaacctgaaatttgaagaggcgaagcctgttctcgaagaccagctggccaaatcaatcgcaaatattctctga

SEQ ID NO: 39425 - DNA, 510 bp, Escherichia coli
atgatcactcactatgatataaaaatggagatgcaaaaactaaaggaggtactctctgtagagggtgttaatatcccatcattattacaagtcataaagccgggaacttatgtgtttttatgggttttattatggccaacttttctgcgtttagtatcggttaaaagtgatgtcagggatgttggctttgatatatgtgctagtggaatgatggggttcctgctttttgtggctattacaaatgaaatgatgttataccttgcgattcctgatagtttcagaaaggattcaaaaataataaattttatgtattctaagagtaagacatatattttgttgtttttgattgttttttctatggtttcgtttatgcattctatcttatatgtttttgcactaatgattacattcatattatttttcttggtgtataccatagatataaatcgttataatctctcagcaatagtctcagtaataggactgttcaaaaaagagtctgttagttaa

SEQ ID NO: 39426 - DNA, 2826 bp, Escherichia coli
gtgaatgaagtttatgtgattgccggtggtgaatggttgcggaataacctgaacgccattgccgcctttatgggaaccaggacgtgggattccattgaaaaaattgctctcaccctgtctgttgttgcggtggcctttatgtgggtacagcgccataacgtgatggatttgctgggctgggcggcggtgtttgtacttatcagcctgctggttaatatccgtacgtcggtgcagattattgataacagtgacctggtcaaagtccatcgggtggataatgtgccggtcggactggcgatgccactttcactgacgacccgtatcgggcatgcaatggtggccagttacgagatgatctacacgcaaccggacagtttcacctacagcaaaacggggatgctgtttggcgcagaactggtatcaaaaagcaccgactttttgtcccgcaatccggaaatcgccaatctttttcaggattatgtgcagaactgtgtgatgggggatatttacctgaaccacaaatacacgctggaggagctgatggcctccaatgatccctacacgctgattttttcccgccccagtccgctgcggggcgtttatgacagcaataataatttcgtgacctgtaaggacgcgtcggtttcgctgaaagacaagctgaatctggacacacagagtggcggaaaaacctggcattattatgcccagcagttatttggtggtcgccctgatccgaacctgttgttcagtacgctgattggcgacagttaccgttacttctatgactcaagtaaatcagccagccagatcatccgccagaatgtcaccattaatgcgctgaaggaggggatcaccagttatgcagcacgtaatggtgactcagccagcctggtgaatctggctaccacgtcatcgatggagaagcaacgtctggcacatgtttccatcggtcatgtggcgatgcggacactgcccatgacgcagaccatcctgacggggatcgccatcggtattttcccgctcctggtactggcggctgtcttcaacaaactgacgctgtctgtcctgaaaggctatgtgtttgccctgatgtggttgcagtcatggccaatgttgtacgccattctgaacagcgccatgacattttatgcgaagcagaatggtgcaccggtggtgctctcggaaatttcacagatacagctgaaatactccgatctggcttccactgccgggtatctttccatgatgatcccgccattatcctggatgatggtcaggggactcggggccggattttccagtgtgtacagccatttcgcttcctctgctatcagcccgaccgccagtgcggcaggcagtgtggttgacggtaattactcctacggcaacatgcagacggaaaacgtgaacggcttcagctggagcaccaacagcaccacgtcgtttggtcagatgatgtaccagaccggcagtggtgcaaccaccacacagacccgtgacggtaatatggtgatggatgcaagcggagcgatgtcccggttaccggttggtatcaatgcaacgcgtcagattgcagcggcacaacaggaaatggcccgggaggcatcgaacagagcagaaagcgccctgcatgggttcagcagcagtattgtcagtgcctggaactcgctcagtcagtttggttctaaccgggggagcagtgattctgtcacaggtggtgctgacagcacgatgagcgcacaggattccatgatggccagccgtatgcgcagtgcagtggaaagctatgcgaaggcgcataatatcagtaatgagcaggcgactcaggaactggcatcaacaagtaccaggctatctggtggaatgtatgctgatgctcatgctgaatggggggttaaacctaaaattcttggtgttggtggtggggtaggcatcagaggtggatttaaggggagcttggatgcaacggatgatgactcacattcagcaagtagtggcagcagggctacccatgatgctcgccatgatatcgatgccagagctacacaagactttaaagaggccagcgattactttaccagtcgcaaagtcagtgaatccggcagccatactgacaataatgctgattcccgtgtggaccagctgtctgcagccctgaattcagcgaaacagagttacgatcagtacacgacgaatatgacccgcagccatgaatatgctgaaatggcatcccgtactgaaagcatgagtgggcagatgagtgaagatctgtcgcaacagtttgcacagtatgtgatgaaacacgcaccgcaggatgccgaagctattctgacaaacaccagttcaccggagattgcagaacgccgtcgggcgatggcatggtcttttgttcaggaacaggtgcagcctggtgttgataatgcctggcgtgaatcccgtggggatattggtaaaggaatggagagcgtaccttcgggtggtggcagccaggatattattgctgaccatcaggggcatcaggccattattgatcaaagaacgcaggacagtaatatccgtaatgatgtaaaacatcaggttgataatatggtcacagaatataaagggaatatcggagatactcagaatagtattcatggcgaagaaaatattgtagacagacaatattcagagttaaaaaataatcacaaacagaaagaaattcaacaaaacaacagatataatgaagaaaataaacgacagaaattaataccaacaccgtctgaagatgcgttaaaacagatggtggatgataagaaagaacgattgaaggggccattatga

SEQ ID NO: 39427 - DNA, 1374 bp, Escherichia coli; identical to SEQ ID NO: 38626

SEQ ID NO: 39428 - DNA, 393 bp, Escherichia coli
atgacaaaaaacaaaaagaatcaggaattcaaaatcagaaaaattagacggaatattgagtatagtttcagaggttctgacagatatttttatttgtttattgttttccttgttgccggaattgttttatgggctgttatgcacgttattttcgatgtctgtattgattcgtggatggccgacccgaaattacttaatttccagtatatgtggaatgttctgatgaaagtcattccgtttacgttatgggcgctggcagcagggtttcttgttacattttttctgtccccaatgtgcgaattaatattcggaaatatcatgatattcctgctgaaacgccgtatgcgccgggagaacacattaagggagggcaagaatgatgccacgcattaa

SEQ ID NO: 39429 - DNA, 315 bp, Escherichia coli
gtgcgaaataagcaggtggtgttactcattgccggaatatccggcatcgcgacgggaataatcgtcagcctgaatattccctttatccgtcaggggcttttttatcccgccagtcctgtagaaatagtcgtttcgctgtgtcttaccttttctgtttctgttgtgttttttgtgggggcaattgtgggatggatttcggtgcctgaaatatattacagccgcatgaccggtctgaatgaatcatcagtaatatcagaggaaacttataatgacaaaaaacaaaaagaatcaggaattcaaaatcagaaaaattag

SEQ ID NO: 39430 - DNA, 285 bp, Escherichia coli
atgataagtaaacgcagattctctttaccccggcttgatattacgggaatgtgggtattttccctgggcgtctggtttcatatcgtcgcccgtcttgttcacagcaaaccctggatggctttttttctggcggagctgattgcggccatccttgtgctgttcggcgcataccaggtgctggatgcatggattgcccgtgtcagccgggaagagcgtgaggcactggaagccaggcaacaggccatgatggcagagcagcaggagggcggacatgtctctcactaa

SEQ ID NO: 39431 - DNA, 336 bp, Escherichia coli
atggaaaagcgatcttttaaagaaaaactggaaatagtgagaaacatcataagagagtcattatcaggtaatgcagcttttgctttactggtgtattcattattgcacactctccccattaaaacctttgctgatttatttgtgacgatactgttatttatagcaattatcgctgttgtgatatggctatttctaatcatctatgtttatttttgtgatttattcagaagtcactggatagcagtctggtttatcctctggtctgtggtaatcaacctcactattggatttggcatttatgacaaattagcaccagtcatttcactaatgaaataa

SEQ ID NO: 39432 - DNA, 342 bp, Escherichia coli
atgcatacaggggatttgtgtttttttacaggtgccagcctgtttatcgtgggggttgttggttatttctttacaggactaaataataaaggagtttatctactgagctcgtttgtcttctttgtagtaaatgtcataagtgtatgtatgctgccagataatttcttgtttctttgtggtgcggttatgaatcagtgtgccgtaccggttgtttcaatggcagtcagcaccatgccgattatcacgaagtttgacagtttcagaaggatgtttatttgtattatgttgtcagccatatggtctggagtgatgtggttttttattatttcattagtgaaatga

SEQ ID NO: 39433 - DNA, 258 bp, Escherichia coli
atgaaagtcatattcacgtcgaaccgttttattgattttcttatccggcttttgattacagcgattgtcatttctccggtaattatctggtcgtgggatacggtaaaagaaaccacggcagacgggatgcttgccgctgctttcgttatcctttactccggtgtgctcctgtttattctgtatttttgtttttctgccctgactgacctgcagaaacctgatgaaagaaaaagtgatgaaaggaatgaagatgaataa

SEQ ID NO: 39434 - DNA, 1809 bp, Escherichia coli
atgaaacgtattttacctctgatactggctctggttgccggcatggcacaggctgacagcaacagtgattaccgggccggctctgattttgctcaccagatcaaagggcagggaagcagcagtattcagggctttaagccacaggagagtatccccggctataacgcgaatccggacgagacaaaatattacggtggcgtgactgccggcggggatggcggcctgaaaaatgacggcaccacggaatgggcgaccggtgaaaccggaaaaaccatcacagagtcattcatgaacaagccgaaagacattctttcaccggatgcaccgtttatccagaccggcagggatgtggtgaaccgggctgacagcattgtgggaaacaccgggcagcagtgcagtgcgcaggagattagccggagtgaatacacgaattacacctgtgagagggatttacaggtggagcagtactgcacacgaactgcccgtatggagctgcaggggagtaccacatgggaaacccggacgctggagtatgaaatgagtcagctacctgcacgtgaagtgaatggtcagtatgttgtctccattacctctcccgttaccggtgaaattgtcgatgcgcattacagctggagtcgtacttacctgcagaagagtgtacctatgacaattacagtactgggaaccccactgagctggaatgccaaatactcagcagatgcctcatttacaccagtacagaaaacactgactgccggtgttgcttttacgtcatctcaccccgtccgggtcgggaatacaaaattcaaacgtcatacggcaatgaagctgcgtctggttgtcagggtaaaaaaagcctcgtacaccccgtatgttgtctggtctgaaagctgcccgttcagcaaggagctggggaaactgacaaaaacagaatgtacggaggctggcgggaacaggacgctggtgaaagacggtcagtcatacagcatgtaccagagctgctgggcataccgggacacgtatgtcacgcagtcagcagacaagggaacctgtcagacctacaccgacaatcctgcctgtaccctggtgtcacaccagtgtgccttttactccgaagaaggtgcctgtctgcatgaatatgccacgtactcctgtgagtcaaaaacatccgggaaagtgatggtctgtgggggagacgtcttctgtctcgatggcgaatgcgataaggctcagagcgggcagagtaatgattttgccgaagccgtttctcagctggcggcactggccgcagcaggtaaggatgttgcggcgctgaacggggtggatgtccgtgctttcaccggtcaggcgaaattttgtaagaaggctgcagccggatacagcaactgctgtaaggacagcggctggggacaggatatcgggctggccaaatgcagcagtgatgaaaaggccctggctaaagcaaaatcaaacaaactgaccgtcagcgtcggggagttctgttcgaagaaagtgctgggtgtctgtctggagaaaaaacgcagctactgtcagtttgattcgaagctggcgcagatagtccagcagcaggggcgcaacggtcagttgcgtatcagttttggtagtgcgaagcatcctgactgtcgggggattacggttgatgagctgcagaaaattcagttcaacagactggatttcactaacttctacgaagacctgatgaataaccagaaaatcccggacagtggcgttctgacgcagaaagtgaaagagcagatttctgaccagctgaaacaggcaggacagtaa

SEQ ID NO: 39435 - DNA, 639 bp, Escherichia coli
atgaagctgagtatgaaatctctggcagcactgctgatgatgctgaacggggcggttatggcgtcagaaaacgtgaacactcctgaaaaccgccagttcctgaagcagcaggaaaatttaagcagacaactgcgtgaaaaacctgaccatcagctgaaagcctgggcggagaagcaggtgctggaaaccccccttcagcgttcagataaccatttcctggatgagctggttcgtaaacagcaggcttcgcaggacgggaaaccccggcagggtgccctgtattttgtgtcgttttccattcccgaagaggggctgaaacgaatgctgggcgaaacccggcactacggtatacccgccacactgcggggcatggtgaacaatgacctgaagaccaccgctgaagccgtgctgtccctggtgaaagacggcgcgactgatggtgttcagatcgacccgacgctgttttcacagtacggcattcgcagtgtaccggcactggtggtgttctgcagtcagggatacgacatcatccggggaaacctgcgggtcggccaggcgctggagaaagtggccgccacgggtgactgccggcaggtggctcatgatttactggcagggaaaggagattccgggaaatga

SEQ ID NO: 39436 - DNA, 633 bp, Escherichia coli
atgagatgccgggggctgattgccctgctgatatgggggcagagtgtggccgccgccgatcttggtacctggggcgatctgtggccggtaaaggagccggacatgctgacggtgatcatgcagcgcctgacggcactggagcagtccggtgagatgggccggaaaatggatgcctttaaggagcgggtgatccgcaacagtctgcggccccctgccgtgcccggtatcggacgcacggagaaatacggcagccggttgtttgacccgtccgtcagactggctgcggatatccgggataacgaagggcgggtgtttgcccgtcagggtgaagtgatgaatccgctgcagtatgttccttttaaccagacgctgtatttcatcaatggcgatgatccggcgcaggtggcctggatgaaacgccagacgccgcccacactggagagcaaaattatcctcgtgcagggcagtatcccggagatgcagaagtctctggacagccgtgtttactttgaccagaacggtgtgctctgccagcgcctcggcattgatcaggtcccggcacgggtgagcgccgttcccggcgatcgcttcctgaaggtggaatttattccggcagaggagggcagaaaatga

SEQ ID NO: 39437 - DNA, 387 bp, Escherichia coli
atgaccacaacgcaaaaaacgactgacgttacagcccgtcgacgcagccactggtggtggacggtgccgggatgcctggcaatggtgttactgaacgcagccatcagttacggcattgtcagactgaacgcaccggtgactgccgccttcaacatgaaacagaccgtggatgcgttttttgacagcgccagtcagaaacaactgtcagaagcacagtcaaaagccctttcagcgcgttttaacacggcactggaagccagcctgcaggcatggcagcagaaacaccacgcggtcattctggtgtcgcctgccgtggtacagggggctccggatatcacccgggaaatccagcaggatatcgcccggcgaatgagggcggagccatga

SEQ ID NO: 39438 - DNA, 2628 bp, Escherichia coli
gtgaataacccacttgaggccgtcactcaggcggttaactccctcgtcacagcactgaaactgcctgacgaatccgcaaaggccaatgaagttctgggcgaaatgagcttcccgcagttcagccgtctgctgccgtaccgtgattacaaccaggaatccggtctgttcatgaatgacaccacgatgggctttatgctggaagccatccccatcaatggggcgaatgagtccattgtggaggccctcgatcacatgctgcgcaccaaactgccgcgcggtattccgttgtgtatccatctgatgtccagtcagctggttggtgacaggattgaatacgggctgcgtgagttctcctggtcaggtgaacaggctgaacggtttaacgccattacccgggcctattatatgaaagcggcagcgacacagtttccgctgccggaggggatgaatctgcccctgaccctgcgccattaccgggtgtttatctcgtactgttcttcttcgaagaaaaaaagccgggccgacattctggaaatggaaaacctggtgaaaatcatccgggcgtcgttacagggggccagtatcaccacacagacggtggatgcacaggcctttatcgatattgtcggggagatgattaaccataacccggactccctgtacccgaaaagacgtcagctggacccgtattctgatctgaattatcagtgtgtggaggacagttttgatctgaaagtccgggctgattacctgacgctgggcctgcgtgagaacggcaggaacagcacggcccgcatcctgaatttccatctggcccgtaacccggaaatcgccttcctgtggaacatggccgacaactacagcaacctgctgaacccggaactgtccatctcctgtccgttcatcctgacgctgactctggtggtggaagaccaggtgaaaacccacagtgaagccaacctgaagtacatggacctggagaaaaagtcgaagacctcctatgccaaatggtttccgtctgtggagaaagaggcgaaggagtggggggaactgcgtcagcggctgggctccggtcagtcctccgtggtgtcctacttcctcaacatcacagccttctgcaaggacaataatgaaacggcactggaagtagagcaggacatcctgaacagcttccgtaaaaacggttttgagctgatttcaccgcgctttaaccacatgcgcaatttcctgacctgtctgccctttatggccgggaaagggttgtttaaacagctgaaagaggccggagtggtacagcgcgcagagagctttaatgtggccaacctgatgccgttagtggcggataaccccctgacaccggcaggtctgctggcacccacctaccgtaaccagctggcgtttatcgatattttcttccgggggatgaataacaccaactataacatggcggtctgtggcacctccggggccggtaaaaccgggctgatacagccacttatccgcagcgtgctggactccgggggctttgccgtggtgttcgacatgggggatggctacaagtccctgtgtgagaacatggggggcgtatatctggacggtgaaaccctgcgctttaacccgtttgcgaacatcaccgatattgaccagtcagcggagcgtgtccgcgaccagctgtcggtgatggccagccccaacggtaacctggatgaagtgcatgaaggtctgctgctgcaggccgtcagggcatcatggctggccaaagagaacagagcacgtattgatgacgtggtggatttcctgaaaaacgccagtgacagcgagcagtatgccgagtcaccgactatccgcagccgtctggacgaaatgattgtgctgcttgaccagtacactgccaacggcacttacggccagtattttaactctgatgagccgtccctgcgggatgacgcaaaaatggtggtgctggagctgggcggactggaagaccgtccgtcactgctggttgcggtgatgttcagccttatcatttacatcgagaacaggatgtaccgcacgccgcgtaatctcaaaaaactgaacgttattgatgaaggctggcgtctgctggacttcaaaaatcacaaggtcggtgaatttattgagaaaggttaccgtaccgcccgccgtcataccggtgcctatatcaccatcacacagaacatcgtcgactttgactctgacaaggcttccagtgctgcccgcgcggcatggggtaactcctcctacaaaattatcctcaaacagagtgcgaaggagttcgcgaaatacaaccagctgtatccggaccagttccagccactgcagcgtgacatgattggtaagtttggtgcggccaaagaccagtggttcagttccttcctgctgcaggtggaaaaccattcctcctggcatcgtctgtttgtggacccgttaagccgcgccatgtacagctctgacggcccggattttgagtttgtgcagcagaaacgtaaagaggggctgagtattcatgaggcggtgtggcagctggcgtggaagaagtcagggccggagatggcttcgctggaagcctggctggaagaacatgagaaatacaggagtgttgcatga

SEQ ID NO: 39439 - DNA, 516 bp, Escherichia coli; identical to SEQ ID NO: 7946

SEQ ID NO: 39440 - DNA, 252 bp, Escherichia coli; identical to SEQ ID NO: 5331

SEQ ID NO: 39441 - DNA, 162 bp, Escherichia coli
atggctgctgtcagtgtgatgaagaagggtatgtcgatgagtttattttcttctccggggcatattgtggttgccggacaatccggtggcggaaaatctgttccggtgaaagaactaatcgacagaattattcagaaatataaggagcccttcgatgaataa

SEQ ID NO: 39442 - DNA, 138 bp, Escherichia coli; identical to SEQ ID NO: 20576

SEQ ID NO: 39443 - DNA, 1428 bp, Escherichia coli
atggccagtatcaataccattgtgaaacgcaagcagtacctgtggctggggattgtggttgtcggtacagcctccgcgattggtggggcactgtatctgtctgatgtggacatgtccggtaacggtgaaaccgtggctgaacaggagcctgtgccggatatgaccggtgtggtggatacgacctttgatgacaaggtgcgtcagcatgccaccaccgagatgcaggtgacggcagcgcagatgcagaagcagtatgaggaaatccgtcgtgagctggatgttctgaacaaacagcgcggtgatgaccagcgtcgtattgaaaagttgggacaggacaatgccgccctggcagagcaggtaaaagccctgggtgctaatcccgtcacggcgaccggtgagcctgtaccgcagatgcctgcctcaccgcccggcccggaaggcgaaccacagctaggaaacacccccgtatccttcccgccgcagggcagcgttgctgttccaccgccgacggcgttttatcccgggaatggtgtcacgccaccaccacaggtgacgtaccagtctgtgccggtgcctaaccggatacagcgtaaggtgtttacccgtaatgagggaaaacagggaccatcactgccgtacattccgtcaggaagttttgcgaaagccatgctgattgaaggggcggatgccaatgcctctgtcaccggtaatgaatccacggtgccgatgcagctgcgtatcaccggcctggtggaaatgccgaacagcaagacgtatgacgcaacgggatgttttgtgggtctggaagcctggggggatgtgtccagtgagcgtgccattgtacgcacccgcaatatcagttgcctgaaggacggcaaaactattgatatgccgattaaggggcatgtcagcttccggggtaaaaacggtatcaagggcgaagtggtgatgcgtaacggcaaaatcctcggctgggcatggggcgcgggatttgttgacggtatcggtcagggaatggagcgcgcctcccagccggctgtcgggctgggtgccacagccgcttacggggctggtgatgtcctgaaaatgggtatcggtggcggcgcatcgaaagccgcacagacgctcagtgactactacatcaaacgtgccgaacagtatcacccggtgataccgattggtgcgggcaacgaagtgaccgtggtgttccaggacggcttccagctgaaaaccgtggaagagatggcgctggaacgcacgcagagcagagcggaagaagacaatccggaaagtccggttcctgttccgtcatcggctgaaagtcatcttaacggctttaatactgaccagatgctgaagcagctgggcaacctgaatccgcagcagtttatgtccggcagccagggagggggcaacgatggcaaataa

SEQ ID NO: 39444 - DNA, 729 bp, Escherichia coli
atgagaaaaaataatacagcaataatattaggcggcctgtttttttcctgcagcgtgatggccggagtcggtacgctggcccccaccgtggtgccaatggtgaacggtggtcaggccagtattgccatcagcaataccagcccgaatctgtttaccgttcccggtgaccggattatcgccgtgaacagtctggatggtgccctgaccaataatgagcagaccgcctccggcggtgtggtggtggccaccgtcaacaaaaagccctttacgttcattctggaaacagaacgtggtctgaatctttccattcaggccgttccccgtgaaggcgcggggcgtaccattcagctggtcagtgacctgcgcggaaccggagaagaagccggtgcgtgggaaacgtccacgccttacgaatccctgcttgtgaccatcagccaggccgtccgtggcggaaaattacccgcaggctggtatcaggtcccggtgacaaaggaaaccctgcaggccccggcggggctgtcttcagtggcagatgccgtatggacggggaatcacctgaagatggtccgctttgccgtggaaaataaaacgctgtctgccctgaatatccgggaaagtgacttctggcagccgggaacccgtgccgtgatgttcagccagcctgccagccagttactggcaggtgcgcgcatggatgtgtatgtcatccgtgacggggagggcaactga

SEQ ID NO: 39445 - DNA, 567 bp, Escherichia coli
atggaacacggtgcccgtttaagtaccagtcgtgtaatggccatcgcctttatatttatgtcagtgcttattgttctcagcctctctgttaacgtcattcagggggtgaataactaccgtcttcagaatgagcaacgcactgccgtgacgccaatggcatttaatgccccctttgccgtgtcacagaacagtgccgacgcctcttatttacagcagatggcgctgtcatttattgccctccgtctgaatgtttcatcagaaaccgccgatgcctcacatcaggcgcttctgcaatatatccgcccgggcgcacagaaccagatgaaagttattctggctgaagaagcgaagcgtattaaaaacgataacgtgaactcagcctttttccagaccagtgttcgtgtctggcctcagtatggccgtgtggaaattcgtggtgtgcttaaaacctggattggtgattcaaaacctttcactgatatcaaacattacatccttattctgaagcgggaaaacggggtgacctggctggataatttcggggaaacagacgatgagaaaaaataa

SEQ ID NO: 39446 - DNA, 366 bp, Escherichia coli
atggacgccgttttaagtgttcagggtgtttctgcgcccgtcaaaaagaagtcgtttttttctaaattcactcgtctgaatatgcttcgcctggctcgcgctgtgatcccggctgctgttctgatgatgttcttcccgcagctggcgatggccgccggcagcagtggtcaggacctgatggcaagtggtaacaccacggttaaggcgaccttcggtaaggactccagtgttgttaaatgggttgttctggctgaagttctggtcggtgcggtcatgtacatgatgaccaaaaacgtcaagttcctggccggttttgccatcatctctgtatttattgctgtgggtatggccgtcgttggcctctga

SEQ ID NO: 39447 - DNA, 216 bp, Escherichia coli
gtgagcagagggagaaccagagccgcaccgggtaacaaagtcttattaatactggatgagacaactaatcagaaacttttagcagctagagatcgtagcggaagaacaaaaactaatgaggtgttcattagactaaaagatcatctcaatcgttttccagacttttataatgcatctttagtaaaggaggaagctgaaagcatagacgatatataa

SEQ ID NO: 39448 - DNA, 648 bp, Escherichia coli
atgtgtgcgatggatcgtagagaaagagcactcatcagtcaattgcatttccctcatagtcttggagaggctatttcgtttttaaaatatccagtatgtgtccgcttcgaggatggttcttttattcaggaaaataaccgctttgaaaaacttatcagatcgtcatttaattcatgtgatgaatggtttgatagtttaacgttggaatgtaaattacagttatccagagcagagattgaatcatgctcttcagtttatggtgtaaattgtaataatgacatattacttaataatatgttatggagtgtgatcatagaaagtgttatcacaccatgcggctatttctttatctggagatttatttgggtagcaaatgataatctgtcatcgtttgttgtgtctaaatacaccaatgaattaattatactatctgatgaatatgtaggcattgagccatatctgatagggtttagccatcattattcatcagcaaagatgaacatcactgtgtctaaatcaaagaagaaaaccatgaaattatttaaacgacatggatttagttctagagatctctggttggatgaaatgattagaacggaaaagatacttcctttatatgctaaagtaaaagaaatattgggaagatag

SEQ ID NO: 39449 - DNA, 384 bp, Escherichia coli
atggccaaaattcaggtttatgttaatgaccatgtgtctgaaaaaataaatgctattgctgtgcaaaggcgagcagagggagcaaaagagaaagatgttagttattcaagtattgcctctatgttgcttgagttaggattgcgagtttatgaagcgcagatggaacgaaaagaatcagcgtttaatcaggcagagtttaataaacttcttcttgagtgtgttgtaaaaacgcagtcaacggtggcaaagattttaggtattgagtctcttagccctcatgtttccggaaaaccgaagtttgaatatgccaatatggttgaagatatcagagagaaggtgtcggttgagatggaaaggttctttccaaaaaatgatgatgaataa

SEQ ID NO: 39450 - DNA, 288 bp, Escherichia coli
atgagtacccgaaatatccacgttaacaccgcgtcgtacacgcttcttgttgccgggaagaaaaaaaacaccggggaagagtgggacgtcctggaattcagcagcctgactgagctgaaaaaatatcgcaaaagccacccggaaaagatggccttcagctatagctacgcgctcagccggggtgtggatacgcagttccgccatatcaacattgcggaagccgatcacttcaaacagttcctgcgtcagattaagcgtgccggcctcgatatccgggagatctgctga

SEQ ID NO: 39451 - DNA, 1362 bp, Escherichia coli
atgacattagcagcaatcaccatgaccgccccggaagccgccagccctgtgcagatgtaccgcgcgacctactcaccggatgacaacaaactgcgcctgtatgctgcgtcacgtcttgacccggagacgtataaaaaagtgcatgatgccggttttcgctgggcaccaaaacaggcgctgtttgtggctccagcctggacaccgggccgggaagacgtgctcctctcacttgccggagagattgaggatgaagacagcacgctcgctgaacgtcaggaagcacgggcggagcggtttaccggatacagcggaaagcgggccagtgaatccgcacaggcacttgatgaagtggaaagactggccgcgatgatcccgcccggtcagcccattcttgtggagcatcacagcgaacgccgcgcccgtcgtgatgcgcagcgtattgaaaacggcatgaaacgtgccgtgatgctcgttgaacgtgcggaatactgggaagagcgggcgcggtcggcactgcttcacgcgaagtataaagaacgtccggacgttcgctggcgtcgtatcaaaaaaatcgaagctgatttgcgcaaggctgaaaagaccatcgcgcagtcgcagaaatatctgacgatatggcgggctgaatcgctggatctgaatatggcaaaactcatcagtagtcatgaccgtatcagtgcctgtttcccgctggatacgtatccgcgcccggcagaaaaaagccagtatgaaggaagtcgatcgttatggtcggccctggatgatgacatcatcaccacggagcaggcccgcgaaattgcgatccgctgtcataaacggcagattcagcatcagcaacgctgggttaaccactatcagaaccgcctgatctatgagcgtgccatgctggacgaaagcggcggcgtggttacccggacacaggattttgagccgggcggacaggttttcagccggggcgagtggctgaccatcatccgcgtgaacaaaagcaacgggacggtgagttcagtcacaacgccgaattacagttttctcgggtacagtggcacgatgaaagtgacgcccgatcgcattacggactacaaagcaccatcggcagaagaggctgccgtcgccagtcaggccgctaagcgtccgcctgttgtcaactatccgggagaaggtttccgggaaatgacaaaggcacagtgggctgccctgccccgggactgtaaggccgtgcgcagtgtggcagaggcagaagaccacggggcatatcgttaccgccgcacaatggacaataatttccgcctggtgaatgtgtatatcaccgacatgaagattacggaaatcccacagaaataa

SEQ ID NO: 39452 - DNA, 231 bp, Escherichia coli; identical to SEQ ID NO: 19231

SEQ ID NO: 39453 - DNA, 183 bp, Escherichia coli; identical to SEQ ID NO: 5345

SEQ ID NO: 39454 - DNA, 372 bp, Escherichia coli; identical to SEQ ID NO: 5344

SEQ ID NO: 39455 - DNA, 426 bp, Escherichia coli
atgcagtatgcgaaacctgtcactctgaatgttgaagagtgcgaccgtctgtcttttctgccttacctatttggcaacgattttctgtatgccgaagcatatgtgtacgcgctggcgcaaaaaatgatgccggaatatcagggaggcttctggcacttcatccgcctgctggacggtggcggttacatgatgccggatggcgaccgttttcatctggttaacggtgaaaactggtttgaccgcacggtcagtgccgatgccgcaggcatcattctgacttcccttgtgattaaccgccagttgtggctgtaccacgacagcggtaacgcagggctgacacacctgtaccggatgcgtgatgcgcagttgtggagccacatcgaatttcaccccgaatgtaacgcgatttacgcggcgctggactga

SEQ ID NO: 39456 - DNA, 972 bp, Escherichia coli
atgagtcaaccaaatctgcaatgcatgggtattgatgttgccaaactatcgctggacatcgccaccaccgacacgattgagccattcactgtgggtaacgatgaggatggtttcgctgttatcacagataaactgaagcacaccaaaattaacctgattctcatggaagctaccggtggccttgaagcagccattgcctgtaagcttcagtcagaaggatacgatgtggttgtgatcaacccacgacaggctagggattttgcccgttcaatgggatatctggctaaaacagataaacttgacgccgccatgctagcacaactggccctggtcattgatcgccatccggaccgcagtcgttatatacggcatctgccagatgaggcacgagcagtacttgccacaatggtcgtccgtcgtcgtcagttgaaccatatgctggtcgctgagcgtaatcgtctctatccttctcatccccaaagcaggaagagtatcgataacattattgatgcgcttcaaaacgagctcgaccggatcaatgagcaaatgaaacaacacatgacagcattcttccaggagcaggccagactgataggcagcgtgaaaggcgtcggcgatatcaccgtcgcgtcgctgattgccgaactaccggaacaggggaaactcaatcgacgggagattagtgctctaactggcgtcgctcctctaaacagagactccgggaaaatgcgagggaaacggaccacgtttggtggcagagccggagtgagagcaacgttgaacatggcagctctggtggctacgcagtttaatcctgccataaagctgttctaccagcgtttgcttgccgccggaaaacccaaaaaacttgctctggtcgcctgcatgcgcaaactcatcaccattctgaataccatgctcagaaaaggggaagagtggaacgcctcatttcaatcacaggtaatctcatga

SEQ ID NO: 39457 - DNA, 213 bp, Escherichia coli; identical to SEQ ID NO: 5241

SEQ ID NO: 39458 - DNA, 576 bp, Escherichia coli
atggatgaagagaaaactcgtgctgaagtggcacacatagaatttatttcatatggtacgtctcgaatttttgataggcgtatgagatccttagactggaagcgtaaggttgtcaccttccttggggtctttgttccactgatgataggttgtgcagttttatcattcggacttgaagctccatttctgccgctttgcatcacaattgccggtgtggcaagtatcatgcaattggggttctcgctgtggtctttggtttccggatgggatcgctcatatagtgattgcatggcttccgttaaggaaaatacagccatttataacctagctggtagtgttcgcaagaaaataggtaagcttgacgaagccaaattggaaattttgatagacgatttgacggaaaaatttgagagaagggagcaggaagacttaactttgtgtgtgagtgataaagaacttcgttatgcaaaccgtatgtcctgtttctacttcaaaaaaaaatgccatatttgtaatgtcgttcccctaactttgaaaccgggaaaatgtgtttgtgatggttgtgggaaattttaa

SEQ ID NO: 39459 - DNA, 339 bp, Escherichia coli; identical to SEQ ID NO: 5239

SEQ ID NO: 39460 - DNA, 972 bp, Escherichia coli
atgaagcgtgcgcctgtcattccaaaacatacgattaagactcaaccgcttgaagatactccgtcatcggcaccagctgcaccgatggtggattcgttaattgcgcgcgtaggagctatggctcgtggtaatgctattactttgcctgtatgtggtagggacgtgaaatttacccttgaggtgctccggggagatagtgttgagaagacctctcgggtatggtcaggtaatgaacgtgaccaggaactgcttaccgaagacgccctggatgatcttatcccttcttttctactgacaggtcagcagacaccagcattcggtcgaagagtgtctggggtcatagaaattgccgatgggagccgccgtcgtaaagctgctgcacttacagaaagtgattatcgagttctggttggtgagctggatgatgagcagatggctgcattgtccagattgggtaacgattataggccaacaagtgcttatgaacgtggtcagcgttatgcaagccgattgcagaatgaatttgctggaaatatttctgcgctggctgatgcagaaaatatttcacgtaagattattacccgctgtatcaacacagctaaactgcctaaatcagttgttgctcttttttctcatcccggtgaactatctgcccggtcaggtgatgcacttcaaagagcttttacagataaagaagaattacttaagcagcaggcatctaaccttcacgagcagaaaaaagcaggagtgatatttgaagctgaagaagtcatcactcttttaacgtctgtgcttaaaacgtcatctgcctcaagaactagcttaagctcacgacatcagtttgctcctggagcgacagtgttgtacaagggcgataaaatggtgttaaacctagatagatctcgtattccaactgagtgtatagagagaattgaagccattcttaaggaacttgaaaaagcggcactttga

SEQ ID NO: 39461 - DNA, 1167 bp, Escherichia coli
atgagactcatggaaacacttaaccagtgcataaacgctggtcatgaaatgacgaaggctatcgccattgcacagtttaatgatgacagcccggaagcgaggaaaatcacccgacgctggagaataggtgaagcagcggatttagttggagtatcttctcaggctatcagggatgccgagaaagcaggccggctaccgcacccggatatggaaatacgaggacgggttgagcaacgtgttggttatacaattgaacaaattaatcatatgcgtgacgtgtttggtacgagactacgacgtgctgaagacgtatttccgccggtgattggagttgctgctcataaagggggcgtttacaaaacctctgtttctgttcatcttgctcaggatctggctctgaagggattacgtgttctgctcgtggaaggtaacgacccccagggaacagcatcgatgtatcacggctgggtgccagatcttcatattcatgcagaggatactctccttcccttctatcttggggaaaaggacgatgtcacttatgcaataaagcctacttgctggcctgggcttgacattattccttcctgtttggctctgcaccgcattgaaactgagctaatgggcaaatttgatgaaggtaaattgcccaccgatccacacctgatgctccgactggccattgaaaccgtcgctcatgactatgatgtcattgtcattgacagcgcgcctaacctaggtatcggcacgattaatgttgtatgtgctgctgatgtgttgattgtccccacgcctgctgagttgttcgactacacttccgctctgcagtttttcgatatgcttcgtgatctgctcaaaaacgtagatcttaaaggattcgagcctgatgtacgtattttgcttactaaatacagtaatagtaatggttctcagtccccgtggatggaggagcaaattcgggacgcctggggaagcatggtcctaaaaaatgttgtgcgtgaaacggatgaagttggtaaaggtcagatccggatgagaactgtttttgaacaggctattgatcaacgctcttcaacaggtgcctggagaaatgccctttctatttgggaacctgtctgcaatgaaattttcgatcgtttgattaaaccacgctgggagattagataa

SEQ ID NO: 39462 - DNA, 864 bp, Escherichia coli
gtgaaatatagtaaatatatagaagagcaagttacagaaatacaatctttatacgattctcttcatattgaaaatgatagttggaacaaagagcaaaaccagattgttagagatattttatccgacataaatattcgtgggtcaattatctttgataatgataagttctatgcaggattagaaggttgtattaatcgcgggaaatttagagcatcaaatgaaaaatcaacacgacaaaagttaacggatacatttaatgtacaatcatatactgattttgttaagctgttaaacaatgataaagtaattagcacggatggagatggtgaattaattacaatagaggattttttctggaaaagtgagtactttaatcaaggaggacgatatgaattaatgcattatttgttttctccagaaaagataaagaattatttatatgttaatgcggaatttacctataaaggtaagactgttgaccaactatcagttggccagcgtgggactttttatgtaagcttgaaacttgcaacagatccttttggtagcccatttgtatttgatcagccagaggatgatcttgataatagttttattatgaagcaattggttcctttgttcaaaaaaataaaaaaatatcgacaagtaatcattgttacacacaatgcaaatctggttattaactctgattcagaacaagtaattgttgctaattatgatggtgatgttatcagttatgaagtgggagcaatagaagatggtaatataagaatgcaacaaggtataagacatcatatttgctctatccttgaaggcggacatattgcgttttctgtccgcgagaagaaatacggtattcagtaa

SEQ ID NO: 39463 - DNA, 234 bp, Escherichia coli
atgaatggtcaaataatcacagttgcactcatcctgttggggaacacatttctgacacctcctgtacaggccatagggttcgactattacaatgatcacagtgtcatgtcttacggtaaaggttattggggggataagaaaatcattgcccaatttccggagatgaacagggccgatttgcgccttgtgaaaaatatctctgggaagactaatgccagtcagttaagcaactga

SEQ ID NO: 39464 - DNA, 258 bp, Escherichia coli
atgatttccgtgcgtctgaaggacccgcgcggtgctggttatacacaactatggctaagccgcggaacaggtgcttacacctatgactggacgccagaaacacgatacggcagcatgaagagcgtcagtttacaacgtattcaaccgctgactgagcaacttaatctcgggctgacggcaggtaaagtttggtataaaacaccgaaccataatttcaatgggctgcaattaggcctgcatttaaaatggcaattatga

SEQ ID NO: 39465 - DNA, 540 bp, Escherichia coli
atgatgattaatgaagcacaagcgcaggccactgcgaccagcggcagaggagacggacagcatccgtcagggctgcatgatggcgctgaaatcagcacggcggcgggtgggcaaacgaaagcggaagtgccgctgacgatggaagcggtgataacgagagaaaacctgatgctggcttatcagcgcgtggtggaaaacaaaggcacggcgggggtggataacctcagcgtggcggagttgaaaccgtggctgaagaagaactggcgcagcgtcaggcaggcattgattgacggaaactaccagccgcggacaatacgccggatggatatcccgaagccggatggcggcgtgagaacctcaggcatcccgacggtggtggacaggcttatccagcaggcggtgcaacaggcacagcgttacatacggggtggcaaacggtgggtggtggatatggatctggagaagttcttcgaccgggtggatcacagactcctgatgacgcgtctggccagaacgataaaggacaggcgggtgctgtga

SEQ ID NO: 39466 - DNA, 387 bp, Escherichia coli; identical to SEQ ID NO: 12817

SEQ ID NO: 39467 - DNA, 243 bp, Escherichia coli
atggcccgtcgctgggatggtaaccaaagacaggctaaagtgttgtcagcgcgtttccggtgcatttttttggataatggttggttcagggcactaggaactagcttcagtcaggccttgctgaaaacacaggaacgcgttaaaacgcatacggacgcgtttctggcgctcaaaaaccatggggttagtgtgggtagtgtgtatagcaacaggagcctggaacgcgttccgcttcttctgtaa

SEQ ID NO: 39468 - DNA, 516 bp, Escherichia coli
atgacccccggttgttgtgggggaaaagatactgaccgtcataaagagtcacagaaagcattaaaaatactgggatgtgacaagtcaattcatcttaattttgaggatacccgtctttatttacagataagagacatgatatcttccctggaaaatataattgctaatgatatccctcaggatgtcgaaattacgagagtttataccatgaataattctgacaggcatcaggatcatattgctgtttatcaggcatcaatggttgcctgtcgttatattcctcagatactgggatatgaaacaccaagtgcatggatttcattttcccctcatgcttttgaagcaatagagaagaatgaatttaataaaaaattaatggcattgaaagagcataaaagccagagtcaacgtaaatatatgcaacatgaatatttacatagtcaggccagtttcagagggcaacaggcaaactgcgctatgtgcgaaggttttattatatacaaaatggtgttatga

SEQ ID NO: 39469 - DNA, 165 bp, Escherichia coli
atgccggagcacgacagccgtcagaatcgatcgtctggcaggtataaagatattgatgttctctgttttgatcacgataacagaaaagacatggatgcgataatggcaagcccgctgtggcaggctgcccgcgttctggacaaaaccattggatgcaaagcgtga

SEQ ID NO: 39470 - DNA, 339 bp, Escherichia coli
atgcttgctctggttgtatgcgtagtctggcaagtatttagccgctacgtacttaaccagccaagtacattaaccgatgagctggcacgctttttgatgatctgggtaggattattaggtgctgcatataccgtcggcgcgcagagacatctctctatcgatttatttgctctcgccctgaataagcgcaagcaattacttcttagtatagtcattaacattctcattttaggttttgccggttcggtcattgtgactggtggcctgaaattaattgataaaacactggcaacatcacaggtatttccactgccgggcctcctctgcagtactaattaa

SEQ ID NO: 39471 - DNA, 1518 bp, Escherichia coli
atgaaaaaaaacattgttagacaagtgcttgagagttatggtccgtgcatatcttctgaacttgctgagaggattaagcgtcagaatccttctatgtcatctgatgcaatacgtaaaatgatctctcgaagcactgatattggtaagttgccatttttaagatttagtcataacaggagattcatttatctaaaagatgactttggtagcttcaaattttggcgggcgctcaaaaaatgtatgcgtgaggcaaattcggcgtattctcacgctatactttccgtaattaataatggcggatacttgaaggtaaaggatttcgggattgtgtctggctctccgataaagcaggccaagcatttaagttatgaatctgttctaaaaaatctgctttcagctaaaatacttagatctgtgtatattgatggtattggtgattgtgttttgataaataataatatagctaatgatatcagcatctttaatatggcaaattgcgagtctttttttgataagccaatatttgaactgattaaggcatggttgcgaaatttaggtattgtggcttttaatcaaataaaaacaaaatatgatggagagaacaatcctgtggttggttctttcgagtgggatataacagcgccaagttatgtgtcccctcttgctgaatattccagcgatggactcatcccaggttttgttgtctgtgattttgctctagggtttaatcgaaatgaaattaccaccgatgctgctgataccttcataagaaaagttcagatgaccaagtcctctaggacaaaccagaggattatgtttgttctttttgctagacgttttgagaagaatgccttcaacaagctaaggagtgaaggggttctggctataactatagctaatgcgtttggtaataaggtcgatgagagcttggccagactatcgaaggtgattcagggaactttatctattgaaagacatcctgatgagttacttcaaatggtaaaagatctggagtctatctctggagagaatggaaatttaagggggtatatttttgagctttttgtttcctctcaaatttgtaatttctatggttatggaaatgttcgtattaataaagaatataaaataaacggtaaacatgccgaagctgatgttgtattggaaactaacgatgatatttatatcgttgagtgcaaaaatgttaagactttaccttcgatggaggttagtctttggatgaaaacaagagtgccaattataaattcctactacaaatcaaataaccctgataacaaaaatatacatcatcgtttgtgggttacggggaatatatatcctaaagatataaaccgattggacgagtttaaatgtaataataagaagattgatgttgattatttatttggtcagtctttggatgattttttctaccaaaaaaaacaagtgtttaatttatataggaaagtcatttcgccagattataaaaaagggcaaatacccgattttgacttatag

SEQ ID NO: 39472 - DNA, 444 bp, Escherichia coli
ttgggagatattcctgaagcgcatttaacgcaggaaaatgttctttggaaaggctcattatcaatgggaaaaaaaagtgatatatctttagaaccaaaattcattgatggtcgtcttgatttaaatgaagttggtaacattagaactattaaggatgaattttctcctgaagaacaggcgtgggaaataaatactgacgacggtgatacatatgttaagataggacagcgttttacattacgagactcttgtgaaaacggggatggtacagtacctcttcgtgcaggacaaatcgtacacaagaacatcctagagcgtttggctgtacaggtttctcacgaggctgcttatcgaaatcccgttagtcaggcatttgcattacgttctattataaaaatagctcaggaggtaaaaaaggatggtaaaatgtcatactctgattaa

SEQ ID NO: 39473 - DNA, 228 bp, Escherichia coli; identical to SEQ ID NO: 4959

SEQ ID NO: 39474 - DNA, 273 bp, Escherichia coli
atgccatctgcacgactgaccacacaccacaccataatctggcgctctgtggcattgattgcgacacaaaaaaagacgcgtggcgcgtcatatgtcgcctgtgaattgctcgggttctcacgcccggctgccgattttgcggcagcggaaaaactatatccgcaaatgccggaaaaaggcaagccagaaaaagggagtttttgcagagcgggcatcatcatgcgtcgtacccccgtttgcgtccggcaatgcgcccggccatccatgcggtga

SEQ ID NO: 39475 - DNA, 333 bp, Escherichia coli
atgcaccagccccagcgcttcgttgttcatcaaaatgattttaacatccagctgattttcactggcggtcgccatctcctgaatattcatcatcaggctgccgtcgccggagaagcacaacactttgcggtccgggttcgccagcgccgcgccaatcgccgcaggcaggccaaaacccatcgtgcccagcccgccggaggtcagccactggcgtgggcgattgagcggataggcttgcgcggtccacatctgatgctgacccacgtcggtggtgataatcgcattgtcatcgacacaggcggcaacggcgttgatcaggccgtaatggcttaa

SEQ ID NO: 39476 - DNA, 231 bp, Escherichia coli
atgcggttgcttgattttgcccagctctgcgcggtcgatatcgacatgaataattttggcattcggacagaactgctcggttttgccaatcgcccggtcatcaaaacgcgcaccgagtacaatcagcagatccgcctcctgcaaaatatagttggtgctgcgcacaccgtgcatccccagcatacccagcgacagcggatgcgcttttggcaacatacccagcgccattaa

SEQ ID NO: 39477 - DNA, 294 bp, Escherichia coli
atgtctgaccagatagttgtgtttggtgatggggatagagatgccgtaggtgtcgacttcctggaaggcgtcggtgccgatcatcgaggcgggaacctgaccagtgatgcaaatcagcgggatggagtccagcctcgcatcggcaatggcggtcaccaggttagtcgcacccggtccactacaggccatacagaccgccggtttaccgtcggtgcgcgccattccctgagcgataaaccccgcgccctgttcatggcgagccagaatatggcggatttgcgtgctttggcttaa

SEQ ID NO: 39478 - DNA, 315 bp, Escherichia coli
atgagcaatatcgttgaattcgttaaacagcaagagcagttattctgcggagcattgactgaacagacggtgacatgggctaaggaaagccagtttgcaattcagtatttccagaaaaacgattacctggctaaaacagcactggcaaatccaaccagcgcacagaacgccatcatcaatgttgcggcgatcggcatcaccttaaacccggccagcaaactggcttatctggttccgcgcgacggcatggtttgcctggatatcagctatatgggattgctccatattgcaatggagtctggtgttatctcatag

SEQ ID NO: 39479 - DNA, 537 bp, Escherichia coli
atgataaaaagcacaggcgctcttttactgtttgccgcactgtctgccggacaggcaatagcctcagatgtggcattcaggggtaatctgcttgacagaccctgccatgtgtccggtgacagtctgaataaacatgtcgtcttcaaaacccgggcgtccagggatttctggtatccgcccggacgttcgccgacagagtcgtttgtcatcaggctggaaaactgccatgcaacagcagttggcaaaattgtgaccctgacctttaagggaacggaagaggcggccctcccgggccatctgaaggtaaccggagtgaatgccggccggttaggcattgcactgctggacaccgatggcagcagtctgctgaaacccggcacctcccataacaaaggccagggagaaaaggttaccggaaacagtcttgagcttcctttcggcgcgtatgttgtggcaacgccggaagccctgcggacgaagagtgtggtacccggtgattatgaagcaacagccacgtttgaattaacatatcgttag

SEQ ID NO: 39480 - DNA, 720 bp, Escherichia coli
atgattcgaaaaaagattctgatggctgccatccccctgtttgttatatccggggcagacgctgctgtttcgctggacagaacccgcgcggtgtttgacgggagtgagaagtcaatgacgcttgatatctccaatgataacaaacaactgccctatcttgctcaggcatggatagaaaatgaaaatcaggaaaaaattattacagggccggttattgccacccctccggttcagcgccttgagccgggtgcgaaaagcatggtcaggctgagtaccacaccggatatcagtaaacttcctcaggacagggaatcactgttttattttaatctccgggaaataccgccgaggagtgaaaaggccaatgtactgcagatagccttacagaccaaaataaagcttttttatcgcccggcagcaattaaaaccagaccaaatgaagtatggcaggaccagttaattctgaacaaagtcagcggtgggtatcgtattgaaaacccgaccccctattatgtcactgttattggtctgggaggaagtgaaaagcaggcagaggaaggtgagtttgaaaccgtgatgctgtctccccgttcagagcagacagtaaaatcggcaaattataataccccttatctgtcttatattaacgactatggtggtcgcccggtactgtcgtttatctgtaatggcagccgttgctctgtgaaaaaagagaaataa

SEQ ID NO: 39481 - DNA, 258 bp, Escherichia coli
atgaacttccctgcactcaatatacgagaagcgcacgaacgcccggaaggcttcgaagaaggggcagtaatgatggtcggtcttgaatctgatcgcgttttacaggcattagaaattattgcaacacagcctcgtggagaagtacgcttacttcgtcaggttagtgactatagcatgccaaatgtttcagataaagttctgcgtattatccattcatatactgactacgttaaacgggttgtctggaagcaatactaa

SEQ ID NO: 39482 - DNA, 444 bp, Escherichia coli
  misc_feature (421)..(430): n is a, c, g, or t
atggaggctgggaatcgttgttttgaccaacgcgtaccggaagaaactaacagaaaaatagttgatcataccgctgatatcaatatgacatatagtgatatcgcgcgtgaatatcttctggctgaaggtgtaccagccgatagaattattaaaaccggtagcccaatgtttgaagtactcactcattatatgccgcagattgatggttccgatgtactttctcgcctgaatttaacacctgggaatttctttgtggtaagtgcccacagagaagaaaatgttgatacccctaaacaacttgtgaaactggcgaatatacttaataccgtggctgaaaaatatgatgtcccggtagttgtttctactcatcctcgcactcgtaaccgcatcaacgaaaacggtattcaattccataaaaatnnnnnnnnnntcttaagccattag

SEQ ID NO: 39483 - DNA, 525 bp, Escherichia coli
gtgggctgtgtaattgaaggtttttacgtcagattcttttgggattggcttgcgtttatttctggagcgtttcgttggaaggtatttgcagttttcgcagattatgtcggtgatgcttcgtcgctgtcgtctcatgcagccctcctgacgccctgcccgatcgccatcaatgccgctttggatacggtagtaaacattcgccggggactgatgaacggtcgccaaatcagcagcatggaacctttgctgtttcccttcttctccagccctgtcgatggttcgataaaattaatccgtccatcagtgatgatgcgaacttcgtcaacgctctccagagccttactgaaccatccgactgacatatcctctggcacaagcataactaccgtctgtctctgttgtatgcactgctcagcggctttttccacccacggcctgatattgctgtacggtgggttattccagattgcaccgtggcttacccactcagaattgagcgcgtcgtcggcctcagttagccagtga

SEQ ID NO: 39484 - DNA, 150 bp, Escherichia coli
atgctgatgttaaaaaaaggaatgatgctggtggggctgatattcttttctttacccgccaatgccgggtgtacgctggaggaagccgccagaaagatgattatcggctttaagcaagaagattgcccaattaatcaattcgttaattga

SEQ ID NO: 39485 - DNA, 720 bp, Escherichia coli
atgcaattaccctttgtcatatctttagttttgctattgtcggctaatgcacatgctgaaataactgacgagcaaattaacgctgactgcgcgaaaatcactatgtatgcaagccaggggcaggcattgtataaagcgaaaaactaccctgcggcacgcaaatacttcgaacagcaagccgcatggagtgaagactgtaaagctaatgatgagaaagcgatcgccacagcttataacaatgtcgcgctaacctggatgcacgagaatcaatggcgcaaagcccgtgcctggctcatgcttctaccgcaagatcccaaatccatctacaatttgcaacttatcaaagataagctcgcggctttgccctctgatttttcaacaaccaatgaatactggaactacgcgggcaaagcgacatggaatacgctcacctttaaactcgcgcggttaacaggcacgatgcaggtagattttcagggtaattactttggtatgatgggcatttacaatgggccaaatattggtgagttttctgaatctgtaacgcttaaaaatggcacaggcgtaatcgtgttgcgtgatgatacagacgatatgattcactgtaatattactctcaaacttactaccgaaacgcttgatgtaagcaccgatacgccaaacaactgcggattcggggccaatgttagtgctgacggcccttaccttcgtgttgattga

SEQ ID NO: 39486 - DNA, 867 bp, Escherichia coli
atgttttccgtaactgagctgtgtgaagaaattcgtcgaaaaagaagtgagctagctggtgagatgtctcattgtgagtggaagagatatgctgaagtgcttgatgaaacttacccagtgatgcaagaagaactagccataatgaggaaacaatattgggaatctgagaaggtagggacgcgtgtgatgctgtactccgatcctcatatccggcaagataaatatcataaagtgaatggaacactggagattaaagaagagtacacagagttatacgacccagtacaggaatgctggataaacttggaaaaacgtatttttcaaaagactatttttcctttagtccgtgagcctgtcatcattgttgacgtctttgtagaacatctcatttatgcctcaatggcgtatcaatggggaaagtcggtaatgtcggagaatgaacgtattgcgcttaaggcatttattactgcctctagtttatttgataaaagcatcggaatgatctggttcaagacttatgctgacaaacaaaaaaaactatcgcgcactagggctaaagctggaaagaaaggtggggaaagtaaagcggaagtgtacgttgttattcagaataaattagtggagcttataaacgaacttgccccaaaaggcgggtggaaaaataaaactgtggcagttaatgcccttattgagcctttatgggtatttgttgaagagtcagattttgtgattaataaccaaagcaaaaagtaccgattattaacggcgagccaggatgccctagttgatactattttgaaatcttggtcaagaaatgttgagaacgttaaactggcttttgataacaatgtaatcagaaaaaaataa

SEQ ID NO: 39487 - DNA, 213 bp, Escherichia coli
atgaacaccgtctctgcagtcaggatactccgcttacctgctgttatccataaaactggtgtctcacgagccacgatctatgactggttgaacccgagatctccacgctatgatccaacgttcccaaagaaaagaaagcttggaacacaatcagttggatggcttgaatcagaaattgatgagtggttgttacatcgtagtcttattaattaa

SEQ ID NO: 39488 - DNA, 1515 bp, Escherichia coli
atgtctaaaaaaaacagttcaacgcaaaatatagaactttgtcttaaattccagactctacccacttttgcacaacagctaataagttacatccattataaaacaggagctgccgccgagcttattttaacagtgttacttgggataatggcatttgcttgccaggataaatttgatattcagcttaaaaatgggaaaacatttacatcgctttatcttctgtttttagcaaaatcaggcagcaggaaatcaacaatattcaggctgttgatggaggaaatctatcggctggaaaaagagttgaaagatgattttttgttaaaggagaaagtttatgagcagaaatacgtatcctggcaagtagagttaaaagagtataaaaaacaatacagtaaagctattcgtcagaagatcgatgtaactgaagcgcttgaagcgctggaggagtgccaaagaagaaaaccagtagttccagcaagaaagtatcttactaagaacgattcaacaagtgagggacttagaaaggttttagcgcaggggtctccgtcgttgatgctcggatctgatgaggccggagggctattcgacggtaatcttttccgcaatacaccagttctcaactctctttggggagaggggaaaattgcagacagcagggcttcccgtgacagctacgatgtttatgatgcacggctaactatgctgctgacgatgcaaccaggtttgtttgatggctttcttgaaaaacagggaaaaaaagcaaaagactcaggattgttagctcgtttattacttattgacatggaacagttacctgaactgtgctgtatccctgatgctggtacatggcctgatgagccaggaattgaagaatttttctctattctcaccagacacttgcaagatgggatggtgcgtagagaaaaaaatgaagaacggatatgtattactttttcaccggaggctcaagttctttggaattcacagagtgaacacattcagaaaaaaataaaaaaaggaggggaactacaacatcatgatgattttggtgctcgatttatggagcactcctcgagaattgcagcagtaatgcaaatgtttatcacacctgattcacgaataattactaaggatacttttatgtcagctttgaaaataacacaatgttttacgaatcatgttatctcgaaggttgaatctactcgagaacctagaggtgacgaaaaattattgacgtatcttgaggataatcttgtcaataatggctcttacgaatttaggcagaatgatattatcaaaaaaggcccatattcattaaggcgatcagaacggctaatgtctgctttgaataaacttgaagctgaaggggttgtacaattattcaaaagaggtgggactaattatgtaaaattcaccaaatcgaaaatggaggttagagaactggcggagaaaactaacactcctcttttacaatcaggatcacttgcgataagtaaactgcctatacctgaataa

SEQ ID NO: 39489 - DNA, 699 bp, Escherichia coli
atggaatcacaatattcacttaccaacgaagagaccgatgacttggtagaaatagcctccagaaagtataggtcacccattgacctcaatattctcaacccactacttaacatggtctacggcactttggagcagaataagcgaatactaggtattcgttctgatctgagatttgcccagtctcatgtaccaggagaacctgatctacccctgtgcttccagcgcgatgatgcacaggcaataactcgctccttcgagtcactgaaaagccagctacgcgcagatcataaccggtccgggagaccgggtaacccaacgttgctatcttatggatggtgcagagaacgtgacacaagcgagcatccccattaccacctgatgttgttgtttaatgcagatgtgtatggatacttgggcaattaccaagaactcaatgctaaaaatatggcaacccgaatacagaaagcctggtgcagtgctatagggcttgctcacgaagattactcaacattagctgaattcccacctaatgctgtttacaggtttagcagattcgatgctttggatcgtagcccagtctactgggatttcctgattcgactggcgtacttagccaaaaccagaactaaggatgcccacagcggttaccgcaactttggcgcaagccagtgtccacgcttaggcggattagcctgttaa

SEQ ID NO: 39490 - DNA, 2142 bp, Escherichia coli
atgaactacgaaataatcaaaaatatcttggcgaaactcggtgaagagaatacaaaaacagtcgatgtgctgctcgccatcaataccatcgtcaacagaagcaattcagagtgggagggccgcgatttggtgatccgagcactcgacaaatttgagttttttgactctgtcgaacagtcactcctgctaaacttggtacgagctgtcggattattcccctatatcactcctcacctcagcagtatggcgatttctgaccgcttagcttacgaagcgcacagagtcgagggtgtagaacaaggcatggtatttcatcatctgcaggcccatgttttcagtttgatcatgcaaggccggaacgtagtactcagtgcttctaccagcgtcggaaaaagtctagttattgatgctgtactagcacagcgacggttcaaaaaggtggtagtgattgttccgaccattgcgctgatcgacgaaacccgccgtcgactcgtcaaacgttttaaggacttcaacctgatcacgcatccgagccaagaatccgtggttgagacaaccaacgtctacctgctcacccaagagcgtgtcattcagcgtcctgatcttgctgatgtggagttctttgtcttagacgagttctacaaaatcgacttggggaactcccctgacgaaagcacgcgcgctgttgacctgagcttagcattccacaagcttgcaaagactggtgctcagttctacatgctcgggcctcacattcagaagatctctggtttggatgattatgagtaccactttatcccatccgactacagcactgtcgcggtcgacattcagaatttcaatctggagatgcgttccgaagagcgaaaggaaaaattgcttgagttggtcacaactctagactcgcctactttaatctactgtcaggctcccccgagtgcgaacagggtcgccgagtatttaattcaggaagccgggttgaagccagtgccagaaacgaaggaaatagctgcatggatctccaggcactaccaccctgaatggaacgttgccaaggcaatatctctgggtatcgggattcaccatggaggagtgccacgtgcattgcaacaatacatcgttaagttgttcaatgatggcatcatcaagcgaattatctgtacatcaacgatgatagaaggcgtcaacacatcggcagagaacgtgatcatttacgaccgccgcctaaatacttcaaagttcgactacttcacttacaagaatatttccggtcgagctggccgtatgaataagtacttcattggtaaagtcttcatgctcgaagcacctccccttgagcagggtctcaccgttgaatatcccatcggccatcaggatgaaaactccccgataggactcatcatgcaactggagaacgaataccttactgatatttcacgtggtcggcttcaagatgcatatgccaacccgatactgtcgccggcaaccctaatagaaaatcggcacgttccgattgagcggcaagtcgaggtagcagaaacgatcattcgagacctaccggatggcagcaggcttctgggctggagaggcatccctgagacgaatcagctcaattacctatgtgaactggtctacagtctggaaggcggtaacctgatggactatgggatatcatctagcttgcaattaatgtggcacatcaatgagcttcgaactcagaaaaatctgcctgcttatctaagagacgcggtggagaatcgacgagaggaacacactcccagtgaagcgatcaatctacgcctgaaattcatcagaaatatggtgtgtttccgattgcctcgggacatcatggccgtgagtaacattcaggccgacgtgctggcgaaaatagggatcgagccgggcgattttagcttctttgctgagcagcttgaaaatatgttcctcgacccactactcaccgcgttggacgaatacggaattcccactcagatctcggctcagatcaagaacctcatcttgccatcggaacatctgaacgacctgctggcgaaacttcgggctctggctcccagagtagatagcctccaactgacaggctttgagaaaagcttaatgagctgggctgtgtccgaaatgtag

SEQ ID NO: 39491 - DNA, 1623 bp, Escherichia coli
atgagtattactagcctatccgatgcaggtgggcctgcggcaaggcaaggcttcaaatatcaagatcacgtagctgtcagtttcattttcaagatgctccaggacagtaactactcccaagtggaatgtgagacagcggatgacatcgtggcggtattccaatgcgtgggccagatagtaaatgaatacattcaggtcaaaacaacggaaagtgatagcaaatggaacgtgaaagagataacagcgttagacggcaccaaggccaattcttcgctgctacacaaatcgctgaaatgtgatgttcgcccaggtattgcacgctttcgaatcgtgactaagcgcgacgtcgcaaagattcttgatggattcaagaaagagatagataagcgagtgctacctgacacaaccacaacacgaggtgtagcactgtgcaagcagtttaaaacatttgtatcacctcaaaaacatgacttcttatactgggctgaaaacgttgtctggcaggtatacggcgatgtcgaggcgctggaggctgtcaatattaaggctttgtcccagcttgcggaagggtttggaaatcgccccaacttcacgcagctaaaggcaatttacgaagaatttttagagattgctgacaaagcggccacatctagcgtgaagacagccgcagcatctaagatcatccttcgagctccggcgctggatcacctcaagaaattactagacgaggctgatgacatgtcgacggccacatccaaaccatataaaaagcgtccggacccgttcttagtcgagtttcacgccaacacaaaagagagcttgttgcactcattttctggatttgacgtgcgctattcgcttaagaaatggcggcatgaaaattacgcaaagcatctcatcgaatggctaccggagttttccctaaaggccagtgaaatcgtaaacattcttgcgcataacgccgaaacgatattggctaggtcaatcagtaccttcagcgacagtgagcttccgcgcgacaggctcattgcagaattaattctccattccatcctgcgcagccgacagcacagcgagcccgttgcgtgtaaagtcttctacaaatctgctggtaagctttccgaatttggcaatgctcacatcgttcaaatgcctgatgaagatgaccagttgtggctaggccttgcccgcatgatcaaagcgaatgacatggatacaactctagagcaaattcgagaaattcttgacgaaactatctcagaaaccgtcctgtcagcggagcgcgaaatcattatttctctacgcgaaccattacatcaccagccaaaagcagactccttcaatcaagctctgcatcgaaattctcctatcgatgacatgctgaatattctctgcttccccatcttgctgacttacgacagtgcagctctctcatcaggatggctcgtagattacgtagacaacctcaagaaagagattgaaacccacttcagcacgttcacctctgaactgtcggagaacatcaaacaagttaaggtgctcatcttcttggtgcctatggaaagtattgaacttctgaccaaagctttcaacgctcgctgcgaaaagctggaagaattatag

SEQ ID NO: 39492 - DNA, 672 bp, Escherichia coli
atggctatgtcacctcctcctatttttgaaggcgacgattactacagcgtccccgaagaggtttttaacaaattgcccgctgatctgagagcgccttttgaacaaataatgaagaagggggcggagattatcagcggttgcgataaagagattgaaagtctgattagacttataaaggcaataccgacttcatcaagccttagttacatctatcatcggcttcgtacgaccaagtttgaaatcaatacagaatcgatgatggaacaggagatgttaactaccgcgtttgtggtcagctacgcacgtttgttcgccaaaagcaatggcacttgcgttctccagcggaatcatctccccacacaccttcgggttgttcatgatgagctttataaaattcgcaacgaacgttacgcccataatggagggcatgaatcgattgatacttcagtagggtttgcgttcagcggcacacaatttcatatacaggtgcaaatgagcttagggcttcatataggtggaagaaacgagtgggaagacctaatcaagtttatcgacgctttaatgcgcgaacgccttaataaaatacttgcccgtttgaaggagcagacgggctatgagtggctattcccagacggcccgacaccgagttgggtgggcgattacggcgattga

SEQ ID NO: 39493 - DNA, 1272 bp, Escherichia coli
atgaagctcagaaatatttcgctgacaaattttcgtggcattcagcaggctgatgttgccatcgctgataccccgacggtgattgtcggggtaaacggtgcaggtaaaacaacgctccttgatgctttagcaattacgctttcgcaggtcacgagccgtatttatgacagtgctcaaagagcgcgcagcttttcccgggatgacatttttatcgccagtgactacacacgcgcagtggtggatctggaactcgaaaatcagagcgtaacgtttgcgctagcgttaaataagcgtgcggggaaacatccggcagaacggtcaagttatttcgatgttctcaacgcggttgtacagcccctgacagagagaaataaaaatttccttgaaagtgagccgacagccatcagtttgcctttggctatctattacgatgttcaccgcacagtgatggagatccctcttcgcgtcagagaaaagctgaaaaatacgccagctgaaggctatgaagatgccttagcaaatgggggggcagattttaaacgtttctttaactggtatcgtaacgaagaagatctcgaaaatcaggctaaacgacgcgaccattattttacggaccccaaactcgatgccgttcgtcgtgccatcgagacctttacccactttagcgatcttcatattgaccgtaaaacgccattacgcatgatagtgacaaaaaaagggatggagctgagcgtgaaccagctgtccaatggcgaaaaatgcctgcttgcacttgtgggtgatttggcacgtcgtctggcactggttaatccgttatcatccaatccgctgctcggtgaagcgattgttctcattgatgaaattgatctccaccttcatcctaaatggcaacgtgatgtactgaagaaactgacggaaacctttcccaattgccagtttattgtttccacacattcaccacagattattggcgaaattccgcctgaaaatgtgcttctggtgcgtgacggttgcgttttagggcatccctcttctgcacgcggtctgagcagcgatgaggttctggaattgatcatggaaggcgactcaagaaatcctgcgattaaacagcaaattgaaagcattgaggcgtgtctcaacgaagatgatgttgaggaagcccatcaacaattagcgcaactggaaaagcaaataggcagtacgcctgatgtaatgcgtttacagagtagtattgagacactggaactgttactcaacggtgatcgtcaatga

SEQ ID NO: 39494 - DNA, 783 bp, Escherichia coli
atgaagtcacttgtccgaggggctgaaccccgtgagttgcttacctggaaatcggataaccggttaacacctgaaaatctcaaatatggcagagccggttttccctcagaggtccttcgttgtgcgctgttgcaacagcaacattatttgtgcgcatatacgctcatcaggctcaaaaaaccgcaagagtgcagtgccgattaccaaacacgcgaaagttgccatattgaacatatcctaccgcaaacgcgcggagagttagtcgaaaaaaagcgttctggagatgaggtaaaagaggttgtcaatttcacacccggtgaagacattgattttcataatatggtggcatgctaccccccaagccagcataaaacacattgtgcttttggtgcacagcataaaggccattacgatccttatgataatcccttgtttctctcaccgctgacgccctctgtcgagtcgcatttttcatttttttccgacgggcgtattgaagccaagacagaaagggggcaggaaacaattagtgcgttacgcctcgatcatgacgaactctgttatcgacgaaaatcggtgataacaggcgcaatatatcccaaaggcagtaatcgtgaccccatttcagcttcagaagcgcgtcgccttgccgcggaagtattacaccctgcgccggacggccggttacgcgaattttgcattgcgattcatcaggtggctctgtggcatgcgaataaacttgaacaacgtgcaaggcgaatggccgcccggcgtcgaggctga

SEQ ID NO: 39495 - DNA, 621 bp, Escherichia coli
atgctcttggcagctacaataaggtcaaaggcatctatgtcgctacaatttcgtggaagtaatatgacaaccgtatttatagcaggctcaattaaaataaaaaatctggacagactcgtgattgagcggatcaggaaaatcgttgactccggctatcaggtggtcgtgggtgacgcaaacggagctgatagttcaattcaacaattgatcctagatttgggttgcgaaaatgctactgttttcagcagcagcaatcacccacgtaacaatcttggcggctggcatgttcatgtagttgattcagagtatgcacctggtactcgagccttctttacggcaaaagacctgaaaatggctgaaatagcagattatgggctgatggtctgggattcacagagtaccggaacactgagcaacataattgagctgctgcgccagaataaatatagcgcagttttcgtcaacaaagtgaaggcattcgagttagtgaaaactccatctgatttgaaaaaactgattaattacatgtcgccagcggctctggaaaaagcagagcagaagatcaaacttagccaaaaactggataagcttgataacagccaaatgcaaatggtgttatga

SEQ ID NO: 39496 - DNA, 585 bp, Escherichia coli
gtgaacgttaatctgaggaaaatagaaggtaactggacgctaggatatgcgctggataaacacacgcttagcagcacatttcttggttacaacgaatatggtagaggccagtgggacacaacaagaagtgaggcaggccaagctctttttcgattgaagtacagagatgactatagccagatagaggcgatagctcaggcaatcgtgaatgagatcgtggcaccatattttccaaaaattggctttgttgtccccatgccagcatcaaaaaaaagggacgttcagccggttacgaagcttgctaaacgggttgcggaattactgggagtcgtttgtattaaaagctcgctgttaaaagcagctacagatgtatcacttaaggatttgacaacgaaagaggaaaaagtagctgtaatcaacggcgcgttttcagtagtagacagaatcaaaaatgaggggcagtgggatgcccttctaattgatgacttattcgatacaggagccaccatggaggctgcatgtcatgctcttggcagctacaataaggtcaaaggcatctatgtcgctacaatttcgtggaagtaa

SEQ ID NO: 39497 - DNA, 291 bp, Escherichia coli
gtgttctggctctcaaaggaaacagcgagtatcgatacattttctttctggaaagatgatgtcccttatatcttcttaaacactcgtaagtcaggtgaacgcagccgtttcgatgcggcacatgtgctggcccacttggtgcttcaccgttatggtgatgttaaaggacaggatgctgagcgtgaagcggatgcttttgcgtcagcatttctgatgccactgaaaaacgtgatggccgtgaagatggcgtttccgacgtttgataaaattgtgcagttgaaatcgctctga

SEQ ID NO: 39498 - DNA, 864 bp, Escherichia coli
atgaaaaaatctgaaggttttcagtcgctgcagcaatcactttctggcctgccgcagtgggcatcagagcgtattttgcagcagataaaccagcttactcactatgagccggtgattggcatcatgggtaaaactggttcgggcaagagcagcttatgtaatgccctgtttgccggtgagatttcccccatcagcgatgtgatcgcctgcacacgtgaccccttacgctttcgcctgcaggtgggaaagcgctttatgacactggtggatttacccggcgtcggggagtctgagcgccgggatacagagtacgccgcgctgtaccgcgaacaactcccccggctcgatctggtgttatggctcattaaggccgatgatcgggcgctggcagtggatgagcattattatcggcaggtgattggtgaagcataccggcacaagatgctgtttgttatcagtcagtccgacaaggtcgagccaatcagcggcggtgatatgttgtccacggaacagaaacgaaacatcagccgtaaaatctgccagttgcatgaactctttcagccggtaaatccggtctgtgcggtatcggttcgtttgcaatgggggcttagggtgacggctgagcgcatgattcgttgtctgccacgtgaggccagcagttcggtggtatctcagctcagtgcgccgcttcgtaccgattccgttaataaaaaagcctgtgacgattttggggaaacggtaggctcggtactggatacaataagttccatgcccctgataccgaacccggttcggacaatcattcaggctgtacgcgacaccgttgtgtcggttgcccgtaccgtctggaatttcttcttctga

SEQ ID NO: 39499 - DNA, 1068 bp, Escherichia coli
gtgaaaatattattgattgtcctgactctatgtttgagctttagcgttaaagccaccccgatggaggctgctgccaactgcaccgataattgcccttatcctagcgagctgtacaaatcagacaaagcatttgcggatgccttagctgggaacttgcgtgctattgggataaaggacgcttttaccagaaccggcgcgcttaatggcactgaatcgccggtaagctcgtataaatataaaggcgataccgtgattaccggctcaatttgcgctagtgactgttttacccacttcaatttcatctacaacgtcgttaccaaaacagccgcatctgtatatatcgaaggtgataaagctactttgatgggtaagccaccagaggacgttactaactttctgctaaaagatgaaaatattgccaccacaactatcgcccctttagcaccaaagggaccatctgagagtggaaaaaattcagacaaaactatctgggaactaaaagacaaaagcgggcggctgttgggggatgtgtgcgctggacaaccgggtacctgcgccatcgtaatgaacacaacaaacctcgtggcggtagttaatcataaatctctcaacggatgcgccatgggagatttctacgtcgtaagtagacctgagcagttttggagtcagtacgatacaggcacctgcagcaaagacgcctattttgctgaagggacaatgaataatggtcaatatcgtacaatcgatgtccaccttaatggagaactggtcaaacgtttcccaatcgaatactggtcattggcaaaatccttttccggcagtaaccgcccgaagtggaaggaaaaggaatatggtagaggttctatttaccaaactaacgaagagccgatggagaaaccaacttacaccccagaggaattggaaaaaatggaggctgcgcaaaaaatgggggggcgtggtttttctggtacctcaaacgacattaatcaagctgtaaatgatgccggtgggattatgaattatataaagaagacaacaggaacagataaagatcagacacaaaaataa

SEQ ID NO: 39500 - DNA, 321 bp, Escherichia coli
atgaaaactctacctgcaacaactttgtgggcggctaaaccatgtccgtcaccagtgatcgtatggcaaatgcttctttcacgcctgctggatcagcactatggcctgacactgaacgacacgccattcagtgatgaaactgtgattaaggaacatatcgatgccggtatctctttagccgatgccgttaattttctggtggaaaaatacgaactggttcgcatcgatcgtaaggggtttagctggcaaaaacagtcgccttttattactgctgtagacattctaaaagccagacgggctatgagggaaatgagaacttaa

SEQ ID NO: 39501 - DNA, 489 bp, Escherichia coli
atggaggtatactccggggctcactactggacaaggttgtttcgacaatatggtcatgaaccacgtctgatggttgctaaatttgtatctccttatcgcatggctggtaaatcaggcaaaaatgacgcaaataatgctcaggctatctgtgaagcagttcgtcgcccacatatgcggtttgtaacagtgaaggatgagaaccagcaggcgatgcaatgcctacaccgtaccagacagggttttatcgaagagaaaacagcaacatataaccgattgagaggtttgatatcggaattcagtgtcatcgccccacaaagtacagatgcccttcgtcatatgttttctgagcagaagagttttttgccacttcaggttcaacaatacgttcatgacctgctggtacacattgatcgtattgaagataatattactgaatatgaccggttttgtcccgcatggcaaaagcagatcaccgcagtcagcgactaa

SEQ ID NO: 39502 - DNA, 297 bp, Escherichia coli
gtgctggttgatacccactgggttggtggtgactcgacggcgcttgccatgtacgactggccatcttggaacaaagacaaagccattcttggtttgcgcaacccgtcggataagccacaaacctactacctagagttagcgaaggatttcgaaataccaacaggatacgcggcgcaggttagtctgaaagcggtatatggcattaataaaaccttgcccgttgagtataaaaacgcaacagtgattacgttgcaggcactggaaacgctggtgtttgaggcgatacccgttaactaa

SEQ ID NO: 39503 - DNA, 1350 bp, Escherichia coli
atgagtgcggggaaattgccagaggggtgggttgaaacctacctttctgaaatatgtagtaaaccacaatatggttatacaactaagtcgagccctacaggtaatgtaaaatttttaagaactacagatattactaaaggtactgtggattggtccactgtaccttattgtttgcaaaatcctgatgatatacttaaatatcagcttcaagatcgagatattgttatatcccgggctggttccgtaggttttagttttttagtaaaaaatccaccgaataatgtcgtctttgcttcgtacctgatcagatttaaaccttttgataatatttcagagctttacttgaagcgttttttagagtccggcaactattgggttcagcttgcctctatgtcggctggaaatgcattacaaaatgtaaatgctcaaaaattatccactcttatagtaccaattcctccacttgccgaacaaaaaatcatcgctgaaaaactcgatacgctgctggcgcaagtagacagcaccaaagtacgtcttgagcaaatcccacaaatcctgaaacgttttcgtcaggcggtgctatctagtgctgttagcggtaagttaattgacaaaagcttcgaaaataaatcagaaaagctcaattcgtttgtatctatagatattggtaatgcgttcaaaagctcagagtttagtgatgaaggcgttccattactccgaggacaaaatatagaacccggagcattacgttgggatgacacaaaaaaattcccaatagataaacttcaaaaatattctcatttatttattaatgagggcgatattatattagcaatggatcgcccaataatatcaagcgggttaaaaatagctaaagccaaaaaaagtgatcttccttgcgttctggttcaacgagttgccagatttaaagatttcgaaaatctaattcctgactatctgtatttgttattgaatgatgtgtcttttattaattatattcaaccaaatcagactggtagcgacattccgcatatcagtggaaaacaaattttaaactttgagtgtaatgtcccctctatccccgaacaacgcgaaatcgttcgccgcgtcgaacaactcctcgcctacgccgacgccatagaaaaacaggtcaacaacgccttagctcgcgtcaacaatctgacgcaatccatcctggcaaaagcgttccgtggtgagctcaccgcccagtggcgggccgaaaacccggatttaatcagcggagaaaacagcgccgccgcgttgctggaaaaaatcaaagctgaacgctcagccagcgggggtaaaaaagcttcgcgtaaaaagtcctga

SEQ ID NO: 39504 - DNA, 699 bp, Escherichia coli
ttgattcagtatgacgttactgacataccgggtatcaaaagccgcatcccccagaaagcggtaatctttttccggtttcaggccaagacggtcaagaatgtacgacgagcccagaaactgtttttcatcggtatatgccgggtctgtttctcgtggtgcctgtccgggttgcatcctgagcaggtcatacagtccggcaaacagactgctgtccacctttccgagaccatccagtttcgggttcaccgtaatcagatacggactgtccggggccgtggacgggacaaaataaccattgttaccggatggcaggggatagctgcttacacttgccccggacagcgacagcgcacccgggatatccttcagcgtatccggcagcgcgtcattccatacagggccggttatcccggtaccgctttcattcagcagggcttcaccgctcaccccctgactgaccgtcggtggtgtcagggagttcagcgaaggcaccgttatcgtgttacctgcaccacctgcccggggcatgacagtggtattaccggtgtcagtggcaaagctggcagacacatcaccggcagcgctgataaccgcacggtactgacctgccggagaggtgccactggcttctgtcacatccggcgagacctggcgatagaccttataccatggctcagtaaaccacgctttggggagtga

SEQ ID NO: 39505 - DNA, 141 bp, Escherichia coli; identical to SEQ ID NO: 31245

SEQ ID NO: 39506 - DNA, 216 bp, Escherichia coli
atgcttgaacaacatcaggatagcctcttaccgcgcgttacgcaaggagaagaaggccatgaaactaccgggaaacgcccttatctggtgcgtattaatcgtgtgctgcacgttgttaatattcacactcctgacccggaatcgcctgtgcgaaatccggctgaaggacggatacagggaggttacggcaagcatggcttacgaatccggcggtaa

SEQ ID NO: 39507 - DNA, 1293 bp, Escherichia coli
  misc_feature (1239)..(1248): n is a, c, g, or t
atggtcagtcaaaccaatgaacaagcattagagtcggccattgagaaatgtctggctgggatcagtactgaagagcttaaagagggactgagtcagcagtcactgggtgctggatacttcattggtgctgctagtgactttaatatgcaatatgccattgatgaacgttttttctggcaatttctgcaaaagacacaagaagtagagttggccaaactgcaaaagaacaacccctcagattggcaacgtaagttactcgaacgatttgaccgactgattaagaagcatggcattcttcatttacttaagaaagggctaagcgtagacgatgctcatttcaatttgctctatccagcccctttggcaagtagtagtgagaaggtaaagcaaaactttgcagataacgtgtttagttgtactcgccaagtgcgctattccatggtaaatcccctacaagaaatcgacatggtattgtttatcaacggaatacccttgataacgctggagttgaagaacgcatggaccgggcaaacagcacgttatcacggccaaaagcagtatcgagatgatcgggatgcaactcagccattgctgacctttggccgctgcctagtgcatatggcggtcgataccgacgaagtgtatatgaccaccaagttatcaggtagcagtacattcttcttgccgttcaataaaggtcacaatcttggacaaggcaacccgccgaatccatctggccataaaacggcatacctatggcaagaagtattcactaaagacagcttggcgaatattattcagcattttgtgcgtctggatgggtcaagcaaagatccattaccaaagcgaaccctgttctttcctcgataccatcaattggatgtggtgagaaaattagtagaccatgccgcccagcacggtgtcggtcagacttacttaattcaacactcagccggttcaggtaagtctaactcgattacctgggcagcttatcagctaattgaaacctatcctgcttcgtctgatgtggcaggcggaaaaagcttggagcagccgttgtttgactctgtgattgtggtcaccgatagacgcctattggacaagcagctgcgggataacattaaagagttttctgaagtaaagaacattattgccccagcgaataagtcttctgagcttaagcaggcgctggagaatggcaaaaagattattataacgacgattcagaaattcccgttnnnnnnnnnnttattgatggtatcgccgatcttagtgacaagcgctttgcagtga

SEQ ID NO: 39508 - DNA, 1311 bp, Escherichia coli
atgatgaagatttctgaaatgccgaaatatgacgattatgtagattctggggttgaatggttgggacgagtacctgcttcttgggaattaacacgattaggcactcgctttaatgagcgtagatctaaagtttcagacattgactaccccgcactctccgtaacaaaaaaaggcgttctacctcaattagataatgcggccaaaacaaaagatggcgataacagaaagctagtaaaagagggtgactttgttataaatagccgctctgatcggaaaggttctagtggagtatctgacagagatggatcagtatcgcttataaatatagtgcttaaaccaaaagggattcatccaaagttttctgagcatcttttgaaaagtcatgcatttattgaggaatactatcgtgttggacgtggaattgtcgcagatttgtggactactcgatacgatgaaatgcggacgattactatatctgttccttcactagaagagcaaacccgtatcgccaacttcctagacaagaaaaccgctctaatcgacgaagcgatttcgatcaaagaaaagcaaattaatctgttaaaagaacataagcagatcatcatccaacaggcggtgacccaagggcttgatcccaatgtgccaatgaaagactccggtgtggattggattggagatattccagagcattgggaagttgtgcctctaaaaaggttggcggtcttgagcccttctgtgaaagtttcaaatagaaagtccaaagaattagttactttcttagcgatggaaaaggtttcaacagatggatttattgatcaagatacattaatgcctatatgtgatgtgagccaaggttttacggtttttaaccggggggatgtgattgttgcaaaaattacaccttgctttgaaaatgggaaatctgcttggcttaacaatcttcaaactgagtttggatacggctcaaccgagtttcacgttttaagatgtggtcagagaattataggaagttttctctacttaatcgttagttcgcccctttttcttaatgccggtgaggctatgatgactggttcagctggtcagaagcgcgtgcctagttcatttatccaaaactttcctaccgcaattcccggagttgcagagcaagaaaaaatagtatcaaaggtaaaagagctgttttcacagattgatgttgttgtggcttctacggtaaatcaaatcgaaaagctcaaagaatacaaaaccaccctgatcaacagcgccgtgacaggaaaaataaaaatcaccccagaaatggttgagcaatag

SEQ ID NO: 39509 - DNA, 1497 bp, Escherichia coli
atgaaaaaacaccttctctcgtgtgccattctgctggcctgttccccggtctttgcggcggggaataccgacagtattgaagcccggctggcggccctggaaaaacggcttcaggatgctgaaacccgtgctcagaaggctgaatcacgggcaaccgctacagaacagcaggtgcagcaactggccgccaccccggcgacacaacctgttgtgccacagaccgtatccgtaccaccggaaaagaaagcggacaatagtggttttgagtttcacggctatgcccgctcgggtctgctgatgaacgatgccgcatccggcagcaaaagtggtccgtatctgacgcctgccggagagaccggtggctcggtcgggcgcctcgggaatgagggagacacttatgtggaaaccgtgtttgagcacaaaaagacgctcgaaagcggggccaccacccggtttaaggtgatgctggcggatggtcagaaaacctataacgactggtcggcgaactccagtgaccttaacgtccgccaggtggtggctgaactgggaaatctgccggacttcaccgggccgctgaagcacagtacggtatgggcgggtaaacgtttcgatcgtgacaactttgatatccactggctggactcggacgtggttttcctcggcggaaccgggggcggtatctatgacgtgaaatggaacgacactctgcgcagtaacttctccctgtatggacgcaatttcggggagatggaggatatcgataacaacgtccagaactatatccttaccatgaaccactttgccgggccgttccagcttatggtcagcggtatgcgggcaaaggataatgatgaccgcagggacaataatggcgaccttatccatgccagtgccgccagccacggtgtgcatgtgttggccggacttcataatgacagtttctggggattacgtgagggaacggcgaaaatagcacttctgtacgggcatggtctgggggcggaagtgaaggggattggctctgacggtgcactacgcagtgatgcggatacttggcgtcttgctgcatatggtaccaccccgctcggaaacggctggcatatcgccccgtcagtcatggcgcagggcagtaaggatcgctatgcccgtggagacagttatgaatgggtgaccctgaacacccgcttgattaaggaggtgacgcagaattttgcgctggcgtttgagggcacttaccagtacatggatctgaaacctgaagggtataaggaccgcaatgctgttaacggcagtttttacaagctgacgtttgcgcccaccctcaaggcaggaggtctgggggacttcttcagccgtccggaactgcgtctgttcgccacctggatggactggagcagcagactggataactacgccagtgatgatgctttcggcggtagcgggtttaatgcaggcggggaatggaattttggcgttcagatggaaacctggttctga

SEQ ID NO: 39510 - DNA, 927 bp, Escherichia coli
atgagtacagtaaaagtatggggtctcggtgatgccgtggtggatttattaccggagaagccgggcacgctgttgcagtgccctggtggtgcgcctgccaatgttgccgtgggcgtggcccgactggggggcctgagcgggtttgtcgggtgtgtgggggatgaccctttcgggcgttttatgcgcaaaaccctggctgatgagggtgtggacacggcgtatatgcataccgaccctctgtaccggacttccacagtggtggtgtcgctggtgccgggtggtgaacgaaccttcacatttatggtgcgcccttcggcagaccttttccttacccctgatgatttaccgccctttcgtgccggtgaatggctgcatacctgctccaatgccctgagtgcagagccctgccgcagcgccacgtttcaggccatggagaacatccggcaggctggcggcagggtcagctttgaccccaacatccggactgacctgtggcagagcacatcgcaactgcgtgagtgtctgcaccgggcactcatgctggcggatgtggcaaaggtatcggaagaggaactgttctttatcagcggtgaacaggatgtccggaagggaaccgatgttctggcatcacattatcccctggcactgctgctggtaacccaaggaaaggatggcgtgatggctcgctggcagggaaaaaacctgtacttcccggcaacaccggtggtgagtgtggacacgaccggtgccggtgacgccttcgtggcaggtctgctggcagcgctggcggcagaggggatgccctccggtgagcaggcactcgcatccgtcatcgaacaggcccagcgctgtggtgcgcttgccacgacagcaaaaggtgccatgacagcgttaccccgtcgccaggatttactgaaacacccctga

SEQ ID NO: 39511 - DNA, 516 bp, Escherichia coli
atgggattactgggcaggattaaacaactgataagtgaaaatgagaaaccggcggaagtcacccgcgtgatggcaccgctgtccggtgaaattgtccctctggacacggttccggatgctgtgtttgccgggaaaatagtgggggatggtattgctatccgtccttccggcggcgataccttgatggctcctgtcagcggcactatcggtaaaatactggagacaaaccacgcgttttccatccgcaccgacagtggcactgaactgttcgtgcacttcggtattaacacagttgacctcaggggagagggtttccggcgtattgcccaggaaggccagctgatcagcaccggtgaccccgtcatcgggtttgaccttgcgttacttcagcagaaagcacagtccacgctgacaccggtgattgtggcggactctgaccgtgtccaggagataaccctgttctccggcccggtcatcgccggagaaacaccggtttttgatatcagcagccagtaa

SEQ ID NO: 39512 - DNA, 1431 bp, Escherichia coli
atgaaacagcgtcttgcctctgcacaggttgcacttgatacactccgcgcccgtcgtggtgatacctggtacccggtttttcatctggctccacctgccggatggatgaatgatccgaacgggcttatttatttcagcggtcgctatcacgcattctttcagcaccatccggcaagtgaacatcaggggccgatgcactggggacatgccaccagtccggacatgctgcactggcagcatgagccggttgcgctggcacccggtgatgaatatgaccgggatggctgtttttccggcagcgcagtggacgacaacggcgtgctgtcgcttatctacaccggtcatctctgtctggaggatcggggggatgacagcatcatccgcgaagtccagtgtctggcaaccagccgtgacggcattcactttgagaaacagggctgcgtgctgacgccaccggaaggcatcatgcatttccgtgacccgaaggtctggcgggaagggggatactggtggatggttatcggcgcgcgggatacctctgacaccggtcaggtgctgctgtatcgcggcacatccctgcgggactggcgccaggaacgggttctagcgcagtcggcagccggagaaagctatatgtgggaatgtccggactttttccgctgtggcgaccatcactggctgatgttctccccgcaggggatgacgcccggcggataccggttccgcaaccgctttcagagcggagttttaccgggtcactggcagccgggggccgcctttgccctgagcggggcatttgaagaactggatcacggtcatgatttttatgccccgcagtccctggtcgcggaggacggacggcgcatcatcatggcctggatgaatatgtgggactccccgatgcctacaaagcgtgaggcctgggccggatgtctgaccctgccgagggaactttttgaacgccatggtcgtctgtgtcagcgtccggttcgcgaagccgaatcccttcgcgggacgtgccagccgttacaccctgtaaggctcagtggcacgcagttgctggctgaggacgcacaggccgtggaactggtgctgacgtggcataccctcgacagtcaggcagagcattacggcatccacctgggagacgggctccggctgtatgtggataaccaggcaggacggctggtgctttggcgtcactacccggatgaggggctggacggttaccgcagtatcgcgctgcctggcgcagaatatctgacgctacgggttttcctggaccgttcatcggtggaagtgttcgttaacgatggcgatgccaccctgtccagccgtatttacccgcagcccggaacccgccggttgtcgctatatgcagctcacggcgaggctgtgctgacggacggctcactgtggacgctggcctga

SEQ ID NO: 39513 - DNA, 1278 bp, Escherichia coli
atgaatactgtcagtactcataaaaaccccgatttctggatatttggtctgttcttttttctctactttttcatcatggcaacctgtttcccgtttctgcccgtctggctgtcagacattgtggggctgagtaaaacggataccgggattgttttttcatgcctctccctgtttgccatcagcttccagccgctgctgggggtcatctcagaccgtcttggcctgaaaaaacacctgatgtggatcatcagcctgctgctggtcctgtttgcaccgttctttctgtacgtttttgcgccgctgctgcggttcaacatctgggccggagcactgagcggcgggatttttatcggcttcgttttttctgcgggagccggtgccatcgaagcctatattgaacgtgtcagccgcagcagcggatttgaatacggtaaggcccggatgttcggctgtctgggctgggcgctgtgtgccaccacggcagggctgcttttcaacgtggatccgtccctggtattctggatggggtccggctgcgcattgctgctggtccttctggtggcgctggcgcgtcccggaaccagtcagacagcgatggtcatgaatgcgctgggtgccaactcgcccgtgatttccgccggaatggtgttcagtctgtttcgtatgcgtcagatgtggatgttcgtgctttacatgattggggtggcctgcgtctatgacgtgtttgaccagcagtttgccacgttcttccgtgcattttttgacacgccgcaggcggggatccgggcatttggttttgccaccacggctggcgagatttgcaatgccatcatcatgttctgctccccctggataatcaaccgcattggtgccaaaaacacactgcttgtcgcgggtctgattatgaccatccgcatcacagggtcggcctttgccaccacggctactgaagtggtgatcctgaaaatgctgcatgcccttgaagtcccattcctgctggttggtgcgttcaagtatatcaccggcgtgtttgatacccggctgtcggccaccatttatctgattggctttcagttctccaaacaactggcggcgatattcctctcaacctttgcaggtcacctgtatgaccgcatggggttccagaacacctatctggttctgggcggtattgtccttgcggtcaccgtgttatcggctttcaccctgagcagtacccgtaaaacggctgccccgtcagcagaaaccgctacagcacagacggaggttcgcttatga

SEQ ID NO: 39514 - DNA, 2127 bp, Escherichia coli
atggaaccgatgtaccgcaggctgaccagtccccactcagacctgattattaaaacccacccgtatgcagagattgtctggtggggatccaccctgaaacacttttcaccggatgactgtatcagcctggaaaggccggttgcgaatggtcgtctggataccgacaccccactgacgctgatggccgaaaacggcgcgggactttttggctcgccggggctggagggacaccgcaacgggctggatgcgtcccctgtgttccgtaccatcagcgtggtacaggccggagaatcactcaccctgaccagtgaggatgcagtggcgggtctgcgcatggtcagtgaactggtgctgacatcgtccggtgtgctgaagatgcgtcatgccctgacgaacctccgtgaaggggactggcaggtgaaccgcttcgccatcacgctccctgtggctgaaagggcagaggaagtcatggccttccacggacgctggactcgtgagtttcagccgcacagggtccgtctcacacatgacggttttgtgctggagaaccgccggggccgcacgtcccatgagcattttccggcactgattgccggtgcccccggtttctcagaacagcagggcgaggtgtgggccgtacatctgggctggagtggcaaccatcgcatgaaatgtgaggtcaaaactgacggacggcgttacctccaggcggaagcactgtggatgcccggagaaaaagccctgaagaaggatgagaccgtgtacacgccgtggctgtacgccagctattccccggaggggctcaatggtatgagtcagcagtaccaccgttttctgcgcgatgaaatcatccgttttcctgagcagaaaccccgtccggtgcacctcaatacctgggaaggtatttattttgaccacgacccgaactacatcatgcagatggccggacgtgcggcagcgcttggcgttgaacgtttcattatcgacgacggctggtttaagggacgcaatgatgaccatgcggctctgggcgactggtatctggatgaacagaagtatccggacggactgatgccggtgattaaccatgtgaaatcactcggcatggagttcggtatctgggtggaaccggaaatgattaacccggactctgacctctttcgccgccatcctgactgggtactgtcaatgccggggtacacacaaccaaccgggagacatcagtatgttctcaacctgaacattcctgaggcctttgcttacatttatgaacgctgtttatggctgctgggcgaacacccagttgactatgtgaaatgggacatgaaccgcgagctggtccaggccgggcatgaaggtcgggcggcggcggacgcgcagacccgtcagttttaccggctgctggatctcctgcgcgaacgttttccccgtgttgagtttgagtcctgcgcttccggcggtggacgtatcgactttgaggttctgacccgcacgcaccgcttctgggcttctgacaacaatgacgccctggagcgctgcaccatacagcgtggcatgagttactttttcccgccggaggttatgggggcacacatcggtcatcatcgctgccatgccaccttccggcagcacagcattgcctttcgcggtctgacggccctgttcggtcatatgggactggagctggatccggtaacggccggagaagaggaatccgccggttaccgccgctatgcctcgctctacaaagaatggcggcagcttatccacacgggcaccctatggcgggtggatatgccggatgcggcgacacaggtgcagggggtggtcagcccggatcagtcgcaggcgctcttcctggtgagccagcttgccatgccggatcacaccctgccgggtgctctacgttttccggggctggcaccacaggcccgttaccggcttcgtgttgttgaccatccggatattcagctggtcggtgaaggcgggcataccatgcgcaggctgcccggctggatgaaccagacctccgacatcagtggggaatggctggcgcaggccggtattcagcttcccgtactggatccggaaagcgccatgctgattgcccttgaacgtttggcataa

SEQ ID NO: 39515 - DNA, 1011 bp, Escherichia coli
atgtcactcaaggctatcgccgccgaactcgggatctctgtcaccacagtcagccgggcgcttggcggattttcggacgtttccgcttcgacccgtgcacgtgtagaagcggaagctcggcgtcgtggttatcgcccgaataccctggcaagacgtctcaaaaccggtaaaaccgatgcggtcggcctggtcttccctgaacatgctgtactgttcagcagtagtgtgtttgtggatatggtcagttgtatcagccgggaactggcccgccatgatattgacttactgctgatagccgatgatgaacgggctgacagccacagctatatgcgtctggtcgaaagccgccgggttgatgcccttatcgtggcgcacacgatggataatgacccgcgtcttacacacctgcaggaggccggtattccgtttctggcactcggtcaggtgccgtccggtcttccctgtgcctggtttgactttgataaccatgcaggaacctggcaggccacacagcacctgattgccctgggccatcagcgaattgccctgctgagtgaggacaactcccgtgcctatgtcactgcacgacgtcagggatggcgcgatgccctgagtgaacatggtctgcctgagacctggctacgccgggtctctcccacccgacgctcaggtttccaggcagtgactgagttaatgtcacttccgcttcccccgacggccattattaccgacagtgacctgatcggtgatggcgcggccatgtcgctgcagttatccggtcatctgtccggagaggatgccgtctctcttgtggtttatgatggtctgccgcaggacagtattattgaacaggatgtggctgcagttcttcagtcaacacgacatcgcgtcggtcgtcagattgccgacatgatacgccagctggtcacgaatgtttcacctgaaatgctacaagtactctggcagccggaatttcatcctggcaagacaacgcttgctccctccgcctga

SEQ ID NO: 39516 - DNA, 372 bp, Escherichia coli
atggaacggatttttgcaaatcaggccgctgtagtttacatctgcgcccagtttttcacacaacgcacgttcaatcgcggcggcgtatttcagcgccttaaccgaagcatcaggcgcggttctcacggcgatattgagtgcgtagagcaggtgggcgtgaccgttcacgggattttttatggtgatgttcggtgcgggggcgttcaggtcgctccagtcaatcgcagccccctcgcggtcaacatcaaaaaccagccagaactgcgcatgaggctggttctgctgtatgtaccgcgcaagaagcgcacgccctttgccggagatgcgaagaccaaaagcgagatcatccgtgtgatagggacgatggggtaa

SEQ ID NO: 39517 - DNA, 492 bp, Escherichia coli
atggcgggtgatttacgcaggttaaggggagatcgtgacaaaaaaagcgttcctcactgtatcgttcatgcctgcatgaacgggttattcttcctgactacagaattacatcgctccttcagttcatacatcacttttacatcacttttacatcacttatacatcacttttacatcattccttcagctcatacgtcactttcatcctctgtgccatttgtacatcacccccttcctgaacgtgctgacagcgggttttccggctgcgccggcaacgcttcacggccacgcaataaattgcgtccccgttcaccgttttcggatgggaagaacgccggaaacaggacttaccccggctgaatggtgtgaatttccgcgctatgcacttgtgcgcatactcatgcatgccgtaaaaacagagcctgcgcgtttctggcgggttttcgggtggtttgttgcctgttttaccggtttcccgtcagaaacgccctga

SEQ ID NO: 39518 - DNA, 435 bp, Escherichia coli
atgaaaactgaactgaccctgaatgtattacagaccatgagcgcacaggaatatgaagatatccgggcagccggaagcgatatgcgccgtaatctcactcacgaggtgatgcgtgaagtggacgcaccggttaactggatgatgaatggcgagtatggcagtgagttcgggggctttttccccgtccaggttcgtttcacgccagcccacgaacgtttccacctggcgttatgttcaccgggcgatgtctctcaggtctgggtgctggttctggtgaatgccggtggtgagccgtttgcggtggttcaggtacagcggcggtttgcaccggaagccgtcagccattcactggcactggcggcgtcactggacgcgcaggggtacagcgtcagtgacatcatccatatcctgatggcggaaggaggtcaggcatga

SEQ ID NO: 39519 - DNA, 678 bp, Escherichia coli
atggccttccagtacatccaggcgaccaccggactccagaacaacgccgtcagccttaccgttttccaccgtgaaattgcccagacggttgctgccaagaaccgttgccgcagtactggtgaccagtgctccaccctgtttcagggtgacatgtgtggcggtaccaccggcgttcacctgcagtttgcctttctggttaacggtggtattttcagccactgccccatccttcactacctgccagccgtcactgtttacaacagtgccagacgctgtaccgccgttgtgcacatactggtaccccccattcagcgtggtatccagtgcgtgaccatgtaccgtctggtcgccgccggcataaaccacagtggtatttgctgttccttcagcagccacaatctgacgaccatttttattgatggtggtacgtacggcatttccgcgaacaaactgcccggtatcaccattttctgcatccggtcccccttctgcgccggtattcacaaccgtgtcggttgccactgcgccggatttgacggcctgccagcccttctcattaatgacggtaaccgttgcaatcccgccttcatgtacccactgctcaccgccgttcagagtggtattcactgcctgcccctgaaggctctgtccgcctccggcactgataaccgtgtctga

SEQ ID NO: 39520 - DNA, 483 bp, Escherichia coli
atgactttcttgccagatggacatgttgccgttgctccaggccaacgccacgcagtagctgaagcggtaacaatttggctatcacctgcgccaatttttttccacgtaccggattggcacggaggccagtgccaatccggtgtgtggagaacttccggttcctctaacggtagttacagtaatcttggctcacacagaggatcatttactggtcgcaatacaggaagtggtacgctgtttgtttacgcctctggagggaatggtggttccgccgggggagattgcgctaacacatccagattgcagggatacgttgcaggggcattgattagcacaaatgcgagcaacaacccatcttatgggaagacagcattcatctcttttgctgtccctgctggcgcaacttatcagatcacctcttatccggcccaaaactactcttgtggctcaggggtattttcagtatttggataccagacttaa

SEQ ID NO: 39521 - DNA, 162 bp, Escherichia coli; identical to SEQ ID NO: 27732

SEQ ID NO: 39522 - DNA, 1164 bp, Escherichia coli; identical to SEQ ID NO: 32830

SEQ ID NO: 39523 - DNA, 3303 bp, Escherichia coli
atggagaaaccggcgtcgggaatgtcagcatcaccacggggggggatgtgggaggtcaataagaatgtctataccaccattggtgttgcgggtgtcggaaacctcaatattagcgatggcggtaagtttgtatcgcaaaatattacttttttgggcgataaagcaagcggtatcggcacactgaacctgatggatgcgacatcattgttcgatactgtaggtattaatgtcggtaattttggtagcggcatcgtaaatgtcagtaatggtgccactcttaattcaacgggctatggatttatcggaggaaatgcctccggtaaggggatagttaatatttcaacggatagtctctggaatttaaaaacgtcatctactaacgcccaattgctacaggtcggtgtattaggcgcgggtgaactgaatattaccaccggaggtatagttaaagcgcgtgatacacagatagctctcaatgacaaaagtaagggcgacgtgcgggtggatgggcagaactctcttcttgaaacattcaatatgaatgtagggacgactggcacaggtacgttaacactgacgaataacggtacgctgaatgtcgaaggtggagaagtttacttaggtgtttttgaacctgctgtaggaacgctaaacattggtgcagctcacggtgaggcggcggcagatgccggatttatcaccaacgcgacgaaaatagagtttggctctggcgaaggtgtttttgtctttaatcatactaataacagtgatgccggctaccaggtcgatatgctgattacaggtgacgataaagacggaaaagtgatccatgatgcaggccatacggtgttcaatgcagggaatacttatagcggtaaaacgctggtcaatgacggcctcctgaccattgcgtctcatacggcagatggggtaacgggcatgggttcgagtgaagtaaccattgcaaaccccggtacgctcgacattctcgcatcaacgaacagtgcaggagattacacgctgaccaatgcgctcaaaggcgatggcttgatgcgagtgcagctgtcatcctccgacaagatgtttggctttacccatgcaacagggactgaattcgccggtgttgcccaactgaaagatagtaccttcacgctggaacgcgacaacaccgctgcgcttactcacgcgatgttgcagtctgacagtgaaaataccacatcggtaaacgtgggagagcaatccattggtggactggccatgaatggcggtacgctcattttcgatacggatattcctgctgcgacgctcgcggagggatatatcagcgtcgatacgctggttgtcggcgcgggtgactacacctggaaaggccgtaactatcaggtaaacgggacgggcgacgtgcttatcgacgtgcctaaaccgtggaatgatcccatggcgaataaccctctgacgacgctcaatttgctggaacacgatgatagtcatgtcggcgttcaactggtgaaggcgcaaacggttattgggtcgggtggctcattaacgttacgtgatttacagggcgacgaggtggaagcggacaaaacgttacatattgcacaaaacgggacagtggtcgccgagggtgattatggattccgcctcacgaccgcaccaggtgatggtttgtacgttaactatgggctgaaagcgctgaacatccatggtgggcaaaagctgacgttagccgaacatggcggagcctatggcgcaacggccgatatgtcggcaaaaatcggtggtgaaggggatctggcaatcaatacggtgcgacaggtttcgctttctaacggtcagaacgactatcagggggcaacctacgttcagatggggacattacgtaccgatgcggatggcgcgctgggcaatactcgggaactgaacatcagcaacgcggccatcgtcgatcttaatggatcggcccagacggtagagacattcaccgggctgatggattcgactattttgtttaaagaggggtcgctgacggtgaataaaggtgggatcagtcagggcgaactgacaggtggcggaaacctgaatgttacagggggaacgctggctatcgaggggcttaatgcacgctacaatgccttaaccagcattagctcaaatgcggaagtcagcctcgataatacgcaggggttaggcagaggaaatattgccaatgacggtctgttaacgctaaaaaatgtgaccggcgaactgcgtaatagcataagcgggaagggtatcgtgagcgcaaccgccaggacagacgtagagctggatggcgataatagccgctttgtggggcaattcaacattgatacaggcagcgcgctcagcgtcaacgagcagaaaaacctgggtgatgcttccgttatcaataatggcctgctcaccatctccactgagcgtagctgggcgatgacgcacagtatcagcggtagcggtgatgtgacaaaactgggtaccgggatcctgactcttaacaaagattccgcggcgtatcagggtacgacggatatcgtgggtggtgaaattgctttcggttccgactctgccattaatatggcaagtcagcacattaatatccataacagcggtgtgatgtcgggaaatgtcaccactgcaggtgatgtgaacgttatgccaggggggacactgcgtgtcgctaaaaccactgtcggcggtaacctggagaatggtggcacggttcaaatgaacagcgaaggggggaaaccggggaatgtactgaccgttaacggtaactataccggaaacaatggcctgatgacgttcaacgcgacgctgggcggcgataattcgcccaccgataagatgaacgtgaaaggcgatacccaagggaatactcgcgttcgggttgataacattggcggcgtcggtgcacaaacggtcaacggtattgaactcattgaggtcggcggtaattctgcaggtaacttcgcgctgaccaccggaactgtcgaagctggggcttacgtctacacgctggctaaagggaaggggaatgacgagaaaaactggtatctgaccagtaaatgggatggcgtaacgccagcggatacacccgatcccatcaataatccccctgttgtggatccggaaggcccatcagtttatcgcccggaggccggaagctatatcagcaacattgccgcagccaactcgctgtttagccatcgcttacacgaccgtctgggtgagccgcagtatacagattcactgcattctcagggttcggcaagcagtatgtag

SEQ ID NO: 39524 - DNA, 1233 bp, Escherichia coli
atgagtgatacgcttttaaccgaaaaaatccttaccggagaaaatgttttgcgtgctgcaatcgcccgcattgagtggatttttgaaacatttccgtcggtatgtctgtctttttcaggtggaaaggattccaccgtgcttttccatcttgtggcagaggtggcccgcaggagaaaacgtcatttctctgttctgttcattgactgggaggcccagtatcggtgcaccattgaacatattcagaagatgcgggaaatgtaccatgatgtgacggaaaccttttactgggtggcacttcccctgaccacggtaaacggcgtctcgcagtttcagccggagtggatatgctgggagccaggagtgacctgggttcgccagccaccggaagaggccattacggatatgacatattttccctttttccggtatgccatgacgtttgaagaatttgttccggcattttcttcctggtttgccggtaaccggtgtggagtggcagtgctgaccggtgttcgtgcggatgaatccctcaatcgctttatggggctggtgtctcagcgcaaactgagatatgccgatgataagccctggaccacggcatcgcctgaagggttttattacaccatgtatccgttgtatgactggaaagcccgcgatatctggatatataacgccagagcttgtgccatttacaatcctctgtatgacctgatgtaccgtgccgacgtgccgttacgcaacatgcgtgtctgtgaaccttttggtcctgaacaacgtaaggggctgtggctttaccatgttctggagccggaaacctgggccaggatgtgtgagcgggtgtcaggcgctgccagcggggcgctttatgccaatgaaagcggtgcctattttgccctgcgtaaacgtatatcaaaaccagcccatcatacctggcgcagctatgcgatgttcctgctggatgtgatgccggaaagaacggcagaacattaccgtaataaaattgctgtctacctgcgctggtatcagacgcggggcttcccggatgacatcccggatgaacaggagaatgacctggggagccgggatattccgtcctggcggcgtatctgtaagacacttataaagaatgatttctggtgccggaccctctccttcagtccgaacaaaccccggcactatgaacgttatctgcagcgtatgaaagaaaggaggaaggaatgggggattctgtga

SEQ ID NO: 39525 - DNA, 879 bp, Escherichia coli
atgattaaacctgaaatggaagaggttttagttaaggttcttaaaaataggtggaacgagcacggtaccccatatttcgaccttatgaccttaatccttactgacttagattcatatccggtttgggcatctctcccggaatatgttctacaattggcagatctgttctggtatcggccacttaaagaaacaggcgaacgttatcacagtatggatattgaagatgagttcggtctatttaggtctcatcacgactattatccagaaagtccatatcagactcctatatattggttactacaatcacagttcaaaaaaacaatagactttattcttgattttacgaacaagacaacgatatgttttgcccactcccattttgctaaaaacgaaattgaagaagtcgatgtctttattgaagaaggaaagtttataaagcaatatatatgcaatcgtctgtggtgctcatatcgaggaacacaggtctctacctacttactttcatcaattcatatggcattggaaaaattttttcttgagaattttaaaaatgcagactcgaaagtgttggaaagttggcttcttttcttgttaagaaataccaagtcagcttctatttctgcagtagttacgagtattgtacttgcattccctgagaagacattcaatgtagctaaagtactattccaaacaaaggatttcttccgttttgatatgaatcgaatggttctagacagaacacataaaagttcattaatctccctcagggatggctttggcggtacagattacagaaactctttgcacgaagaagatagaattaaagcttgcgatgatgtgcatagaaatacttatcttgaaaatcttgcctttcaatga

SEQ ID NO: 39526 - DNA, 612 bp, Escherichia coli
atgacatggcaacttttatgcgatgaacatggttttacccgggagcactacaatcagctgaagaagttcagcccggaaacattacgtgaaattattgctgaaatagccagctgtcatccatcaaccagtgtattgctcaggaataagtggctgacaccgccggaggatattctggagcagattacccgtgaatacgaacgaagaatacaaaactgtccaccgttcaggagcgagaaggaagcggaatcctggttaaatgaactatcttttgctgtgattgctccgctataccgtgttgcccccgaacaaacagaacaggttgagtcctttgttctgcagcttattgccgagcaggagcgggtttgggagcttattttaaccaatgatggttattcatggcattgcgcactttatgatatattatttcatctggttttacgaaatatggaagaccagcctgaacatcagaaacagcgaataacaaaaatattttatgagcccgatgcaagactggttgcagaagagattaaattccggattcaatctctgtatgatgatgaacaaaagagagctttaagtgaactggtaaatgattttacttcaaaagaataa

SEQ ID NO: 39527 - DNA, 585 bp, Escherichia coli
gtgacatgccatgactcagatgactggtcccatcctgaaaaattatttagacagatatcacctttattgttaaaccataaactaatttgttcgatctctgattggataaggttgcaagataatgggattttctatgcgcgtgcggtctatccactaaaaagactgaatccttcttctctgctgtttagaagagcggatgtattgcaaaaagcgggcgtttgggactgtgttaaaacgggtgctgatagtgaattcattgctcgacttaagctaatttttggtgcttcctctatacatcgtattaaattgcctttgacactaggaagccatcgtaccgactcgttaatgaattcacctacaacaggatatacatctcagggaatttcaccggatcgccaaaaatattgggattcctggtcgcgatggcacattcaggcgttaagaaataaagaaagtctttacataggaaattctgatttcactaataaaaatcgaccattttctgcacccgactcaatattagtagatactaatgccatcaaaactgcattacaaagtgctcatgttaactttgccagtatataa

SEQ ID NO: 39528 - DNA, 639 bp, Escherichia coli
  misc_feature (584)..(593): n is a, c, g, or t
atgtattggtcattacataatcttactgatacaccgccagattggcggtgtaaattagcaattaaaatagctaaaattgcctgtggtgacataagcttaactccggaattactcatggagtttaaagacgagtacacagaaacacatcaaaaagttgagttagcaaaaaccttagcatcatactctcctgagttttcattatcattattagataatgccgataattgtcccttagacttgtatacagctcttcaattaagaatcgggttaactcaaaaagctatatcaacactcgctcagattgatgtcagtgatattgtatactcccctgatatattactcttgcaaaataatgctttcagagaaacggcagaaatctctttaaatagacttaacgaatactataagtactttggtttatctccagtcgcacttgcagataactcatctcctttgtcaccttgtaatattattacattggttccttatcctgtccaaacgggccccctggtttctattttaatgacaacatacaataccggcaggcgggtagaaaatgcagtaatatcattgcttaatcaaannnnnnnnnngatgatgccagcaccgatgatacgctatttcgtcttcagagattag

SEQ ID NO: 39529 - DNA, 735 bp, Escherichia coli
gtgctgaccggtgttcgggcggatgaatccctcaaccgctttatgggactggtgtcccagcgcaaactgagatatgccgatgataagccttggaccacggcatcgcctgaagggttttactacactatgtatccgctgtatgactggaaaactcgtgatatctggatatatcacaccagaacccgtgccatctacaatcccctgtatgatctgatgtaccgtgccggcgtaccgttacgcaacatgcgtgtctgtgaaccttttggtcctgaacaacgtaagggactgtggctttaccatgttctggaaccggaaacctgggccaggatgtgtgagcgggtgtcaggcgctgccagcggggcgctttatgccaatgaaagcggtgcctattttgccctgcgtaaacgtatatcaaaaccagcccatcatacctggcgcagctatgcgatgttcctgctggatgtgatgccggaaagaacggcagaacattaccgtaataaaattgctgtctacctgcgctggtatcagacgcggggcttcccggatgacatcccggatgaacaggagaatgacctggggagccgggatattccgtcctggcggcgtatctgtaagacacttataaagaatgatttctggtgccgtaccctctccttcagtccgaacaaaccccggcactatgaacgttatctgcagcgtatgaaagaaaggaggaaggaatgggggattctgtga

SEQ ID NO: 39530 - DNA, 162 bp, Escherichia coli
atgacaaggttgtttaacaacatacggccggatgccattccatccataaccccaagctctctggtattagctttacccgctaaaacccgtgacacggtgctggatgaaaggcctgttcgcatggcaatatcagcaatctttagttttttttccatattgtga

SEQ ID NO: 39531 - DNA, 378 bp, Escherichia coli; identical to SEQ ID NO: 38842

SEQ ID NO: 39532 - DNA, 144 bp, Escherichia coli; identical to SEQ ID NO: 9158

SEQ ID NO: 39533 - DNA, 366 bp, Escherichia coli; identical to SEQ ID NO: 5339

SEQ ID NO: 39534 - DNA, 450 bp, Escherichia coli
atgaacttatccctccgacgctctaccagcgcccttcttgcctcgtcgttgttattaaccatcggacgcggcgctacgctgccgtttatgaccatttacttgagtcgccagtacaacctgagtgtcgatctaatcggttatgcgatgacaattgcgctcactattggcgtcgtttttagcctcggttttggtatcctggcggataagttcgacaagaaacgctatatgttactggcaattaccgccttcgccagcggttttattgccattcctttagtgaataacgtgacgctggtggtgctcttttttgccctcattaactgcgcctattccgtttttgctaccgtgttgaaagcctggtttgccgacaatctttcgtccaccagcaaaacgaaaatcttctcaacattggctggaccatcggtccgccgctcggcacgctgttggtga

SEQ ID NO: 39535 - DNA, 2718 bp, Escherichia coli
gtgcagattatccagcagtttgaacagacgggttctcatgctaaccgttatgacgtcacgatcctggttaatggtttaccgctggtgcaaatcgaactaaaaaaacgcggggtggcgattcgtgaggctttcaaccagatacatcgttacagtaaagagagttttaacagcgaaaattccctgtttaagtatctgcaactgtttgtcatttctaacggcaccgatacccattattttgccaacacgacaaagcgcgataaaaacagttttgacttcaccatgaattgggcaaaatcagacaacacgctgattaaagacctcaaagactttaccgctacctttttccagaaacatactctgctgaatgttctggtgaactacagcgtttttgacagtagccagacgctactggtgatgcgaccgtaccagattgccgccactgagcgtatcttatggaaaatcaacagctcctataaagcgaaaaactggtctacccccgaaagtggtggctttatctggcacactaccggttctggtaaaaccctgaccagctttaaagccgcgcgtctggcaacagaactggactttattgataaagtcttctttgtggtcgacaggaaagacctcgattaccagaccatgaaggaatatcagcgtttttcgccagacagtgtcaatggatcggaaaataccgcaggtcttaaacgaaatctggataaggatgataacaaaattatcgtcaccactattcagaaactcaataacctgatgaaagcagaaagcgacctgcctgtatacaatcagcaagtggtgtttatatttgatgaatgccaccgcagccagtttggagaagcacagaaaaacctgaagaagaaattcaaacgctattatcagtttggttttaccggtacccctattttcccggaaaacgccttaggctcagaaacaaccgccagcgtatttggtcgtgaattgcattcatatgttattaccgatgcgattcgagatgaaaaagtgcttaaattcaaggtggactacaacgatgtgcggccacagtttaagtctttagagacagaaaccgacgagaaaaaactgagtgcggctgaaaatcagcaggcgtttcttcatcccatgcgtatacaggaaattacgcaatatattctgaataatttccgccagaaaactcaccgtaccttccctggctcaaaaggttttaatgctatgttggcagtgagcagcgtggatgccgcgaaagcctattatgcgacgtttaaacggttacaagaagaagccgctaataaatcggctacctataaaccgctgcgtattgcgacaatcttctcctttgccgccaatgaagaacaaaatgccattggtgagatttccgatgaaacttttgataccagcgcaatggacagcagtgctaaagagtttctggacgctgcaattcgtgaatataacagccattttaaaactaactttagcaccgacagtaacggttttcagaactactatcgtgatttagcccagcgggttaaaaatcaggatatcgatctgctaattgtcgtggggatgttcttaaccggcttcgatgctccaacattgaacacgctattcgtcgataaaaacttacgttttcacggcctgatgcaggcattttcccgcaccaaccgcatttatgacgccactaaaaccttcggtaatatcgtcactttccgggatctggaacgctcaactattgatgccataacgctgtttggtgacaaaaacaccaaaaatgtagtgttagaaaagagttatgcagagtatatggaaggctttactgatgctgctactggtgaagctaagcgcggctttatggcagtagttgcagaactggaacaacggttccctgaccctgccagtattgaaagtgaaaaagagaagaaagacttcgtaaaactgtttggtgaatacctgcgtaccgagaacatcctgcaaaactatgatgaatttgccacgctgaaagccctgcaacaaatcgatcttagcgatcctgttgcagtagaaaaattcaaagcagaacattatgtggatgatgaaaagctcgctgaattgcaaacaattcgtctccctgctgatcgcaagattcaggattatcgttctgcctataacgatattcgcgactggcagcgccgtgagaaagaagctgagaaaaaagagaaatcaaccactgactgggatgacgtggtttttgaggtcgatttgctgaagtctcaggaaataaacctggattatatccttggactgattttcgaacataacagacaaaataaaggcaagggcgaaatgatcgaagaggtcaaacgcttaattcgttcaagcctggggaaccgggcgaaagagggcctggtggtcgattttattcagcaaacgaacctggatgatttaccagacaaagccagcatcattgacgcgttctttacctttgctcaacacgaacagctacgtgaagcagaagcgttgattaaagaagaaaatctcaatgaagaggcggcgaaacgctatattcgcacgtctttaaaacgcgaatacgccaccgaaaatggcacagaattaaacgagacattaccaaaacttagtccgttaaacccgcaatataaaacgaaaaaacaggcagttttccagaaaatcgtctcgtttattgagaagtttaaaggcgtaggcggaaaaatatag

SEQ ID NO: 39536 - DNA, 672 bp, Escherichia coli
atgaaaaaagagactgcacagttatatctgctgttttttgcttttcatcggtttcagcaaattaatgacaacttaattgaagcattgctccattgggtcgatcaatacgagaaacaggccaagcgtgccgctgaagaagcaatgaataatgcggttaccaatgcagcgaaaaatttacaggctgcgggtcatgtattgagcctgtttacggatgacaccatcaccgatgacacacctttttccattattaaagaaaaagcctatgcattgcttgaacaagagagattcccattagttgctgattacttacgcaatattgctttcgacaaaacggcatttgaatggtcacattacacaaaattatccgccacattcaaacgtaacttaaggcaactttttactgatctggattttgccggacgtgtagaagactctcctttgcttgaagctatcgcgtttttacaaaacttattgcgcacagaaaaatcaccaaggcaaactgaccctaattcatttccgactgagattattcctaaaggtttacgccgatatttgtttagtaaagagggcaaaacatttaaaacgcttgatgtagatcgctatgagtttttggtctatcgcctactacgcaactcactggaagcgggtgatgtgtacgttaaacccatataa

SEQ ID NO: 39537 - DNA, 405 bp, Escherichia coli
gtgagtggtggtaataattttaaaatgtctcaggactatgaaattgctcaaccaaaaaagaaaatggcttaccctattcttgttgaagaatgggattttttaatagggaaaatagaaagtattagtgatgatgaaaatatataccatacgattggttctatatttttaggtgtggctggctcggcattgatagcagcattaactttagatttgccatcagatgatggttatatgccaaggcagatattaatttcatggtacgtattttgggcaagccttatttgtggagtgctttctatgttttttggtagaaagaataaaaagattaatagaacttctgcgaaggatattgtgcaacaaatgagattgatagagaaacgttacgagcaaggtagtatggattaa

SEQ ID NO: 39538 - DNA, 147 bp, Escherichia coli
atgtctaacaaaatgactggtttagtgaaatggtttaaccctgaaaaaggtttcgatttcaaaacattaactgagaatcaggaagttgaatttggtattgagaacggacctaaaggtcctgccgctgttcatgtagtggcgctttga

SEQ ID NO: 39539 - DNA, 282 bp, Escherichia coli
gtggaagaagggaggatcgttgcttatgacgcttccggcaacaaaatttattcccgcgcgaagcctggcgaactggcgcagtttgatgaggcgctggagttccttgtcgaaaattaccctcagaaagactacatcctgaaagccagtggcaacaatggcggcggctcccgtccgacacagcatgatattggtcagaaaacgatgaaacgctctgcttttgatgcactggatgttgcaggtaagcaaaacgcattgaaagacggtatcacaatcgttgattaa

SEQ ID NO: 39540 - DNA, 276 bp, Escherichia coli; identical to SEQ ID NO: 5786

SEQ ID NO: 39541 - DNA, 270 bp, Escherichia coli
atgaccaccatcttgtctctgatgtatctggcgtttgtggcgacaattgttggttatgggatctgggggacgttactgggacgctatgaaacctggcgggttgcaccgttatcgttactggtgcccgtagtaggactggcaagtgcggcactattgttggatgaacgcttaacgggtctacaatttttcggtgcggtgctcattatgaccgggctgtatatcaatgtatttggcttgcggtggcgtaaagcggtaaaggttagaggctaa

SEQ ID NO: 39542 - DNA, 288 bp, Escherichia coli; identical to SEQ ID NO: 30151

SEQ ID NO: 39543 - DNA, 720 bp, Escherichia coli
atgagcgtacattcacgggcactggttcccctctgcacagagcaacaggccgcatggcgggcggtggcggagacggaaaaacgccgccatcagggaaacacgctggctgaatatccgtatgcgggggcgtttttccgctgtctgaacggaagccgcaggatatcgctgtctgacctgcgatttttcatgccgtccctgaccgcagaagaactgcacggcaaccgtcttcagtggctgtatgccatcgatgtgctgattgaaacacagggcgaggtctgcctccttccccttcccggtgatgcagcagagcgcttgttcccgtcggtgcggtttcgtgtcagggaacgcagtcgccataaatccgcgctggtcatgcagaagtacagccgccagcaggcgagggaggcagagcagaaagcccgtgcgtaccaggcgctggtcgctcaggctgaaatcgaactggcattccattcgccggaaacagtcggaagctggcatgcacgctggagtgaccgggtggcagagcatgacctggaaaccctgttctggcagtggggcgagcgttttccgtcactggccggaatggaacgctggcagtggcaggatatgccattctggcaggtcatcgcagaggctggtatggcggcaagggtggtcggtcatgctgttcgtgagatggagcggtggatggtgccgaacaaactccgggaggcagcgtga

SEQ ID NO: 39544 - DNA, 1164 bp, Escherichia coli; identical to SEQ ID NO: 32830

SEQ ID NO: 39545 - DNA, 396 bp, Escherichia coli
  misc_feature (359)..(368): n is a, c, g, or t
atgttagttagtaaaagcaacgaaattaacactagcacatttataaatagtggaagttgtaatgaaagaaaatcttctaaatccatggagttactagcttatagtattataaaattaatttgtaaagaagctgcctcagggacgtataacggtgctcttgaaattttacaaaaaatgatgtctgaatgtaaatatcatgaaggcaatgcttttgtcattatgggagccggagaacaattaaaacgtattaaatatgatgctaatgaaaataaattaaaagtatacaacgtacactttgataataatcaagagttagttgctgatggtgagcctgacgtagtatttttaaaaaaaacggnnnnnnnnnngtgtgggaagaccttctcgttaaactaa

SEQ ID NO: 39546 - DNA, 444 bp, Escherichia coli
atgcacgaaaagaacatcgccctgctttgtgatgaagccgaccggcttttgcaactgaatatcaatctgctccggcaaatggttgatgagccggatgtgttatctgacagtaagaacgaaaacgggctgctttttgataaacggaaagcgctgaaaagaattgaggagctggagggcgaacaaatcaaaaccgcccgcagggagatggtgctggctgtggtcggcacgatgaaggcgggcaaatcaaccaccatcaacgccattgtggggcaggaaattctgcccaaccgtaaccgccccatgacctcggtaccgacattgatccgccacgttcccggaaaaacggaaccggtcctccatctggaacatattcagcccgtccgcaatttattaatcacactgcaggaaaaactcgccaccccggcagggcagcaagtcgcatag

SEQ ID NO: 39547 - DNA, 336 bp, Escherichia coli
gtgaccctggagccccgtgtcttcggctggatggaccgtctgtgcgaaaactactgcggtggtatctggaatctgtacaccctgaacaacggcggggcatttatggcccctgaaccggatgactatgatgacgaaacatgggtactgttcaatgccatgaacggtaaccgcgctgaaatgagtccggaagctgccggtattgccgcctgtctgatgacgtacagtcatcatgcctgtcgtatggagaattatgccatgacggttcattattaccgtttgcgggattacgccctgcagcatccggaatgcagcgccattatgcgcattattgactga

SEQ ID NO: 39548 - DNA, 816 bp, Escherichia coli
ttgatcttccctggcggacatatctattttgatagtaaagagggaactgatgccaatctggatgttgatgatacggatagctatggaccagaaactgtcactatcagcaaaaagcattttggtgaaagttacatctatgccgtgcaggactatagcaataaagggctgcccaacagtaattatctctctgccagtaaggcaaaagtgtttgtttatgtagggagctccctggtacgtagttatagtgtccctgcaggaaaacgagggaacatctggaccgtgtttaaactcaatccaaacggcgagtttgaagatatcaactctgttaccagcgccaattttaacggcaccacattagacgtcagggatttagccactgtgataatgcctgcgacggactcttcagctccggcttcgcctgcgatgcaaaacagtggagatactcaactggcaagaaaatataatcgcgaaggtgaagctgtttataaaaccggtcaacttgagcaagccattcaactcttccaacaggcaacagaattagacggcaattacggacaggcatttagtaacctgggtctggcgtatcagaaaaatggcaacatagcggaagcaatttgggcaaatcgtaaagcgatctcgttagcgagtggggtaaatgcggcgacaacgcgcgccaactcctattataacattgccaaaatttatgaaacctcgggccagaatgctgaagcattgcagcattatcaactggcgtatacggaaaaaaataagccttcttatgaagaagctattgcacgtgtaaagacgaaaatgtaa

SEQ ID NO: 39549 - DNA, 927 bp, Escherichia coli
  misc_feature (903)..(912): n is a, c, g, or t
atgctgctaccattgcatcgcacatttgtcttaactgggataacatttgcattatcggcagtgtattcattgagctatgcacgagatgaatttaaccttcgtatcctggagctggatagcccacttgaaaatacacaagtgctggaggattttgttaataataataacttaactccgggagtatatcttacctctgttatgtgggggcaagagtatcttgataagagaaatattaccttcattctgtcttcggataaaaaaaggctcatccctcgttttacaaaggcggatctccgtgagttcggtcttaaagttgacgacattcccgcgttacaagtaatggatgatgacactgagtttggtgatattgctcagattattgatggcgcacgttatgatttccagttagacagccaaacgctgtgtctgcggatcccgcaaatctatcagaatgcgcgggccgcagggagtatttcaccgaaatactggagtgatggtgagagtgcggtttggttaagttattacgccagtggttcccggcaaaacagtgatggcgataacctgaattcaaattggttgaatttaaattcagggattaatttaggcgtatggcggctacgaaataataccgtttacagtgactccagttgggagtcgatcagcaccagtttgcaacgcgatatcaaagcattaagaagccagatggaagtcgggcagacgttcacaaatggcgatctttttgacagtgtgcagatgacaggtataaagcttgaaacggacaccagtatgctgcctgacagcgaacaaggctttgcgccagtggttcgtggtattgccaacagcgatgcacaagttgtgattaaacaaaacggctatgttatttaccaaacgtgggtatcggcnnnnnnnnnnggcagggccatttga

SEQ ID NO: 39550 - DNA, 123 bp, Escherichia coli
atgtccgaactgcaatggtcattgattcaactggcgatgttgggtaatgactccaacttactgatagtgttttatgttcagataatgcccgatgactttgtcatgcagctccaccgattttga

SEQ ID NO: 39551 - DNA, 201 bp, Escherichia coli
atggtgatacgcaaaaagaagtgcagggactgtggaaacgcgattactcataatacagtgtgttgcccgtattgtagttctgtcgaccccttcggctactaccggaatacagaccgtatcgttaccatactgctggcgctgattattgtggtcctgctgactactgtcagcgtcagtgtgtgtatactgtgtagctggtga

SEQ ID NO: 39552 - DNA, 432 bp, Escherichia coli
atgacggcggagcaacgccttgccgaacgtcagttgaaaacgaaaccgctgctgaaatccctggaaagctggctgcgtgaaaagatgaaaaccctgtcgcgacactcagaactggcgaaagcgttcgcatacgccctgaaccagtggccggcgctgacgtactatgcagatgatggctgggctgaggcggacaataacatcgctgaaaatgcgttgcggatggtcagtctgggccgcaaaaactacctgttcttcggttcggatcatggaggagagcggggagcgctgctgtacagcctgatcgggacgtgcaaactgaacggagtggagccagaaagctacctccgctatgtccttgacgtcatagccgactggccgataaaccgggtcggcgaactgctcccctggcgcgtagcactgccgactgaataa

SEQ ID NO: 39553 - DNA, 693 bp, Escherichia coli
atgacaattgactatcaggtactgcgtgaggcggcagaaaaggcaacaccagacgaatgggtcgcatttatttcgacggatactggtacttatgcggtgcacacgcccggtgatgaacgatgtgaagacgttatcaaatggaccggctttgatggacagaaaaatgcagagaacaacgctcgtcatgttgccgcgttcaacccaaaggttgcactggagctgcttggtgaaattaagtgcctggaggacacaaatattgatgctatgtgtcgaattgcagagcttgagactaatctcgcggcgctggtggcagagaacgccgggctgaaacacgcaatggccgtaactcttgagcatgtgtcggtcacggatgcagggcaggccggagttgctgcaatgattatcaacgatgccctgcaccacagcgaaactccagctaccgatgcttttctagctgaagtgaagactgaagcacgcaaggaaggcgcttattttgtggcgaacagaatgctggctgcctgggaagctggttttattgatgatactgcgaagaacgccgcggatattgcccggatgattcttacctctactgagtttatggctaatgcgccggaaggcgattttgaccgctcattctctgatggcgttctcgaagatatcgccgcccagcttcgaaaaggaggcaaccagtga

SEQ ID NO: 39554 - DNA, 183 bp, Escherichia coli
gtgagcaagattgactatcaggcactgcgcgaggcggcggaacaggcaacgcaagatgaatgggtagcatatatttgccgggtcataacggcatttatcctgcgcgcacgtctgagggtaggcattgcggatactttattgactggcctggcgtctgtcaggggcgggagagcatcaacatga

SEQ ID NO: 39555 - DNA, 507 bp, Escherichia coli
atgagcatcagaacctacgcagtgaattgcaatgacgcatggctaaacaccgaaggtgatgacatctccggctcatacgttaagtacaaagaccatcaggaagtggttgccgctcttgaggccaagtgcgcggcgctggcagcggagaatgcgggaataaagtctgcaattccagaatcacgggatattgaggatgacaatgacaatatggatgacgtatctctcgcggaagacttcgggttcaatcatgcaatagaacggatgaggagacagatacctgaaacgccaaccactgatgctttcctggctgaagtccgggcgcagggggtggatgctgctatagaagctgcaaaaaatctggtggcccaagaatatgagtataaggatttcaaagcggcgcagagtgattgctgtatgtaccctggttcagacctggtagggaaggttgaaatgactgagtggttagttgactttgctgcccagcttcgcaaaggaggcaaccagtga

SEQ ID NO: 39556 - DNA, 528 bp, Escherichia coli
atgaaagtctttgccggaaccaactttattgatttcaatatgacaggacagaacctatccgggttcgttctaaccttgtcaaggttttatttcgaagatctacttaatataaatttcactgacgcaaatttaggtgacactattttttcacataaagaacaccctgccccaaaattatataaagacgaacaatatcttgacaaacaaatcgaaggtttattttcaacattattaaccattaatgacaactttttacgagcaaaagcggaaattgcttcgacaataattaaattcttagaggccaggataaccaatatttcatacaatgacatattaaaatatcagcaagaattcaaaaaacaatgttataagcaagttaaagcctttacgacacaaaaaatgtcatgcgcaccttatttaaagagatcgctacctgatgaaaaaactataaattatggggtggaaatagaaacaccaactggcaaaagaattcgcttatcaaatcattaccagaatataatcccataa

SEQ ID NO: 39557 - DNA, 138 bp, Escherichia coli
atgaataacaccaaaaaatcactaaaagtgctctttattggggaatcctggcatattcatatgattcattcaaaaggatatgacagttttacctcaagtaaatatgaagaaggtgcacctggttactccagtgtctga

SEQ ID NO: 39558 - DNA, 513 bp, Escherichia coli
  misc_feature (25)..(34): n is a, c, g, or t
gtgaaccacctgccagacgtggttnnnnnnnnnngacgtggttatcctgcttctgtttttgacagtttgcctcgcttactggagaggccgggaccaacactaaaaggaagtattactgcgttttataccgtattactggagggggaggatgaatcagacccactgggtgatgaaattcgctcaatccttgatggccatatctatctaagtcgcaaactcgctgggcaaggtcattatccggcaatagatgttctaaaaagtgtgagtcgagtatttggtcaggtcactgatgaaaaacacagagataatgctgcacgggtaaggaagatcctcacaactttggaagatctacaggtgtttattgatttaggggaatatcgcgctgggcaaaatgctgaaaatgattttgctatgaatgcccggcctaaactcacaaattggttaaaacagtcagttaatgaaaaaatgccaatgagtgaaacgctaaaagagcttgaacgaattgttaagtaa

SEQ ID NO: 39559 - DNA, 456 bp, Escherichia coli
atggctgaacgtatcgaagagttgcagacaaaatctgcaccagattcgtttggcatcatcggtgaaaatattcgaacacaggataatcgaataacgtcagaccctatgttttgtgtgtatcaaaagcgcgaaatcgttgttgatgctgattatgactatgaccggattgtctgggttgatgaagatggcaatgaagccaataaacgccaaagtcgtcgtctcgaactacttcacgaaaactttcgagagccaccagaaaaatggcggcgcgttgctgtgaaagatattgatgaattcgttacctgctgtttcaccgaacagggttgtaaagactacctggcagccaatggtcacaatcttcgcttgccatttatatatgtaaaaagcggtttcaggaacgctgaatatatcggcataagaaactggcttgctggcattcgcatcaaaggagagtga

SEQ ID NO: 39560 - DNA, 1269 bp, Escherichia coli
gtgctgcgtactccgcgttcatttatcaataccgttccgcatatgagctttgtctggggcgaggataacgttaatttcctgcgcgcccgttacgccgcgttgcaacaaagctcgctgtttcgcggtatgcgttactctgaagatcacgcgcagatcaaagagtgggcaccgttagtgatggaagggcgcgatccgcaacagaaagtagcggcaacacgcacagaaattggcaccgatgtgaactatggcgagatcacccgccagttgatcgcctccttacagaagaaatctaacttctcgctgcaactcagcagcgaagtccgcgccctaaagcgtaatgacgataacagctggaccgtcaccgttgccgatctgaaaaacggcactgcacagaacatccgcgccaaatttgtctttatcggcgcgggcggtgcggcgctgaaactgttacaggaatcggggattccggaggcgaaagactacgctggtttcccggtgggcggacagttccttgtttcggaaaacccggacgtggttaatcaccatctggcgaaggtttacggtaaagcatccgttggcgcaccaccgatgtcggttccgcatatcgatacccgtgttcttgacggtaaacgcgtagtgctgtttgggccatttgccaccttctcaaccaaattcctcaaaaacggttcattatgggatctgatgagttccaccaccacctctaacgtgatgccgatgatgcacgttgggctggataatttcgatctggtgaaatatctggtgagtcaggtgatgttgagtgaagaggatcgttttgaagtgttgaaagagtactatccgcaggcgaaaaaagaggactggcgtttgtggcaagcggggcagcgcgtgcagattatcaagcgtgatgccgataaaggtggcgtactgcgtctcggtactgaagtcgtcagtgaccagcaagggaccattgccgcgctcctgggggcatcgccaggggcgtcaaccgccgcgccgattatgttgaatctgctggaaaaagtatttggcgatcgcgtttccagcccgcaatggcaggctacgttgaaagcgatcgttccgtcttatggacgcaagctgaacggtgatgtagcggcaacagaacgcgagttgcagtacaccagcgaagtgctgggtctgaaatacgacaagccgcaggcagcagatagtacgccgaaaccgcagttgaaaccgcaacccgttcaaaaagaagtggcggatattgcgttgtaa

SEQ ID NO: 39561 - DNA, 1008 bp, Escherichia coli
atgggttcatgtgcagctccatcagcaaaaggggatgataagtttatcaccaccgactatttgcaacagtgccccgcagcccgccgtgtcgcgctgggtagcctgctgtttaagctggtgggtagcctgattatcctgccgtttgttcatttgctggcagagacaatggggaagttgccattgccaaaagcggaattggtgatctatttccacgtcttctacaaccttgtacgctgcctggtcatgttgccattcgttgacccgatggcacggttttgcaaaacgattattcgcgatgaaccggaactggatacccagctacggcctaaacatctggatgtcagcgcgctggatacgcccacgcttgctctggcgaacgctgcccgcgaaaccctgcgcattggcgacgccatggaacagatgatggaagggctgaataaagtgatgcacggcgagccacggcaggagaaagagctgcgtaagctggctgatgacatcaacgttctctataccgccattaagctgtatctggcgcggatgccaaaagaggaactggcagaagaagagtcgcgccgctgggcggagatcatcgaaatgtcgctcaaccttgaacaggcctccgatatcgtcgagcgcatgggcagcgaaattgccgacaaatcgctggcagcaaggcgagcattttcgcttgatggcttgaaggaactggatgcgctctatgagcaattgctcagtaatttaaaactggcaatgtcggttttcttctctggcgatgttaccagcgcccgtcgtttgcgccgcagcaaacatcgttttcgcattcttaatcgccgctattcccacgcccacgtcgatcgcctgcaccagcaaaacgtgcagagtattgaaaccagttcgctacatttaggcttactgggagatatgcagcgtctgaactcgctgttttgttcggtggcttacagtgtgctggaacagccggatgaagatgaaggacgggacgagtattaa

SEQ ID NO: 39562 - DNA, 339 bp, Escherichia coli
atgaaaaaagtgactgccatgctcttctcgatggccgtggggcttaatgccgtttcgatggcggcaaaagcgaaagcgtccgaggagcaggaaactgatgtactgttgattggcggcggcattatgagcgccacgttggggacctatttacgcgagctggagcctgaatggtcgatgaccatggtggagcgcctggaaggtgtcgcgcaggagagttcgaacggctggaacaacgccggaaccgggcattctgcactgatggaactcaattacaccccgcaaaatgccgacggcagtatcagtattgaaaaagcagtcgccattaacgaagcattgtaa

SEQ ID NO: 39563 - DNA, 1488 bp, Escherichia coli; identical to SEQ ID NO: 28541

SEQ ID NO: 39564 - DNA, 486 bp, Escherichia coli
gtggtgacttctccggataaagcctactactggattcaggcgaatgtgctgaaggccgataagatggatctgcgggagtctcagggatggctgaaccgtggttatgaaggcgcagctgttggtgcagcgttaggtgccggtattaccggatataactcaaattctgccggtgccacactcggtgtgggccttgctgccggtctggtgggtatggctgcagatgcgatggtggaagatgtgaactataccatgatcacggatgtgcagattgcagagcgtactaaggcaacggtgacaacggataatgttgccgccctgcgtcagggcacatccggtgcgaaaattcagaccagtactgaaacaggtaaccagcataaataccagacccgtgtggtctcaaatgcgaacaaggttaacctgaaatttgaagaggcgaagcctgttctcgaagaccagctggccaaatcaatcgcaaatattctctga

SEQ ID NO: 39565 - DNA, 336 bp, Escherichia coli
atgaaaaaaattttgctgctgcatatgttggtgttcgtttccgccactctcccaatcagttccgtggcttctgatgaggttgaaacgcttaaatgcaccatcatcgcagacgccattaccggaaataccttatatgagaccggagaatgtgcccgtcgtgtgtctccgtgctcgtcttttaaacttccattggcaatcatggggtttgatagtggaatcttgcagtcgccaaaatcacctacgtgggaattgaagccggaatacaacccgtctccgagagatcgcacatacaaacaagtctatccggcgctatggcaaagcgactctgttgtctag

SEQ ID NO: 39566 - DNA, 252 bp, Escherichia coli; identical to SEQ ID NO: 30842

SEQ ID NO: 39567 - DNA, 633 bp, Escherichia coli; identical to SEQ ID NO: 30074

SEQ ID NO: 39568 - DNA, 717 bp, Escherichia coli
atggtgttgtgctggcactgcgacaaccagttgtgtgaccagacctcagaatcacttgagcaacttgctcaccaaaacttgtcagcatggatgattgacgtcatccgtcacgcaatcagcggtacgcaggagagggagttatcgctggccgaattatcctggtgggcggtctgcaatcaggtggctgatgtgcttccggagtctgtattgtgtcgttcactgggattaccggtggaaaaaatccgctccgtataccgtgagagtgacatcgtaccgggagaacagactgccaccagcatactgaagcagcgcacaaaaaatattgcgctgccacttcacgtccaccagcaacagcccccactccaggaaaagacgttagtaagcatcgccgttgatccggagtctccggctcagtatctccagcgccagaaaccacaacgggaagagatgcctgtatacacgcgctgggtaaaaacgcagaaatgcatgacgtgcggtaatcaggcagatgatccgcatcacatcattggtcatggcctgggaggtatgggaacaaaggctgatgatttgtttgttattccgctgtgccgtaaatgtcataacgaactgcacgccggggtaaaagattttgaagaaaaacacggcagccagctgttgttgctgattcgttttttaatgcacgcgagaaattcgggtgtcctgaagtggaaagcatga

SEQ ID NO: 39569 - DNA, 951 bp, Escherichia coli
atgaatgtttttattgatacaaatctatatttagaattttatcgaatgggtaaggataaactagatgagctagataaagtatttgccttacatcaatatggtcgtttaaaactttggttgccagaacttttagtgaatgagttctggagaaatcgttctaaagttctctctgaaaccataaaggaaattgcaaaagactacaagccagcgctaccacagattttcagacagcatgaaaaacatttactatttaatgataaggttatagaagctagtcggctaaagaatgaaattattaccgatatacagaacttatttaaagaagagtctttagctgccgatgttgtaattaaaaggatttttgatgcagcgtctaagatagaggctgatgatgaaacaatagaaaaggggaaacgccgattcgatcttggcaaccctccgggtaaaaataaatcatatggtgatgcagtcaattgggagtgtttgctaaaagcaataccaaacggagaggatatatacattataactgaagatggtgattataaaagtgcctttataaaggatgatatgaatgagtatttgaagtacgagtggaaaaagaagaaagattcagaaccacatatctatgcccgcttatcagagtttataggcgagcactttcctcaagccagtaacttagcggaaatggaagttaatttcactatagatgaattacgccgctcaggcagttttgccacaacacatcgagttgtagcaaagttattaaaattcaatcattttacacaagagcaaatcctaaaaataatcgatatctattttaataatgatcaggttggcttcattaaagatgatgatgatgtaaaactactcgccagaagactaatatcacttggtgacgaggataaagatcctgaagggatgcttgagccattccgtgtatttattgattaa

SEQ ID NO: 39570 - DNA, 459 bp, Escherichia coli
atgaaaggcaactgcgccgatctccacctgggcggcgtggtcaaattgccgggccttacggcatcgagctgggcgacgcgcccacttccccggagccgaacggggcagggcgttacgtcgccggtgacgccgaccagggcgaagcgcccaccccctccctgcaaagccggttttggcgggctgtcagacgataccgccgccggaacagtggcccgtcacaacggcccggttgagcgggcgggctggcgcgtagcgacgggccgggcgcgatttatccgggtgttggggggttggtcgcgcagcggccagcgcccctacaggcacgacagcgccgtaactggcagaggatggcgaagccaccccgaaggggcggggccgccggaggcggggcaagtccggcgcagggcgtgggggccaagcggagcgcggagggcgaagcccggaggcgttagggattga

SEQ ID NO: 39571 - DNA, 309 bp, Escherichia coli
atgtctgacacgcatttgtctttatatgaatttctaaggatgttcgttgtaataggcgtaactctcattgggtacttttatctcatcctcaatttaataacggttcgtaaattagggggggtatttcagttactggctcttataggtcttagtgcgatattttcattcatgatgttcagaagtgaaaatatgtggtcgggtgagccaagtttttctctggcgctgatgtttggttcgttttcagcaacggttattttttacatgtttaaaattatgattcatgcttttgagtcgttaggtagagaataa

SEQ ID NO: 39572 - DNA, 135 bp, Escherichia coli; identical to SEQ ID NO: 38622

SEQ ID NO: 39573 - DNA, 600 bp, Escherichia coli
  misc_feature (558)..(567): n is a, c, g, or t
atgaaaaaattaaaactattaaataaatacagctacttacatagcataaacggctcgctgattgaagcagagcttgacgacgtttcagtgggcgaagtatgcgaaatttatgcgagctggcaagcaaatgaacgtatagccagggctcaggtcgttggctttcgcaatggaaagacattattaaaccttataggcagctctgtggggcttacacgtactgcagttttgaaaccaacgggagagcagttaaccatacagatcagtgatgcctttcttggttcagttttgaatgcttctggtcaaattatggaaaggtttgtcccggacactccaggcgaaaggggaaatttacgcctgattgatgaactgccaccgtcgtatcaggaacgtcgagttattaatacaccactagagacacggataagagtcattgatggcgtactgacatgtggcattggtcaacgtgttgggattttcgcatcggctggctgtggcaaaacggttttaatgcatatgcttgtaaacaacactgaagctgatgtgtttgttattggcttnnnnnnnnnngtagggaagttacggaatgcgcggaatcgctga

SEQ ID NO: 39574 - DNA, 264 bp, Escherichia coli; identical to SEQ ID NO: 24468

SEQ ID NO: 39575 - DNA, 381 bp, Escherichia coli
gtgggttttcacctggtcttccaccaccagagtcagcgtcaggatgaacggacaggagatggacagttccgggttcagcaggttgctgtagttgtcggccacgttccacaggaaggcgatttccgggttacgggccagatggaaattcaggatgcgggccgtgctgttcctgccgttctcacgcaggcccagcgtcaggtaatcagcccggactttcagatcaaaactgtcctccacacactgataattcagatcagaatacgggtccagctgacgtcttttcgggtacagggagtccgggttatggttaatcatctccccgacaatatcgataaaggcctgtgcatccaccgtctgtgtggtgatactggccccctgtaa

SEQ ID NO: 39576 - DNA, 852 bp, Escherichia coli; identical to SEQ ID NO: 36130

SEQ ID NO: 39577 - DNA, 861 bp, Escherichia coli; identical to SEQ ID NO: 9954

SEQ ID NO: 39578 - DNA, 621 bp, Escherichia coli
ttgatactggcggtgactgtactggttcctgccgtctggctggtgacactgaactccaccgtaccgtccgactgcgtggtgaccgtcggagtgaccgttgcgctgttgcctgccatcacgctgaccgcctgcccggcaagtgcattgccgaacgcatcggtcaccctcgcccgcagcgtgttcgccgtcgaaccgtccgcctctgaaccatccttaatgaccaccagatcagcgatcttcgccgtcctgacatcggcaacaaacgtcacgtcccggctcaggctgctgttgttgatggatgcagtgacaatactgatccccgccgtctggctggtgacactgatctccaccgtaccgtccggccctgtgatgacagtcgaagcgaccattgcactgttgtctgccgtcacgctgaccgtctgtccgccaagcgtattaccgaatgcatccgtgaccctcatccgcagcgtgttcgccattgcgccgtcagccactgagttatcctggataacgaccagatccgctatttttgccgtgctgacatcggcgacaaacgtcacgttccggctcaggctgctgctgttgatgctggcagtgactgtactggtgcctgccgtctga

SEQ ID NO: 39579 - DNA, 747 bp, Escherichia coli; identical to SEQ ID NO: 7901

SEQ ID NO: 39580 - DNA, 258 bp, Escherichia coli
atggcagagaacaaacctgacttgccggacggcaaaacagagctggctgtcagggatattgccgggcaggaacgtgaccggactgccacttctgaacgggaaaccgcactgccggagagtgtgctgcgtgaatcacaacgggaacgggaagcggtccgggaggttgcccgggaaaatctgctgcagaggcttctgcagcagatggagcgggatatggttcgtgacctgcagaaagagaaaaccctgggcggagactga

SEQ ID NO: 39581 - DNA, 747 bp, Escherichia coli
atgacaacggataacacgaacacgacacgtaacgattcactggctgcacggaccgatacctggttgcagtcatttctggtctggtcacccggacagcgggatatcatcaaaacggtggcactggtgctgatggtactggaccacatcaatctgatattccagctgaagcaggaatggatgtttctggccgggcgaggagcctttccgctgtttgccctggtgtgggggctgaatctgtcccgtcatgcgaatatccggcaaccggccattaaccggctgtggggatgggggattattgcccagttcgcatattatctggccggctttccctggtatgaggggaatatcctgtttgcctttgcagtggcggcacaggtgctgacgtggtgtgaaacgcgcagtgggtggcgtacagcagcggccattcttctgatggccctgtgggggcccttgtccggcaccagttacggcattgccgggctgctgatgctggcagtcagccaccggctgtaccgggcggaagacagagcggaacgtctggcgctggtcgcctgcctgctggctgttattccggcgcttaaccttgccaccagtgatgcagcggcggtggctggtcttgtgatgacggtgctgaccgttggtctggtgtcgtgtgcaggaaaatcattaccccgtttctggcccggggattttttcccggtattctacgcctgtcatctggctgtgctgggcgttctggcgctgtga

SEQ ID NO: 39582 - DNA, 213 bp, Escherichia coli
atgcctgtctgcccgcgccgggaaaaaacgcgcgccggtggcgctgaaaggggccgcgctcacgcgccgcccctttcattacgcggacgttctgatgggggcttctgtttcttcatgcctgtcatttgtctgttactgatgttgttgttcctgctactgctactgctactgctactgctactgctactgttcttctttttcctgctgctctga

SEQ ID NO: 39583 - DNA, 1149 bp, Escherichia coli
atgaacagtttaacggcaaataaccgtttgtcgcaacagctggtggtcagcgtcgctgaacacctgttgttacggcatgaatgcagattaccaaatcacctggctgtaagtaaccacagagaactttacctgactgtggggggcgagttgtgcaggaacttaaccgctggtttcgtgacggaagaggactttatgttcatgttattcgttgggagccagaaacacagcgcgttatctatcttcgcaaagactacccgcatgagtgctttagtcctttgtggaaattcaggcgtgattttgttgagtgtgaaggaccaccagcacattgattctgccattccgggacgttacactgttcaggcaccttataaagcgggtgccgggattggcgtcctggagaaggctaccgcgtacaaccgcgtagatgcggtttttttgtacgcattattttgtcacgcccaaattatggtggggcgtacaggggcatcgcaagatgcgccggtaagggtagccgccggtaacgccaactctgtacgtctcaccacctctatgattggcgtcttatgtggtgagttttttaagcttgctaccgaggctgccattatggctacgatcccaacctttgttcaccctgaaatcacgatcatcaatggtcgtgctgtcactacatctcttgcagttgctaactactttactaaacggcacgagcgggttttagatagaattcgaaaccttgaatgctccgctgaatttgctgaacacaattttgtgttaagtggttataccgacgcttcaggccgcaaactaccttgctatcaaataacccgcgatggctttgcgtttcttgctatgggtttcacgggtaaacgtgctgcccagttcaaagaggcatacatcaatgcctttaaccagatggagaaacagctttcaaagcccgctgtaccgagcgacgttgcacataacgccagcgttctctattcctacatttcatcaattcatcaggtctggttgcagcagctttatcccatgctggaaaaagctgaatcacctctggctgtaagtctgtatgaccgaattaacgatgcggcatttcttgcccgtcttattcattcgtcgctgaactcttcagaggtaagggggcgcaaatga

SEQ ID NO: 39584 - DNA, 207 bp, Escherichia coli
gtgctggagatggccgctggagtctggcatgccgtgctgtcgctggataccggtggcgtcatttttgaagtaaaacacggtggctatcaacccgtggctgccgatgactatgcgcactgggctccagcggaaggtgaatcaggagccacagagcttatggcctggtatgcgcaagcgcaggtgggcgatggtggttttgccatctga

SEQ ID NO: 39585 - DNA, 888 bp, Escherichia coli
atgaaaaaagtagtcttatccgcagtgatcgcaatggcgctggccgggaccacattcaacgcagcggcgcttcaagcgccgaaaagttcaccgtatgacttccgtatcaaaacggtagtttataacccggtcgatgtggtgcgaattgatgcggtagcgggcctgtttacgcatatcgtcgtttccccggatgaaagctatatcactcacgctttcggtgattctgctggctggattttctcacacaaacttaatcactatttcgtgaaacctaagaccgaaatgagtgataccaacctgaccatcgttactgataaacggtcttataacatcgtgcttcactatatcggtgagacgacaacaaagaacgctgacggcacagaaacaaaatcgtttatcaaaacgccgtggtcaatgaaacaggccacgcttcagctgacctatgaatacccgtttgacgagcagaaaaaagcctccagcgtggctgagaaaaagcgcctgacggagaagctacgggagtctgctttcgctggtcctaaaaactaccagtatgaaatgagcgacgagccggaaatggcagatattcagccgatccatgtttgggataactaccgtttcacgcgctttgagttcccggaaaacgccgacttaccgcaggtttattacatatcgtccagcggcaaagagacgctccctaactgtcgcccggttggtgaacataacaacattctggaatgccagaacgtagcgaaagaatggcgtgtaaggcttggctggacaaaggttgttggtattaaaaatatcaactacgtgccttcagctggcgcaatttccactggcacagcctccccggatgtaagaagggtgcaaaaaggaggggataactaa

SEQ ID NO: 39586 - DNA, 1134 bp, Escherichia coli
atggcccgtaaagtcgatattgatagcgagctggataacaacaacagcttcaacgatgaacgcgggggaatgcccgcacagaaacgccgcaccgcaccagggctaaaagcctttattgctatcctggctatcatcgccatgtgcttcgttggcgtcactatttacacgcacacacgcaaagcgccggacacggccaaagctgacagcggtaataaaaatgatggggttagcagtctgcctaactatcagttcaacactaacccgaacgttggcggggcagcggcccctgacgctaatcagaaggcgatgcaggataaagccagagcggaatatgaagccagtcatagcaacacgggccgggccagcaacgggaagaagcagctgacaccggaagaagtcgccatgcagcgccgtcttgatggcgatctttccggcgagcagggcggtagccagactccggccaaaaaagagcagcaaagcgacgaaggcagcgaaggcagcagcgcgttagcaaaagagcttacacctgcccgcctgaaaggcagcagagcgggcgtaatgcaaaatatgagcatgaccattgctaaagggacgatgataccgtgtggcacgtctacggagctggatacgaccgttcccggcatggtgtcctgccgggtgacgcgtgatgtgtattccctcgatgggttggtgaagctgatcgacaaaggcgcatttgttacgggccagatgaacggtggcctcaaaaatggtcaggctcgcgtctttgtgctgtgggagcgagtggtaaacccggatggcacattcgttaatctggatagcgccgggaccaactctctcggtagttccggtgttcccggacaggttgactcccacttttgggatcgcttcgaaggggccgtgttcatttccgtcctgtctgacgcgcttcaggctggcgtggccgcagctcaaaacggcaataatatccagtttagtaatacgcaaaacaactcgcaggaactggcctctgaagcactgagagccacgattaacatcccgccaacactctacgaccagcagggcgacgcaatcagtatctacgtcgttcgtgacctcgatttcagtgatatttactcactggcagacaactaa

SEQ ID NO: 39587 - DNA, 207 bp, Escherichia coli
atgaaacaacatatcgctgcaattattcgcgaatacaacacccctacaataaccgtcgaagtagccaatacagaccgctacgatagcgagcaaatcgagatccgccaggttgtggatggtcgccttgtctggcgagcgtgggactatgagacaggttttgaaaatgacctgcatcgcgagctggcctattgccatatcccggcctga

SEQ ID NO: 39588 - DNA, 531 bp, Escherichia coli
atggctttcgacttcaaaaaagaggatgcggccaagtatggccgcgaggtttaccgggcgtttcgtagtaagggcaatcaccgctgggatacgtgcgttttcgtgaatgaatccggggcttactctgccgtgttccggcactcgttccgcaaaaaggttatcgaggatggcaaagagatccggcgcaacgtcattgatgatgaaatcgtggtggccgcgccggacgcgggcagttttaccagggcaaaattcccacaactggccgacgcaaaggagctgaagcaatccggctttttcgcccgcttacggtttcttgctgaagcagctgcttaccgtgaagcgtggccggggcatgatggcggcgtggtactgatatgggaagggaaagcctatggctggaaaaattgcctgcgtgatgccgggtgtgagcgccccggcgcgatagcgatcgacactgacggtcatgtttttattgctgaaggcggtaacgattatgacggcgcgaaatgctgggtagctatgccatgttaa

SEQ ID NO: 39589 - DNA, 228 bp, Escherichia coli
atgcgtttattaacaatatatcttttggcattatcagttttcttaattagcggatgtaaagaagaggctaaaacaaccaaatggtataaagaccatccagaagaactaaaagctgtttatgaaaaatgccagaaaacaggaagcgcttcggaaaattgtaaaaatgcaaacgaagctcactggcaaatacagcagttgaatgctccgaccgtcgatttaaattcatag

SEQ ID NO: 39590 - DNA, 1071 bp, Escherichia coli
atgtccggtggtgtttttgtcggtgttgaaaaatatctgataggaggaataacagacgccacaaagggattaatgatgtcgtactcttctatgatgatggggctggcagcagcatcagccaccatctacatcatgtggcggggataccagactctggctggtaagctctctacgccgatggaagacacgatgtgggacatcatgagaatggcgatcatcctgtcctttgtggctaatttgggtggttatctcgatggcgttatcgacgctgttaatgggttaaaggaggggttttctggcagtgataatatatggcagctattagatagcttatggaataacgcaaaagtattaggtaaaacattacatgacctagataattccaaatatataaaagatgagggaatgaccgctcaattttatgtatggcttgggatattcatcttaatgattattaccgcatttgtttctatgatagcggaagtcatgatcttattgctgagtatcactgcacctatatttatattttgcttaatgtatggttttctacgccccatgtttaataactggctacaaaatatatttgcagccatattaactattctcctttcctccttatcattaaggattgtagtcaattatttaaactcaaggcttgcattagctactcaaggtgcagcccaagcaaatattgtagaactaggagcacaagtttgtcttgctggagtatgcgctgcaatactggtgtacatatccgcaaaactagctggggcacttgcaggagcaagtgctacagccactatgcaaggtgcggcggctctcggcattggcgctgctgcatacggcgctggaaaaatgttaaaggaggcaggaaaagtattgcctaaagaagtagcaagtccaagtaataaagggttaggagatccacaatcacgaatagtatttaacgctgctgatgcacgtaaacacgctatagaacaaatgatagcgcgtaatgaagcacggatgctgacagatcaatcaacaccaaaactaccgccatcaattaaatgtttaccccctccaagataa

SEQ ID NO: 39591 - DNA, 294 bp, Escherichia coli
atgcccgttatccgttctttcagaatccagccgataagttatcgtctggctcctgaaagcccgaagaacgggcaacggcgtgtgccgtttcggcctggctggaacgccagtccttcacgtcacatgggggtaatggcccgtctggacgccggaccaaaacccccaaggtcaaaggcggcacaccgtcgcgcgctacgcgcgacccccgcctttaagacgatgaatttagcctattttttctgcgtaaacttgaaaaaatgggaattcatctttaaagacgggggtcgcgcctag

SEQ ID NO: 39592 - DNA, 1032 bp, Escherichia coli
  misc_feature (1009)..(1018): n is a, c, g, or t
atgaatcatgtattaaagcagattgcctctcaaaagcagaggggggatatcgtcatcattggtaaaggtcccagtattgaccagatagatttatccctgcttaaaaactgtattgttattaataccaatgactccgaacttatttatccgggggatattgcagtatttcatcatggctgggtactggacatctttgatgaacaagctcctcagtgtaaattgtacgtctctgatcgtaatcttcctgagggcgttgaacatctatccgctgaatttataccctatactcctgagtcggcagattttctgattcaacgttttttctctgaaactatccatattgaaagtgcaattgttgttacagcacttaaaattgccaatcagattgctctatctcaaaatgagaccaagaatgtgtatctgcttggatttgattttacgataaagggggggttcactagcaagatcccctgcgcagccttgcatgccgaaccagaatatcaagagcgaattatcagtagtcaagaacagctattgcagatgctccttgcagaaaaaacacgcctgaatatcaatatcaatcatgttggtaataagccttacagcgtatattctgttgatgcatttaatcaagtgttcgctgcccgccatcgtggagtcgtgctgcccacacatgcccagatttccactacatcatcacaaaatggggtgaaggtgatcgcagagattactactaatcactttggtgatatggaccgattgaagtcaatgattgtagcggccaagcaggcaggggctgactatatcaaactgcagaagcgtgatgttgaaagtttctatagcagggagaagctggagtcaccgtacaactctccttttggcaccacctttagggactatcggcatggcattgaactcaatgaagagcaattttcctttgtcgactctttctgtaaagagattggtatcggctggtttgcttctattttagatatgccctcgtatgagnnnnnnnnnnattcggcaatttga

SEQ ID NO: 39593 - DNA, 327 bp, Escherichia coli
  misc_feature (254)..(263): n is a, c, g, or t
atggctggcaaccatatcgttgaccttattcgcgagtttggacaaacaaaacttttacgacctgatattaaaaaaccggtatggcacaactctcttcgcttaccgcatggagaaaaattgtcagaagcacaatgggcaaccgtagccgacgactatatgtcccgtatgggttttaatgatacacatcttcgttgctatgttcttcataatgatgagactggacaacatattcacattattgccagtcgtatcgnnnnnnnnnncttgaaagaatacatggtctcacagaaacagcgactacttcaaaccgacgatctcagagcataa

SEQ ID NO: 39594 - DNA, 387 bp, Escherichia coli
atgaatgaatctgaccttgatagtgaagctactaaagaggcttctaaaacatctgacttagaggaggataaaatctctgatgtgaatgttgatagtgaccataaaaacacacagtgccccgccactgatgatgagatggaccccttcgatgattaccttgatgaagagtcagagcgtgaagaggctattaaaaaagcacaacgcaaagcagagattaaatcacgcattgaaatggcgaagctaaagaataaggttaatgacctcgatgactttgatgatggtgacgatgatgacttttctttcacaccaaagaagaaagtagttagtgaaaataagaagcaaaggattaagcctaaaatgtactatgcaggtggaggtatccaatga

SEQ ID NO: 39595 - DNA, 252 bp, Escherichia coli; identical to SEQ ID NO: 11002

SEQ ID NO: 39596 - DNA, 435 bp, Escherichia coli
gtgttctggctttccactcttggattaacggccatcgcctggctaacggctccctttgccggggttatggcatcgttttacacccaggatccacaggttaaacatgtcgttgtgattctgatttggctaaatgctttatttatgcctatttggtccgcctcatgggtgctacccgctggatttaagggggctcgtgatgcccgttacgccatgtgggtttctatgttgagcatgtggggttgccgggttgtcgtcggttatgtgctgggcatcatgcttggctggggggtggttggtgtctggatgggaatgtttgccgactgggctgtgcgggccgtgctgttttactggcgaatggttactggacgttggctgtggaaataccctcgacccgaaccgcaaaagtgtgaaaaaaagccagctgtgtcggaataa

SEQ ID NO: 39597 - DNA, 138 bp, Escherichia coli
atgcgtgtgttaatgctaatgtatgcatacattagcattaacatagagcagattctggcgcgttgcgcccgtagttcgctgatgctcacacgcgcagtacagcgccccgtcctgttgcgacgcaccaggacggcgtaa

SEQ ID NO: 39598 - DNA, 435 bp, Escherichia coli
atgtttgattcaatattagttgtctgtactggaaatatttgtcgttcacctattggtgaacggtttttaagacagttattaccgaataaaaaaattgactcagctggtactgaagctttggtacatcatgctgccgatgatagtgcatccaaaattgcattgtgtcatggtatttcgttggaaggacatcaatctaaacaatttacttcctcattaggccgtcaatatgatctgatcttagtaatggaaaaatatcatattgagcgtattgggcagattgcacctgaagctagagggaaaacaatgttattcggacattggctaaatcaaagagaaattccggatccgtacagaaaaagtgatgaggcgttccactctgtctataaacttattgagcaagccggtagtctttgggctcaaaaactaggtgcataa

SEQ ID NO: 39599 - DNA, 687 bp, Escherichia coli; identical to SEQ ID NO: 32266

SEQ ID NO: 39600 - DNA, 3120 bp, Escherichia coli
atgaacaggaccagtccctattattttcgccgctcagtactttccttattgatatctgccttaatatatgcccagcccgggatggcggccttcactactaatgttattggtgtggtaaacgatgagactgtagatggcaaccaacgagtagatgaacgaggtacaacaaataacactcatattatcaaccatggccggcaggaggtctatggtgggatatctaatagtagtattattgaaactggtggcgagcaactagtatcaatccatgccgatattaacgggcaagctaataatacaaccattaatggaggcagacagtcaattgagtacggaggaatttctactggcacgataatcgaaagtggcaatcaatatgtttataaaggtggtaccagcaatgacacgacaattaagggcggtacttcacgcatagagggggggactgcaaatggaacaatcattgatggtggaggccagtcagtatcaactcaggggcatgttgacggtacgacgataaataagtctggttatcaggacatcacgcaaggaagtctggcgacgaacacaaccataaatggtgggcgacagtatgttgaacagagcacagtagaaacaaccgccattaaaaatggcggtgagcaaagagtatatgagagccgtgcgctggacacgacgattgaaggcggaactcagtctctgaatagtaagtcaacggcaaaaaatacgcagatctattctggtggtacgcaaattgttgataacacgagctcctcggatgttattgaagtttattccggcggcgtgcttgatgttagaggtggtacggcaactaatattactcagcacgatggagccgctttaaaagtaacgacttacgatttgacggtgagcggtacgaatagtgaaggggcattctccatccacaataacgtggcagagaatgtgttgctggaaaacggtggtcatttagacataaacgcatatggttcggcaaataagacgattattaaagataaaggaacaatgtcagttttaacgaatgctaaagctgatgcgacccgaatagataatggcggcgttatggatgttgccggaaacgcgacaaataccataattaatggtggcacacagaatattaataatcatggtattgccacgggcaccaatatcaacagtggaacgcaaaatatcaagagcggcgggaaagctgacacgacaaatatatcctctgggagccggcaggttgttgagaaagatggtacggcaactggcagcaatattagcgccggaggctcgctgattgtctataccggcggtattgcacatggggttaaccaggagacgggcagtgctttagttgccaacacgggcgcagggactgatatcgaaggatacaacaagctctctcacttcactattaccggaggagaggctaattatgttgtgctggaaaataccggcgaactgacggtaatggctaaaacctcggcgaaaaatactaccattgatgctggcggtaagctgattgtccagaaggaggctaaaacagatagcaccagacttaataatggtggcgttctggaggttcaggacggtggtgaggctaagcatgttgagcaacaatccggcggcgcattaattgcttccacgacctccggaacacttatcgaaggaaccaacagttatggtgatgctttctacatcaggaattcagaagctaaaaatgtagtgctggaaaacgctggctcattaacagtcgtcactggttcccgggcagttgacacgattattaatgccaacggcaaaatggatgtttatggaaaagatgttggtactgtacttaatagtgctggtacccaaacaatatatgtcagtgccacttctgaaaaagcaaatatcaaaggtggcaagcaaacggtatatggtttagccactgaggcaaatatcgaaagtggtgaacaaattgttgatggtgggtcaacagacaaaacgcacatcaatggcggtacgcaaaccgttcagaattatggtaaggcgatcaataccgatatcgtctctggcctacaacaaattatggtaaacgggacagcggaaggttccattattaatggcggttcacaggtagttaatgagggcggtctggctgaaaactcggtgcttaatgaaggcggcactctcgatgtgcgggagaaaggcagcgcaacggggatacagcaaagtagccagggcgcgttggttgcaaccaccagagcgacgcgggtcacagggacacgcgctgatggcgtcgcgttcagcattgagcaggatgcggcgaacaatatcctgctggcagatggcggcgtgttaaccgtggagtcagacaccacttccgccaaaacacaggtcaatgcgggcgggcgggagatcgtcaaaacaaaagccactgcgacaggcacgacgctcaccggcggcgaacaaatcgtcgagggggtggcgaatgagacaacgattaacgacggcggaatacaaacagtttcggctaacggtgaggcagtaaaaacaacgattaatgaaggcggtacgctgacagtcaacgataatggcaaagcgacagatatcatccagaacagcggtgccgctctccagacgagcacggctaacggtattgaaatcagcggtactcaccagtacggcaccttttccattgccggaaatttagcgaccaatgtgctgctggaaaatggcggtaatttattggtattagcaggtaccgaagctcgcgattccacggttggcaacggtggggcaatgcaaaacctgggtcaggacttcgccacaaaggttaattccggtgggcaatatacccttggtcggtcaaaagatgagtttcaggctctggcccgggcagaagatctactgatcgctggcgggacggcaatcgtctacgcaggtacgctggcggatgcatcggtcagtggcgcgacaggaagcctgtcgttaatgacgccacgggataatgttacgccagttaaacttgaaggggtggtccggattaccgatagcgcgacattaactatcggaaatggcgtcgatacgacgcttgccgacctgacggctgccagtcggggcagtgtctag

SEQ ID NO: 39601 - DNA, 435 bp, Escherichia coli
atgaaaatagcattaatcggtactacagcagaaagtctaatccaattcagaaaagaactgattaatttattacataaaaatggccatgttgtatatgcatttgcaattgactatgatgatgtgacaaaagaaaaagttaaatcatttggcgctataccagtacattattgtttcagtcgtacagggctaaatccattttctgatgttatcaacacctataaattgtataaaattttaaaatcacttcagttagacttggcattttcttatttttcaaagccagccatttttggtactttagcagcaaagttcgcaagaatacaaaaacgatatgcgatgcttgaaggtcttggttttttctttaccaattctggaggacaggtttcattacgaactaaattactaaaaaaatattggtttcgctttacaaagtga

SEQ ID NO: 39602 - DNA, 1164 bp, Escherichia coli
atgaatgataaagtaatcctttacggcgcatatgatcgttataattatggtgataatttaatgccgatcttgttagaaagatttctaaagatgaattttccggataaaactaggaccattgactttatttatgcgtcaatcgattcttctgatctaagtaaatataagtgttattcttcaatagctatgaaagatctgctttatactcaacataattcatcaattatagttgtaggtggtgaggtattaggagcagatgttggaacgttgtatacacatgtacaacaaagccaattttatactcgaattttaaaaaagataagaaggtttcaaccaaaactattgtcaactattgctaaaatattctaccctgcggtttgggattatccatacatacctcaaaaagcaagtttcaagaataatgtcaaggtaatatacaatactgttggtggagttcctgtttcttcacaaactaaatatatcgcacaagcggaatatatatctgcaagagatcgacgtacatatgaagaggtaacaaagtgggccagtgcagaattagttccagattctgttcttatcgcatcaaaaattattgatgatcagttcatgcaagattttgtccgcaaagaaataattgattattgtgcagcaaataagtttattactgtgcaggcctgcccttataaggttaatttttctgctcaagatcttgcatatcaattagatatagtaaaatcacaatcaagtatagatgtagtgttacttcctattggttacgcgagtggtcatgatgatgtaatctttcttcgagaagtacaaaaactggctaaaactgagcttaagcttgaatacgaattaaatatttgggaaataatgtattttctttctcactctcattcattctacggtactagtttgcatggaattattacagcaatgtcgtttggtgtaccacatttttgtattgataaacgaatagaaaaaataacatcattcgttcagacatggagtgttggaccctttactcaacctataagcatttttaatataaaagatagtgttagtaaaatgaatgactatgataattctgatttattaaagtcggtggagtatgcccagcagatcatatctgaaagtttgaagaagatttcccatattttgtaa

SEQ ID NO: 39603 - DNA, 474 bp, Escherichia coli
atgagaaaaggatatacacataaattatttaatgaaaataattcaaatggactctcggacattttatctgggaaaactgagattagcttagctataaaaacaattaagtcagctgggtttgactatatttcccgtggtatggttcctcctaatccagctgaactccttatgaataagcgttttggggatttattagagtgggccaataataattatgatattgtagtgttggatactccacctattttagctgtgactgatgcagcagtcattggtcattatgtaggtactactttactggtagccagatttgaattgaataccgcgaaagaaatagaggtaagtataaaacgttttgaacagacaggaattatagtgaaaggttgtatacttaatggtgttgtaaagaaagccagtagttattatggatatggatataaccattatggatattcctatacagataaaaagtaa

SEQ ID NO: 39604 - DNA, 1428 bp, Escherichia coli
atgacgattctcgtcaggaattttattgttagcttttcacttgctgtatctgatctttttagttttgttatttcactttatctggcagttggggtgttatctattacatcgagtgattatcaaaatatttatcaggctgagcaattagagggatggaaggccttgcattggttattggctttttgttgtattgcttggtactcaatgcgtctacgccattacttctacagaaaaacgttctggtttgaactcaaggaaattttaaggacacttgtaatttttgcagtaattgaaatagcagtaatggcatttacgaattggtcattctctcgttatctgtgggtattgagttggactttgataatattgttattgcctctagctcgaatgatgacaaaacgtattctcgatattttcggattgtggcgtagggatacatggatcattggcaatggaaataatgcaattgaagcttataaagcaattactagtgagcgtaatcttggatttagtatagtaggtttcattgcaagtgagcaaaataatgcaagtaataataacatcgatggtattccagttttagataatgatcttaactggttatcaacaatagataaaaagactcaattcattgttgcagttgagtcaaatcaaagtgaggttcgtaatacatggttgcgtaattttatgataaaaggctttagatatgtatcagtaatacctactttgcgtggcatgcctttagatagcactgatatgtcttttatttttagtcatgaagttatgatctttcgtgtccaacaaaatttagcgaaattctcatctaggatcataaaacgtcttttcgacattatcggttcattggcaataataataattctttccccagcattagtgtatataagtcgaaaagtaaagaaggatggtgggcccgctatttatgcgcatgagcgtataggtaaaggcggacattcattcaagtgtctaaagtttagaacaatggtcatcaactctaaagaggttcttgcagagttgctagataaagatcctttggcaagacaagaatgggatgctacatttaagctcaaaaatgatcctcgcattacgaagataggagcattccttagaagaacaagtctggatgaattacctcagctattcaatgtactgaagggagagatgagccttgtaggacctagaccaataataaccgcagagcttgaaaggtataatgaagaggtcgattattatttgctgagcaaaccaggaatgacaggtttgtggcaagttagcggacgaagtgacgttgattacgaaacgcgtgtatatcttgatgcatggtatgttaaaaattggtctatgtggaatgatatagccatattatttaagacagttggtgtagtgctgaaaaaagatggtgcatattag

SEQ ID NO: 39605 - DNA, 258 bp, Escherichia coli
atgaaatattatattgcaattccaacatataatggcggggaactatgggaaaagtccgttgctaatataaaaaaatacgcgcctcaagatatttttgttcaagttattgactcaagtagtaaagacaaaaccgtatcagtatccaaaaacgcgggttttgatattataaatatttccggaagtgaatttaatcatggtggtactcggaatttagcagtactaaatcatatacaggaatatgatttggtgattttctaa

SEQ ID NO: 39606 - DNA, 594 bp, Escherichia coli
atgataactattaataaaatagttaaaaacaatgctgttattaatatcatttggttgtctgcagatagtctaattagaatgggattaggctttcttgtatcagtatggcttgcacgatatctaggaccgcatgaatttggtatttataattattgtttggctattatcacaatatatgtttctgtagcttctttaggaatgaacggtgtagttgtcagagaggtcattaaaaacgaaaacaaagctaaagtaatcatggggacttcgttgtaccttcagatcttgggaagtcttttagcaagtgtcttagttacaattacaatatatgtactccgcccgaatgactggggggtattatttgctgttttagtgatgttaccttcagtattacttagaagtagtgatatttttaagtattggttcgagtcaaaaataaaatcgaaatacactgttttatcacaaaatattgctttctttataagctcagctgttaaaatatcaataatatattttaatgggtcatacttatatgtctgtgcaactgtttctttagaggcactgattattatgaagctaaaagattattatctttaa

SEQ ID NO: 39607 - DNA, 393 bp, Escherichia coli
atgaacgttttaagacacgttaatgcgattaacatgggagtgtgcattctaatttgggttattggatgtgcaaatgctaaagttcttaaacgatgtatattacctgctcctgatggtggcgtagaaaaactatcaaaacccaacttacatggagtaattaaaaaagttgatttgaacacaaatgaagcggaaattaaaataaaagaggggggggcagtgagttttatttttaatgaggaaacattgtattttactgtttttggtggggattttattatggatgatttaaaaaaagtaaaaaatacggaagcatgggtatggtataaaaattgcgatagtaaaaataaaaatgtggcagttgaacttcttcaaatctacgaattgcatcaatga

SEQ ID NO: 39608 - DNA, 576 bp, Escherichia coli
atgttgacattatcactaacaggtgataatccgcttttaattgagcgtatattaaacagtgttagtgaaaactatttagctcagaatattgcgcgccaagcagcccaagatgctaaaagtttagagtttctaagtaagcaattaccacaagtcaggggagatttagatctttctgaagataaattaaatcagtatcgtcgtttgaatgactctgttgacctatctcttgaggcaaaagctgtacttgatcaaattgtaaatgttgataaccaactgaatgaattgacctttagagaatcagagatatctcagctttatacaaaggaacacccaacatataaagcattaatggagaaaagaaaaacattacaagatgaaaagattaaattgaataaacgagtatcggcgatgccggaaactcagcaagaaatccttcgtctcagtcgtgatgtagagtctggcagagctgtttacatgcagttattgaaccgacagcaagagttaaatattgctaaatccagtgccattggtaatgttcgaatcattgatgatgcagtaactcaaacaaaatattaa

SEQ ID NO: 39609 - DNA, 600 bp, Escherichia coli
  misc_feature (570)..(579): n is a, c, g, or t
atgaatttatttttcatagtcgataagttggattgggcattcggaaaaatagcccaaaatatagcaaaagagttgagtgactttaatgtaaaaatagtttgcaccgatgattttaaaacggtggcggaccttgttttacacttggataaaaacgtaaaagaaaagagtatcttacactttttctggcgtgactatctcatggaagtgatgaacttcactcagcggaatccccagtataaagaaattttgatcagcaatattgtcaccacacatattcctgatcacctattcacttatgatgatatcgcgaactatgagagacgaattcctcttatgaattttgtggatgggtattttgttacatccgcaaagttgaaagagctatattctgaactgtctgattttccacctcctcatagtgttatctatgataatccagaaattcctatgagcgaaggaaatagtcatgataatagcgatagaaaaaaactcgtatggattggaaatagcaaatggggcgaatatcttggttataaagattataaaggcctgaataaaatagttttgccnnnnnnnnnnaaaatctggatatacgtttga

SEQ ID NO: 39610 - DNA, 207 bp, Escherichia coli
atggaagtagtagatattcggatgacacacgccccaggatacggcgtgccgggtgaagccggtcagccatttctggtagctttcgtggagccattcgtagcgggtctgatactgttgtttcattttcatattcctcacggggatataacaggcagcagaatgccgccggcaggccggggattacgtctgctgcgggtgaacggataa

SEQ ID NO: 39611 - DNA, 279 bp, Escherichia coli
atgaagaagaatacccgctttgcttttaacgcttacctgcagcagctggcgcgtctgaacggtgtggcagttgaagaactgtccagcaagttcaccgtggagccgtctgtgcagcagacgctggaagaccagatccagcagtccgccgctttcctgacgctgattaacgtcacgccagtgactgagcagtccggtcagctgctggggctgggagttgcaccattgccggaaccactgacaccaccgcgaaagagcgtgaacctgtcgatccgacgctga

SEQ ID NO: 39612 - DNA, 444 bp, Escherichia coli
atggatatacaaaacattcagttcgctgagccgactgtaattactgcctcggtggtccctgacgagttacgcatcggcttctggccacagcactttggctccatcccacaatggataacccttgaacctcgcattttcacctggatggatcggctgtgtgcctattaccaagggggtatctggcgcttttcgacactcagcaacggcggcggttttatggctcccgagtcagatcacgatgagaagtggacattgttcaacagaatgaacggcaatggagcagagcttaccagtgaagctgcagggatggtcgcctgtctgatggcttacaaccaccacgcctgtcgcaccgagtgtgacgcgatgactgagcactattatcgcttacgcgactacgcgctgaactatccagagtgcagcgccattatgcatctcatcgactga

SEQ ID NO: 39613 - DNA, 231 bp, Escherichia coli
atggctgaactcactgaattgcctgatggaccgtttacgcgccagcaagcagaggcggtttcgtctcaatattccaatgttgctatagaggatgaccaggggacacatttccgtctggttatccgtcatgagtgttgcatggtctggcgagcctggaactttgagccggatgccggttactggctgaacagatatatcgctcgttatggcatccgcaaattccctgcataa

SEQ ID NO: 39614 - DNA, 450 bp, Escherichia coli
atgatgaagctgaaaggcgttatctcagctttcgctctgagcctctgtctattgtcaccggctcaggccgaagaacagcgttacattagtatccgcaacacagacatggtctgggtgccaggtaatgtctgcgtctggcagtttcgcctggacaacggtggaagtggcgaagggttcgggcctctgacactctccctgcgtctgaaagataaaggggggaacacgctggcgatgggtaatatgacggtggctgcatttggcgacagcgatgccacccgctctcaggaagcctcgctggagaacgaatgcgtggaaaacgtcagctccgtcgaaatcatgaaggcaacagaagagcgtaatggttaccagattgacctgccactgtccgttttcgacccgcagtactaccgaccgttacaagtcacggttgtcggtggtaaggcatcttag

SEQ ID NO: 39615 - DNA, 453 bp, Escherichia coli
atgaagaaattgtatccacctctgcttcccgttctgacagttatcggtgccatgggagtctctggctgcgacagtaaggaagatgcgggtgtgaaaacgatagccaggtttaaggacctgactccgccaccgttcagcaaggttgtgtcgcataaatccgatattgcccaggaatgggtaaagaaggatgccttcggtacaccgcaatacacagtgatgaaaatccgccagtcgccggaaggctgtgagtcaggcaattattactacattgctgacatacagcagaaaacggtgcagccactaatggcagccctgtgccttgcggacaatatcaccctgagcttcaggattgaaaccgacagctacacgggtgagaaatcggtggtgtattcacacgatggtaaggaaatggggaaactttatctgccggtgaatcaggagaaaaatccatga

SEQ ID NO: 39616 - DNA, 570 bp, Escherichia coli
atgaagaaattactgactacaacggcactggccgtcagtctatgcgctggtgctgcttttccggcgtctgccgaaactgtcgtgggtaccgtaaaattctggcagtacatgcaggcggatggctggaaatcagccgatggcatggacaatgacacgctgaacaatacgctctaccaggccagtgtcattggcaattacccctggactaaacaatttctgctgcgtcagcggggaggtggagcttattttctcgccgataaaaaaacgcataccgtgcgcaagctgaatctgaaacctgccagcggttattactccgacctgacatcggtctatcagggcgaagaccaggggaaagggtgttacttcactatcatcgacacccagtatcagctggagctggctgacgaacctcacagcaaccaggtacttgctgcattcccggaaaactgtgtcaacaaacagcagcaggctgccctggcggcgaagcgttctgcctcagagcagaaactgcagcagtgggtagcccaacagagtctggcagagttgtgccgacgcaccggcaactgctga

SEQ ID NO: 39617 - DNA, 705 bp, Escherichia coli
atgtcccagactgagcgtcgccatgagaggctggcgattcggctgtccctcattatcagccgcctgattgctggcgaaacgctggatatggaccttcttgccgcagagtttggggtgtcgatccgtaccctccgtcgggactttcgtgagcgactgatgtatctggacctggaataccgtgacggtacctgtcgtctgctttcgggtagtcatcagcgcgaactggctgtgctgacttttgctcgccagtcaggtgtggaggccttgtttcctgacatggataaccacatggtcagctcactactgagtgggcccggtgagtctccgtgcctcatatgggcagagtcggagtcattgccaccacccaggccaggcatatttacacgccttgtcagggccatatcagagcatcgtcgcgtgactctgctggctgaaggttgtcgttgctcagggcttgctccataccgcctcgtactctgcagcgggcactggtatctgactggagagcatcatcatcgcgtggcagtgtttccgctgagcgatatccatgcggttaccttgcacccggaactgttcgtgcccgaccttcagattcgtaacgttctcgccgaaccggaattactcagagcccttccccattttcacgtttttcactcactgctcgccagaaccggcgacggtcttttacctcataaggaatcatga

SEQ ID NO: 39618 - DNA, 876 bp, Escherichia coli
atgcaaaagttggacggccttaaggcctttgagcaaccgctggctttactgccatatacgcttcgcaacctcatccttgaacgtcttcgtagcctgacgcagtacgaacctgtgataggtattttgggcaaaactggggctggtaagtcgtcactctgtaatgctctctttcagggagaggtaacacctgtcagtaatgttgactcttgcacccgtgatgttctgcgctttcggctccgcaatggcgatcacagcctaatgattattgatttgccaggggtgggtgaaagcgatcaaagagacaaagaatacgccgccctctatcgtcacatccttcccgaagtggatttggtactctgggttatcaaaaccgatgatcgcgctctgtcggtggatgagcatttttatcgaaagattatatttgcctaccagcatagggtcatatttgtagtgaatcaggccgacaaggccgaaccctgccatcagtggaataccaccagcaataccccctctcatagccagcagtcgacaattgaggccaagcggagcgctgtacaacagatctttctgccgcaccatccagtctgtgttgtatcggcccgaactggttgggggctggatgcgatggtagagacgatgatgcgctgcctgcctgaccgcgccaccagcccattgacgacacaactgcatggaaggctctgcaccgagccggtaaaaaagcaggcatgtgagcgctttggtaatgcagtggatgaaatgattggcactgtggagtcatcatcttttctgccagcgcctgtaagggctgtgattcgaaccgtgcgggaagcggtggtgactgttgctcgtgctgtatgggactggattttcttctga

SEQ ID NO: 39619 - DNA, 972 bp, Escherichia coli
gtgagcggaacaaatcgagcaaagataacatttttagaactggttattcctcccatctctaatcaagaagcggtttggtttaaagacgaaccttttgccgaatatatgaagcgaagcgatttctacatgattggtggaaaagccaagtcaaaattttctaatattcgtaccaatgaagacaatagccaaattttctttgatgtttttgtaggtgatgttcataaaagcagcggggtcattcatatatataagttgaagccagttattgattttgagggtaatgattttggtgttggttgcgggggtgaagcaatagagtttttctacaaaaaagatggcgaaaaattcctattggctcgattcacaccagaaaatattctatggtatcgatctagagaagaagaaggcatatcaggtttagataattatgcagatattttagtctatgatctactttatgtcggaatagcaaaaaaaggagatagttatagtcgcctaatagctaaaggtcatcatgcccgtcaagaaatactttctaatgagccacagcgctatcctggggctagagttactgatgagatttttcttttcctattccgcccagagcctttatttatcactacgttcggccctgatagcgatatagatctggactttggttacgatcacaaaaaaatcattgcagatgccgagaaagccttcgtaagtttgttgcagccaaactataacacagtcagatttaaacaatatccaaaaggatcagatggattatacgactctaagctagacaggtatggttactctataggtgaagctatcacttttaatacccctcacggtcaaattaaaggaggtagaaatggagatttagcggggttaagtaacaaagctgattttatatctgtcgacaaggaatctgccaaacttttcatttcaggcgttgactttcctaatgatgaacctaacgtctaa

SEQ ID NO: 39620 - DNA, 978 bp, Escherichia coli
atgaataataatctttatcgtttgattgttgactttcaagataatgttcaagttgctttaaagctaatgcatcgatctggaattaaaatgccatcaagttgctatgggtggattgaatatgatatacccagtattggtgagttagatggtggtgtcaaatattataaacatggggctggatgcagggtagatctaaactccgggagcgtagattttgattttgggaggcgaggtgaggtaggagggtttaattcttggtggttgaccagctttgcaggggaaaatctaatagattacggcttcagaaattttgatgatgtcgctgatcatttaaataaggccctagatgatggagaactgatttttccagatcatgaactttattattttgctaatatcccacatacttacgctatagatacagattgccgctcccctgaggacatgctcccatgtcgcaatcacgaccgcgtattaacactacaaattcattatttcgaaacggctgaacttatgtttaaaaattacaataagctcaacaaaaaaatgacaagaaattaccatttgagtgagagagaagaatttgaaatgggaatttatctttctacatggttaggttttttaggtgtggtctgcgaaggatttaaaagcttaaacatgcgactcttactcgataatgaacgccctagagaatttaaagaattattaccaatttcagatggcatcggaaagttgatgaaagaacattcgaactcactcaggatatttagaaataatgtttttcatcttagagaaagcactggctttatacattatttttttgataaggaagttgagcgtcttccatgggcacgtgaattacatatagcactttcggattttttttcgcagtatagagttttttgcgaagtacattatgttgttaatgggcgtaaaggagagagcaatatgataaagaaaaaggtagcacgctcttag

SEQ ID NO: 39621 - DNA, 2610 bp, Escherichia coli
atgctcagcaacgagtttttgcgctttttccaaactttagacacagcagatgtacctggcgatgttagaaaaattgcgaacttagtgtgggataatatggatagtattatcccgttaggtaccgcgcagggccagcggattcgtcgcatcgtcgatctggcgcagtcttcatgggataccctcagtccggaagtcctgccactgcctgagcagaactccgaacgtgtccccacgttcagtcggctaaaaaggctgtccgttggaccgttcagaggatttgccagacaggaggaatttgatctggattcgcgtctggtgctgatttatgggcctaatggtaccgggaagtccagtttctgcgaagcacttgaatatacattattgggtagcgttgctgaggctgaaagtaaacgctttcgtaatcaaaccgactattttagaaatgcatacgtcaatcagttttctgcgcctgtgattactggtgttggatctcaagggcatgatgtggaaattgagaataacgaagcactgcaccgcttttgctttgttgaaaaaaaccgcatcgacaacttttcaagaattgcggcactggccccggcaaggcagaccgaactaatttcaacgttattcgggctggatgtattcaatgattttgtccgaaatttcactgcggagattgatggcagatacatcgatctgataggcgtaaaagccgctcaacttgcagaaaaacgccgcacactcgagggggccatccaacaactggaagcgggtaagacggagcttgaaggactagtttctgaggaacatacgctggcttctgggtaccgcgagggcctttcttttcagcagatgatgattgaattaaaaggggatgagcaaaatatcgggaccatccggcagcttgaggcagagttacagaaacctcttccgaacaagagtcacctgacctgtgcgatgttgaaggacttaaatggctctgttgaaactgtattggcggatctgtatggcaaacagaaacaactggcagaggcgagtctgcaggtttcgtttaaaagtttattcgaagcagtcgtccagttacagagctccagcccagaacagtgccctgcatgccataccccactcctgcaagctacgaaaaacccctacagtcatgccagtgcagaattgctgaagcttgagtttttgtcaacgttgcagggtgagatagctcagttggaacaatcattcagccagcagatgtaccgcgtctcacaagttgtcggcacctgttgccagtttcttcctcatgaaaatgttctcgaaagattccgagaagagaatggtatcgctttgtggcgtgatctgcatcaaccagcaggcgatggtgtcactccctggtctcttctggagaaacaggtgttgcagttggaagaagaagataaaaaaacagaagcagctgctaaattgcgggaatcccggcagcgtgatcttgtggggctgcgtgagtcagaacgccagataacaatattacagacaagaagaagtacgacagaaagggccatcgcagcggctcagttgttgattggtaactttgatacggaaaacaggcagcttattgaagaggttgttcttgaggaatccgttgtaagaaaaaatagagaaatctcaggagcctatgcccggttcgtattgcagttgaacgcctataaagatggtttgcctcagcagttggttgcgaatctcggagacagcattgttattttgtacaatgcattcaaccgtaatgaccctccaggagaaaagctcgctggtatcaaactccccttgatgcagaatcagcggttggaggtggcatttcagaacaatccagcgcaatattttgatgctttacatgtgctcagtgaggggcatgttcgctgcatagggttggctattttgttggcaaaaaacatcagtgagcaatgcccacttttgatatttgatgatccggtcaatgctatcgatgacgatcacagagaatctattcgaagaacactgtttgaagacgccttctttgcagataagcaaatcatcctagcctgccacggagaagagttctttaaagacatacagaatttattgccagctccagtggcggcccaatccagaactttcagttttttaccacgtcttgacgaattgcatatccgcgtggattttaactgtgcccctaggaactatattctttcagcgagaagtcattatggacgtaatgaaatcagggaggcgctgactaaatgcaggcagtcacttgaatcgctgatgaaggggaaagtctggcgttatgtaaacaaacacggtgacggtaacctcagccttaaactgaggtcagcaactgcacctattgagctgcgtaatctctcagatcaattgaaaaaacaaattggtcgtgccgattttaatgacccaaataaaaatgccgtgttttctcccatcgaggttttgaccggctttagcggagaatcacgtgaatggcgatacctcaataaaggtacgcatgatgaaaacgacagggcagaatttgacagggcaactgtagaagccatgataggtgcaatcgaggcgctcgatcaggccgtgggataa

SEQ ID NO: 39622 - DNA, 579 bp, Escherichia coli
atggccactagttacattagtgaacacagtgctgaatactatttagtaccagcgctcaaaaacattttacaggaacaatatagccatatcgccccggtgtttccgtggatatcccgagagtttagcaatatctcaaaatatcttcataaagaggaccggtttcatgtgctggtaatgtttccgcgcagaccaaaaataaatgcctctgatgattgtgaagtatatgtcactattaatgaagaactagatgcttttaataaaatagggaaagaaaaaggggttccagtgatagctggttgccctagagctgtaaatgtctgggacttatcaaattgtaataattacgcatggataaatcttagtcaatttaattattatgagtatttaaacccagtaagtaatttgaaaaaaaatggatgtttgctagaaaaagaggacattctatctcttgtgagaaatagtgccatttttaatttagagtcgtttgaagtttttttccgatatgcaaaagagactcaacctcacaggatgtatggaagtcaatataagcctgtatactttctgattaagacacactaa

SEQ ID NO: 39623 - DNA, 807 bp, Escherichia coli
atgaacaaagccggaaaaatagcgtattcatggctaaaggcacagagcgatagcgaaaaaattcgatttattgcacaagcgctggggagtgtcgaatatcaggcgtttataaaaaaacatcagcctgaaaagcagcatgcccacaatctacctttaagttttttgaaatggcatttgcctcagaaactagtggcctcctatcagggcaaggagatcggcctgagaagtgtaccggagacggttggcgataagctggaaattcggcatacctggatgccaacaggacagtttgctccttcgcgtcacggatcttacataccactgggaacccacgttgcttgtactgctctgatgcaaccctttttgcaaaaacagcaggaaaaatgtctggagcaggcctggcaggcagcacttcccctgcttctgtcacctgacatcagtaataacaatgaattcaccgctccatggcttgattacgagccctatctcaatggtgaaacggatgtgtactttttactggatgaacctcaggaaagagtcaagattggaatatcaggtaatctcaggcaacgcgtggataccttgaagcaacaacataataccagcctgagtcttatctccataatacccgcagggggtattgagacagaatccgcattacatcttttctttaaaaaatacaggttggatcagaagggacttggtcgagagtggttttcttacacggatgaattatgcgaatttatcaataccctgaacacctatgcaatcaggagccactgtctaagagcttacggcattatctga

SEQ ID NO: 39624 - DNA, 798 bp, Escherichia coli
atgtcagaacgaatcactttcaatgtaaccaattctgagactctgcgtgttgttgatgaatacagcaaaaaacagaagatctcacggtcgcaggttatttccacattgctggatgccaccgttccggtactgaaagatattaatcgttattatcagcttgcggacgaacttaaggcccggctactgtctggtgtctaccagcaggatttgcctcgccgaagaaatgttgtggctgctgaaaagtactgcatggagatctgggaaagtaagctccaggttggaaaagggtatgactttgacagtgtcaatggcaaggtgcatgttcgcgaacataaacgacactaccgtcgggataatgcagttggcagggtcgaaaatcgacatatcaaagagctctgtcagtttatcctggataggtcagaacaggatgcccgttacgcctgttttatctataccgaaaggattatatttgctgatgccgagacttcagaactatcctcatcgccagtcaaatttgcggcaggtgacgctgtgattttgctggcaaaagatgtggtttttaacgagtttttctttgatataggtaaggcgctttttatcaatgtggttgatcttatgtcatacggtacaagtggtatcccggagacgacaggagatccacgagttcactgctgggtgccaatcctgtttagtgggaaaaatgccgtgatagtacctgtgtacctgattgaccctgctacggccctgacgttaagaaaaccagacaacataacagtggtctaccacggtaaaaaataa

SEQ ID NO: 39625 - DNA, 582 bp, Escherichia coli
atggactttccctggccctggaaccgcaaatacacaatgaactggttcctgttgtcgttactgaaccaccatcttgatcagctactgggacgttactcccgccttcagcccctcagactcgatgtgttctatcagaatgacacatggcgttataaccatcacggatggtacgagacagaaagggaggtacgccagttaacagaacatctgatgttagagagcaacatcgtaggtcacttctgggtgctggagtgtacttcccgacataaatgccatgcccatatcgtgatgtatcttgatggtcaccataaccaggccacctttccggtagctgaacaggcggggactgcctggcagaagattacacagggagagggctaccacaatcgctgtgatcccaagaaatgctacgaagccgatatcacccatcccgtcaattacgatgatgctgcagccatcaacaacctgcgctacatcatcagctatctcggcaaggagaaatcaaaacacgggcagacttactacggggccagcgaggtaccccccgccagtggactgggcagaccgcgagggcttcgataa

SEQ ID NO: 39626 - DNA, 267 bp, Escherichia coli
atgaccattaaaccttccctgtctgaagaccagttcgtcaatatggctttcattacccatctcaccggattaaccgataaatggttctacaagctcatcaaagacggtgagtttccggctcccatcaagtttggtcgcagttcccgctggcgacagagtgaagtcgaagcctggctgcaggcccgtattgatgcatcccggggagagaattccgccctgacaactatccacaaacttaccgtaactcccgtggaggcgttgtcatga

SEQ ID NO: 39627 - DNA, 573 bp, Escherichia coli
atgaaaacgccgtattcccgtcatgacatcctgctgcagcattaccagcgctggctggacgatttcacccgtctggctgtacgacatgggttgtgtcacccgaacatccaggccagtcatcaactcaccataggttcgctccgcttcacgggtacggggcaggtcactgccgtggtaccccatgctttgtaccggttgttctgcggtaatcagcctccggtcatcacggtgacagaggacatgtccacccggctggattcagacaccacgctgctgcttcaccatcccatgctggaaggcatattgctgagtgaatgtgcccgactgaagcagttcccggtacaacgggcactgctggtgatgttacagcgactgaccagccgggaaatccgacacaaaatagtctggctgtgctggcgcgatttgatgtgcggggatgacccttgcgactggctggagcgtctggtcggacagccagacgacgcgctgtatctctggctgggtgaccgccaggatagtgatcccgttttaaccctgatgatggatgaatacctgctgtttaccggcaactga

SEQ ID NO: 39628 - DNA, 297 bp, Escherichia coli
atggagtatttaaacgatgagctgacagaaatgcagcaagtaaagcgggtggttcagcaggccatcgaccagtacccacgtctggctgtatttcggttgatgttggactgccctggccctgagtcaatagggtgttttcaggataccgtctaccgacaagtaagtgaactggcagcaacccgacaattgagcggcaggccatcgccaccaacaattctcagatggattggaagcaaaacttctccccactcatatcagacactactgatgctcaaccaggacaggccatcgatataa

SEQ ID NO: 39629 - DNA, 741 bp, Escherichia coli
atgtcatcgatttctgggattgatattgttacgggattgttaatccccgtagttctgtatttgataaaaaaagtcattgactgggcagaaaaaatcgttggtaacccacgacctaaacgaaaataccagtttgataaaattcctgcggataagaaagtagagattttttcaaaaattgatgcattaaaagaaaaaacaacaacgccgcatgttcttgttcagatgaaacttttatatgaacaactgggaatgtatttgcctgtgtggcattgtcaccaactggtttcctgtatggcggctaaaaatattagctcgctggatgtacgtctgcgaggttttctgaaaaacactattatcggtcactatcctgagaaagggttcagtgttaacactaaggttgtccgcagatcctacgtgataactaccttgttcggggtatttgcagttgctatgtttatctatgcaggatgggatgccatctcttctttctggagaagcaaagagacagggttgtttatcttgtttttattgatttatgcttccgctattattactgttataggttatataatttcccagattgaagatatctacctgggatctaaatttgggcatttattcgagacttggctcaggaaccaaccaccgtgtaacgatgtgaaccctgatacttctgcagcaacgccaactgaggagcaagcatcatccgaaggccctcaagaagattctctcgcgagttaa

SEQ ID NO: 39630 - DNA, 498 bp, Escherichia coli
atgaagggtattggaactgtacttcaggctggatacctcaaactggatcacagaatgaagacctactcagttctcacagaaaatactcttttgtttaccggtcattttgccgatcttgatcctcatggctggggttctctttacgaaaaatttactggtcaggcatttgaggctgaaggatatgaagtggaatacagagggctcacagcagggtttaatgatggtggtatcgaccttattctgcgaaaaggggatgacactatttttgttcagtgcaaacatgcttttaaatcttcactatctcgcaactccattgagaatatcctgtataaagcaggaaattatataaaccgtaatatgcccacgaatagagtacatctgtggttagttgtacctgatgttaaacgaataaaatggaaacggtattttttacggcacaacactacacagaataaagttaagcttgctctggttgaaatccgcatgctatctatctga

SEQ ID NO: 39631 - DNA, 1155 bp, Escherichia coli
atgacgaaacagaaattaccggaaggctggcaaatggtgaagtttggagatatcgcgaaacatatctctaaacgagtggaaccgagcgagacagaccttgaaatttatgtcggtttggagcatttagaccctgatagcctgaagatcaaacgtcatggtacacctagcgacgttgaaggacagaagcttttagtgaaaaaaggccagataatttttggcaagcgtcgtgcttatcaacgtaaagttgcagtagcggattgggactgtatctgttcggctcatgccatggttctggaggcaaattcaaagactgtaataccggattttttgccagtatttatgcagtctgatgtatttatgaatcgtgcggtagcgatctctgagggctccctatcgcctacgataaaatggaaagttcttgctgaacagaaatttccattaccagataaggaagagcaaaagcgtattgttagtatttgccaatcaattgctaaaactaacgaaaaaatcgttaatactattgatggaaatatttcgcttaaaaaaacacttggaaaacaatttgctaatgtaaatgcatttgctttaattgaagatgtggtggagtttgttactagtggctctagaggttgggctaagttttgcggtgatgaaggcgatctgttcctaagaataactaatatgcaaagaggtaggatagatattgatctttcagataacaagtttgttaatttaccggaaggtagtaccgagggcgtaagaacaaaagtccaggaaggtgacgttctggtttcaattactgctgatttaggactagtttcaattatagaaaaagatttccctatagcatatgttaatcagcatatagccttattaaggcctaagccagaaaaaatatctccttattatttggcattcatgctttcatctgaatatggtcaaaaactattgctatcattaaatgatggtggtgctaaggctggaataagtttaaagaatctaaagcgattgaaaatacctgttcctgccattgaggaacagttgaatttgtccaagatacttcttaatataaaaaatacagatttatccttggagtgttatttaggaaaagttaatgctataaagaaaaactatttgggaacaaaggttggataa

SEQ ID NO: 39632 - DNA, 255 bp, Escherichia coli
atggcaaaaggtgtgtcaatttctccaactacggtaagaatccctgaatctttacgcgaggctcttgctgtcagagcatcaaaaaatggtcgctctgttaactccgagatcgtcatgattttgcaagccgcgattgatgaagaaaaatcaccaagatcaatagaaggttttgctcaacaagaatctgaaaaatttagggaggctcttcttaagactctcagcagcatgtacggagaagataaaaaacccacctga

SEQ ID NO: 39633 - DNA, 303 bp, Escherichia coli
atgctaaacatgctgtcaatattctttattgatggtgtcgctatgctgcctggtcgtcttaaaactgctcgtttacgggcaaattttactcaggaaaaattaggtgtactggctggtattgaagaagctaccgctcggtcccgcatatctcagtatgaaagcggtatacaccgcccgacatttgaaatgatgtgtgcatttgccaaagtgctcaacgtaccggagtgctatttctatacggttgatgatgattttgccgaagcggtactggatctttatgtccggtgggaaagtaaatcctga

SEQ ID NO: 39634 - DNA, 261 bp, Escherichia coli
atgcttcccgttcgtctcaaaacagctcggttacacgctcgtctgactcaggaaaagctgggtgttcttgctggtattgaggaagaaactgcacgttctcgcgtatctcagtacgagggagggatacatcgcccgacgtttgaaatgatgtgcgcattcgcgaaggtgcttaatgtgccggaatgctatttctacgcggttaatgatgattttgctgaaatgattctgaagctttatcaggaatattcgaactattcctga

SEQ ID NO: 39635 - DNA, 894 bp, Escherichia coli
atggctagagcaaaaaaactttcatatggcgctattaatatcacaatccatccccatagccctcaaaaatatgttgaattgtttagagatgcaagaaggcttttcttaaacgtgaacgtctacggcgatcagtttgcggtattgcagcatttcaacccaatgcatagagaacaacttataacagagccttatgaaggagaggttgtaaagtatacggatatcaataagaacggtgaatggtatagtattagtcgaaaagagttggctacagatgaagaaaaagagcaaattgtcattcctgatgatatgaagcctaatgtttctcgtttttcttttatatttttacccaatgttcacttgatggtttacgaaaatcaacatgagcaaaagagtattacccctcggcaaatggagaagtttttaaaaactcttttttctaatgaaaagattaaagaaaaatatggagttgtaaatgttacgagtttaacagagcctgatgctgtagagcgaatgttatcgcttaaaggtattacgctgttatctatggtaactcgcaggcctaatccagatgatttggttagtgctgaacatgaagttcaagagcgatttaaagctatcggtgttatcgaagaagataagacatataaagctgaaagaggtgagcaaattaaacctgataaaaaactaaagcgtgatgctctgattgcagcacgaaatggtcaggttgaaattaaacgaaaaaatgagagcggccacgtagaaagattgtctactactgataaaccgttacaacgtagtgcgagttatgatccagttgtaacactacctattgcactcttgctacaggaagcttacgctcttacaaaagagtttataaataaattgagggaataa

SEQ ID NO: 39636 - DNA, 558 bp, Escherichia coli
atgttaaaaaacagtatattgaaggattactggcgtatgtacggagggtggcgagccctctgtaaaagctgctatttccgaatgtctgttgttatgactatcattctttatcctacatggtcacatgtagggtggtggaatgatattttatccctaatgccaaatcttttaggattttctctaggtggttttgcaatgtggattgcaataggtgatgataattttagagaattaatttctggttctgaagagaataaaacatcaccttatatggaagtcaatgcagcatttgtacatttcatttttcttcaaatattatctatattaattggcttaatagctaaatcttattgtgttattttacttggggagttttctttccttaaacaatatggcttaatctatattatttgtcttaaagcggtcagtgggcttgggtattttatctttgtatatgctattttttctgctttagctgcggtatttgcaatatttagggtgtcgaagtggtatgaccaatactctggacatataagaaaaagtaaaaagaggaactga

SEQ ID NO: 39637 - DNA, 1497 bp, Escherichia coli
atgaataaaatatacgctctaaaatattgttatattactaacacagtaaaggttgtctctgaactagcccgaagggtatgtaaagggagtacccgcagaggaaaaagactttcagtacttacctctctggcactatctgcattactcccaaccgttgctggtgcatcaacggttggtggcaacaatccttaccagacataccgcgactttgcagaaaacaaagggcagtttcaggctggcgcaacaaacattcctatttttaataataaaggggaattagtaggacatcttgataaagcgcccatggttgattttagcagtgtgaatgtaagctcaaatcccggcgttgcaacattaattaacccgcaatatatagccagtgtaaaacataataaaggatatcagagcgtcagcttcggtgatggtcagaacagttaccatattgtggatcgtaatgaacacagttcatctgatctccacacaccaagacttgataagctcgtaactgaggttgctccggctaccgtaaccagctcatcaacagctgatatattgaacccttcaaaatactcggcattctacagggctggttcgggaagtcagtatattcaggatagtcagggtaagcgacattgggtaacaggtgggtatggttatctgacaggaggaatactcccgacatcattcttttatcacggctcagacggcattcagctgtatatggggggcaacatacatgatcatagcatcctgccctcttttggagaggccggcgacagtggttctccattatttggctggaatacggccaaagggcagtgggaactggtcggtgtttactcgggagtaggaggggggaccaatttgatatattctcttattcctcagagttttctctcacagatctattcagaggataatgacgctcccgtcttttttaatgcctcatccggcgcccccctgcaatggaaatttgacagcagcaccggcactggctctctgaaacagggttccgatgaatatgccatgcacgggcaaaaaggttctgacctgaacgcaggtaaaaatctgacattcctgggacataatggtcagattgacctggaaaactctgtcacgcagggtgccggttcactgacatttactgatgactacactgtcaccacttcaaacggaagtacctggaccggggccggtattattgtggacaaggatgcctccgtaaactggcaggttaatggtgtgaaaggtgacaacctgcataaaatcggcgaaggaaccctggttgtacagggaaccggtgttaatgagggcggcctgaaagtcggggatgggaccgttgtcctcaatcagcaggctgacagttcaggacacgttcaggcattcagtagcgtgaatattgccagcggccgcccgacagtcgtgctggcagacaaccagcaggttaatccggacaatatatcctggggctaccggggggggggttctggatgttaa

SEQ ID NO: 39638 - DNA, 2223 bp, Escherichia coli; identical to SEQ ID NO: 8647

SEQ ID NO: 39639 - DNA, 1026 bp, Escherichia coli
atgttagaaattaccgcctcacgaattagtaatgttgtgacatttaccactgatttcaagagcttacagaaagctaagaatgaagtggataagctacaaaagaagatgcaggggatcaaacctgtgcaagtggcggcagcacgtcagaaagatttacagaggctgggaaaagagattcagcgccagcatgatcagcatgttaagcgggctgttaaatctgagacacaggcatctaaagccagcactaaacagaagctacaggaagctaaaaacctcgctaaagcacaggctaaacaagcctcaattgctgaaaaggcagagatcaagcgccttgcatcatatcgccagttacaaggcatcaagaacaattcccgctatggcgaagggatggatattaagaaatatcacgatgctctacgttacattaaggaacaaacccgcctctatgaatccggcgctatatcgcaagcgaagatgaatgccctgatccgtgaccgcatcacattagaaagacgagccgcagccgctgctacgcgtcgtaatgctgccgctgggggtgtatatccagttacttctaagaagctccacaaagaaggtgttagcggcggtggcgcgttaatgatgggcggtgttggtggcattatcggcggcgctgccgttggcttaggaagtatggctgtatctgctggaatggaaaaagcccgtgaacgtatggaattgcagaagatgagcgatctggtaggcgcagactccaaccaggtggctgcaatggttaattgggggagggcaaacggtgtatcaagtgcaagcgtggacaagaccactgacaatatcaaagacttaaacgaacgcattggtcatcaaagccgaactgctgaatgggatagtaagaaaaaagagtggcgaggcggggaaggatcattaaatgatattcagaatgcctttgcatggaacaaagataagatagcttcctaccaggggcgggcgaccgctgcaactcctgcaagacgtggtgagagaaggtga

SEQ ID NO: 39640 - DNA, 642 bp, Escherichia coli
atgcaactggtgaagttccggaccgcacaaattaatgccctgcacgggacgttactggagtttggtgaaaccatccacaaaggccgggcagcgatggaacgggagttccccgaagcactggaacggatgaaagagagactgccaccgtatctcattatggttctggaaaaccagtacaaccgactgaatgagttggactcactgatagaggatattgaaaaacagcttaccagcgtggcgaggcagaatgaaacctgtaagcggttgctggatattcctagcgttggaccacttattgcgacggcagcggtggccaccacgggggaagcatcagcgtttaaatcggggcgagagttcgccgcatatgtcggtctggttccaaaacaagccggctccggaggtaaagtacgcctgctggggataagcaaacgtggtgacacttatctcaggacattatttatccacggagcaagagcggtggcattagtagctaaagagcctggcccgtggataaccgaactgaaaaaacgtcgtccagccagtgtggcaatcgtcgccatggcaaacaagctggcacgaacagtatggcaggaaccatgtcagtatcagaccatattaatcgctgataccgttaaacaatga

SEQ ID NO: 39641 - DNA, 1335 bp, Escherichia coli
atgaccgtacacagcaacgacggactatcatggttaacgaaacttgagcgtataggcgagaaatcagcagccaacaaacatgagatgttcagtaatctggggcatctggtgaacgttgacatgctgaaaggacaattcctgcggctcgacgggaataaggctacaggtattgatggtatgactaaagccgcttacagtgaacgccttgatgagaacattactgctctcatcgtgcgtatacgcagagggacgtatcacccgcaagcggcaagaatcacggagataccaaaagaggacggcagtaaacggccgctggctatctcgtgcatcgaggataaactggtgcaacttgctgtcagcgatattctcagcagagtctatgagccactgtttctgccctgctcatacggtttccggccgggattaaattgtcatgctgctttgaaggctttgcaacagcaaacgttccgcaactggaatggcgcggtggtggaaatcgacatccgaaagtatttcaacacaattccacatactgaattgatgaatttactgcggaagaagatatcagaccgtcgttttctcaggctggttgaggtcttaataacggcacctgttatcagggggaaagagatatcagagaatgaacagggttgcccgcagggggcggccctgtcgccaatactcgctaatatctacctgcatcatgtaatagacgaatggtttgctcaaatcacgcgttcacacatccatggacgggcagagatggtgaggtatgctgatgatatggtatttacctttgagttctttagcgaggcaaaacgcttctgtagggtgctaccgaaaaggttgaataaatatggcctggaattgcattgtgataaatcacaattaattcccgcgggtcatatagcagcaatgagagctaaccagtcgggaaaacgcctgcctacgtttaattttctgggatttacctgctactggggtaaaacgcgaaaaggacactggcgtttaaagttaagcagccggaaagatcgtttcgcagccaaactaaagggcctcagagatttcctctggagaaacctgaatgcccccaataaaaggcttgttctgaataccgtcatcagagtaatcagaggctggataaattatcacggtatatctgataaccagaggcgtgtggggcagtttatattccaaagtacgcgaataatctacagatggtttaatcgtaaaggtgggcgtcgccgaatgacgtggaaaacgctgaatataatcctgaaaatgctgggtttcccatcgagatggaaaacccgttcactgttcgcttcttgctga

SEQ ID NO: 39642 - DNA, 441 bp, Escherichia coli
atgcagcagcgtctggcgcaacatcggcaaacaatggcggcatctgcccgtcagttacctgtcggggccagagtgctgtctggaacttcgcgcgaacagcaatttaatcttcactcgcgctataccggcagcgtactgacggcgctcgggctaaaggttccacagcccatcaacggcacaccgatgatggcgattaatctcgaacaactgctggcaataaatctccagtggctgctggtggcacattaccgtgctgaaagcatcgttaaaaaatggcagcaagatccgctatggtccatgttgcaggcgcagaaaaatcagcaggttgtcgcagtctacagaaacaactgggcgcggatgcgcggtatctttgtcgccgaacgtatcgccagcaacatggtaaaaattgtccaccatcaggcggtcgatagctcgccatga

SEQ ID NO: 39643 - DNA, 300 bp, Escherichia coli
atgacgactgctatcggcgatgccaatcgggctaacgttgaccgccaccagcgcgtcgacaaaagaaaattcaagcaccacaatccgctgcggcgttttatcaagggtaaaagtaccgtgctcaccctgcacggtaacggcaaatactgggcctgccagaagcaacagactgaaaagaaacctgcgagcaagggtaaatatagtgaactccagtgggcggacagggcgctgacgccgctatccgccaaaaacaatcatcagaacttcattgagccttgcagatacagcgtgcgcggctga

SEQ ID NO: 39644 - DNA, 2322 bp, Escherichia coli
atgattcctttacgcaaaccgatgcctctggtgatggcaatccatttaagcctgctgctgttagttgggttgactgccgcgtcagcctttgccgccacgcagtttgatattgcaaccggagatttagacaacgtactcaaccaatatgccgcccgcagcggtattaccctctctgccgacgccggtcttacgcgcggcaaacatagcactggcctgcatggcagttatgaaaccgaagagggcttacgcacgctgctcaacggcagcggactacagctcaaatctttgggcaataatgtctgggcccttgaggccgcacctgtcatcgcagaatccaccttaatagtggtgggtgattggctcggcgacgcgcgtgaaaatgatgtttttgaacatgccggcgcccgcgatgttattcgtcgggatgatttcgccaaaaccggcgcgacaaccatgcgcgacgtcctgaaccgtattcccggcgttaacgccccggggaataacggcaccggcagtcacgatctggccatgaacttcggtattcgcggactcaacccgcgccttgccagccgctccacggtgctaatggacggtatcccggttccctttgcaccctacggccagccacagctttcgctggcgccggtgttactcggcaatatggataccattgatgtggtacgcggcggcggtgcggtgcgctatgggccgcaaagcgtcggcggcgtggtgaatttcgttacccgcgccattccgcaggattttggtattgcgggcggcgtcgaggggcaactcagccccacctcgtcgcaaaacaatccgaaagaaacccataacctactgattggcggcacggcggataacggcttcggctccgccctgctctactcaggcacccgtggcagcgactggcgcgaacacagcgcgacgcgtattgacgatgtgatgctgaaaagcaaatattcgcccaatcaggtgcatacttttaacagcctgctgcaatactacgatggcgaagccgatatgcccggcggtctctcccgcgccgactacaatgccgatcactggcagtccacacggccttacgatcgcttctgggggcgccgccagcttgccagtctcggctatcaatatcagcccgatgcccagcataaatttaacattcaggggttctatactcacaccctgcgtagcggttacctgcaacagggttcgtgcgtaaccctttcgccgcgcgaatattgggtccgcggcatcgaaccgcgctatagccagagctttatgatcggcccttccgctcatgaaatcggtgttggctaccgctatgtgaacgaatcgacccacgagatgcgttattacaccgcgaccgccagcggcgtggtgccagacactgccagctcgtacgatcgcgatacccgttccggcaccgaagcccacgcttggtatatcgatgatcgtattgatatcagcaactggacgattacgccgggtatgcgctttgaacacatcgagtcttaccagaacaacaacctgaaaggcacacatgagcaggtcagctacaatgcgccgcttcctgctctaaatgtgctttatcacctcaccgacagctggaatttatatgccaacacagaaggatcatttggcaccgtacagtacagccgaattggcaaggctgtgcaaagcggcaatgtggaaccggaaaaagcgcgtacttgggaggtcggcacccgctacgacgacggcgcgctgagcgctgaaatggggttgttcctgattaacttcaacaatcagtacgactccaatcagatcaatgacacggttaccgcccgcggtaaaacccgccatagcggcttggaggtgcaaacccgttacgatcttggtgagctgtcgcccgcgctggataacctttcggtttacgccagctatgcgtacgtcaatgcggtgatccgtgagaaaggcgacacctatggcaatcaggttcccttctcgccgaagcataaaggcatctttggcgtcgattataagctcgccaactggacgtttaaccttaatagcgacttccagtccagccaatttgcggataacgccaatactgttgccgagagccccgacggcagtacagggcgtattcccggctatatgctatggggcgcgcgcgtagcctacgacttcggttcgcagatggccaatctcaacctcgccctaggggtaaaaaatatcttcgatcatgagtattacatccgctcatacgacgataacaacaaaggcctttacgccggtcagccgcgcacgctgtatctgcaaggctcaatgaagttctga

SEQ ID NO: 39645 - DNA, 471 bp, Escherichia coli
atgtcccagtcttctgccacgatgtcaccgctaacgcttgcttcgctgtgtagcgacaatcacagttggctgaaaaactggcttacccataagctgcaatccgcgtttgacgccgatgatgtggtgcaggatacctttgtgcggatcatggagagcgactcgctgaccacgattcgcgatctgaagtcctttctttgcaccatcgcaaaacgggtgataatcgacctgtaccgccgccatgcgctggaacgtgcatggctggagatgctctctgagctaccggaggcgctggccccgtcgcctgagctacggcaaagccagcttgagcttttacagcagattgacgccatactggatcgcgcttacgcctgtctgagaaaaaacaaaaaaattttcattcgctgttgtcccttttccctcactcgttcgacttattcattgaaaccaaaaacgctcacggagaagttatga

SEQ ID NO: 39646 - DNA, 201 bp, Escherichia coli
atgtattcttacgtaattattatcacccctaaatattacggtaagccatcgacactcaacatcatcttctataataagtttgttattgtttccattgaactgaactttattctctttgctatttacaagatctccacatacaaaaatattacccgatccattatcatcaacggaaaacgagtcttgagtcttgagtcttga

SEQ ID NO: 39647 - DNA, 129 bp, Escherichia coli
atgaaaccacagtatcagacccgttacgagctgctccacgaaaaagagcctgatgattgcctcttttccataggctctttctctgaagtgaaggaaggcccggaagaaagcactcgctggcatacgtga

SEQ ID NO: 39648 - DNA, 165 bp, Escherichia coli
atgatttccccggccgtcgtgccgggttttcttttgcctcccctcatcacacaccgttcaaaaaaccaccacaacccccgcttcagttatcgctatgcgatgcaagtcacaaaattaattccttttgctatcaaacagttaatatcaaaatacatcaatcaatag

SEQ ID NO: 39649 - DNA, 1203 bp, Escherichia coli; identical to SEQ ID NO: 969

SEQ ID NO: 39650 - DNA, 552 bp, Escherichia coli
gtgaagacagaagcagagcttgcacaggcaaaagagaatatggctggcagagccgacccggttgagcgttcacgtatcagggctcccctgagaggcatcgtaaaaaatattcgggtaaatactttgggaggcgtggtttctgcaggacaggatataatggaaattattccgctggaagaccagttgctgattgaagcctatataaatccacgggatgttgcctatgtcagaacagggatgccggcacttgtaaaactgacggcttatgactatgccatttatggtggtcttgacggagtggtgatactggtaagtccggatactttacgtgaccagaaacggccgggagatttaaaactggatccaaatgaagcatattatcgggtactcgttactaccagtaataattatctgacagacaggaacggaaaaatattaccagttattcctggcatgatagccagcgtggatataaaaacaggtcagaaaagtgtatttcagtacctgattaaaccaatcaccagaatgaaacaagctcttcaggaacgctga

SEQ ID NO: 39651 - DNA, 552 bp, Escherichia coli
gtgaagacagaagcagagcttgctcaggcaaaagagaatatggctggcagagccgacccggttgagcgttcacgtctcagggcacccctgagaggtatcgtaaaaaatatacgggtaaacacactgggaggggtggtttccgcaggacaggacataatggaaattattccgctggaagaccagttgctgattgaagcttatataaatccacgggatgttgcctatgtcagaacagggatgccggcacttgtgaaactgacggcttatgactatgccatttatggtggtcttgacggcgtggtgacactggtaagtccggatactttacgtgaccagaaacgtccgggagacttaaaactggacccgaatgaagcttattaccgggtactggttaccaccagtaataattatctgacagacaggaatgggaaaaaattaccggttattcctggcatgatagccagtgtggatataaaaaccgggcgtaaaacggtatttcagtatctgattaaaccgataaccagaatgaagcaggcacttcaggaaagataa

SEQ ID NO: 39652 - DNA, 150 bp, Escherichia coli
atgatgagcgtggcggttttatatggttgggcggtctggtatttggtgggggactggctgctatggcgttggctgcaggtggcggtggaagcaaacatagacatgaaaatgatgactctgatactacagccccatcgtcaccagcactga

SEQ ID NO: 39653 - DNA, 1185 bp, Escherichia coli
atgcgggaatcatcgcagcgccagggattacttgtggaggctctggacggaatagaaaccctgaagctgaataatgcagttaactgggtccagcgccgctgggatggatatacagccagtgtcgcccgctcgtccatacgggtaaaaaataccagtaatgtcataatctgcttttccacagcagttcagcaactgaatactgttctgctggtcattctgggaacgtaccttattcacagtgatgacccacacaaccgaatcaccatgggggcactgattgccgcagttattctttccggtcgtgcgctggcaccgcttggtcagatagcatcactggccacccgttttcagcaggcccgcctggccatgcagggggtgaatgacattgtccaccgtccggtggagcgggaaagtcagacacattatctgacagtgaaggatatccagggagagtttcgtttcagtgatgtctccttttcttataagcccggattacccgacgctttgtgcggtctgtcactctgtatccggcccggagagcgggtgggtattattggctcaataggttgtggtaaatcgacgctgctgaaaatgatggtggggctgtaccgtcagaacagggggcaaattactcttgacggggttgcgatgcagcaactggacccctgttttgtccgggataaagtgtttcttctggaacagaatccccggatttttctgggaactctgcgtgaaaatctgcagctttcgcgtctgccgggaagcctgtcggatgtggatatgattaatgcagccggacgtttcgggtttgaccgttttatccggcatcatccccgcggacttgatatgcagacaggggaaggcggtcagggactgtcaggaggacagaggcagatggttgccctgacgagaatggtactgggttctccccgggtggtactgcttgatgagcccacgacaggtcttgacctgcagactgagtctgttgttctgaaaggtctgagccactggagccggggacgcacaatggtggtggtgacacatcgtctgcaggtgctgaatattgttgaccgtattgtcgtgatgaatgaagggcgggtaatgatggacggtccccgcgatgaaatactgaaaaaactgtcaggaaaacagcagagtgaagagagcagagcggcagtttcctga

SEQ ID NO: 39654 - DNA, 381 bp, Escherichia coli
atgggcgttctactttcgttaggagtgaatcatgttaatcatttacttttatcatatagtaaacaatcattgataagtcgttgttataacctgctgctatccgaacccggcacaaaatggacagcaaacaaggttgctcgatatctctacatttctgtttctacattacatcgccgtctagcaagcgagggggtaagtttccaaagtatactggacgatgtgaggttaaataatgcgttgtctgctatacaaacgacggtaaaacctataagcgagattgccagagaaaatggttataagtgtccttctcgttttactgaaagatttcataatcgttttaatataacaccaagagagataagaaaagcttccagagagtaa

SEQ ID NO: 39655 - DNA, 381 bp, Escherichia coli; identical to SEQ ID NO: 39654

SEQ ID NO: 39656 - DNA, 180 bp, Escherichia coli
atgcaacataattgtttaatcatgccagacacgcccttgccggatccggatgtggtccggcgttttgttctgcggacggtggttcaatggctgtgtctgctgatgatcctctttatgcgacattcagacaggggagacatcgataaacatcatctgcgggcaaatagttacatagaatga

SEQ ID NO: 39657 - DNA, 381 bp, Escherichia coli; identical to SEQ ID NO: 39654

SEQ ID NO: 39658 - DNA, 405 bp, Escherichia coli
atgattaatgcagccggacgtttcgggtttgaccgttttattcgtcatcacccatgcgggcttgatatgcagataggggaaggaggtcaggggctgtcaggaggacagcgtcagatggtcgctctgacgagaatggtactgggttctccccgggtagttctgcttgatgaacccacgacgggtcttgatctgcagacagagaacattgttctgaaagggctgaatcactggagccgtggacgcacaatggtggtggtgacgcatcgtctgcaggtgctgaatattgttgaccgtattatcgtgatgaatgaaggccgggtaatgatggatggtccccgcgatgaaatactgaaaaaactgtcagggaaacagcagagtggggagagcagagcgataacttcatga

SEQ ID NO: 39659 - DNA, 198 bp, Escherichia coli
atgccaaatacactatttaaaagtgctgatgattttgcggtgcaaaaaataatcaatcctgatatggctatagaggtaatacattttgtaattattgagttccatagcaccttaaaaatcaatgttctttcaataaatacacctaaccataatgtagaaaaaattattgataatagtatgcatgtaaattgccattga

SEQ ID NO: 39660 - DNA, 786 bp, Escherichia coli
atgattaaaaatagtgcttatgaatttccaaactcgttctatgactttgctttaatgccaaagttccaagattgcattgaagaactgagaaatttagcggagccagaagactggggatataaaaacacaaccgatacgtttaaattcccaatacttaaaaattacttgctttatacttatcagagaattgcagaggaaaaaaagattgcaatcacagctgatgagaacttcgcgtgctggaatacgggattgattacagaaaagcaagagcctctattcattctttttgaaaaaaataagcttgaagatcataaaacttattggcatttttcccgattcagtcgaaaaggggagggctatctgaataaatttgcagccattcctgaaatggcacattactttgatgacccctcggttcttgtctacgatactcgtctcgatctgagagtgaatgttgaccacattatttctgacaataaaagcagattcccgaaaaatatgcagtccatgagtgatttcttactgcaaaatgtcgttaatggtgcaatcgattcagctaaagaacgagcaaaaagaaattacaaaactgcaatcccccaatactatcaaggcactatgcagttattacttcctctggctttacaagatgcttcaaaagctgacctggcattggtagtagaacgtttttctggattctacagagcatccacttgcttgaccctagatatggcctataacaacgctcggcaactagcacgccccgatcgagattggttagaaccttaa

SEQ ID NO: 39661 - DNA, 978 bp, Escherichia coli
atgcattacattgatgaaactttagcaaaaggcattgtgaaaagagatttgcggaactggaaaggcaatgcatctgaattaatgaaaactattgatgttattactcgggagcttaagaacttcaaaacacgtgacttacgtgaagaagcgattttaaaaaaaataaaacaaatgcacttccctttctttcatcgctatgttcctgcaatacattccaattcctatggaattttaagtaaagttcatgactccgattgtgttgggttgagtaaaaaatacttgaaaaaatgtcaagaatcagaatcaaaacttttatatgagattcataagcaaaaaaaaagtatggttaatgtttttgttgctttagacgatgctgggactatccctggctcactcgtaatatgtatttttgatttgcattcgaaggagaagtcattccactcagtagtcaatatatcccgacattgtttagaaagagtagtgcaacgtttagggtgtcagactcttaccgatgcgcttgaggaaattttgactggtctggtgagcttagaactaacagttcgttcatatataacaagacctcctgagcgggaatgtgagagaaaagagtttaaaattcacgtacctacaaagaacggtgcattgttgcttaagattgagaatcctaaagcgtctgacaaagatgcatttttagatagcaatttagtgacatggattaataagcggcaattttttgatgaacaggaagttacattaaaacgttttacttttgtgaactttgttaattatgcattaaacgcaccagttttaagttatatacaaaaggattttcaggaaaagattgataagctaaaggtagatggagctttttgtgtcgagtttctaattaatggcttttattacgacagcactgaagtcatgaatgccattaatgccggaaactatctggataatattattgcatttgaaaggctctga

SEQ ID NO: 39662 - DNA, 483 bp, Escherichia coli; identical to SEQ ID NO: 36936

SEQ ID NO: 39663 - DNA, 228 bp, Escherichia coli
atggcagagattattcccatgactgaagaacagaaattccagttagagatttacaaactggtcatgaaccagaacgcagccgcagaagaagcatttcagttcattggcactgacgagctgaagcttgagctattcaaaattcacttccagtcaggcggcgctaattcagatatcacgacccgcactatcgaagcggtgcgtaaattgtcaacgacggatgaaaagtga

SEQ ID NO: 39664 - DNA, 588 bp, Escherichia coli; identical to SEQ ID NO: 36939

SEQ ID NO: 39665 - DNA, 291 bp, Escherichia coli
atgagtgaggccagcataaaccaagtgtttaagcgcattggctacgctggacgtgtaactggtcatgggttccgacacactatgagcacgattttgcatgagcagggctataacaccgcgtggatagaaacgcagctcgctcacgttgataagaactcaattcgtggcacatacaaccatgcgcaatatctggatggacggcgggagatgcttcaatggtatgccgactatatggattctctcgagcatggcggaaatgtggtgcatatggtgtttgaaaaacacgcatga

SEQ ID NO: 39666 - DNA, 492 bp, Escherichia coli; identical to SEQ ID NO: 27401

SEQ ID NO: 39667 - DNA, 237 bp, Escherichia coli
atgtttgacagcacgataaaagttctggagatgaaaaacatgccgataccacagactatccatgctatcgccaccgggcccaaggcagaattctccgccatattctgggggagtccgtcaacgccgctgccgatcatcgagctcacgacaatggatgttagcgcaagcaagcccaacttttgtttattatttttttcaggcgcttcgcgaagtatgtcgcggccttttggaggatag

SEQ ID NO: 39668 - DNA, 708 bp, Escherichia coli; identical to SEQ ID NO: 10331

SEQ ID NO: 39669 - DNA, 237 bp, Escherichia coli; identical to SEQ ID NO: 10330

SEQ ID NO: 39670 - DNA, 363 bp, Escherichia coli
atgagcgcctacacggtatcgcaactggcccataacgctggggtgagcgtacatatcgtgcgcgactacctggtgcgcggcttgttacggccggtggcctgcaccacgggcggctacggcgtgttcgacgatgcggccttgcaacggctgtgcttcgtgcgcgcggccttcgaggcgggtatcggcctggatgccctggcgcggctgtgccgtgcgctcgacgcagcggacggcgcacaagccgcagcgcagcttgccgtgctgcgccagttggtcgagcggcggcgcgcggcgttggcccatctggacgcgcaactggcctccatgccagccgagcgggcgcacgaggaggcattgccgtga

SEQ ID NO: 39671 - DNA, 423 bp, Escherichia coli; identical to SEQ ID NO: 10327

SEQ ID NO: 39672 - DNA, 1599 bp, Escherichia coli
gtgcttacacgtctgtctcctgtccagataccacttcctttaatccagattgccgctggtgcagtactggcccagcctatatttggtctgcatgtggaattcaatcctgaactttttctcttattgtttataccacccctgttgtttgctgaaagttcaaaaatacaacctaaagaattgatcaagcacagccgggaaattatcagcctggcacttgtgttggtactaatcactatttttggtgtcggctatgtgattcatttactcttaccgaatgtgccgctcatcgctgctttcgcattagccgccgtgttgtcgcctaccgatgccgtggcgttgctggggattgtcgggaaagggcgtatcagcaaaaacatccaggaagtgctcgaaggcgaagcgttgatgaatgatgcttccggcctggtggcgttgaaatttgctgttgcagtgacgatgggaacgatggaattcagcgttcatggcgcaaccattgcgttttttgtcgttgcgttgggcggtattgccgtggggatcgctgttacctggttatatggtaaagggctgctgttgatcagccgatatgctcacgatgaaccttccattcagattgtattgatgcttctgttgccgtttattgtttatctggttgcggaacattttggcttatctggcattcttgccgctgtcgccgcggggttaacaaccagtcgcattggcgtagtccaccacgcgcctattcgcctgagaattaaagctaaaagtagctggtcgatgcttgaatatgtctttaacggcatggtgtttctgattttaggcttacaactgccgggcattatttcggaatcactgatccgtgcagaaaacgatccactggtggacaccggatctctgctccttgatgtcatttggatctacctggcgttaatggttgtgcgcctgggctggctttggctgatgcgtctgtatagccgtaaacgacccggcaaacatccgatgctgtttgctggatataaaacgcgtcatatgctgctggcgacctttgcgggggtgcgcggagctatcacgcttgcgggggtgctttctatcccgttattgctgccggatggcacaccttttcccgggcgttacttgctggtatttctcgctacaggtgtgatcctcttttcgctggtttgcggcattattattctgccgttattactggggaaaaatgtggggattttcagcgataaccgacaaaaagaagaggaagctgccgatctgtttatggctaaaatggccatactgagtgtgcaaaagaccgagcaacgtttgctgcgcgccagaacagaaaacctcgataacgagttgattatggaaacgggggccagagttatcggttatatgcgacatagtgaagaggatatgtcgcctaatgataattccctgcatatgcagcgtgcgaagctggaaagaacatttaatctggcggcgttaaatgccaaacgcgcggctatttaccagatgcgcgcaaggcaagaagtcagtgatgaaacactggcaaaaatagtcagtgaattagatgtgctggaaacgttaatcatggatagccgataa

SEQ ID NO: 39673 - DNA, 240 bp, Escherichia coli; identical to SEQ ID NO: 11875

SEQ ID NO: 39674 - DNA, 276 bp, Escherichia coli
ttgcgttctatttttgaaacgtacaatgaagaatataatgttagtgctggtgattgggccaacttaggttttagaaaagaaggtgtagggggaacatgttggttaaacgagttcgttgtaaggaatacattattagttagtgatgtaggtcagtatgatgattcagggttttatacgactagtagaattctgaatgctttgcacttaactagagataatctactagctgcctttacaacaagttctccgaactccgaagaacaggcgaattcttga

SEQ ID NO: 39675 - DNA, 543 bp, Escherichia coli
atgaactgctgggaaatattagctttacaaccaggtgcggaagaacgagatattaagcgtcgttatgcgcaactggtaaaaaattgccgcccggaagatgatcctgcagcctggcaacaattgcacgatgcttatgaacaggctttacgttatgacgacgaagatcagtggcaagaagaggaagaagagcagccaatcaatatgcccaggggtattgtttatcctcgtcctgtgatgacatttcgcgcacccaacaccttttctggtcatccacttcctgatgtcgctgttaaatcagagggggaagtcacctggcaagccgtgctggatatgctctgtgaggagaatgaagctacccccgaacacgcccccatgcaactttctaaggcgttatctttccttgagaaaaaagatctcagctcacgaatgtgctttgaagaagcgttattactgtatcttcatcgggtatttcggccattattaactctcgctgctgcacaaacttttagatggcatttagttgcaggcagtcgtcaacggtaa

SEQ ID NO: 39676 - DNA, 396 bp, Escherichia coli; identical to SEQ ID NO: 39090

SEQ ID NO: 39677 - DNA, 1302 bp, Escherichia coli; identical to SEQ ID NO: 17731

SEQ ID NO: 39678 - DNA, 5454 bp, Escherichia coli
atgagtagcgcgttcataaagcttccacaggataaattgaatgcggcgttggctggagtgctgtgtcctcgtatcgaagcgatcctgagtgatcgtggcctaggccactgtgtgcgggtcaccgaccttgatgacgcagttatggagtcagtatgccgggaacttaggcgaatttggcctgacggaaacatatttatactcggcagtcatgaccaagaaggcatgcctttccgagtaacttccaccaagttggtggaactgcgtaatcctgacgcgaacggcgatctgcgccagcctttgctggtgttcataccgacctcgcttcgtactagcgccgaggattcttttggcgtggcgaccttcgaggaacttgccttcaccggtatctacgaggatctgatcgagtcgctgcttgaccggcttccggcaacgctggctggctatgttcgcgatcttttgggtatcctcaccgaggaggaatggctgtttgctgatgatgtttcgcgcgcgcggtatctactcaccgcgctcgaaaacgggattgatggagaaactcttggggccagcctgtatgaattggcgttgatcccggacttcaagctctttgccgatccgggcaaggtcattggaaaaattcgccgtaatcttggcagcgtccgcagtttgatatcctcacacaagtcggctcgtggtcgtattgctgatcttgggctcagcgataagacattggagttgcgtctattcacctactttgaaaaatacgatgtccatgattccgaatcttggacgccccccattgcgacagacaaaagttggtggagcatttctttcgataaatggacgttcaaagaagaactttcactggacaaggttcttctgacagtgttggaaactgacttgcctgtcgttgcggatgatgagaccgacgatcaactcagtggcctaattgggcaacaggttctggtaccgaacgaccgtcgtaaaatgaacgtggtgtttgaggttaatcctcaccccggtaaggtcagtgggcttgaccattttatggtgcaaatcatttcgcagaatgacggcccggtagggaaatctaaaaaggtaaaagcctggacgccgaaccgcctgcaatgtactgccagcctggctaaactcaataaaatagaattcgaggaaggatggcatttcatccgtgtaatgccctggactgccgatggcgacccgattccgctggaagcagatttcagctccgagggcgttaagcgctcttatgagagcgagcctttctacgtcctgcccggtggcaacattgaagaagatcccccccaacgtgccatgcctattgagcagagcctggagcatgcacgtttccgactgcaattgacagccctaagtgatgaacgtgatcccaatgatatcgctatcagtagtgtagcttggtccgagggcgatcgtaccaagaagacctcccgcctggaaaccttgcacgcaaaattcggtcgtgagggggcggttcagattccgctatcacgtacgctcaaaataatcgagcaacgcatattagcaaagcctaaacacccgtcaggctggcgaatgcagatcaacctggataccgctgagccaccctccgaggtcggactcatgctgcctacatctgccgcgatggcatctttcctggctgcccgtgaagagttttttgcagtggtgcgaaaagactctgccgaactgagcatgcaggggctgttgttccatgactctgaaaaggaatgcctcgcgtatgctgaaagatatcttgacttggtcaggaatctcatccgccaggccgagatgacttctggtggcgagcgccagcaacacctgcgatcgctaagaaacgtactgtccgttgattcaatccatgtcatcctgaccgacttccgtggaaggcatcgcgaggctgttttggtctccccaacccatccggtccgagccttgtggctgaacagttgggttactctgggcaaggattggatcgaaaagatcaagtcaggtgggaaagactacattcctcacgtccgttctgccctattggatggccttgtgccctcagcctatcctgtcggcattcccgtagaggatggtcgtatattcacgccggtggacaatctaaatgcgttttgggcgctatacgctccaacaaccgagaataattctcgtggcctgatggcggagatctgttcggcacttggcttggccgagccctctgcggcgggaattgatatttccggaaaggtcattgcggataagattgagcgctatctctcccagcatccttatgtgagagagctatcgctgaatatctttaaccccggatcaggttcgttaatagctgaggctctgatagcgcttcagcagaaacgtgagtatgccgatttgcgctatgacatacggctctttacctccgagcctgactcgccagttttgggtgaggcgcttgaatccatagttcatcccggagcaacggtgaatgaggctgcagacgcgtttgcggcatcaactggcaatcatctgttttccaagctgaacttggccaagcatgcgctgaatgaattccatgcaaattccaaggattttccagcgcacatcagcgttcttttggatgtgttccccgccgaggagctttccatttccgagaggccgatgggggtgactccgctgtatgggttgatacagggttttgacaccgaattcgttgacgacgattcgggtaccttctggaataagcggccgattattgggcgctccttcggtgcaaataaccacgctgcgtgtttcgatttgctgtcgtcactgaaccgtcacctctgttttgcaacctcagcggttgctacttctggtgctagtttcaaggccgtacccgttgtaacccttggcctcgatgtggctcaacgagaactgatctacgaggttcatcagatcagtgattgggtgtttactatcgaccgaaatatggggattgagtttttcgaccatggaggtcggaagaacagaccggattatctgattgactatgtgccaggagccagctcccaagcgacccataatctgataatctcctcgcgctcgaacgatgagttggaggccatgctgaaaccggtgctgcttgagcacggtttgtccgccgacggcgagcagtcggttcagatactcgcgaacctgcgctcgctttctggtcagcttgccctgaaactgatttccgcacgtacgcaacaggcggaggctcttggcttggctctagcgaggctctatctcgaatatcaaggcgcgttaagcaatcagatcattgtgccattagacgcacacacggacctctaccgcgtaagcggtgagtcagacgatgtcaacgatgctatcagcctacaacgtaccgacttgggtttgtttgatttagatttaaacaccaggacgatcacttgtaatctggttgaggtgaagtgttattcgcaggttggtgcctttgcggctttcaaccaactgaaggaacggatctccgcccagataaatcagagcgagcgcatcctccagcgtcactttgacccggccctgaaaaaaccggatcggccggataggttgctcaagagccgggagttggctcagattcttaggttctatttggagcgctcactgcgttatgggatctttgaagagaccgccgcgcaggaagcgagaggactacttgaatccattgagcagggctactcgcttcaattcaggcggtgcgctttgattttcgactttgacaagtctggaacagaatctccggacaacgagattggcatcgagttccatcgtatcggcaaggatctcattcatgccttgctggagaactgtcgcaagcctgtgtctgtcgagagtgaggaagtaccgactgctcctagtctgagcgaacagatcatttcgaacgtaccgaagctcgagactgccgctttcatcgcccctaatagggtccgctcgacatcctggacggtggacgagctctggaacgatgagctggagacaccagtcactctaccaataccttctgtctcagaggaaaccatcgcacctgttcaaaaggaagcacaggcgaaacccgtcgagcaagcacctgaacctaccaccattgtgcccaaacaagaaaaagatgacgaacaacccgctaccgttgatgtggaaccggaagaagctgttcgacccgctcttgaagtacaggggcatctgacattcgagcctcaagccgaagtcagctacgacatcatgctgggcgttaatggtagttcaccgcagtacggattgctcggagaggtttccggacggaaaatcgcgctggacctcaatcatacccacacgatcagtctcttcggggttcaaggcggtggaaagagctacacccttggaacagcaattgagatggcctcaatgccgattcagcacattaatgtactgccaagcccgctcgccacagtcattttccattatagcccgacgcaggattatgcgccggagtttacctcgatgattaatgccaactcggtagaggatgagatccgtatccttcgtgagcgttacaaggccaacccggaagcattgaaggatgtcttgattcttacccctgccaacaaggtagatgatcgtagggccgagtacccggatattgaggttaagccgattgctttttctgccgctgaacttaaggcagcacactggaaattcctaatgggagcgattggtagccagagcatgtatatgcgccaaatcaatctcatcatgaggggactgcgggataacctgaccttggattctctgcgagcaggcatcgataactctggtttgtccgatcatctaaaggagctggcccagacgcgcttactgtttgcaagcgaatatatcgatgataaccagcgtctccaggatctgattcgccccggccggttgattatcgtggatctgcgagatgaatacattgagaaggacgaagctctcggtttgttcgtggtgatgctacaggttttctcagaagcaacctaccaaggaagagccttcaataagttggtggttttcgatgaagctcacaaatatatcgagaacgatgatctggtttccggcttggtcgaggttgtccgtgagatgcgccacaagggaaccagcattatggtcgcttctcaggacccgccatcagtcccgatctctcttatcgagttgtcttcacagatcatcatgcacaagttcaactcgcccgcatggttgaaacacatccagaaggcgaatgccgctcttggtgagttgacctccgataagatgagtcgtctcggtaccggcgaagcctatgtatggtcgagcaaggcttcggatgactcattcacccggggcgcggtgaagatcaagtgccgtcctcgcattacccagcatggtggcagtaccaaaacggccgtgggtcgatag

SEQ ID NO: 39679 - DNA, 1683 bp, Escherichia coli
atgtcaattaaaggccgtgacaaagagtttcgaatcccgaaagtttcttatctcgattttaaacatattgagatggatcgcgtactcaccatgttgtttccacgattgaaatacgatggctatggtagtcgcagacctcctcgcggtggtgatctttcagttgaggagtttctcgaagatttccttgaacatcccgagtggtttgctggtttcgatcaaaaccctgaaattgttcgagcctggattgaaacagatcttatggatctagtgaatagaggtaaaagcaaccaagctctagctgcaccacgtcctttgcatggcaatacctataagtttcgtaacgcgaagcatacccgagattacggcgctgcagagcaaatctactggatgcttttctatgcccgcaaaggtaagggccaagcggcgcgagatgccttgaagtgtttcttcttcccggggatcgacttggtaacggaccgttacgatcccaacgcttccgtggatgtggaaacgcaggccatcttgcgattagaccaacaggttacgcaggatatgaaggattccaaggagcccgcacgtttccaacctctgtgtatcgggcaggccgatattttggcagacgatattctgcgtttactcgcctatgagccttatatcccgcgctcggtgttggttgactatctcaaaactctgatggctttccatctggcactatatcatctcaaactactgcaaatgctgcccaagctggtgaaacagcgctctggtaacgatctctgtaccgccagggaatgtccgagcaacccgggtctcgataatgctctggaaggttgcccttaccgcttggcgttgatagtagatatgggggacgtcaacaatccgcatatggttgagttagctcgaaaatccactgatcggctctatcgtcagatacctgcttttgtgcaggccaattttgtcgtcaagaaactcgatgaaatggcggaatacttgggcaaaaaaactggtaaattggctcctcccggaggcggtgtgttcactgttagtgatctgatatccctgctgaagcccgagcacgacaccgagcgtcaagcctacttcaaattccgcttggcgagcctaattgaagaatcggcctccaggaatgaggatttagacccagagattagggacgtcaccgccatgggcttgggtgaattcgattccttcattgaaatactgatggcctatcgaggtaaatatcaccgccaatacatcactgagtgcctggattctcttctgctgaagaataaagaaagtggacttttggctcaggcccggactaagggaagcccacgtcgatttgtgttaggaagcaagctgctcgaagtgctcctccaggtagctgtactcacccaagacggcgggcgttttgtgacccacgaggttcgcatcgaagaattgttagcctttttaaggaaccgctacggtctttacatcgaccaattaccagaaggaaccacagctaacagcagcatactagacaaacgtgccctgcgtcttaatctcgaagccttcaagcgccgccttcgtgaaattgggttctaccaggatttgtcggatgcttatgtaacccaaaaagtatcgccccgatatgcaattgaaagatttgatagaactgataagaatgggaggcacacatga

SEQ ID NO: 39680 - DNA, 4158 bp, Escherichia coli
atggcgaaggtcatacccatcggacaacctgcaaacgaatctgaacgcaaggccatcggtttccttcgggatcatcttcctgatggctggttgatcttccacaacttcgagatgcgtcaaggggaggaggtgttcgaaatcgatatcgccatcctcgcgcctcatgcgatttatttggtggatgtcaaaggaacgcgtggcaacatcgatgtgtatggctcaaagtggtatcccgaggggaggcaaaaatttcactcccctctggcaaagctgcgcaaccacgccaaggtgatgagcaccttattggctgacagcaataaaggaataatcgagttacgtaaagtgcatgtacatgcggttgtattgcttacagcagatgatgcccagctatatgatcctgctggtatcgatagcccggatgtgactgactacaagcgctgcttaaaactctttactgataaggggaaaatcccaagccaccgtctttctgatattcgttcttatcactcacatattgacaaagccattcaaggtagagccaagccaaaatcagctcccccagtgtttggaagttggcaggttatagaaaaactgggtggcacagaccgttacaccgagtaccgggcaaagcacaatttattgggtgcgaaggcgggtcaagttcgcctaagagtttatcgcgcagacccctatctagaggaaaccgcccgcaaagacgaactgaaaaaaatcagtaatgcttttgtggctgttcagcacatgagtgctcattcgaatgtattggctgtgcgtgacctgattcaatctgacgatggtaatgaaattactttggtgaccgatgatatttcaggtcaagcgctgcgtcagcatttaaaaaagcctacttttgcgctcacaacagatcaaaaataccaggtgatcaaaggtgtactttctgcattggatcacgcacatcaacatcaggtcattcatcgaaacctcacaccagatgcgattctcatcactaaagggggtatagctcgcatcaccgatttcgactttgctcgagtaggtaaaaaccgatcgatttcagaaactattgctaatcaaattaccgaagatctcgattcggcttaccgcgctcccgaattagtgatatccgagcaaaagtctgagccgaaagaggcctccattgcttctgatttattctctgcaggcttagtattttacgagttgctaactggtgagttgccctacgaaaatattgatcaaatgatcgaagccgatggtaaattccctatcaaaccctcggagcacaaacctgatttccccaaaggcattgatgagtggttgcaaaccttttgtgagttcgatcctgaagatcgttttgccagcgctgctatagctaaaaagcaatttgaagatctgatattacccgaaggcaaaagtgaaaaaaaatcttctgcaccagcttttaacattcctgatgacctaaccaacctgcctgccgattttgtattagctgagcgtttcagtgtgcaaaagaaactcggcagcggtggttttggggtggtctataaagtatttgatgctttaggcgatgtagttcgcgttatcaaacttgtgaccaaagaccggcgtagtgtttatgagcgcctgcgccgcgaatataagacactcaccagcctgccagatcatccacatgtcgttaaggttatctgggccgatcgaatggctgatccaaatcaaactccttatatcgtctttgagtatgtggaaggcctggacgtgtccgatctgatcgatactgaagccttggcgttggatgatgctgttcgcattgttcgcgaagcagctgagggcttagcgcatctccataaacatggtatttatcatcaggacgttaaaccctctaatttgctatggactgataaaggtgttcgtatcattgacttcaatgtcgcggtatccgaaagtgacgaggttcagggtggtggaggcactcgtcgctacctgccgccggattacgattacaattccgagccggatgcttctgaccgggtagaccgcgacatctatgctttgggtatcaccttctacgagtgtctgaccagcaagtatccgttcgacgatcccacgccgccgatcaagactcaacccaaggaccccaagcagttcaaaggctgtgccgacctcagctcgtcactggtcaacatcctggtgaagatgatcgcaccggagcgtaaggagcgcttcacgtcagtcgatgagttcttgactgccatggctgaggtcaagcgtctgcgctcggtgctgaccaccggcgagattggagccggccccaaggtggtatctaggctgggcttcgagccgaccaagcccaatagcaacccctttgtcacccatctgctgaccctctacagccagagccaagtatccaacgcgggaacccgtggcctcgacgaagttggtaaggccacttatgtgccgacatatctggacgaaaagcttaagcccgccttgctcaaaggcgagtttaagctcgtgatcattagcggtaacgcaggtgatggcaagaccgcctttattcagcaggttgagtcctttgctgagagcaagggcgcgcagatgcaacgtggcgcgaatggagcagtgttccagatcaaggggcatacctacctgagtaactatgacggcagccaggatgaaggtgatgagcgaaacgatgcggtgttgcggaaattctttgctcctttcgcgggtaaggatgcctctagctggcccgaaaatcagactcgcctaatagccattaacgagggacggctagtcgattttttcctagagcatgaagaggagtacccgctgctcgccaggcagatccaacagggtttggccggggccgttccggaaggcggtatagcgatcatcaacctcaatttgcgctcggtagttgctaaccccgaagaaagtcagccttcgatttttgagaggctgattgcccgcatgacacaacaggaatactggcaagcctgtgagaagtgtgacatcaagtgcaagtgttttgcctaccataatgcccggactttccaggatccggttgccggtcccaaggtgatcgagcgtctgaaaatgctctacactattacccaccttcgcgggagattgcatatcactatgcgcgacctacggtcggcgttggctttcatgttagtgggcacccaagattgtgacggtattcaccagctttatcagaccggtggtgaagaggtccaaaaccgcattctggacggattctatttcaactcgtggcttggtggggaaaaaggctccaatgaccgactcattgctctgctgcgcgagatcgacattgctgaagtcagcaaccctgatctggaccgcgagttaggctttctccatcccaggtctaaggccatgagtcgtttctcgtttgcagaacgagccggatatgacaatgaattggttgaagcgttgtttgacagcctgcctcgcgattactcatcgaaaaatcgtgcccgattgatttctaggcatcggaattacctctcacatatgcgacgtcgccatttcttcgaacgaagggatatggggtggaaggagatgctgccatatgaaagcatcgatcccttcttggtctccacacagcgggcaggtacgaaaagcaacgatgaagtgactgcaattctccgcgccatcaaccgaggtgaaggtttaagcgaccctgcgaggttaggtaaccagttggcactgcgtgttcgccaagtggataaaggtaccgttcgcagttaccggcttttcgacggtgactatttttctcttcgtaccgaacaggagaccgcgtctcatccttttctcgagtgcctgtctcaggcgctggtcctgctttatgactccggcgaagggcacaaggccagtctacgaatcaatctcgatatatatgaaatgctgatgcgccttaacgacggctaccgaccaagcgtagaagagcaagaaggttttttgttgagcttgtccgtctttaagaacttgttggcctctgtaccttacaacgaagtattgttaaccaaggctggccacaaattttacgaaatccgtcgagaacaagatgggcggttagtaatggaatcatctgaaaagggggccgaatacaatgtcaattaa

SEQ ID NO: 39681 - DNA, 1413 bp, Escherichia coli
atgagcagaaaatttcaggtaaaaacagttccgagtagctggatagagaaacaggctcgccgccttgattgcggaccgtatatgtctggagcaattgaggcacgagagcttcttgggcaaattcgagtaagaaaagatcatcttcaagacctaactgagggcggcatatctggaataataaatccaggtcgtattactcgcctttgggtagaggatgaacagaatgggtatccatttctatcaagcactgacattctccaatccgatctgagcaatgttagttacattgcaaaatctgcagcacgtcaaaatagtcaacttctaatcaaggagcgatggaccctcatcactcgctctggaactattggacgcatggcgtattcacgtgcagacatgaacggaatggcctgtactgaggatgttcttagggtgatccctgacgaaagcaaagtaaaaccaggttatctctacgcctacttatgtagccgatttggagttccactcatcatttccggcacatacggcgcaatcatccagcacattgagcctcaacatattgctaatcttcctgttccgcgtctaggcacggtagaggatcaagctcacgagttgattcaaagcgctgctgatcttagagttgaagcggcaaagttgctgaagacagcgggaaaaatggtcaatgaacagttcggctttccggaaaagctggcgttatcacaccgagtcttttcctgttcgacggcttcatcaacgctagttctcaagcgattagaggctaccttccacgatgctgttgctcaagaaagtgaccggctgcttgctgatgttcaacgaaaggataaattctcatccctcggtatagcgattagtgaaaccgggcggcttaagcaggtcttcgttgatgaggagtacggagccccattcttgaccagcggcgagattttccgccagcgttatgagccaacacgtttcctgtccaatcgattgttgcctgacgagagcgagtgggcgacccaggaaggtgacctccttctagctcgaagcgggcaagtcggcggtattattggtcgtggtgtttgggccgaccatcgcttcgccggaggatgcgtatcggtagatgttctcaggctgggggcacaaaactcgcaaattcttcccggctacctctacgcttacatgtttctcactgatattggttaccggcaattgattcgaacagctgctggtagctctatcccgcatctgtcggcacctgatgtgtcgcgcttgcttattccccgatgctacagcgccctcgaagctgagatcaatgagttggtctggaatgctggacataaacgggctgaggctcaggaaaaagaagacctggctcgcgccctcgtcgagcgcaccattgaggagggaggtcgctaa

SEQ ID NO: 39682 - DNA, 2019 bp, Escherichia coli
atgaacgatcaagatgacattattgaagtcttgcaggatgctgccgaagagtgtggcttggataactttttcatcgatatcctgaccggcaacaaagagagtgcctccgccaagaagctattggtacagaaagttttacgccagcttattgaaagctacgggttcgaccgggatgatctggaggtgaactataacccccagattcccggccaagggcgcaagcgcatcgacatcgctgttttccaccccgatgctgagcacagcaacgataatttgcaacggattatcgtctgcaaaactcagaagaaacgtgacaagctccgttccattaccgaggccgaagccgacctgcgtgagctcaaggagcggctggagctgagcccctgcgcgactctgggtatgtggaccaatggccaggaagagttcctgttccaggtcgaacgcactaggtttgaggttcgcgctaaaccgttaggtgtctggccagtgccgggagaacgcactgccgatcttgaccgcaccggaggtgtcattcaggtcagtgccgaagctgaagacctcgaaagtgctctgctgcgttgccgccagtatctgaaccgtaacctagggctagatcacaaagactcctttaaacagttggctgtgttgatgctggccaagatctttgatgagactctgcccaccggtgagcgcaaattctggatcagaggtaacgaacctttcacggaggtgggtcaacaggccattgccctgcgcatcaatgagtctgttgctgccgccaaggcttggcaaccgaatctgctgacccgtggctgggagttgacgctggaccctcacgaaactgcccgcgtggtgatggagttagctcgctataacttaagcgaaaccccgccccgttaccgcactggagcctttcgggcggtcgctcgcaacgtgatggacggtcgcgaaggccgctatcccacccccctaaacgtggccgaaatggtggtagagatgctcgatcctaaacccggcgaaagagtcatggactgctcctgtggtaccggcactttcctggccatgactgcgacgcacatcttcaagaagaaactggctgccatgagcactacgcctgaagaggccacaaacgaacagaaccgtcaggctcaaaacgaaaccgccgcttgggcggccagcaatgccttgggttgcgacattgatccctttctggccgtggccagccgcatgaacctgctgttcaccatcggtaatcccggccgcgtgttccgtatcgatgctcgtacctttccagacggcgatctggatggcatcgaagccgccagtccagctatgtcacttggcagtatggatatggttctgctcaacccctggttctcaactcaagacacggtgagcgatccctccattttggagcgctatgacttaggcaacaactgggagcgcgacgaagaggggggattccgcaacactggcaatctgagcaccggaggcgtccctcccgaggtactgtttatcgaacgcgccctgcagtgggtgaaacctggtactggccgtgtgggcatcctgttaccagatggcttgttgggcaaccctggcgatgaatacgtgcgctggtggattctgcatcactgcgaggtcttggcctcggttgatctgccagtggagcctttcaaggtcacggtgaaggaatatggtttatcccctgcactaccgagtttattgctcctccgacgccgcagtcaggaggaactgataaataccgaatatccggaatatagggtgttcatggccgtggtggatcgggccggggtcgatgcccggggtaatctcctgttccaacgggcccccgatggtgaagagctggtttttgatgaagaagtgatcgagcgagttcgtgaaagcggcgcagttgaaatccgtagggtcacgcgtcgcaaccgccgcattcatgacgagctgccgctggtggcagagaaatacaaggaattccgcgcaaccggcgaggtgacattatga

SEQ ID NO: 39683 - DNA, 2001 bp, Escherichia coli
atgagcaaaaagaacggcacacaagccgaaaacacgataccggctggatatacgctcgactacgtttccggcaaacagattaaggaaacgaagaaggagctagtccggcagcggatcgttcgcgccctgatccacgaatatggattctcgcccgaagacatggagctggatttttccattggcggccgcaagaaggtggacgtagctatcttccatcatggcaaggaacacatcatcgagaatcttgggcgcgctgtgctctgccgtcaggaaccgaacgtcggcaaaaatgccgtacgcatccgcgattttgaacaggctgctcaagatcttgatgaaattgaagctattatgcgcgaggttgaagccgttaagtatggtttgtggactaacggcttggagttcttctttgttgaaaaagagcaaaagcgattcgaaacaaagtgcaacccaatcggtgactggcctatggcggaagagtctgttggcaccaaagaggttatctctgatgcttacacgcgcgtcgctgacaatgagatgcttaaaatcacattccgtcgttgccataatttcatccatggcaacgaaggcatgccaaaggatgctgccttctggcagttcctctatctgattttctgcaaaatgcatgacgaaaaccttcgggggatcctacgtcagtcatggaagcggcagttctgggcaggccctaaagagcagtttgaagttgagggccgaaaggccattcgtgctcgtatcgagacgctctttaccgaggttaaaaagcagtataagaacatcttccggggcaacgaggaaattaccctctccaaccgggcgttagcctttattgtttctgagttagccaaatacgattttacccgcacggacgttgatgccaagggcgtggcctaccaagagttggtgggcgtcaatctgcgcggcgaccgtggtcagtattttactccccggggcgtagtcaagctggtcgtggaaatgctcgatcccaaggaaagtgagatggtgctagaccctgcttgcgggactggcggtttcttggttgccactttgggacacatgctgaagaaattccgtgaggagcagaacacccagagcggaaatgaggacaccaccgagtttctgaacgtccacgagcggctgaaagaatatgctgcagccaatgtgttcggagccgactttgacccgttcctgattcgcgctgctcagatgaacatggtgctggcgggtgacggtcggggtcacatttacaacatcaactctctggagttcccactgggacatttgaccgatctgtcctccgctaaaagggagattccattggggtcagtggatatcatcgccaccaatcctccattcggctccgatatcccgatcactgataagcatattctggaacaatacgagttagcacatagctgggaatcggatggcgaaggtggtttccgcaatacggggtcattgaaaggcagtgtggccccggagattctctttattgagcgatgcatcaaatggctcaagccaggtataggtcgtatgggtatcgttctgcccgatggtgttctcggtaacccagctgcagaatacatccgttggtggatcatgcgcgaaacccaagtgctcgcctcagtagacctgccggtggaggctttcatcgccgaggctaacgtcaatatcctcaccagcttgctattcctgcggcgtaagagtgaagaggaaaaacgcgccgaagccttggggggtatcgatgaatatccggtcttcatggccgttgccgacaaggttgggttcgaccgccgtggcaacaagctttacaagcgctccccggatggagaagaaatcgtcgagcccaagcagcatatcgaacgtatccgtatcggtgggcgtttcgtggaacggaccttgacccgcaatgaaaagatcgaagacaacgatctgccgatcattgctgagaagtaccgcgaatttctcatggagcatgactga

SEQ ID NO: 39684 - DNA, 213 bp, Escherichia coli
atgagcaatgacgaggttctgaaactaaaggatgtcgccaccctacttaaggttggtgagaagactgtctattccatggcccagaccggggaattacctgcttttaaggtccgaggccagtggcgattttcccgaaaggatatcgacgcatggatagaacaacagaaacatacaacaaaagatttcggtgagggtaatacaaaatgcccctga

SEQ ID NO: 39685 - DNA, 387 bp, Escherichia coli
ttgcaaaacactaaacaccgaagtatattaaacgtcatgaaaaactttggtgaaaccatccgcgaccttcgagtcgctcaaggccttgggttgcgcgagactgcgatcaaggtaggcatttctcccgcctatctaagccgcattgagcgtggcaaggagcgtccgccaagaccagaggtaatcaaggagctggccaagatactagcagctgaccctgacgtgctgttccgcttgtcttcctccacagacccggaagttgtcgactaccttcatgaccaacccgaggtcatgaatttgctccgctatgtcaaggaggcctgctttaccgaggatgagctcaagaacctcgttcaagcagccgaaaacatcaaagccaactctcattag

SEQ ID NO: 39686 - DNA, 270 bp, Escherichia coli
gtgcttacgcatgaagtgtttattcatcaggaagctgtcgatgtgattgagttgtggattaatactgcgcgcaatccacgccattttcgccacttcttccatcaccaccgcgttatgcaccgcgtcgtgggcatctttcccctaggcgaacggtccgtgctgatacaccacaattcccggcgtatgcagcggctcggcgtcacccagcgtttcgataatcactttgccggtattcagttcgtactcaccctgcacctcttcttcgcttaa

SEQ ID NO: 39687 - DNA, 216 bp, Escherichia coli; identical to SEQ ID NO: 26858

SEQ ID NO: 39688 - DNA, 372 bp, Escherichia coli; identical to SEQ ID NO: 34244

SEQ ID NO: 39689 - DNA, 273 bp, Escherichia coli
gtgcgtgaactgccggtgaactggtgggtacagccttctgttatccgcaccttcagctcccggggtgacatgagcatgggtacagccgcagcctgcagtaacatgacgttctcaccgtcccagaatggcacgtcactggacctgcaggccggactggaagcccgtgtccgggaaaatatcaccctgggcgttcaggccggttatgcccacagcgtcagcggcagcagcgctgaaggctataacggtcaggccacgctgaatgtgactttctga

SEQ ID NO: 39690 - DNA, 222 bp, Escherichia coli
atgctggcaacctttctaggcataaatgttctttcatatatactgaaggatgcgattttactctctttggtgtcaactatgaaaataaagataatcctaaatatcttggaagttttgatgctcaatctccggaaaagattaacctcccaggcatgcaatttggactcatttgggatggagattctgtcgaaacctgtagtggtgcctttggcgactatttaa

SEQ ID NO: 39691 - DNA, 144 bp, Escherichia coli
atggttaatcatctccccgacaatatcgatgaaagcctgtgcatccaccgtctgcgtggtgatatatgctccctgcagagacgcccggatgattttcaccaggttttccatttccagaatgtcagcccggctttttttctttga

SEQ ID NO: 39692 - DNA, 405 bp, Escherichia coli; identical to SEQ ID NO: 20458

SEQ ID NO: 39693 - DNA, 216 bp, Escherichia coli; identical to SEQ ID NO: 26858

SEQ ID NO: 39694 - DNA, 375 bp, Escherichia coli; identical to SEQ ID NO: 26863

SEQ ID NO: 39695 - DNA, 282 bp, Escherichia coli; identical to SEQ ID NO: 33099

SEQ ID NO: 39696 - DNA, 213 bp, Escherichia coli; identical to SEQ ID NO: 28481

SEQ ID NO: 39697 - DNA, 213 bp, Escherichia coli
atggctgctggtaaaggcgacctgatggctaaaggtaacgatacggttaaggcgaccttcggtaaggactccagtatcgttaaatgggttgttctggctgaggtgctggtcggtgcggtcatgtacatgatgaccaaaaacgtcaagttcctggtcggctttgccatcatctctgtatttattgctgtgggtatgagcgtcgttggcctctga

SEQ ID NO: 39698 - DNA, 258 bp, Escherichia coli
atgaaagtcatattcacgtcgaaccgttttattgattttcttatccggcttttgattacagcgattgtcatttctccggtaattatctggtcgtgggatacggtaaaagaaaccacggcagacgggatacttgctgctgctttcgttatcctttactccggtgtgcttctgtttattctgtatttttgtttttctgccctgactgacctgcagaaacctgatgaaagaaaaagtgatgaaaggaatgaagatgaataa

SEQ ID NO: 39699 - DNA, 261 bp, Escherichia coli
atgccccttaatcggcatatcaatggttttgccattcttcaggcagctgatattacgggtgcgaacaatagcacgttcactggacacatccccccaggcttccagacccacaaaacatcccgttgcgtcatacgtcttgctgttcggcatttccaccaggccggtgatacgcagctgcatcggcaccgtggattcattaccggtgacagaggcattggcatccgccccttcaatcagcatggctttcgcaaaacttcctga

SEQ ID NO: 39700 - DNA, 261 bp, Escherichia coli
atgccccttaatcggcatatcaatagttttgccgtccttcaggcagctgatattgcgggtacgtacaatggcacgctcactggacacatccccccaggcttccagacccacaaaacatcccgttgcgtcatacgtcttgctgttcggcatttccaccaggccggtgatacgcagctgcatcggcaccgtggattcattaccggtgacagaggcattggcatccgccccttcaatcagcatggctttcgcaaaacttcctga

SEQ ID NO: 39701 - DNA, 456 bp, Escherichia coli; identical to SEQ ID NO: 7975

SEQ ID NO: 39702 - DNA, 180 bp, Escherichia coli
atgccaatggggcctttattgaactcttttccaaagaagataaacccttctctggtgaaagttatgtacgtctgcaggttgaaatttttctttcatcacttgagcttgaatgccagtctcttgggcatggttccgcattttgtcgtcgttttaattttcatggagaaatctatcaaataa

SEQ ID NO: 39703 - DNA, 507 bp, Escherichia coli; identical to SEQ ID NO: 5717

SEQ ID NO: 39704 - DNA, 969 bp, Escherichia coli
atgaaggtccgtgataaagaatgggttccccgggtggagtgggtggagagttgtccgtttaataaagcggatggcgtgctgacaggcactgagtgttcagagccgggtggtacgaaaaccggagtgatggaaggtaaaccctggaacatcacacaggcatgctgggcataccgggataaatatgtcactcagtccgcagataacggcacctgtcagaaatatgtcgataatccggcctgtacgctggcctcacgtcagtgcgcgttttattccgatgagggaacctgtctgcatgagtacgccacgtactcctgcgagtcaaaaacatcaggaaaagtgatggtctgtggtggtgatgtcttctgccttgacggtgaatgcgataaggcacagagcggaaaaagcagtgattttggtgaagcagtatcacagctggctgcgcttgccgccgcaggtaaggatgttgccgccctgaatggtgtggatgtcagggctttcacgggtgaggcgaaattctgccgtaaggccgcagccggcttcagtaactgctgtaaggatggcggctggggacaggatatcgggctggccaaatgcagcagtgatgaaaaggccctggctaaagcaaaatcaaacaaactgaccgtcagtgtcggagagttctgttcgaagaaagtgctgggtgtctgtctgcagaaaaaacgcagctactgtcagtttgattcgaagctggcgcagatagtccagcagcaggggcgtaacgggcagttgcgtatcgggtttggcagtgcgaagcatcctgactgtcgggggattacggttgatgagctgcagcgtattaagttcgacaagctggacttcacaaatttctacgaagacctgatgaagaatcagaaaatcccggacagtggcgttctgacgcagaaagtgaaagaacagattgctgaccagctgaaacaggcaggacagtaa

SEQ ID NO: 39705 - DNA, 507 bp, Escherichia coli; identical to SEQ ID NO: 5717

SEQ ID NO: 39706 - DNA, 516 bp, Escherichia coli
ttgttgccaggtttttgcgggatctttggaggcaagaattgccgctgctgtcgccgggctttctggcttgataaccccaaccaacaatgttctcaattgcactttgccagaatctacccacggacgagcctgctgccagaactgtttacaatatgggcagaacggatcggcgaagacgtagacaatgaccggcgcgtcttttttaccgtcgaggagccagtgggattgttccatccgttgccacatttcacgtccggcgggtgcgtaaatttctttttcgataagcgtgttactcaggttttcacctttttcgttgtacatgtaaccagagatagcgtgcttaccatctggagtcaggtagatggtgacgcccatatcctgatacttaccgagataacctttcattcctccaggggcatcgaacgttttgatgattgtaataccctgtttttcaatcgcttttactggggcaggaagttcctctgcgaaggcgattgcaggaagcagggccagtaa

SEQ ID NO: 39707 - DNA, 519 bp, Escherichia coli
atggtagtttataatataccggctcttagcggagtgcgtttttctttagatcagataaatgagcttgtcacaatacccagggtttgtgcattaaaacagacatccggtgatttattccagatggaacaaatcaaaaggaatcatccagagcttgtgttatataatggttacgatgaaatatttgcatcagggttaattgcaggtgcagatgggggaatcggtagtacatataatataatggggtggcgttatcttgaaatatttgaagcagtcaaaaacaatgatgtgattaaggcgaaggaaatgcaagtagcctgtaaccaggttattgatactcttattcagagtggtgtcctggcaggtataaaaactcttctttactatatggggattataaatactcctgtatgcagaagtcctttttctccggtaaaggaaaagaatctggatgtattatcaaaacttgcagagcgactgttcgaagaacatgacagaaacaaaaaaatgaaaataatctga

SEQ ID NO: 39708 - DNA, 519 bp, Escherichia coli
ttgtccacacagctcccggcgtttcgtcagaaactgaatgacggctggtatcaggtgcgcattgccgggcgtgatgcaggtgaaaccgaattatctgcccgtcttaatgagccgctggcaaatggtgccgtgatccacatcgtgccgcgtctggcgggagctaaaagtggcggtgtgtttcaggtggtgctgggggcggcgctgattgcggtggcatggtggaaccctgtgggctggctgggtgccgcggctgtatcgggcatgtatgcggcaggggccagtatgatcctgggtggtgtggcccagatgctggcaccgaaagcccggacgcccacagcgaccagcacggataacggtaagcagaacacctatttctcatcactggataacatggttgcccagggcaatgttctgcctgttctgtacggtgaaatgcgcgtggggtctcgtgtggtttctcaggagatcagcacggcagatgaaggggacggtggtcaggttgtggtgattggccgctga

SEQ ID NO: 39709 - DNA, 246 bp, Escherichia coli
atgccatttgcacttatccgtgagtgtgtttttgaaaaaaaacgtaagaagagttatggcgttgatgtgccactctatttatatgctgatgctgataaggctgaaagagttaagaaacatttatcttatcaattagggcaggctattatctccagtgctaattcgatatttggattcattacccttccatttaagttaattgttcttgtttataaatataggagagctaaaatcaagggctgttaa

SEQ ID NO: 39710 - DNA, 669 bp, Escherichia coli
atgactgctccgcagcagctgctcgggcctgacggtaaaacgccactacgccgttacgcggggtataacggcggcggtcccggtttcggtggccagctgattgactggaacgcaccacagcagagcgccgacgcagcactgttgccgaatttttatcgcggtaacgcgcgagcagacgatctcgttcgcaataacggcgtcgcgtcgaacgccgtgcagctgcaccaggatcatatcgtcggcaatctgtttaagttgagttatcgccctaactggcgttacctcggcatatctcgcgaggacgccagggcgctggcgcgtgacgtcgaggtagcgtggactgaatacgccgaggaccctcactgcacgattgatatcgagcggaaacggacgttcacaatgatgatccgcgagggcgtggctactcacgctttcaacggtgaaacctgcgtacaaccagtctgggagagtagtgccggcagcgtttttcggacgcgattcaaaatggtctcaccgaaacggattcgaaatccgggttacgcagctgacactcaatttcgccgcgccggtgttgatatcgataaaaacggggccgcggtcgggtactggatagccgaggatacttaccctctcggcggagtcggtaaatgccggcgtatcccagcatag

SEQ ID NO: 39711 - DNA, 582 bp, Escherichia coli
atgacagctccattaaccctattgatcgttgaggacgaaacgccgctggcagagatgcatgcggaatatattcgtcacattcccggattcagccagatattactggcgggaaacctggtgcaggcgcattatcccggcgacgtggtgtttaccactgcagccagcgatatggaaacggtgtctgaagccgtacgttgtggtgtatttgattatctcattaagcccattgcctatgaacgtctggggcaaacgctaacccgtttccgccagcgtaaacatatgctggaaagtattgatagcgccagccagaagcaaattgatgagatgtttaatgcctatgctcgcggtgaacccaaagacgaactgccgaccggcattgaccccttgacgctaaacgcggtgcgaaaactgttcaaagagcctggggtgcaacatacggcagaaacggtggcgcaggcactgaccatcagtcgcaccactgccaggcgttatcttgaatattgcgccagccgccatctgattattgctgaaattgttcacggcaaagttggcagaccgcaacgcatataccacagtgggtga

SEQ ID NO: 39712 - DNA, 330 bp, Escherichia coli
atggaagcgcgcaccactatccccgtaaagctatatgtaaattatgcattcccaacctcaactttctgtcctggggaaatcttagttgcaaccgttgatatgtctaaaggttttccagacaggtacatccttctggaaagccgcgaaattgaaattaccgtcaaccagccccagccaatcgacatcatcggtttacaggtcgagcaactgcgtgaacaaaaacagaaaacagtcgccgacgcccaacagcgtattgctgctatcgatgacgaaatccagcagttactttgcatcgaatacacgccagataccgatgaaatcccctactaa

SEQ ID NO: 39713 - DNA, 795 bp, Escherichia coli
atgacaactcaaatttccgcacaaactctttccccaatctctcatcaaaatacgcttgtcatcaccaccgaattgcttgcacaactgtatgggactgaaccagtccgaattcgtcaaaactactctcgtaatgaagggcggtttgttgaagggagacattattttttggtggaaggcgatgaactacgggagttgaaacgcaaagtatctcaaagctactctgtgaaaattgccaaaaatgtacgtactatcattctctggacagaacgcggcgcagctcgccatgccaaaatgctggaaacagaacaggcctgggaagttttcgaaaagcttgaagattgttattttagccagcgtccagagaggcggagtacaactaccgattaccgtactcccttacgtgatgccgttaatatgctggtcggtaagaaaggcatgatgtatcccgatgcctacaccatgattcaccaacgtttcgccgtctctcacatagaacaactgtcacagacgcaaatgttagaggcgattgaatacatccactgcctgctactcgatgaaaatcagccaaccattccagatttttcttttatcaccactatcaaaaatggaaaagtgaccgggatgcgccatgttgccaaaggcgaacatctgatgacctttgacgctttcaaagagatcgctgagcgggcagggtatctggtgatccacagcgacaatctgcgaagtatgacactggataaattgatggtaatggggaaaaagtcggctatatccgttgctaattcagcattttga

SEQ ID NO: 39714 - DNA, 1638 bp, Escherichia coli
atgcggaagagtatggggaagacgccgatgagtgaactgttgcaaaagctgacccgtagctgttttgccgaccgggatgcactggatgtggcgcgaacacaggcggcgctgtggcagacatggctgctgccggtgacggcagacacgccggtcggggaagaccccggctaccacgacgatttcctgcgtatacgcgacgaaatgaacaaactttccggcgcagataccggcctcatctgccagcttgccgaatccctgctgctgacgcaggccaaagacgtgcgcatcgccacttactacatctgggcgcgactgcaccgcgacggtgagcgcggactggctgaaggactggcgctgttagccgggctggtggaacgcttcggtacgcaactgctgccctcgcgaccggcaagccgaaaaatggcgctggagtggctggcgggggaaaagatgctcgacagccttgcccgctacccggaggtggcaaaagaggattttgcgaacattgttgccgctcttaatcaactgtcggtttccttcactgcatggcccgaagaccagcattccccctccctgatgccgctgattaacgcgctggaatcacgtctggcgcagtcgggcgggatgaacgcggtggtgccgcaaaacagcagcggcgttccggcaccgtcttccccggtggatgcgccgcaggtacagaccatcacctccgggcgcgacctgctcgaccaggcgaaagtgctggcccgttatctgaacgaacagccgcagggctggctttcagcacaccggctgatgaaaaccctgcgctgggacacggtgcatgaactgccgccggacgtggacggcaaaacccggctggccccgccgcgcaccgaatcacgcaaccagcttaagcggctgtatgcccagcagaactggacggaactgctggagcaggccgacctgatgttcagcaccggtgtcagccatttctggctggatatccagtggtatctgcatcaggcgctggcgaaggcgggcgcaccgtgggacagatggacagcggttatccgtcaggacctggcgctgctgctggagcgcctgccggggctggaaaatctggcatggaacgacggcacgccgtttgccgatgaggtgacgcgcaactggatagcgcagcaggtcatgatgcgggaagacggcgcatggcttgcggggaaagccgctgtgccgacagacgacgccacaaatgacgtactggcgctggagccggaagcactggagatggctgacagtcagggcgtggaagcggcgctgggctggatacagacccgtccgggcatcaccacggcacgacagcgcctgttattgcgactgctgatggcacgggtggcggaacagtacggtaaaaacgagatggcgctcctgctgctggaagaactggataccgccgcacagggaataacgctgacacagtgggagccagagctgctgtttgaagtaaaagcccgacaactgaaactgctgcgtctgcgggcgcaccgctatgcggataaagccctgctgaaccgaaaaatggaaatcctgctgggaacgctggtggcaatcgatccggtacgggcagcggtactgtgtgatacgcagcataaggactga

SEQ ID NO: 39715 - DNA, 549 bp, Escherichia coli
atgtcggaagtgagtatcgtagaagacgacccacggccagtagtcgccgaattggcagatctgttacaagcacgaccatttcatcagaatcaatatgataacttatgtcgctttatgatttatttttccttggctgaatcaaaattaacatcaatggctgctggccttggtggaactgacgcactggcacaggaactagttgtgcataacggtatggacagtcaggccatagatgattgctatcgttattttatacgacgctatcgagacagccctgatagcgattaccgcttcaataaactagccccacctgagtatgttaagaatgcaatcagaggacgctttgttacgctacttcagatacagtctccaacaattgaagataaaatcagctttgtgttcaaagtgatttttaggttacggcataatcttttccatggagaaaaatggtcttacaaccttgaagaccaggaagctaatttttcacatgctaacaatgtactactatcctgtttgactcttactcgcgggaatatgtggcacccttga

SEQ ID NO: 39716 - DNA, 681 bp, Escherichia coli
atggaaaagctctgggtttttactcaattagttacagggaaagatgacacctctggctttttggcttactcgctttataagcacgacaaaaatgaatatgccgagaagttgcgcagtagtggcgaatatacagaagactatattaacgcccaactgaagatctttcatgagcagacagttaactcgccaggccgaattgagtcttacaaagaaaaagcagaagacatcgtcacaaacttaacagaccagatagatgctgacatccggcttgagtacgatgcacagttagccggtgctaacttgcaggatgttgaaatagaacggctgaaagcagaaatacaggctatgaaagcatcacgtgagaacgagttaaggaaggctggagaggatgctattctcaattttcatcgcatggttgaaatcacccaggcacgcaaacgtgggcgcgtttcccgctcgttaggatggtactggaatgggtttgccagcattttcgccacaataaccttcgctgttattgtctatggtatttgtacttgggcattaccacaaaaatccagagacgacattgtggatggggcgtttaaaaatctgcagggatcgttattccagcagccaaacattcagtttaataaagacaaaaatgagaacgctcagcaacctaacacaattgccgaatag

SEQ ID NO: 39717 - DNA, 558 bp, Escherichia coli
atgacaaataaacacccatcattgttttctccttttatgctgacagaaaaaataaagctacgtaatcgtatcgttatggctcctatgacaacctggtcagctaatcctgatggaaccatctctgagcaagaactcgaattttataaacgtcgctcacaaaatgttggtttagtaataacaggatgcacctatgtcacgccaagcggcattgggtttactcatgaatttgccgcgtatgacgaccgtttcattaacagccttgaaaagttagcagctgcagccaaaagtggcggtgctccggctattttgcagattttccacgccggtaataaagccatcccggagcttgtgccaaattacgatgttattagtgccagcgcatcaagcgtaaaatctggtgactttatgaagagagtggtacaaagcagggaaatgactgaaaacgaaattcaggaaaccattagagcattcggagatgtcacaaaaagggcgattaaagcaggttttgatggcgttgaacttcatggtgcgcacggattccttctcccctctatttaa

SEQ ID NO: 39718 - DNA, 234 bp, Escherichia coli; identical to SEQ ID NO: 10186

SEQ ID NO: 39719 - DNA, 240 bp, Escherichia coli
atgatgccggatggcgaccgttttcatctggtcaacggtgaaaactggtttgaccgcactgtgagtgctgatgccgcaggtatcatcctgacttcccttgtgattaaccgccagttgtggctgtaccacgacagcggggatgcgggactgacacacctttaccggatgcgcgatgcgcagttgtggagccacatcgaatttcaccccgaatgcaatgcgatttacgcggcactggactga

SEQ ID NO: 39720 - DNA, 420 bp, Escherichia coli
atgtactgtactgttaaagaaatcatccgcgatgtactggatacagacgtgccggacagtgaatgcgtttttgccgtggtgctgacccgtggggatgtgcgtcacatagcccaggactggagtctgacagacgatgagctggaaaccgtcatgcagcggctggacgatgcctttgagcatggtgctgatgtcagcattgttcacgacgttgttcgtgaactgatggaggaaaagcgcgtaaaccgtcttgtaacagtccctgcggtgctgctggaaaaagtgatggtgatggctggtagtgaaatttatcgcctccatgctgtagggagcgagaacgggggcgacggtgacgcatttgtcagggaagaacgtgagattatgcgggtaatgcgtcaggcgctggacggggagaatgggtaa

SEQ ID NO: 39721 - DNA, 192 bp, Escherichia coli; identical to SEQ ID NO: 13008

SEQ ID NO: 39722 - DNA, 570 bp, Escherichia coli
atggctgccggattcactgaccttgcgactggtaaagtaatcgctggcctctttaaagtcttgtgtagccctggcatcgatatcatggcgagcatcatggctggcccgggaaccactgctggcctgatgcgcatcctcatcactccagtcaatacttgcccgaccaccacctctaacacctacgccaccaccaacaccaagaattccaggtttaaccccccattcagcatgagcatctccatacatcccggcagaagttctcgtacttctggatgccagttcctgagtcgcctgctcattactgatattatgcgccttcgcatagctttccactgcactgcgcatacggctggccatcatggagtcctgtgcgctcatcgtgctgtcagcaccacctgtgacagaatcactgctcccccggttagaaccaaactggctgagcgagttccaggcactggcaatactgctgctgaacccatgcagggcgctttctgctctgttcgacgcctcccgggccatttcctgttgtgccgctgcaatctgacgcgttgcattgataccaaccggtaa

SEQ ID NO: 39723 - DNA, 291 bp, Escherichia coli
atgtggtccagtaccatcagcaccagtgccaccgttttgatgatatcccgctgtccgggtgaccagaccagaaatgactgcaaccaggtatcggtccgtgcagccagtgaatcgttacgtgtcgtgttcgtgttatccgttgtcatcagcgtttatcttcctgtatcagtctccgcccagggttttctctttctgcaggtcacgaaccatatcccgctccatctgctgcagacgctcctgcagcagattttcccgggcaacctcccggaccgcttcctgctcccgttgtga

SEQ ID NO: 39724 - DNA, 219 bp, Escherichia coli; identical to SEQ ID NO: 19526

SEQ ID NO: 39725 - DNA, 1278 bp, Escherichia coli
atgaaaaccaaagttgctgctatttatggcaagcgggatgtccgtctgcgcgaatttgaactgccagaaattactgataatgaactgttagtgagtgtaatttctgacagcgtttgtttatccacctggaaagcggcgttgcttggtagtgaacataaacgcgtccccgacgatttagaaaatcatccggttattaccgggcatgaatgtgctggggttgttgtcgaagtgggtaaaaatctcactggcaaatataaaaaagggcagcgttttgtattgcaaccggcgatggggctaccaagcggatattcagccggatacagctacgaatattttggtggcaatgccacctatatgattattcccgaaatcgcgattaatttaggctgtgtattaccgtatcacggctcttattttgctgcggcgtcgctggcagagcctatgtgctgcattattggtgcttatcatgccaattatcacaccacgcaatatgtttatgagcatcgtatgggcgtcaaacctggcggcaatattgccctgctggcgtgtgctggcccgatgggcattggcgctatcgattacgccattaacggcggcatacaaccggcgcgggtggtggtagtcgatatcgacgacaaacggctggcgcaggtgcagaagttgctgccggtggagctggcggccagtaaaggcattgagctggtgtatatgaataccaaagggatgagcgatccggtccagacgctgcgggcgctgacggatgatgccggatttgatgacgtatttgtctatgcagcggtgccttcagtcgtcgagatggctgatgaattactggctgaagatggctgcctgaacttctttgccggtccgacggataaaaacttcaaagtgccgtttaatttctacaacgtccattacaacagtacgcacattgtcggcacgtctggcggttccacggacgacatgaaagaggcgattgcccttagcgccacggggcagttacagccgtcgtttatggtgacccatattggtggcctggatgcggtgccagaaaccgtgctcaatctgccggatatccctggcggtaaaaaactcatttataacggcgtgaccatgccgctgaccgccattgccgattttgccgaaaaaggcaaaaccgatccgctgtttaaagagctggcgcggctggttgagaaaacgcacggtatctggaatgaacaggccgagaaatatctgctggcacaatttggcgttgatattggggaggccgcgcaatga

SEQ ID NO: 39726 - DNA, 510 bp, Escherichia coli
atggatcagcgaatccgggccgttgagcacattaaagccgtcaatgtcgcgcaccgcatcgagaaaacccttcaggctttcgtcgcttccgtcgctgtctttaatcccaatgatattggggtgcgacgccagagcacgcgcggtttctggctggatcgtattgccagtgcgggccgggatgttatagagaaacatcggaatgctcagtgtgtcggcaattgcgctgtaatgcgcaatcaactcttcctgtttcagcggtacgaagtaaggggcaatgaccgacacggcatctacgccaagtttttcaatctgctgacccagacgaatcgtttcgcgcgtagagatctcgccaatgtgtgccacgactggcgcacgaccagccacttcatccacgcaggtttgcgtaacgctgagcttctcctgttcattcaacacaaaaaactcgccgttggtgccgccgcaaaaaatcgcgttacccgcttccagttgacgattcacctgcacttttaa

SEQ ID NO: 39727 - DNA, 1143 bp, Escherichia coli
atgacaaataaacacccatcattgttttctccttttatgctgacagaaaaaataaagctacgtaatcgtatcgttatggctcctatgacaacctggtcagctaatcctgatggaaccatctctgagcaagaactcgaattttataaacgtcgctcacaaaatgttggtttagtaataacaggatgtacctatgtcacgccaagcggcattgggtttactcatgaatttgccgcgtatgacgaccgtttcattaacagccttgaaaagttagcagctgcagccaaaagtggcggtgctccggctattttgcagattttccacgccggtaataaagccatcccggagcttgtgccaaattacgatgttattagtgccagcgcatcaagcgtaaaatctggtgactttatgaagagagtggtacaaagcagggaaatgactgaaaacgaaattcaggaaaccattagagcattcggagatgtcacaaaaagggcgattaaagcaggttttgatggcgttgaacttcatggtgcgcacggattccttctgcagaatttcttctcccctctatttaaccagcgtaatgaccgatggggaggagatcttgaaggacgtatgcgcttcccgctggccgtattacaggaagtaaaaaatgtagtctatgaatatgcgacaaagccctttgctatcggttacagaatatctcctgaagaatctgtaacagggggactgcggatagaggatacttataaactccttgatcggctcatttcatccggtatttcgtatatacatacctcgctggtcagtattaacgatagctaccctgttgagtcgccaaatggtccccgaactattgaattgattttaaatcatattgcaggcagagtgccggtaatcgccgcaggtaaaatacgcacaccgtctcaggctcaagaagcaatttccgctggcctgccacttgttgcgatcggtaaagggctggtgataaatccagaatgggtgactttagctgaatcaggtagaagtcatgaaattcaaacagcccttaatccacaacgcgttcctgaattaaccattccggataaactatgggatcaaattcaggcatcgaaaggaactggctggtttccgttaatggattaa

SEQ ID NO: 39728 - DNA, 210 bp, Escherichia coli; identical to SEQ ID NO: 8156

SEQ ID NO: 39729 - DNA, 774 bp, Escherichia coli
atgttatttagtcgaatgatgatgacgggtgtgctgtccctgatgcttgcaggatgtggaaatctgagtcatgtcacggatgaaggaacgacggaagaagtggtatggccttctccggagacggtgatgtttaatcatgacggaacacagaaaggttcgtggccactgccagaaaagttacgtcagataaaggcgggtatgaataaggaccagatttatcagctggcggggagaccacactttgctgaagggatgtttggtgtaagggaatgggattacctgttcaactttaccggaccggagggggattatacctgccagtacaagatactgtttgaccggaacatggatgcccgctctttctactggaagccggaaaactgtctgccggaggaagagacagcagaatacagggagtcagtccccggtgatatattatttgattttgattcatggactctgacagagagggggcgtgatgcactttcccgtgtggcagagaagtttcaggcgggtcatgttgtcggggtgaagatagaaggatttacggaccatcttggagggaaggcgtataaccggctcctgtcagagaaacgggcggaatcagtcaggggatggtttattgcccggggattcagggctgaaaggatacatgcaacgggccgtggatatgatgcaccagtggtgttctgcccggatgtggagggcgaagcactgaaggaatgtctgcgccccaaccgcagggttgaaataaccggacagagagttcgttaa

SEQ ID NO: 39730 - DNA, 4332 bp, Escherichia coli
atgagttttaagtattctaaggtttgccttgctgtgttgttatccgtaagtccggcacttattcaattttccagtgcagcgcaaaatacaaaaaaccttgaggttgatgagacaggaacaggtacggatgattacggtcttcactggaagagcattgaaatcggtacaactcaagaggttactgttgacgaagcaaaggataagattttttttgatcataaatctccagttgctcaaggccataactcaattgcgattggcacaagtgctgaggctggtacagctattgtaagcgatgcaggatttaagactggagagtcgatcgctataggtgctaaggcaaaagcaactaaagagcagtcaattgcgattggtggtgataccaaagctactggatggggggctattgtgattggcggcgatgatcttacccctataaaaggacaaagttttggcacaaaggttatcccagacaaatatgtttcctccgaagctaagggggtgggaagtattgtaataggttctcaagggggggctgaagaggctttatctatggctattggttctattagccatgctaaggggatgggggcgaatgcattaggggccgtggcagaggctataggaaacatgtctaatgctgttggttttaatgcgttagcaacggctgaaagttctatagctgttggtccattttcgaaagcaacagcagtaaactcgattgctatggggttaaactcgagtagtgataaaaaatcaagtgttgcaatagggcaaaatgcgaaagtatcagtagctgataataatgtcgcaattggtggtaattctattgataaaaaatcagaaaagatacaaacagccactatacagacaaacaaaggaatcactgtagagtatggtaattttgctggttctagtcccgtaggtgttgtatctgttggcgataaaggaaatgagcgtcagattgttaacgtaggtgcgggtaaagtctctgagctaagtacagatgctatcaacggtagccagttatatgcaatagcaaagtcactgaaagatgatcttgatgcaattaacccagcgaatctagcgtggacgctcagagatgataaaggaggcaataagaacattaatagtgggactagtgataacgaagtaatagtcaaaggggctggcaatattgatgttactgttgatggagatggagtaagcattgatggttcaaagcttgctgaaaacattaaaaaagatgctataaaaataaaagataataatggtggtcttttggaaaaagacctttctgaacacattgaaatcactggcaaagggccattaaaaacccaagtaactgatgataaacttgagataactgccgaaacagccagttttacgcctgatggaaatggtggtaacgggaagattacagtaagcaatggtgatgacgataagcttgttactgcgaaaaagattgctgatgccataaaccagtctggctggaaaattaaagctgacagtgaaaatggtgggaaagttgagggggataataaagaggagctaattactcccgatgatacagttacactgaaagccggtaaaaatctcagcgtgaaacaaagtggtggtgaatttacattctctgttattgatactccgtcattcagcagtgttcagctgaacggaaaaggaaataacggaaatgtaacgctttcatccgaaggtaataaactgacactgtctggtggtaataatggtgccggacaaaatggtgttgttatcagtggtgtggcaagtggactggaaggtaaggaactttcgacgttaacgaatactgataaagagatgaaaaatgccgccagtgtggcagacctgaaaacggcaattgatggtgtgtccaccagtatgcagggagcaggtttcgcactgaaagacgctaagggacaggaagtgaaacagtctcttgggcaggctattaaagtatccggggacagcaatatcaccaccacagcaatcactgccaatggggataaggggttaaaaatatccctgaataatgacctgactgtgggggataaggctcccggcagcatcaaagttaacgggactgatggtaaggaggctgtgagtctgaatggtaaagatggcacgattaaactgacatccacgcctgctgcgaacggaaagtctgcgtcagcaaccattgctgttaatgcaggcaaaggtggattaacagatgctgccggtaccacgaagacacgtctgacttatgctccggatagaacattaccggcagaagagttggctaccatgagtgatggtctttcttttgagggggatgacggaaaggttattcataaaaaactgaatgaaaaactgaccatcaaaggtggtgcagagaagaatgctgaagtgactgacatcaatatccgggttgataatgataatagcgggcttctggtgaggatgaccagaaacctccgtgatttagccagcgcggtttttggcacaagtgggcagataacaacagttaatgataaaggcatcacaatcacaacacctgctgcgggcggtggtcaggggaaaacagtttcccttaccggatccggcctgaataacggtggaaatcagataaccaatgtggccagtggtctgaacggcactgcgcttgctgatgccggcgcagatgttctgaataatgcggcaaatatcggtgacctgaaaaatgctctcagtgataacagtgtggcactggtgaataccggcttcggtctacaggcggatgacggaagcaaggtgaacacgtctctcgggaagcatatcacggttggtggtgacgggcagaatatcagcactactgttcagaacgggagcctgacggtcagactcgctgataacattcgtctggcagatgacggcagtgtttctgtcggcggaacccggatggataaaaacggactgaccatcaaggatggcccgtcagtgactgtgaacggtattgatgcggctggtcgggttatttccggcgtgaaagacggggtgaatgaccaggatgccgttaacgtttcacaactgaaccgtgaaatcagtcaggcaactgcagcaacgacctgggcactgaagactgagtccggtgatgaggctgttgctatttcctcccagacggttgaagtccgtcacggacaaaatacccgggtttcagccatcagtaaggatgataagggaaattacagctatgaaattgatgtaacggggattccggtggagtacaccgacagccaggggaacccgcttgtcaatattggcggtcgtttttactcacagaccgaagatgctgcgaccgggaaactgacaatgacgccggctgagccggcccgtgtcagaataagcagtgagcagcctcttgttctgacaaatgtggcggccggaaatgtgtcaccggtatccacggatgcggttaacgggagccagctggcatctgcagccagaattgctggcggtgataatgttgtctggaaagacggaaaagcagcgctggctcctgacaccttcagtgagctgacaactgcaggtggcgggaagacaacggtgaatggtggtgtacataaaacaccggataatgtagctgatgcagtgaatatgctgaaccgtgaaggctcgaagtattttaaagcagcctcttccggtcaggcagcaaaagcggaaggacgtgacagcattgctgtcggacagggggccgtttcccggggacaaaacagcattgccatgggtaatggtgctgaagtcatgcgtcaggctgctgccggctctgttgcaattggcagccatgcccgtgctggccgcgcgaataccgggacttatgccctgaacggtcaggctgttgcgggacgtaccggaagtgatactgcggtggtttcttttggtcagccgggacaggagcgtcagctgcagtcagtggcaccgggtgtgttgtctgcgaactcaacggatgccgtcaatggcagtcagttgcatgcaactaaccgtcaggttgccggaaatacacaggcgataaacactctcgggaataaattcagccagctgagctaccgggtggaagagcttaaccgggatatccgtggtgttggtgcatcggctgcggccatgagcgggatacctcaggcctatctgccgggtaaaagtctgatggggctgggggtcggtggatatggtggtgaaagcgccattgcaataggggtgtcccgaatctccgataacggtaaggtggtaatgaaactgaatgcaggtcagaacacccggggtaatttctccgtcggtgccggtgtgggctggcagtggtaa

SEQ ID NO: 39731 - DNA, 294 bp, Escherichia coli
atgaacaatcagcatcgtccagaccatcgtcctgaaaagcccccccaaccttatattgggggggctcttttaactccggggtgtatggatgaggaacactttttattgttgatggatatatcgccaatatgtagtaagaaggtctttgagtccttaagggcttatttggttgatggatgttcaagaaagttcatttgtgaaaactacaatattaataatgggtatttaacggtaagtctgaatcggctgaataaaatacatcagtgcgtgtcactattaaaaaaattttactaa

SEQ ID NO: 39732 - DNA, 588 bp, Escherichia coli
atgcatgcttttctgctggaatttggcatcagcgtcccgtgtggtgctgccgttattagtcggctgagcaccattcttggagacggtggcttgcctctttatctcagccagttattactgaaattacaacggcattatcattatcttgttgagcagattaaagatctggaatctcagttgaaacgaaagctggacgaggatgaggttgggaaacgtttactgagcattccctgcgtcggaacgctaacggccagtaccatttcaactgagattggtgatgggaagcagtatgccagtaaccgtgattttgcggccgcaacagggttggtacctcgacaatacagcacaggcaggcggacaacattgttgggcatcagcaagcggggcaacaagaagatacgaaccttgctggttcaatgcgcaagagtatttatacaaaaactggaacaccagtctggcaagttggccgattgggtcagggaattgctgtgtcggaaaagtaactttgtcgtgacctgcgctctcgcaaacaagctggccagaatagcttgggcactgacggcacgacagcaaacttacgaagcataa

SEQ ID NO: 39733 - DNA, 402 bp, Escherichia coli
atggaaaacattgcgctcattggtatcgatctgggtaaaaactctttccatatccattgtcaggatcgtcgcggaaaggctgtttatcgcaaaaagtttacccggtcaaagctaatcgaatttctggctacatacccggcaacgaccatcgcaatggaagcctgcggcggttctcattttatggcacgaaaactggctgagcttgggcattcaccaaagctgatatcgccacaatttgttcgtccctttgttaaaactaacaaaaacgatttcgtcgatgccgaggctatctgtgaagctgcgtcgcgtccatcgatgcgttttgtgcagccccgaacggaatctcggcaggcaatgcgagctctgcatcgagtccgtgaatccctagttcaggataagtaa

SEQ ID NO: 39734 - DNA, 870 bp, Escherichia coli
atgccacggcgacaaatactgagtagtgaagagcaagctcgcctgctggttataccagatgatgaaattattctgaccagaatgtcttttctttgtgataaagatattgttctcattaataagcactggcgtccagctaattgcctaggctttgcggtattactctgttacctgcgtgggtctggatttgttccggacaaaaacaatgttccccactgtagcgttgtatccagaattgcttcaagactgaagcttcagcccgatttatggcatgaatatgcagccagagagcaaacccgctgggagcatcaggctgaactttatcgctacctgaaattatctccgttcagccgaacacagcaaaaaggctgcattcggcatctgcattcctgtgccatgcgaacaaataaaggatttactctggcggaggaaatgctcagttggctacataacaataatgttatttttccgtcggttgatctgatcgagcggacgcttgccgaagccgtcatacttgctgacagatctgttttttcggcaattactgcacaacagggaaagcagcatagatctgcactcgacagcctgctcatatcagaaggggaacaaccttcccgacttgcgtggctccttcagcctcccggtaaaattaacggtaaaaacgtgctgcaacatatcgatcgacttaattctatcaccgcgctggaattaactgatggtattgagctttccgttcaccagaacaaattactcaaactggcgcgtgagggatcggaaaatgagcagcagagatctgacaaaattcaccaatatcagaccttatactacgttggtttgtgtcattcaggaagccagagcaacattgactga

SEQ ID NO: 39735 - DNA, 1290 bp, Escherichia coli
atgaaaaaccttgtcattacctcattagcttttgcaatttctgtcaattgttatgcatcaaatggaaattataatgttggcgatggtagttatataaatggttcttataccacagctattggtgcgtcatcatccgcaactggaaatatgtcttctgcgattggctcaagttctagcactaatggtgactataatacggccatcggagcttcatcttcagcgaaaggtaattcatcatcagctataggtgcaaattctagtgttgatgggaacaactccgttgctataggttcattcagtaaagttaccggggattcagccgtggcaaacggtgcagcaagtgaagcggcagctaattcaacaagtgttggcgctgcgtcaaaagctactggagaaaatagcgtagcttttggctcatctgcacaggcaacagcaggtgatacattagctataggctctggtgctatttcaagcgcagaaaacgctatttctctgggttctcaaagcgaagctacacataacaatagtgtagcaattggtggtggtagcaccactgacagagattacagcgtttccttcggctctaataatacaaaccggcagttaactcacgttgccgcaggtactcaggatactgatgctgttaacgtgaaacagctgaaagattatactggcggcgagatagaaaaaaacaatactataattaatcaaaatattactaatgccaaaaacgagtcaatgtcatataccgatcagcaggttacaaaaaacaatgctgtgattaaccagaacatcaccaatgccaaaaatgaatcaatggcatatactgatcagcaggttacaaagaacaatgctgtgattaaccagaacattactaatgccaagaatgaatcaatggcatatactgatcaggaagttacaaaaaataatgctgtgattaataacaatatacagacagcaaaacaagaatctttctcatatacagactataagtttaatcagattgagggccaaataaactcaaaatttaaacaattaaacgataaaattgaagcgaatgccaagaaagccaatgctggtattgcttctgttgctgcaatgtccaacattccatatgtaaataatcagacattcagtgctggagtaggtgtgggtaactatcgaaacggaagtgctgttgctgttggtgctcaatacaacattaatgaaaacacccacgtcagggtatcctcatcatggaacaatactgacggagctgtcattggcggtggtattgctgtaggctggtga

SEQ ID NO: 39736 - DNA, 672 bp, Escherichia coli
gtgcttgttcgctgggaacatccgcaaacgggaattatcccaccggatcagtttattcctctggcggagtcatccggtcttattgtcataatgactcgccagctgatgaaacagactgcggatattctgatgccagtaaaacatttgctgccggataatttccatattggaatcaacgtctcggcaggatgttttttggccgcgggatttgaaaaagagtgcctgaacctggtcaagaaattaggaaacgataaaatcaaactggttctcgagttaacagaacgtaaccccattccggtaacgccagaagccagagcgatatttgacagccttcatcagcacaacattacctttgcgctggatgactttggtacgggttatgcgacctattgttatctgcaggcgtttccggtcgattttattaaaattgacaagtcgtttgtgcaaatggcgagtgttgacgaaatctccggtcatattgtggacaatattgtcgaactggcgcgtaagcctggtctgagtatcgtagcggaaggaatagaaacccaggtgcaggcggatttaatgatcggtaaatgcgttcactttttgcagggctatttctactctcctccaatgtcaagtgtggattttatttcaaagtggctgataaaaaatactttattttcttga

SEQ ID NO: 39737 - DNA, 240 bp, Escherichia coli
atggtcacttttgagacagttatgaaaattaaaatcctgcacaagcagggaatgagtagccgggcgtttgccagagaaatggggatctcccgcaataccgtaaaacgttatttgcaggcgaaatctgagccgcccaaatatacaccgcgaccggctgttgcttcactccgggatgaataccgggggatattcgtcaacgtatcgcagatgcttatttctgcgcacagacagggggactga

SEQ ID NO: 39738 - DNA, 558 bp, Escherichia coli
ttgctgaatgaacttaaagcgttacattttgctatccgttccgaagatactggggtgggggaggggcttcatggtgccttcagaaatcgtcttaaggcgttgaatgatggacagcttgatgccctgcaatgctggtatccggatgacggcatccacattcgttatcgggctcccggagggcagatggaagacatttcttctgcttctccaggacaaaaaggagcgagcatgctgcagttcctgttatcttatggcaccgatccacttctgctcgatcagccggaggacgacctagattgcctaatgctgagcacgggggtgattcctgccatcatgtcgaataagaaacgccggcaactgattatcgtgtctcatcctgccccgatcgtggtgaatggtgatgcggaatacgttatcagtatgaaacatgatcgtacaggtctgtatccgggactttgtggagcgcttcaggagacgtcgatgaaggcgcttatttgtcagcaaatggaaggtggtgaaaaggcgttccgttcgcgatatgagcgtatactcagttaa

SEQ ID NO: 39739 - DNA, 1365 bp, Escherichia coli
atgtcttcacctgatttctacggcctcaagtatgcattgctcgatccggagaattgcgtactgtttgacaaaaaaccgccagaggctcctgcttgtcatctgcgcagcctgaagttgagaactcgccactgtcgtcctgctgagcaggaggctgccgttgtggaattcactccgttttataacgccgttatcggctcccggggtagcggtaaatctacactcatcgaaagcattcgtcttgctatgcgaaaaaccgaaggattaaccttggggcagcgccaaaagcttgaacagtttagccttacggggggaggaatggatgctaactccttcattgaatgtgtgtaccgtaaagacggcactgatttcaaacttagctggcggcctgatggtaaccatgacttacatatcttcagtgaaggtgaatggattcctgacaatcactggtcggccgaccgttttccactctcgatctacagccagaaaatgctttatgaactggcttcagactccggagcatttttgcgcgtttgtgacgagagtccgtttgtcaacaagcgggcttggaaagaacgctgggatcagctggaaagggattatctaaatgagcaaatcacgctgcgtggctatctggccagacaggtgagtgctggggtgctgcagggggagttatccgatgctgaacgcgccgtcagtcagttacagtcaagtgcatactatccggtttgcactagactagctgtagcccgggctgaattgtcagcagcaaccacctcccttgagttatatgagcaacgtattgcggccttgctggcgttgctggagaaacctctgccagtttcagttgctccgtcggcaccgtccgagccgctggcggtatttatgacgcacctgtcatccgtacaacaaaattatggtcagcgtctccacgccctgctgtcagaatgtgccactgaacttagcaccatcagggcagataatccttttgtaactctcggggaaaccgttcgtgaccaggaggtgaatgttgagcatgaggcagttgctctacgtgctcagggactcaatccggatgtactcgacgaattgatgactcgttgtgagtcgttgaagaatgagcttaaaaattacgacgaacttgatggaatgatcgcctcttcggtagctcgttcggagcagttgctggctgaaatgcgcactcatcggatggcgttgacagaaaaccgaaaggcatttttgtcttctctgtcacttcgcgatctggacatcaagattctgcctctttgcgccccccatgaggacattctggctgactatcaggctgttaccggccgcaacggagagaaaatatgcgttgctgaatga

SEQ ID NO: 39740 - DNA, 249 bp, Escherichia coli
gtgcgcaagtatacacaaagcctccggattacggcggataacattgataatgccagcaggccccaactggagaacaagctggtgattatgaacatctcgcgggatgggacagctattgttgcattggccgagaagtctctccacatcagcactggtgctttgcgtgtgcagtatggccaggatatggacatttcctgtagcggtcagttccactcctgggaacagagtcagagggcgaaagccaggtaa

SEQ ID NO: 39741 - DNA, 1269 bp, Escherichia coli
ttgcctcctgtcattgttagcaataatgagcatagatttattgttgctgaacaattgcgacagttcggtgtggatgacttccagattattctagaacctgtaggtagaaatactgcgcccgccgttgcgctggctgctctaaagtctctagaactccatggcgatcatcatatgctggttcttgctgctgaccatgctattcaggatattgaagccttccatgcagctgttttagctgcagaacaagagtccgttgacaataagttagtgacttttggcatcgtcccgaccaaacctgaaactgggtatggctatattaaaaagggcgaacaagttaaaaactctgtatttaaagtaaattctttcgtcgaaaaacctgatttagaaacggctaaaaattatctcgaacaaaaatgctatttgtggaatagtggtatgttcatgttcaaggcgagcgtatatttagatgaattgaaaaaatttcgccctgatattttagcagcgtgtaaagagtcgctttccagtgctagtactgatctagattttatcagattaaattctgatgtctttgcagaatgtcccgatgagtcaattgattatgcggtaatggaaaaaactcaggattgtgtagttattccacttgatgctgactggagtgacatcggttcatggacatcactttgggaaatatcagagaaagatgaacatgaaaacgtatcgcatggcgatgtaattaactataacagcaggaacaactacatttactctgaaggttcactgatcagcactgtaggagttaataaccttattatagttcaaactaaagatgcgctcctggtagcacagcaagacaacgtacaagacataaagaagattgtcgaaattcttaaaaagcaaaaacgtagcgaacatatatcccatcgcgaagtctatcgtccttggggacgttatgattctgtagaacgtggcgaccgttatcaggtaaagcgtattaccgttaagcctggtgaatgtctctcaacacaaatgcatcatcatcgagctgagcattgggtggttgtcgctggtactgcaaaggtgacttgcggcgaacgcacttttttcgtcactgaaaatgagtcaactttcataccaattggcacagttcataccttggaaaatccaggaaagataccattagaagtaattgagattcagtcgggtgtatatctaggtgatgatgatattgtgcgcctaagtgataaatatggtcgtgttgaggataaataa

SEQ ID NO: 39742 - DNA, 1044 bp, Escherichia coli
atggcagtcaagcgcgcatactacggtaacgatagtgaccgagactacttagagcggatatttcagtcagctaacattaactttctcatcggatcaggtgcatccctcccagcgattaaagtactggggacaatcgaaacggatcttcagcagcttattaatgatgaacaggaagatgaatacttaaggatggcagctgactttttgtcagatgtttggctacctcatgaatgcatgttgaagcgcggctacggcacccccttcgcacctcaggtgatcaccgatttggaatgtacccgtgcaaattatgatgcatttatgtcttcactggaaaagatactgacccgccgccgaactggcctacttccgaggcgtattaacgtttttacaactaattatgatttattcatcgaagaagctgccacacgtaataacaatattctttttaatgatggattcaatagaagagcaagtattttgggagatgcggaatttgatgcgggtagctttaatcattctgtaagtgcaaccggaaatctgtataattataaagttgagcttcctactgttaaccttataaaacttcatggttcgctctcttggcagcattctaaagggaaaatcatttatcgtattgcagatattaagccgcttgactttcccaccctagccgaaatgaaaggatgggtacttgctcatgcacttattcttccacgtaaggagaagtttaaagagactctactacagaacgtttattatgatttactgagaacctattccaacgagcttgataaagaagcaactttactaattgtctttgggttctcgtttgctgatgagcacattgaaacgataactaaaaaagccctgcgcaacgccaccctgaagctactgatctttgctttcgatgaggccagtgttaacggctttatggagaaatttcgggattactcaaacgtagagattatttatcggccgggaagaaatgttgattttccggtaatgaataacattatcacgtgctatctgggaggctcgagatga

SEQ ID NO: 39743 - DNA, 1860 bp, Escherichia coli
atgagcaggcattttactgaagaggaagcggtgctccgtataggcgaagtctgtgaggtttctggacgcgctgtgacaattttggtcgataaaaacaaaaatctcagtgacttgttttatcagggaaaagttctaagaaatgtatcagtgggtagcttcattgagatcaaaaaaggtttcatgagcctgatcggcaaggttgaagcggaacgaatcattgaggaaaaacatctcgctgggagcggcagtgatgcctggcgatatcggcgatacctgacctctactcttacgggttacattgatcgtactggttgcttcattggtggttcgcgtgaactacctctcatcggcaatgaagtcttcgtggtaactgaagagatgatacagacggttcatcagatagctgatgcagacgaaactgtaatgaggtttactcgtacagatcttgaagatattgaaattgcactaccaatcaatggtcttattaattcccacattgccattttcggtaatacaggcagcggaaagtcaaataccctagccgcgctatacaaagcaggtattgcccaagttaaacatattctcggcaaccactttagtgaaagatgcaaatttattctattcgactttaatggagaatatactgccccacgctgtattactgacgagaagacggtttataatctcaacacgcaccatgcaaatggtgacaaacttcctctacccagagaggttctacttgagcatgatatgctctcagttctaaccgatgcaacagacaaaacacagaaacctttcctgaagagagttcttgagtttcgcaagaaagtgatgactgctgataatcctcttgagtttatgcgcaatatcctgaagaaaaaagtcagacaaaatctctttagtagcgacaaacccaaatgcgatactataaatcagtttcttagcccaattttcaaagatgacccagaacttatatctgatcttgagtatcattcaactgcatataaatggaaattgaggggtggtagtattttcaatacagaagctgatactgagcgctcctatctattcagtcttgcaagcaatttttcatttaaaactgatatgattgaagaactgttggactttatgtacttacagttaatacaggaatatttatctaacaagtctaaccctgaacatatttcaccagttataaatagaatgagtgctaaccgtaaagatatagccaaaatatttgatacttccggacagtctgacttttggggtgaacataatttcacggttgtgaatctaaatatggttaatataaccatgaaaaaaacgcttcctcttttgatagccaagtgggcttacaatatgaagaaaatgtctacagagaaatctacactgcacatcattatagatgaagcccacaatattttgtctaatacttcttttcgggaaacggaaagttggagagattatcgtctggaaacttttgaggaaatcataaaggaggggagaaaatttggagtttttatcacaatttccagtcaacgccctaatgatatatcgtcgacaatcatatcccaagcacacaattattttattcatcgccttattaatcagaatgatctgtacgcaattgaaaaatcagtatcatatatagatcgactgactgaagagtcgattccaacgctatctacaggaacctgtatttttagtggtatcgtctgccccatgccgctcaaattaagggtagctgaacttccaattgaagaaaaacctaagagtaatactatttccttcaacgatttaatacctgagaggctgggagaggatgaccagagcgactacgtaataaccagccctcactaa

SEQ ID NO: 39744 - DNA, 1377 bp, Escherichia coli
atggggagtaaaattacactcgctgaaatatgtacagatatttcatatggatatacagcaagcgcaactgcgaaacctattggtcctaaatttctccgtataacagatatacaaggaggcaaggtcaattgggaaaatgtaccttattgtgaaatagatgagaaagactctttaaagtatttattgcaagatggtgatatcgtaatcgcaagaaccggaaacagtactggcgaaaactttatatttagctcaaatacaaaagtagtatttgcatcatacctaattcggttccgtattgatccaaagaaagcaaatcccaaatttatttggcttcaaatgagaacacctcaatggtggagttttattgattccgtaaaaactggctcagcccaagctggagctaatgcaaaggttttgggactgtatgaggttgaattacccgaaagaaaaattcaagaccacattgctgatattggatttaatttactaaaaaaacaggatattaactccaaaataaaccaaaccctggaacaaatgtcccaaaccctgttcaaatcctggtttgtggattttgatccggtggttgataacgctctggatgcaggaaatccaatcccggaagctctgcaatctcgtgccgagttgcgtcaaaaagtacgtaatagtacagatttcaaaccacttccgacggaaatccgctcgcttttcccaagtgaatttgaagaaacggagttaggttgggtgccaaaaggctggaagattgataatattggtggcctttccgacaaaattttcagtggtggaacgccgaataccagtacagaagaatattggaatggtgcgttaaactggttctcatctggggaaacaaggaacgcattaattattgaaactgaaaaaaaaattaccgctactggtgttaaaaattcctcaacgcgattatcagttgctggagatatattaattgcaagtgctggacaaggtcatacacggggacaaacgtcactaaacactattgatacctatattaatcaatcagtagtatgtattcggccaattaaaccatcttatagcacatggctgtattttaatctttcgtcacgatacactgaaatgcgtgcaatatcagactctcatagtatcagaggaagtttaacgacaaagttaatttcgtcaatgaaagtcgcgtctccaactgatgaattaatttcattatttgatataaattgttcagtgtttattagcaaaattaaaaataatttagagctaagtcgtgaactaaaaaaactccgcgacaccctgctcccgaaactcatctccggtgagctatccctggaagatcttccggatctcaacaccgatacagaagctgcataa

SEQ ID NO: 39745 - DNA, 384 bp, Escherichia coli
atggcgatgtctgctcaggcagcagagatttacaataaagacagtaacaagctggatctgtacggaaaagttaatgctaagcactacttctcttctaacgatgcagatgatggcgacacaacttatgttcgtctgggcttcaaaggcgaaactcaaatcaacgatcaactgactggtttcggtcagtgggaatatgaattcaaaggcaaccgtgctgaatctcaaggttcttccaaagataaaacccgtcttgccttcgctggcctgaaattcggtgactacggctccatcgattatggccgtaactacggtgtagcatacgatatcggtgcatggaccgacgttctgccggcgatacctggacccaaacagatgtgttcatga

SEQ ID NO: 39746 - DNA, 147 bp, Escherichia coli
atgaattttcttttgccgtgtggtggaattatgaataatatagatttattaaaaactataacaaactacaaaaaaatcaaaaatccggcatacccggctcctgtctcttatacacatctgacgctgccgacgaatagagaggtgtag

SEQ ID NO: 39747 - DNA, 1791 bp, Escherichia coli
gtggaatcgattaccaaactttaccagaccccgctgccatctacccgtactggccctttgtataatgcgttctcatatccaacaaagatttcaccagaagctatagcggtttacattgctacgcacaccgagcccggtgcaacagtgttagacgcatttgctggtagtggtaccacaggcttagccactctgctctgtgaccgccctacactcgaaatgaagcgaatggcggaaagcctcggcgcatcgccaaagtggggaccacgtaatgcacaactttttgacattggaacattagggtcattcgtatctcagaccatgtgcaatcctcctgatcctgacgaatttgcagatgcagtgaaggagctatgtaaacaagctgagttacaattgggttggttatatagtattaaagatgccaatggccaagcaggcatgctccgccatgctatttggtctgatgtactaatctgccctaactgtaatactgagacctcactttgggatgccagtgtgaaaactaatcccatcaaaatggctgattctttcatttgtaagggttgccagaagctcgtatctattgaagcttgtgaaagagccacagagacaatctctgatgttttcggaagtacacagtgcaccaaaaaacgagtgttagctcgcgtgcatggacgttgcggaacaacaaagtggcagaggcctccaactgatgaagactatgagattttggctcgcattgccgaaatgcagcctccaacatcagccccaaacgttgaaattgaatggggagaactaagacgctcaggctatcattttgggatagataagctccatcatttctatacaaagcgtaatttcattgcgatggctttactaatggagctagtcaataactttaatgaaagcgttcgagaggccttgcggcttcttgtccttagctacaatgcgagccattcgacactcatgactcgtgtagtgctaaaaaaaggacaaaatgactttgtacttacgggcgctcaaagtggcgtgctctacatcagcggatttccagttgaaaaaaatcttatagagggtattcgtcgcaaatctaattcgttcataaactcgttccggcttttatacggtagtcaaagtcaggtaactgttcataatgttagcagtgaaactatgccactcaaggacaattccgtggattacgctttcactgaccctcctttcggcgattatatcccatacgctgagctcaatcagctcaatgagctttggctagggcgttccactgatcgtaaacgtgaagtcattgtgagcccttctcaagctaagggagtgaaagaatacggcagtatgatgggtacagtattcaaagaaatgtctagggtactgaagcatgacgcattagctaccgtagtatttcactccgcacattcggagatatggagagctctagttcaagcttataccgaagcaggattcgcagtggaagcaacaagcgtacttgataaaattcaggcaagttttaaacaagtagtttcgaatgtttctgttaagggtgaccctctattattgttatctaagcgcagccaagaacgttcagagtctaagacttgtgatttaatcgccgctgagataatcaataatgctaaaaatgatttgaaacccgatccacagcgtctctattcacaatttgtgggaagatgtctcgagctgggcagcaacgttactatggatgcaaaaaccttttatgcacttgctcaaaccaacggtttatgtgttaaaggaaccaatacgtga

SEQ ID NO: 39748 - DNA, 1041 bp, Escherichia coli
  misc_feature (952)..(961): n is a, c, g, or t
atgagtaagcatgatgataatcatatcgagattagctgccctatagactttgaacggcgaaaacggctggggcagtacttcacgggtaccggccttggtcgtttgcttgcagcccttgctcaagccgaaaaggctgacagcatcatagatcctatggtgggatctggagacctacttgcctcttgtatagagattgatgctaaacctgctgtaatggcaggtatcgagatagatatgaaagtacataaggcttgttcaaagcgattgccacatgcacattgtttacttggtaatgctttcgatcccagggttatcgcacagttgcccgtaaaatcatgggatttagtaatcgcaaatcccccttatgttcgctatcaatcccttcgggataaagatcacaattcaagcgcatttccttccgcaatgcaaattcgaaaaatgttgcttcgatcgttagagttgatagatacactcgataaagaagataagcgactttttgccgaactcatccacggttattctggtctatccgatttggcagtgcctgcatggattctctgcgctgctttggttgagaaaggaggacgtttagctctaattgtacctgagtcgtggcttagccgagactatgcaacaatagtgaattaccttctgtttagatggttcgacatagaatttgttgtagaggacgaacatgcgtcatggtttgaagaagctcagatcaagacaacattgatcatcgccaagagaattcaacgtcgctcttccaaactctcaattcctgctgaatatcactattgtcacatagcacttgcagccgcagcagctaacaacagaagtcctataggtggtattaacttaccggtaaaagaggctgaaaagctcttcgcaaaacaggctcaaatctggctccgagatgcgtctaaacatgaaacgggccttgttagcactnnnnnnnnnncgtccaatttctctaaatcactcttgcaaaaatatgatcgcgtcagcttcccgccaaaagtggtttgccactatgagtaa

SEQ ID NO: 39749 - DNA, 3246 bp, Escherichia coli
atgggaacaatttacaatgaaactcaaggcttagcatttctgaaagaagctgtagcacttatggctgatggaaaagctgaggatgttctgcgacatgcgctatctgccaaactgccgctcatgttccctaaacagccatggtggataaaagcacatgttacaggtacagagtcgcttgctaaatttcatgaatttggttcgaaaaagtatggattcgtggatgtattagtaggttcaactgttattgaatatgaaagaaatttacaaacacagggttcattcacacatgggctccatcagttaaaacaatattgtgcttctcttcttaacagccacacgccttcagatcttttagttggggtactatcagacacgattcgctggtatgcctttcgtgtttcagacgtaaaagatatttcggctgttcccggtgcgacaagctacggccctgaacatattgatttagctgaaattgaatcctatgacctgtcggcagctgggagcattgaggccaaaaagcttggtaaattcttggttcgatatctgggccgagaaggtggacgaactttagcagcatccatgctagcaaaggatttaggctttgaaagctcattttgcgaaacacatctccagcaaatagaaaaactagttgatgtagcttttgtaagcgatccatcctacgctgggttaatcaccaaactctggatggattttgtttcttacttgggtggtgaatctgctacaggtaaatttgataaaacttcatatattggagaattgtacatattaacgttagccaagcttatttgcgctaacgtacttagcggtaaaggacttgttagcgacgatacggaactattatcaattctagatggtacatttttcaaagcgaaaggacttccgaatcttgtagaatacgactacttcggttggcttaataatagcccttatgtttccccccttgccaaagtagcacgcgacattcagaacgatctattagcttatgactttgagtctgctccagctgaagacctatttggttctctaatggctcagcttgcaacacgcgctcaacgtcttctcctcggtcaagaatggacaccagcatggctagctgcgaaagtagtaaatgaagccatcaacaaactgccattaaaccagcaaccaagattcatcgatatgtgttgcggttcaggcactatagttgtggagacagtaaaagcggtccaacaacggttacttgcagcaggctctaagccaggagaacctgctgcgttaagctcattagccactgcaattacggctttcgatatagatccgctcgccgtaatgttagcaaaagtgggctgggtactggcttgcaaggactggcttatacctggccatgaagccttaattcctgtgtatcacgcagactcactatttgccaatactccggtcaccaaggtgtttagtacaacaggcgaagagcaacgcaagctaaagcttgacacagaagaggttgacctaccacaatttttggtcgaatcgaaacatcaatctctatttgatgcacttttatcacgtggttatgatatggccatgagtagtgctgcagaagccaaatcaacgttaaataatgatgatattgagataatggttgattcggtagctttgcatttagactgtgtgctgtcagctgaagaacgcacatctacattattcttttgctgccaactgttacgcgcacttgaagcattgcaacgtgctggtcgaaacggcatttggtcattcgttctgaaaaatagctttcgcccagccttagtggcgggccgttttaatggaattgttactaacccaccatggctatcgctaagccgcattggtagcaacccttatcgtaatgcgttaaaagcaaaagcggataaatatggaattaagccatctggcgcttcacacctgcatgttgaaatcgcgacgaccttcttgctacatgctatcgatcattatcttacatcagatggggttgttgcatgtatcttacccgaaacagttctgaacggttctcatcatgaaccattccggtcatccaagtatctatcagctaatagtccagcagcattcaatccacaagaaatttggaaagtggccagccaaacatttaaaaatgaggccattgttctattcggttataaatctaagccaacatttccagtagtaagcctcttgggccgaaaagttagcagttcatttgaagaattctgcgagtttcacatcgttaattctggagggaagtctgcttgggcattagaccgccctgtaacagaagtgttgaaagtggaaactaaagattcaattggacctctgtttagacaaggagccgatataatgccccgcggaattatttttcatgatatcaaaaaaaacggaatatcatgggatcttggtcccattcatcccggctcatcactatattttttgcgttctgagggtaaaattcttaaggacttttctttaagcgcctgtggggtgaacgatggagtgatatatgatgtgcttctttcaaaacatttagccccttgggaattatctgtaggttcaaaggccttattaccattccagcgtagtgacgataagtggctcgctcgtactggatcaaatattgcagccctaggagcttctactgcctcagcaatcaaagctatgttgacggcaaccggtgaaaacatagaagatttctttttacgaatcgatactgatcgcaagaaattaaccacccagagttggagctcagaagactgggttgtattcgggtctgctggaggtaaatggccatgcgccgcttacacacgcggagagcagattccctgctctaaaacgataatagaccaaacgctctattggggcgtagtcaaaagtgaggatgaagcgatatacattactgcactaattaatagtcctgcggtaatgaatgtgattgtatcccatcaacctagaggatcctttggggaacgacacatacacaagttggctttcgaccggacaccttcttatgaccaaacctcagctaaacatctcgacgttgttcgctcggcgaaggatttgatgaatcagtgggctaatcgtcgcatggaagctgacatatctcccatgctatctcctagtgttcacttaattactcgcagaaaaaagattcgtaatgcattagagtcattgcctgcatgggagccgtacgtggcagccactcaagctatatatgaaatttaa

SEQ ID NO: 39750 - DNA, 471 bp, Escherichia coli
atgacccagattcaactggctcttgccgccatactcggtgctgaccttgatatgctccttgccgcgctcgtcgtcgaggcggattttgttgttcgccggggtacgcagtacgttacgcttgtagttctggatggtcacatggtcggtgtgcgccgagtcgtgttttaccccggcgatatacggcctgtccgggttgccttcctcaaacgcgatgctgacttccgttcccgccagcagcggcaggtgcagaccgtaggtgtctcccgcatacgggcgcgactggcgtacccacaggctctcatagcccggtttccacgtgtcacggtcaaagtcgaggttgacccggtagcgcccgtccttgtcgatatgggcataaatatcgttcttcaccgtgctggtgacccgcgccgggagcgtgccggccattacgggacgtgggataagcgccgggcggtagccgtagcgctctga

SEQ ID NO: 39751 - DNA, 135 bp, Escherichia coli; identical to SEQ ID NO: 29892

SEQ ID NO: 39752 - DNA, 213 bp, Escherichia coli
gtggcatatgctaaaagtgagcatggcataacccttattcgtgaggacattggcaattctttcgatgggggaggcggtgatagtggaggcggaatgtcagataaacttgaaaggcgaattgagcggctcgaaggtgatttatcgctaacaagaaacgaccttgcgacgcttgctgaacgcactacaaacctctcaactgaagtggtttactga

SEQ ID NO: 39753 - DNA, 135 bp, Escherichia coli
atgaaagaaaaaagaaatgatgcggaactaaaaacagaaaaactaaacgggattatgattatgaacgcagggtttctgatatatattttgatctgttttttgtgttcgttgctgtcggaacttttttatgggtga

SEQ ID NO: 39754 - DNA, 714 bp, Escherichia coli
atgatcaggcagaagattctacagcagctcctggagtggattgagtgcaatcttgagcaccctatttcaatcgaagatatcgcacagaaatctggctacagcagacgcaacatccagcttctgttccgaaatttcatgcatgtgcctttgggagaatacattcgcaaacgaaggctttgtcgtgccgccattcttgtccggctctccgcgaaatctatgcttgatattgcactctctttgcattttgattcacagcagtcattcagccgcgaatttaaaaagttattcggctgctctccccgtgaataccgccaccgtgattattgggatctcgcaaatatcttcccttcttttttaatacgtcaacagcaaaagacggagtgtagattagtcaactttcctgagacacctatttttggcaattcatttaaatatgatattgaagtgtcgaataaattaccggatgaagaagtcaaactgcgacgtcatcatttagtcagatgtatgaagaattttaagacggatatctatttcgtctccacgttcgaaccatcaacaaaatcggtcgatttgctcacagttgaaacttttgccggtacggtatgcaaacaaaccgattcagagatgccgaaagagtggacaattaaccgaggactgtatgcctctttccgctatgaaggtgaagtggtcaacaaaaactggccaccgagttag

SEQ ID NO: 39755 - DNA, 645 bp, Escherichia coli
atgcaggggcagacgtttgataaggcagcatatccgaaactggctattgcctatccttcaggtgttattccagatatgcgcggctggacaatcaagggcaaacccgccagtggccgggccgtattgtctcaggaacaggacggcataaaatcgcacacccacagcgccagcgcatccagtacggatttggggacgaaaaccacatcgtcgtttgattacggcactaaatccacgaataacaccggggcgcatacgcacagtctgagtggctctacggggtctgccggtgttcatactcatggtaatggtattcgttggccaggaggcggcggttctgcgttagcattttatgatggcggtgggttcacttatgtccagaattcacagtatcaagtaagcccggagacttcttcctatagatcgtattatcaacgtattcagacacagtcagcaggtgctcatacccactcgctgtctggtactgcagcaagttctggcgcacatgcacatactgtaggtattggtgcgcatacgcactccgttgcgattggttcacatggacacaccatcaccgttaacgctgcgggtaacgcggaaaacaccgtcaaaaacatcgcatttaactatattgtgaggcttgcataa

SEQ ID NO: 39756 - DNA, 324 bp, Escherichia coli
atgtctgatgttttacgcccataccgcgatctttttccacaaatcggtcagcgcgtaatgatcgacgatagcagcgtcgtgattggtgacgttcgtttggctgatgatgtggggatctggccgctcgttgtgattcgtggagatgtacattatgtacagatcggagcacgcaccaatatccaggatggcagtatgttgcatgtcactcataaatcctcgtacaacccagatggcaacccattaaccattggcgaagatgtcactgttggtcacaaggtgagtaagcgtcaacggagcaccgtattgacgcttatttattggtga

SEQ ID NO: 39757 - DNA, 1353 bp, Escherichia coli
gtggttattgtgggtgtagctcgctacatcattaaagggtattctgccactggcgtgttatttgtcggtggcctgttattgctgattatcagtgccattatggggcacaaagtgttaccgtccagccaggcttcaacaggctacagcgccacggatatcgttgaatacgttaaaatattgctaatgagccgcggcggcgacctcggcatgatgattatgatgctgtgtggctttgccgcttacatgacccatatcggcgcgaatgatatggtggtcaagctggcgtcaaaaccattgcagtatattaactccccttaccttctgatgattgccgcctattttgttgcctgtctgatgtcactggccgtctcttccgcaaccggtctgggtgttttgctgatggcaaccctgtttccggtgatggtaaacgttggtatcagtcgtggcgcagctgctgccatttgtgcctccccggcggcgattattctcgcaccgacttcaggggatgtggtgctggcagcgcaggcttccgaaatgtcgctgattgacttcgccttcaaaacaacgctgcctatctcaattgctgcaattatcggcatggcgatcgcccacttcttctggcaacgttatctggataaaaaagagcacatctctcatgaaatgttagatgtcagtgaaatcaccaccactgcccctgcgttttatgccattttgccgttcacgccgatcatcggagtgctgatttttgacggcaaatggggtccgcaattacacatcatcactattctggtgatttgtatgctaattgcctccattctggagttcatccgcagctttaatacccagaaagttttctctggtctggaagtggcttatcgcggtatggcagatgcatttgctaacgtggtgatgctgctggttgccgctggggtattcgctcaggggcttagcaccatcggctttattcaaagtctgatttctatcgctacctcgtttggttcggcgagtatcatcctgatgctggtattggtgatcctgacaatgctggcggcagtcacgaccggttcaggcaatgcgccgttttatgcgtttgttgagatgatcccgaaactggcgcactcctccggcattaacccggcgtatttgactatcccgatgctgcaggcgtcaaacctgggtcgtaccctatcacccgtttctggcgtagtcgttgcggttgccgggatggcgaagatctcgccgtttgaagtcgtaaaacgcacctcggtgccggtgcttgttggtttggtgattgttatcgttgctacagagctgatggtgccaggaacggcagcagcggtcacaggcaagtaa

SEQ ID NO: 39758 - DNA, 516 bp, Escherichia coli
atgaaacagatttctttatttattccgctgctggggacgttattactttccggctgtgccggaacgaactccgattttgagtgtgatgccaccacatccgatacctgtatgactatggatcaggccaatgagaaggccaaaaaactggagcagtcctcagaagcaaagccggctgcggcatcactgccgcgcctggctgacgggaacttccggaccacgtcggtgcaggccgttgcggcgacaacgccgtcccgcagcaggcctgctgtgacagcacttccggagcagaaactgctggcaccacgcccgctgtttaccgctgcccgggaagtgaaaacggttgttccggtcagttcagttgcgccggtaacacctccccgtccgctaagaacgggtgagcagacggcagcattatggatagcgccttatattgataatcaggatgtttatcatcagccatccagtgtgttttttgttattaaaccgtctgcgtggggaaaaccacgtattaattaa

SEQ ID NO: 39759 - DNA, 471 bp, Escherichia coli
atgggggactggcttggaacccgaaaagcatatgttatatcacttcttatcggtcagcttgttattatccccgtttttcttgtggaccgggactatgtatggttacttggccttctaatctttactcagcaggtttttggtcaggggattggtgctctggtgccgaaaataatcagtggttattttaatgtggagcagcgtgcggcaggactggggtttatttataatgtaggttcacttggtggagcatgtgcgcctattcttggtgcagttgttgcgtctcatacaagtcttggtacagcaatgtgttctcttgcttttatcttaacatttgttgttcttgtccttattggttttgatatgccatcacgtgtacagagatggatccatccagaagctgcgcttgaatatgatactgtcgatggaaaacctttttatggagcaagaaaaaagaatgttgcagaagaataa

SEQ ID NO: 39760 - DNA, 570 bp, Escherichia coli; identical to SEQ ID NO: 9415

SEQ ID NO: 39761 - DNA, 636 bp, Escherichia coli
atgtcatcactgaatattaaacagggaagtgaagctcattttcccgagtatcctctggcgtcgcccagtaataatgaaattgatttacttaatctaatcgaggttttatggcgggcaaaaaaaacggtcatggcggtcgtttttgcgtttgcctgcgcaggcttgctgatctctttcatcctgccgcaaaaatggactagcgcggcggttgtcacgcctccagaacctgttcagtggcaagagctggagaaaacattcactaagcttcgtgtgctggatctggatatcaaaattgatcgtacagaagcatttaacctgtttatcaagaaatttcagtctgttagcttgcttgaggagtacctgcgttcatcaccttatgtgatggatcaattaaaagaagcgaaaatcgacccactggatctgcatcgcgccattgttgcattgagcgaaaaaatgaaagcggttgatgacaatgccagtaagaaaaaagatgagtctgcattgtatacttcctggacgctaagtttcaccgcacccaccagtgaagaggcacagaaagtgttggccgggtatatcgattatatctctgcgttggtggtgaaagagtcgggtgatgctgccaacttactgatttag

SEQ ID NO: 39762 - DNA, 462 bp, Escherichia coli; identical to SEQ ID NO: 8356

SEQ ID NO: 39763 - DNA, 687 bp, Escherichia coli
atgtttgacggcaacaaagagttgaaagaatttatcatgacgctcaccggtacgctgatttttggggaagacagcgagattacccccctgccggcgcgtaccactgaccgcgatatcctccgggcgattatggaggggggaacggcaaaaatttaccactgcaacgattcggacaagtgtctgaaggtggtggcggatgcaaatgtgaccatcgcccgggataaagccctgaagtcacagattacaaaactgctcaccagtattcagaataaagcagtgagtgacactccgcttgacgcccgggaacaggggtttatttccagcaccaccattcccgtttttaaatatctgattgacccgcagatgctcggtgtgtccaacagcgtcgtttaccagctgacggactatatcggctacgacatcatgctccagtacattcaggaactgcttcagcaggcccgggccatgattgccaccgggaactatccgcaggctgtgatggacaatgttctggagaatctgaatcaggcacagcaacagattgccattttccagagccaggtacaggtccagcaggatgcgctgctggttgtcgaacgtcagatgagctacatgcgccagcagctttccgcccgtatgctcagccgttaccagaacaactatcacttcggagggaattcactgtga

SEQ ID NO: 39764 - DNA, 222 bp, Escherichia coli; identical to SEQ ID NO: 8358

SEQ ID NO: 39765 - DNA, 432 bp, Escherichia coli; identical to SEQ ID NO: 18470

SEQ ID NO: 39766 - DNA, 213 bp, Escherichia coli
atgtctagtccacatcaggatagcctcttaccgcgctttgcgcaaggagaagaaggccatgaaactaccacgaagttcccttgtctggtgtgtgttgatcgtgtgtctcacactgttgatattcactctcctgacccggaatcgcctgtgcgaagtccggctgaaggacggatacagggaagttacggcaacaatggcttacgaatccggtaa

SEQ ID NO: 39767 - DNA, 171 bp, Escherichia coli; identical to SEQ ID NO: 36496

SEQ ID NO: 39768 - DNA, 171 bp, Escherichia coli
atgacaaaggcgcagtgggccgccctgccccgggactgtaaggccgtgcgcagtgtggaagaagcagaagaccacggggcataccgctaccgtcgcacaatggacaataatttccgtctggtgaatgtgtatatcaccgacatgaaaatcacggaaatcccacagaaataa

SEQ ID NO: 39769 - DNA, 150 bp, Escherichia coli
atgactggggccatttatagcctgacagctgataattaccattattcagtgttacagctttggctgctgcacttgatggaatcgtcagccactgaagtatcaaccctcctggcaaaagttgttttccgtaataatccctcaccccactaa

SEQ ID NO: 39770 - DNA, 408 bp, Escherichia coli
atgaagtattttacatctgctccggttgctctttataactccgatatatcctcttatatacccggtgacgcagtagaaatcagtgatgaagtatataacgcacttattgctggtcaggaggcaggaaagaatattacggcagacagtaacggactgcctgtactggcagaacccgcacaaccaactcatgatgaattggttgctgcgtctgaattaatgaaacagcatatgattgatgttgctatggcttccatcagtctgattcagctgaaattgcaggccggacgtaaactgacgcaggcagaaacaacccgccttaacgctgtgctggattacattgacgcggtgacagcaactgataccagcaccgcgccagatgtcatctggcctgaactgccggaggcgtag

SEQ ID NO: 39771 - DNA, 1782 bp, Escherichia coli
atggctgaactattaccgcaaacaacttctatacaaactatttattcatggtttactgaaggtaagatatttgttaatagacgttatcaacgaaaattagtttggactgcaatagagaaacaaaaattaattgaatccattcaaaaaaaatatccaattcctgcagttcttctcgcggaaagggaaaatgatcctggcacatatgaaataattgatggcctacaaagattacatgcaataatgtctttcatcgaaacaggatatgaatcacttgatggaaaacgttttaatctggacgcttttcccacagcgaaaaatcgagcggatgaaggtaagtttgttgcagtgaaagctgataatcttttaagtcagcgtgaggttactcagttattggattattctcttgcaatgtccattatgcgtaatgcgactgagaacgaaataaatgatgtttttgatagaattaatacatacgggcatagacttagtgatcaagaaaggcgccaggctggtatacaaaataaattttcaaatatggttagggatattgcctgttctatcaggggggatgtatctgacgacatattgcttttagagcaaatgccgtctattagcattgatttgccactaactaaacatggttaccaaattcagtcggaagaagtattttgggtaaaacatgggatcttacgttcaacagaccttcgtgacagtatggatgagcaatgcattgcagatatagcagcttgtattgttggaggtaagttaatagatcgttccaaagatgcgcttgatcagatttataataatgaagatgaagagtatagtcgtattagctctgctattaatgtttatggtgaaggaaaatttgcagaagagtttaaattctgcatccaggaaataacaaaagtatgtaatagtgacggtgaaattaaactcagggatttaatctttactaaacgtactacaaatgctttcccagccatatttgctgtgttatttattgcttttcatgaattactcattaaagaaaataagaagattaataattataaaggtgtaaaagacaatcttaataatatagtcactcgactagatactaaaagatctgctactggtggggaagagagaagaaagaatattaattctatcataggcttgattaaagataactttattgatagcgccgatagcagtcatatctataattctcacaatacggtggatattgaggatattttacgaagatctgaaatagagcttgcaaattatgaactgaaacagggtttgttgatgttaggcggagagcgaactattgatgatggcattcatgagaaaatattctccacaatttgtgctattgctaacatcggtaaaggtaacaagaacggtgtagttggtaagttattgcttggtgtaacagataaaccaagtgatacaagtagagtaaaagagcttgatgatatagatgcacatgtagttggtgagagaagtgttgttggtgttaaaagagaagctattaaactcggcatatcaatggaagaatattatagacgtttttgcgatgagttgaaaaaatctgctttgagtgagcctcttaaatcacaagtggtgagtttgattgactataatgacttttatggttatggagttatagttattacaattccacttctagcatcttattctagttatgatggggatatttattatcgtgctggcgataataccgtaaaagcaacagttatcgaagcagcagatattgcaacacgttttaaatga

SEQ ID NO: 39772 - DNA, 147 bp, Escherichia coli
atgtctatccgtgatgaacatgaaatgattatcgaacacaaaccaagcgcacttgatatttacgaattaagtttgcgtgaatcttttgatagagcttggcgggaatcacacgaagtagctacaacgccgaaatttccaagctattaa

SEQ ID NO: 39773 - DNA, 147 bp, Escherichia coli
atgccatggactcttacagggatttgctatgaaatatcgcagcgaaaatatattgttacgaaccccgatgattatgataaatattccgatatgggtaaaaagtatgtaatagatggtgaggatcacctaattaaatattatatgtaa

SEQ ID NO: 39774 - DNA, 390 bp, Escherichia coli
atgactattaaatccatcgttatcaacggtaagaccatcctgtctacacctaacgccatcaatgagggtgtctggttcgacatgcttgaggtccatcaagctgctggcttgcctgctaacaagacgttctcacagtggcgcagccgacagtctcgtgcattagaagaggctggagaggtgtcgtttgacagtgtacagaagaccctgtgtggcagctttgtggcagtgctggcctaccttatgtgggcggaccttactctctggctggcggtggttcgttacgttgcgtctgagactatcggcgtcctgcctgaccgcttcaagtctatcgacggtgataaccccgaggtagaaatgtcagaggataacagcgagtgggaggacttctaa

SEQ ID NO: 39775 - DNA, 741 bp, Escherichia coli
atgaccatgagccagcttgaagcattacctatcgtcatcgagggtcattcattcatctgcaacgaccagcgcatgtggaacctgaacgagattcaccgagtgttaggtcttccagcaagcaagatgccgtctgagtggaataacaagattcgcacacaacttgaccgctccggaaatttccggaccgtgaatggtgacggcggtggtacatgggcgaccgaggctgggaccgtggcttatgctatgtgggtctctacagatttctacctgatggtcatcaatgctttcatctttatgcgtaacgacgcaatcgtccgagagcgtgtagcggtcaaacaggctgacgaggctaacgctaacctctccatcgcagcacctaaggcagacatctttgacggtcgtctgaccaatggtggctctgttccgtggaactgggcgtgtaaatctttgggtcttgccccgatgaaactgaaagagggcttgaagcgctccggtaagttcgtccagaagtggaaccctgacagttacgccgacgagcttcgacctcaggagaaggcgttcagtattggactattcgtcactaagtcagtcatgggtaaagacacatggcaggtgacagctaaaggctacgcatggatgcaggggaacgcccagaagtggagagagctaatagctgatggtgaccgcttaaaggctgctgagcgtcgagcacagaagcgtcttaaccgtggaggtaagtag

SEQ ID NO: 39776 - DNA, 153 bp, Escherichia coli
atggaaatgacggttgttgccggctctgtaatgacggggttggcagttaaaactgtattggatggtatgacgggtgccgtgactgtctgttttaccggtacagctttcttcgttgtggtaataactttctgttcggttgatgacttcagctag

SEQ ID NO: 39777 - DNA, 189 bp, Escherichia coli
atgaaagatagcgaattaatgacagtaaacttgccactttcacttggcgttactcgacggacgctattcaggtggatgagtaagattaaaaattggcccgttccggtgagtccggtcggtgcaagagttaagtttatccgatctgagattatggaattctacaaaaacaaaggcgctcgccagcaatga

SEQ ID NO: 39778 - DNA, 330 bp, Escherichia coli
atggtaagcgtgctggcggtgaaatcgatctccgaccaagtggcgcgggtgatttcccttgtccggcaggcggttaataacaggactatagcggcctttctggcgatcgtatccagatcggtaagtaaatcctttgccagtgcttttacgtcgtctgtagcgcgtctgtgtgtcgctggtggctcttttgctgcgcggggtaaacgttcggcaacgatagctgacactatccctcgcgtctccgcgtaccggaaaacttcccgtaaccggatcgccagtttgttacctgttgaaccgccccgggtttcctggagagtgttttatctgtga

SEQ ID NO: 39779 - DNA, 672 bp, Escherichia coli; identical to SEQ ID NO: 33817

SEQ ID NO: 39780 - DNA, 498 bp, Escherichia coli
atgagcgacacctcacctgccataccggaaagtatcgatccggcaaatcagcataaaacgctgactgccggacaacaggcggttattaagaagctatttcgccgcctgatcgtctttctgttcgtgctgtttatcttctcgttccttgatcgcatcaacatcggctttgccgggctaacaatgggacgcgacctcggtctgagcgccaccatgtttggcctcgctaccaccctgttctacgccgcttatgtcatcttcggcattcccagcaacattatgctgagtattgtcggtgcgcggcgctggatcgccaccatcatggtgctctggggcatcgcctctacggccaccatgtttgccactggccccaccagcttatacgtactgcgtatactggttggcattaccgaagccggctttctgcctggcattctgctgtatttaaccttctggttccggcctatttccgcgcccgtgccaacgccttgtttatggtag

SEQ ID NO: 39781 - DNA, 318 bp, Escherichia coli
gtgcgccctcttattttatcgattttcgcactatttcttgcgggatgtacgcacagccagcaaagtatggtcgatacatttcgcgccagccttttcgataatcaggatatcaccgtagcggatcagcagatccaggcgtttggatttgcccctatatttccagacatctgttatcacttaacccattacaagcccgctgccgcagatattcccgtggcgagcgataacccagcgcactatgcggatgccattcgttataatgctcgaacgcctctgcaaggttctttgctgccgttaacccgtctggtttgggcatga

SEQ ID NO: 39782 - DNA, 537 bp, Escherichia coli
atgcttcatttcatcaccgctaaacgtcagccagcgcagggtgccccgcaagagaaaacaccagaggttattacaccacctgagcagggcggtatctgttcaccgatgacgggagagattgtgccgctcattcacgtcgctgataccacgtttgccagtggcctgttgggtaaaggtattgccattctgccctcggttggtgaagtgcgttctccggttgcgggtcgaattgcttcgttgttcgccacattacacgccattggcattgagtcagatgatggtgtggagatcctgattcatgtcggtatcgacaccgtaaaactggacggcaaattcttttccgctcacgtcaacgtgggtgacaaggtcaatacaggcgatcggctgatttcttttgatatccctgctattcgcgaggccggatttgatctgacgacgccggtattaatcagtaatagcgatgattttacggacgtattaccccacggcacggcgcagataagcgcaggtgaaccgctgttatccatcattcgctaa

SEQ ID NO: 39783 - DNA, 330 bp, Escherichia coli
atgagtggttacaccgtcaagcctcctaccggagacaccaatgagcagacacaatttattgattattttaatctgttctacagtaagcgtggtcaggaacaaataagcatctctcagcagcttggaaattacggtacgacatttttcagtgccagtcgccaaagttactggaacacgtcacgcagcgaccagcaaatatcatttggattaaatgtgccgtttggtgatattacgacttcgctgaattacagctattccaataatatatggcaaaacgatcgggatcatttactcgctatcgggggtttatggcactctgctgccggataa

SEQ ID NO: 39784 - DNA, 1551 bp, Escherichia coli
atgaagagatcgatatcgtttcgtcccacattgctcgcgctcgtccttgccacaaatttcccggttgcgcacgccgccgtaccaaaagatatgctggtgattggtaaggccgccgatccacaaaccctcgacccggcggtaacaatagataataacgactggacagtgacctacccgtcttatcagcggctggttcagtacaaaacggacggtgataaaggctcaaccgacgttgaaggcgatctggcaagtagctggaaagcgtctgacgatcaaaaagagtggacgttcaccctgaaagataatgctaaatttgccgatggcacacctgtcactgccgaagcagtaaaactttcttttgagcggctactaaaaatcggccaggggccagcagaagcatttcccaaagatttaaagattgatgctcccgacgaacatacggtgaagtttacccttagccaaccattcgcaccgttcctctacacgctggcgaatgacggtgcatccattatcaatccggcggtcttaaaggaacatgcagcggatgatgctcgcggcttcctcgcgcaaaataccgccggttccggaccatttatgctgaaaagctggcaaaaaggtcagcaattagttctggtgccaaatccgcattacccaggcaataaactgaacttcaaacgggtatcggtaaaaattattggtgaaagtgcctcccgtcgcctgcagctctcccgtggcgacattgacattgccgatgcgctgccggtggatcaactcaacgccctgaagcaggaaaataaagtcaatgtggcagagtatccgtcactgcgcgttacctatctgtatctgaataacagcaaagcgcctcttaatcaggcggatctgcgtcgggccatttcctggtctaccgattatcagggcatggttaacggcattctgagtggtaacggaaaacagatgcgcggcccgattccggaaggcatgtggggctacgatgcgacggcaatgcaatacaaccatgacgaaacgaaagccaaagccgaatgggataaagtgacgagcaaacccaccagcctgacgtttctctactccgataacgatccgaactgggagcctattgctctggcgacacaatccagtctcaacaagctgggcatcattgtgaagctggaaaagctggcgaacgccaccatgcgcgacagagtgggtaaaggtgattacgacattgcgattggcaactggagtccggattttgccgacccgtatatgtttatgaattactggtttgagtcagacaaaaaaggtctgccgggtaaccgctcgttctatgaaaacagtgaggtcgataagttactgcgcaatgcgcttgcgaccaccgaccagacgaagcgtacccgggactaccagcaggcacagaaaatcgtcattgatgacgctgcttatgtgtacctgttccagaaaaactaccaactggcgatgaacaaagaggtgaaaggctttgtgttcaatcccatgctggaacaggtcttcaatatcaataccatgagtaaataa

SEQ ID NO: 39785 - DNA, 258 bp, Escherichia coli
atgaaaaaatgctttatttatcacgatgaaaaatcgaataaattttggtggatagattacgaaggggatagtttagctgttggatttgcccctatatttccagacatctgttatcacttaacccattacaagcccgctgccgcagatattcccgtggcgagcgataacccagcgcactatgcggatgccattcgttataatgctcgaacgcctctgcaaggttctttgctgccgttaacccgtctggtttgggcatga

SEQ ID NO: 39786 - DNA, 822 bp, Escherichia coli
gtggctatatttcattatacagatctttttggtttgaaaggtatattagactctaattctttatgggctacaaacatatatttcttaaatgataaagaggagtctaaccatggatgtgaatgctttcgaaatacaattaaaatagttgatgacaatatcattccaaaagataagaaaactattttgctcaagtctcttgacatgtatgagaaagggaggttacaaaaagaaaaagggattgataaacatgtttatagcatctctttttgtaaggaaaacgataagttaagtcagtggagaggttacggaaataaacagggtgtttgcattgagtttgatgcggatgaacttgtgagcttttctcaaaatatttatttaaattgtgttgcacatgatgttatatattcaaataataacgatgttactaagatgagtaaggagttgggggcgtttttttcttgtaatggtattaatattaaagaaaagaatgatcattttgtaacaatggcctctacgtatcaatttatatctaaatacatcccattttttaaacatcctagttttatcgaagaaaatgaatttagattggtatttactccgcgcatactaataccagatgtgcaattcagaataaataataatggtgtcatcccttatatcatcattggtaataaagatcataggaagttaccaattaaaagtattactattggcccgacaaacgattatgatttcattgaggctggtataaaaatgttcttggattcaaaaggatttagttcagtggaaattaaatcctcatcaattccattcagggggtaa

SEQ ID NO: 39787 - DNA, 243 bp, Escherichia coli
atggagaataataaactttcgcttgcagaggtgtcggaatccatgaacagtgcaataagctataataattcggcaattgaaattgcaaacttgtggtttcaattgctgtcaaacaacgaaagagatgaatcaacggcaagacttatatttgctatttctgaattgctggatatttccaccagcaagataaacaaagcattagaaaaaattcacgaattaaaacaccacacaaacggaatttaa

SEQ ID NO: 39788 - DNA, 450 bp, Escherichia coli
atgacggcgcaaatagcagcttacgggcggctggtggacgccccgcagacaaaacagaccagcaagggcacccccatgacgctggcgcgtatggcggtatcactgccctgcagccagtcggatgacggtcaggcgacgatgtggttatctgttctggcgtttggcagacaagccgacgcgctggcaaagcatcacaaaggcgaactcctgagcgtggcgggtaacatgcaggtgagtcagtggactggacagaacggtgaaacgcggcagggctggcaggttatcgcagacagcgtaatcagtgcgcgaacggtgcgaccgggcggcaaaaaaggccaacaggggcaggctactgacgcactgaacagagcaaaacaacaggcagatcagcaaggaagccatccaccagtgggagataatgagcaatggggagatgatattccgttttaa

SEQ ID NO: 39789 - DNA, 342 bp, Escherichia coli
atggctactcattacactgaactcatggctggcactgaagcactggtgactacgctggggatattttcagctaataaaggggtaattcctgcatttacgccactgatgcaggaagatgcaacaggtgcactggtggtatgggatggttcgagcgtaggtaaagcggtttatgtttccgctgtacaaatcgacaccgcgaaaaaaacacaggctcaggtctataagacaggtgtcttaaatgttgatgctctgaactggcctgagtctgtaaaagaactgtcagtaaagattgcagcgtttgttggctcaggtatttctgttcagccgctggctcgtgtgtaa

SEQ ID NO: 39790 - DNA, 156 bp, Escherichia coli
atgaaaaagcgtcgcctgcgttccccatatctccaggataaaaaggaatgtaacaatctcatgcctaagctgacgaaccaggcaggaataatcgctagggatctaagaattagcatgataatagccactaagaaattactgcgttccatgaaatag

SEQ ID NO: 39791 - DNA, 687 bp, Escherichia coli
atggaagtggactggcgcgacagcgtggtgaaaccgtttaacgagcaactggcaaataactatccgtttaatccgcgttctgcacaggatgcctcactggatgccttcgaacgcttctttaaaccggatggcatactggataccttctaccagcagaacctgaagctgtttatcgataatgacctgagtctggaggatggcgataacaacgtcattattcgcgaagatattattgcgcaactggaaactgcgcagaaaatccgtgacatcttcttcagcaaacagaacggtctgggaacatcctttgccgtggaaacggtatcgctttcaggcaataaacgccgcagtgtactgaaccttgacggtcagttagtcgattacagccagggccgtaactataccgcccatctggtctggcctaacaacatgcgcgaaggcaacgaaagtaagctgacgctcatcggcaccagcggcaacgcgccgcgcagtatcagcttcagcgggccgtgggcgcagttccgcctgttcggggccggacaactgaccggagtacaggatggcaactttaccgtgcgctttagcgtggacggtggcgcgatgacctaccgtgtgcataccgacacggaagataacccgttcagcggtgggttgttcagccagtttggtctgtcagacacactgtactga

SEQ ID NO: 39792 - DNA, 174 bp, Escherichia coli
atgcagcgtgtggccgggaaaaaccgttaccctattgatgtggtgaaaatcccgatggcggccccactgaaacaggcgtttgatgagaatgttgaccgtatccggcgtgaacgcctgcccggagaactggcatccgcgctgaaacaacaactgaggattgcgataaaacgatga

SEQ ID NO: 39793 - DNA, 261 bp, Escherichia coli
atggtgaggtactacggtttcctgagtccggtgaagcgccggttactggaagatgttgtgtacgtcataacggagacggtgagaaagacggcgatgcaaatcaggtggagagggatgtatcagcggttactgaaggttgacccgctgaagtgcatcctgtgcggaggtcagatgcgttttacggggctgaagcggggctaccgtctgacagagctggtcctgatgcatgagccactggcgcaacagcgggtgtgcggctga

SEQ ID NO: 39794 - DNA, 528 bp, Escherichia coli
gtgctatcccgcgaaagttctacattaattgctcgctatagatttgctatatctgaatactcttcaacagaggaccacattgacgaagtgtttcgacgcataaattccaatggtaaaattttatcaaaacaagaactacgaagtgcggggtgcgttagtaatttttcagagttagtaaggaaaatatcgacaattataagaggagatactacacatagcgatataatgggactgaataaaatacataacatatcaatttgcaatgatggactcgattatggaataaatatagacaatcatttctatattagaaatcatatcattagtaggcctagcattagagactctgacgatgaagagttagttgcaaatatcttgggctatatatttttagatgataagccaacatcaggatcaacatcgctcgatacattttacggtgaaggttcgacgagtcatgcaatccatacacgaactcaattagagaattacattcagacaaatggtgcagataaaattgtcaggtga

SEQ ID NO: 39795 - DNA, 183 bp, Escherichia coli
atgctctctctgttttggcaaattacccctcactttgaagggatcggagctataaaaatggtgttatccggcttcctgcattgtaggttttcgaaaaaaaacaatgggttaggtcatagtgcaaatttgcactctgccagccaacgcaatttctcgttggcgaaaatatcaggtatttactga

SEQ ID NO: 39796 - DNA, 477 bp, Escherichia coli
gtgtttgattttcacacggttctcatcaaacggttcgatgtccagattgaccgagactttacctttgtttttcgtgttcatcacaccggaagcgacttcactgagaactgcgccgagtttggtttcaaatacgccgccgtccagttctacgataaatacctgcacatcagtactgcgtacgctagccattttgctgctcctcatcataccgaccctgcaaggtcggttggtttctccacaaaacagagaagaacacctgcggtgacagccgcccggatggattgggttatgagcccgtcgtccggtgatgctcttctctgttttgtaaaaagagcggtaccagccggaagcaagtgtacaaactggtaccgccaaagcagtggctgttgtggtgccggtgctgatctccggcttgcggttatttcagactctcacgggcgtttgattgccccgccgaacagctcttttccgcaatag

SEQ ID NO: 39797 - DNA, 246 bp, Escherichia coli; identical to SEQ ID NO: 21664

SEQ ID NO: 39798 - DNA, 1452 bp, Escherichia coli
atgaaactgaaaaaactccccgggtttagtttgggacttattgctctggcggtgggtaatgcatatgcaacacaattgttggatgattatagtataatttcctatatgactgatgaagaatcgccgattgaaatcaaagataataatccgataagtaatggagagtatctaaccactgaagacgaaagccatgctgtgaaagtggatgacggtgtaactggatatataaataatgccagtgtgatgactagtggtgatggatcttatggtatttctgttgatagtcaaaacaaagtattatatataagcgatagcgatattaagacctctggaagcgtatctgacaaagaaaatggagggataacagccagcgcagtagtcagtgaatttggtggcaccatctttatgaatggtgataattcagtcgagtcgggtggggcatattcagcgggacttttaagccaggttaatgattctgaaaagatggtaaataacacccgtcttgaaaccacagataaaacgaacattgttacctctggggaaaatgcagtaggtgttcttgcatgttcaagtcctggagagtctcgaacatgtgtcgatgctgtagatgatgaagttagtgattctaacagttacgaagttattagccgtgctgatttaaaaatgaatggtggttccataacaactaatggcattaatagctatggtgcttatgctaatgggaaaaaagcatatattaatttagattatgtggcacttgaaactgtggctgatggaagttatgcagttgctattcgacaaggtaacattgatataaaaaatagttctattacaacaacaggcactaaagcccccattgcaaaaatatacaatggtggagagttatttttttccaatgtcaccgcggtatcaaaacaagataaaggaatatcaattgatgcatcaaatatcgattctcaagccaaaatagcactattaagtgttgaactttcaagtgctttggatagtattgatgttaacaaaactacaacggatgtaagtatccttaatcgaagtattatcacacctggtaataatgttctggttaataatactggaggtgacttaaacataatttcgtccgactctattctaaatggagcgactaaactcgtcagcggcacaaccacgctgaagctttcagaaaatacaatctggaatatgaaagatgactccgttgttacccatctgactaattcagacagtattatcaatctttcgtatgatgatggtcaaacatttacccaaggaaaaacattaaccgtaaaaggtaattatgtcggtaataatggtcagcttaatatccgcaccgtattaggtgatgataaatcggctacggacagacttattgttgagggtaatacttcgggttcaactaccgtctatgtgaaaaatgatcttacccagcaatag

SEQ ID NO: 39799 - DNA, 597 bp, Escherichia coli
atgaaactggacaaaaacgaaaacatagaacgagttgatattataacttataactatgacatttatcttgagcgccttcttgatttacttaatatcagatttgacatcccaaacatatctgacgggaatgcaaagtttaaaatatacaaaccacatggctctattagcttcttgtatgaaggatatatgtcaaaagataactacaatatccaaaaagagttatctttaaataatggcgacatatcaaaattcgaatgccggcatgaaaacttaagcctttacatgccattaattccaataataccgccagcaggagaagctcatcgttatgcccaaaactgggctaattcaattaaagagtctattgaagcgacgatggagtcgtacaacccaaacgatgatttcttcatttgtggtatttcatattggcatgttgatcgtgccgaaattgatgcaataatacgcaaaataaacagtgacgttaatgttagaatgattaatccaggaaatgttgatggtttaagtgctatacttggaatggtatttaatagttatgttcatcattcatcatctgaagttttaaaggagcttgcctaa

SEQ ID NO: 39800 - DNA, 1029 bp, Escherichia coli
atggaaattttaaagcgggattcaaacagtattaatattgcttccttttgggagggcttttcattaggcaaatttaattttgatcctccttatcaaagagatagtgtttgggatgaagaaaaacaatcattctttatagatagtatactacgtaactatccaattccccctatatttctccatcaaaaaattgatgatgacaccggaagaatcacgtttgaagttgttgacggaaaacagaggctcactgccattgttaattttatcaatggccaaataacatcagcaagtgaggaagaagatgatgaattgactggtgtgtttttttccgatttatcaacttctaaatatgcagaagttaaaaaattattctggcgatatcagatgcctatagagtacattgatactgaagacgaaagaataattgatagtattttcgacaggcttaacagaaatggtgaacgacttaacggacaagagttaaggaatgccaaatatcatgatactgatttttataaaaaaatagtagaatattcacaacgtgaatattggcaaaaattgctagagcacgttgataagaagagaatggaagacaaagagtttgtatctgaattgatattcacgatccttgaggatgaagtatttggtgcaactcaagacataattgatagtctttacgagaagtattgcaccaagaatggtgatgaaacaaatgaggcattttctatttttgaaaaaacaactgactatttagttgatatgaatattgatttcaaaagtcataaagcaagcggtgttagtcacttatacggaatcttcagttatgcactttattgcagtaacaataatgttcctgtagaagaagcgtcaaatagactttccaccttcctggatagcctgtgggaaaaagatacacaacataatgcggaattaagaagagaatatagaaaaactatgagttctagcacaaaaagcaaaacccaacgctcacgtagaattgaagtgcttttaaatctacttcacgattaa

SEQ ID NO: 39801 - DNA, 777 bp, Escherichia coli
atgagcgataaaaagaagcgcagtatggcgggtttgccgtggatcgcggcgatggccttcttcatgcaggcacttgatgccactattcttaataccgccttacccgcaatcgctcatagccttaatcgttctcctctcgcgatgcaatcagccatcatcagttatacgctgacggtggcgatgcttattccggtaagcggatggctagccgatcgcttcggtacgcgtcgcatttttacccttgccgtgagtctgttcacattgggttctctggcctgcgcactttctaattcgctaccacagctggttgtcttccgggttattcaggggataggcggcgcaatgatgatgcctgttgctcggctggccttactgcgcgcttatcctcgtaatgaacttcttccagtattgaattttgtcgccatgccgggtctggtggggccaattttaggccccgttcttggcggcgtgctggtcacctgggcaacctggcactggatatttttaatcaatatccccataggtattgcgggccttctttacgcgcgcaaacatatgcccaatttcaccaccgcacgacgcagattcgatatcactggctttttgctgtttggcctcagccttgttctcttctcaagcggaatagagctattcggggaaaagattgtcgccagctggattgccttgacggtaattgtcaccagcatcgggttactgcttctctatattctccatgcacgacgcacgccaaacccattaattagactggccccctga

SEQ ID NO: 39802 - DNA, 384 bp, Escherichia coli
atgccggaagagaaactacagacgctttcattgcaggtcattaacggcagtgagctggaaagcgggcgggcggcgcgctgtctattcacacagcagggaaatgtcggccatggccccgaatgccactggtcggtacaggatcgtcagcagagcattccggcccaggcttttaccgttatcctgcacgatggcacattttgtctgcgcccgcagacggcacaactgtggctgaatcaggcaaaagtcacagcaacatcagacctaatacagttgcgccagggcgatgagatccagatcggacggctgatggtgagggttcatctgaaccggggagatattcccataagcgctaacttaagggttgtggtattacgcctgatatga

SEQ ID NO: 39803 - DNA, 960 bp, Escherichia coli
atggcggagctgttgcaccgcctggcaaagggtgaaaaggggacgccagaattatccctgcgtgacgatccggcacaggaaaccctgcgtttcagcgccgatgccagccttgccttcccgtgcagtgatatcagtgcgctgaaacgggatacatcaggggcattcaggatgaccaccacctttatggggttacaggggagccagtcgcctctccccggttattacctcgatcacctggcctggaaagcggtacatgaacaaagtccggtaggtgattttctggatatgttcagccaccgcctgacccagtttgtctggcatatctggcgtaagtaccgctatcacatcagttttcgtaacggcggtgtggatgcgttctcgcagcgcatgtactcccttgtcgggctgggccaccgccagcttcgcgataagctggcgattaatcacagcaaaatgctggcgtattccgggatcctggcaaatccgggacgatccccggaaataatctgtggcctggtgtcccactgctttgatttgtcagaagtgacgctgcaaaactggcaacgtcgcaaggtggatattgaaccggatcagcaaaatagtctggggagctattctcttaaaaatggcgaaaaactggcgggaagatcggtactgggcaactttgttctgggtacacgagtgcccgatctcagcggaaaattccagctcagtattaccagcctgacccgaaaacagttcctctcttttctgccgtccggcgaaaacttcctgccactgacgatgttcgtgtccttcatcctgcgcgatcagcttgcctgggacttacatctggggctggcgccggagcaggtgggcgcaatgcgcctgggtgataacaaaagtgcgctgctgggctggaccagcttcctcggcacaccggaagaacgaccctcagtcaccatcagggtacggtcgtaa

SEQ ID NO: 39804 - DNA, 288 bp, Escherichia coli
gtgaagggtatgcggaacattcgcaggggtaagaactttgctggtgtagtccagtatgcattgaagcccggagtacaccataaaagcgatccagttgtcattggtgggaacatgttaagtgattcagcctttgaactgatcgctgaatttgatggcactaaaccacttcgcccagatgttcagaaggccgtttggcacaactcgcttcgattacccgatggtgaatcactaacggctaaaaaatggtcaagcatcgcagatgaatatatgaggagaatgggattctga

SEQ ID NO: 39805 - DNA, 387 bp, Escherichia coli
gtgggctttgatgctaatggtgacgctattaaggcaacaaaagcggctgcggcagtccgtaaaatcacgattgaagcaaaccagaccgctgattttgaagataatgacttcagcggcaaacgctctttgatggagtctgtcgaagcgaaaaccaaagacattatgccagtagcatttgagtttaaatgcgttccgtttgaaggcctgaaagaacgtccgtttaaattacgcctcagcattatcactggtgatcgccctgtactggttctgcgcattattcagctggaagcagtgcaggaagaaatggctaacgaatttcgtgatctgcttgttgaaaaattcaaagacagcaaagtagaaacctttattggtactttcaccgcctga

SEQ ID NO: 39806 - DNA, 387 bp, Escherichia coli
gtgggctttgatgctaatggtgacgccattcaggcaaccaaagcggctgcggcgatccgtaaaatcacaattgaagcgaaccagaccgctgattttgaagataatgacttcagcggcaaacgctccctgatggagtctgtcgaagcgaagaccaaagacattatgccagtgacatttgaatttaaatgcgttccgtttgaaggtctgaaagaacgtccgtttaaattacgcctcagcattatcactggcgatcgtcctgtactggttctgcgcattattcagctggaagcggtgcaggaagaaatggctaacgaatttcgtgatctgcttgttgagaaattcaaagacagcaaagtagaaacctttattggtactttcaccgcctga

SEQ ID NO: 39807 - DNA, 306 bp, Escherichia coli
atgaaaacaaatataaaagtatttacatcgacaggtgaattgaccactcttggccgtgaactgggcaaaggtggtgaaggcgcggtttatgatatcgaggagtttgtcgatagcgtcgccaagatttatcacacgccgccacccgcctcaaaacaggacaaacttgcctttatggctgcgacagctgacgcgcagttgttgaattatgtcgcctggccgcaggcaacgcttcacggtggacgaggcggaaaagttatcggttttatgatgccaaaagtttctggtaaagtgatcctacccacgtaa

SEQ ID NO: 39808 - DNA, 231 bp, Escherichia coli
atgagcaatatttttttggaagatagtgtgttcggcacattatatatgcaaaaaatttatgagttcttcgaagagccaaaacttttctctgtgtctaatgaaataaatagcatgtttgttgtctattggattggcgacgaagaagattatgataaatggattatcataccgatttcaaaagataggttggagcacttcgagcgtaaaagaattgaaaataaatgtttctga

SEQ ID NO: 39809 - DNA, 204 bp, Escherichia coli; identical to SEQ ID NO: 8890

SEQ ID NO: 39810 - DNA, 957 bp, Escherichia coli
atgaaggcgtttacctatgaacgagtgaacaccccggccgaggcggcacttagcgctcagcgcgtacccggcgcaaaatttatcgctggcgggaccaatctgctggacctgatgaagctggaaattgaaacgccaacccaccttatcgatgtgaacgggctcgggctcgataagattgaagtgatcgacgcgggtgggctgcgcatcggcgcactggtacggaacaccgacctggcagctcacgagcgcgtgcgtcgtgattacgcggtactctcccgcgccctgctcgctggcgcgtctggtcagttacgcaatcaggcaaccaccgcaggtaatctgctccagcgcacgcgctgcccctatttttacgacaccaatcagccctgcaataagcgcctgcccgggagcggctgcgcggcacttgaaggctttagccgtcagcacgcggtggtaggcgtaagcgaagcctgcattgccacccatccgagcgatatggcggtcgcaatgcggttgctggatgcggtggtggaaaccatcacgccggagggaaagactcgcagtatcacactggctgatttttatcaccctccgggaaaaacgccgcacattgaaaccgacctgcttcccggtgagcttatcgttgcggtgacgttacctccgccgctcggcggaaaacatatttaccgtaaggtgcgcgatcgcgcctcctacgcctttgccctggtatcggtcgcagcgattattcagcctgacggcagcgggcgcgtcgcgctgggcggagtagcacataagccctggcgcattgaggctgcggatgctcagctatcccagggggcgcaggccgtatatgacgcgctgttcgccagcgcccatcccaccgctgaaaacacctttaaactcctgttggcgaagcgaacgcttgcctccgtactggctgaagcgagggcacaggcatga

SEQ ID NO: 39811 - DNA, 1755 bp, Escherichia coli
atgaaactggcaccgaacgtaaaaaaacagcctcgcggaataaaacacgaacaaaccgaagtgatcatttttgcgggtagtgatgcctggtcacacgcgaaacagtggcaggaacacgacgcgcgtacagccggagataatgagcctcctgtgtggcttggagagcagcagctatccgaactggataatctacagattgtaccggaaggccgaacatacgctcgtatctacagagccggacatcttgcgcctgtaatgattaaggcgattggtcagaatctggctgcggcaggcgtacaggatgcaaatttttaccctgagggaatgcacggtaagaaggtggagaactggcgcgaatatctggcccgtgaacgccagaatctttctgatgggctggttattgagcttccggtaaagcaaaaaatgcagctttcgcagatggcggacagtgagcgcgcgcagctgcttgtcgatcgctttgatagcgtttgtgtgcatccggaaagtgaaatcatccacgtctggcgcggcggggtatggtgtccggtcagcacaatggaactgagccgcgaaatggtggcgatttattcagaacataaagccactttcagcaagcgcgtaatcagtaacgccattgaagcgttaaaagttattgccgaaccaatgggcgagccgtccggtgatttgctgccgttcgctaatggcgtgcttgacctgaaaacaggggaattttccccgcactcgcctgataactggatcaccacacacaacggcattgagtacacgccgccagtaccaggggagaatatccgcgacaacgcgccaaactttcataaatggcttgatcacgcagccggaaaagacccgggcaagatgatgcgcatatgtgccgcgctatacatgattatggcgaaccggtacgactggcagatgtttattgaggccacaggagacggcgggagcggcaagagtacatttacgcacatagccagccttctggcagggaaacagaacacagtaagcgctgagatgacatcgcttgatgatgctggtgggcgtgcgcaggttgtcgggagtcggcttattgtcctggcagaccagccgaaatatacaggcgaaggcacgggcatcaagaaaatcacgggcggcgaccccgtggaaattaacccgaaatatgaaaagcgtttcacaacggtaatcagggcggttgtgctggcaaccaataataacccgatgatattcaccgaacgggccggaggcgtggcacgtcgtcgcgtgattttccgtttcgacaatatcgtcagtgaggccgaaaaagacagggaactaccggaaaagattgcggctgaaatccccgtcattatccgccgattactggcgaactttgccgaccctgaaaaggcgcgggctttactactggaacagcgtgacggcgatgaagctctggcgataaagcagcaaacggatccggttattgagttttgccagttcctgaattttctggaggaagcgcgtggcctgatgatgggcggcggtggtgattccgtgaagtacacaaccaggaacagcctttaccgtgtctatctggcgtttatggcttacgcaggcaggaccaaaccgctgaacgtaaatgactttggcaaggctatgaagcccgccgcgaaagtttacggacatgaatatattacgcggaaagttaagggggtaacgcagactaacgcaataacaacagacgattgcgacgcgtttttataa

SEQ ID NO: 39812 - DNA, 765 bp, Escherichia coli
ttgaccggatttcaacaacgcatcgtaaccgaaaacacccgtctgtactgcggcgacgcactgacagtattgccacatattgagccggacagtgtggacgcgctcatcaccgacccgccctacagttccggcgcgacacacaaagccggacgcacctgccagggcagccacgcaaaatatctaaacgatgagagtcttcatcactttgagggcttcgcaggtgaaaacatggatgcccgttcatgggcatactggatgcagttgtggatgatgcaggcataccacgccgtcaggccgggagggtatgctctggtattttccgactggcgacaattacccgccctgaccgatgcttttcaggccagtggctttacctggcgcggcattgttgtctggaacaaaggaagggcggcgcgagcgcctcacaccgggtatttccggcatcagtgcgaattcatggtctggggcagcaaaggtcatctgggtaaatccccgaacggcccgtttgacggctgcatgacacaccaggttaaaccacaaaagaaactgcatccgaccggaaaaccggaagagctgatggcagagttggtcaggacagcaggcgacggcggcacaatccttgacccgttcatgggttcgggaaccacgggcgtagctgcactgaaagcaggctgcaaattcatcggcatcgagacaagcccgcactattttgatgttgctgtagaacgactgcgtcaggcgcagttgatccccgcagcagcataa

SEQ ID NO: 39813 - DNA, 258 bp, Escherichia coli
gtgtcttttccgtgtcctttttgtggtgcgagcacacgcacccgcaccagtcgcgcagcgaacgataccggaactgtccgctggaaactctgccagtgcaacaacccggaatgcagtctctccttctcgacgctggagagtttcgacaaactcacggttaaacgttatggcagcacttcacaggatattccgtggcaaagcctgcctgcgtctcaccggggtgatgcgcagttgtcactgccgtttccggtaatgtga

SEQ ID NO: 39814 - DNA, 1788 bp, Escherichia coli
atgactgtaaaatatttttctgttctgactgacaaaggcgcagcccgtctggcaagggcggttgccagcggctcgaaaatatccatcaccaccatgaaactgggggatggcggcggcagcctgccggaaccggctgcttccatggaaaacctggtgaacacggtatacagtgccccactgaatcaactgagcgtcagcgcgtccgatgccagccagcttgtcgccgagatgattatcccggaggataaaggggggttctggatccgcgagattgggctttttgacagcgacggcgtgatgattgccgtggcgaactgccccgaaacctacaagcccgtactcgccgagggaagcgggcgcacgcagacaattcgcatgattgttgtggtttccagtgcttcatccgtcgagctgaaagttgatccctctgtcgtgctcgccacccgcgcctatgttgaagaatatgttgcacaggaaaaggactctgtaccgccgctgcctgatgtatggataccgtttaacgattcactggatatgcttacggggttcgctccgggctataaaaaaatcaccattggtgatgatgtggttcaggttgccagtgataaacaggttagtttcacgcgcgcatcaacggcaacctatatcaataaatctggtgaactgaaaacggcggaaattaatgagccgcgatttgagcgcgaaggtctgctgattgaggggcaaagaacaaactacatgctgaattcggaaactccggccagctggggcaagtcagtaagtatggatgtgcccgaaaccgggacagatagtttcgggtttacttatgggaagtttgtctgcaaggattccatcatagggcaaacctcggccattaatatggcatcagttgctgcaacagacgcggttgatgtttcaggcgataataagtacgtgacaacctcgtgccgtttcaaaacagaacgacaggtaagattgcgcatcaggtttgacaggtatgatggtagtacaacagcttttcttggcgatgtgtacattgatgcgcaatcacttgaagtaaatatgacaggcggtgcttctggcagaattacggcacgagtcagaaaggataagatgacaggctggatttttgctgaggcaacaattgaggcaattgatggtgagttaaaagtaggctctcagatacagtactcccccaggcagggtgagggaacggtatctggcgactatatttatctgtccaccccacaagtcgaaaacggaccgtgtgcgtcatcatttattatttcaggggccagcgcaacgacaagagccagtgatttggttagtattcccactaaaaataacctgtattcgcttccatttagttttttagttgaagtccataaagaatgggatgttgcgccaaatgcagcacctcgcgtgtgggatatagcggcagccaataccgggcaatcagcaatcgcagcaatcaacagaggtagcggtaagttatatatgagtctgtcagacccctcaggaacatatgttaatagtgcggcggcagatgtatttgcacaaaatgccacgtttggatgtattgcaaaatctgatggtaagtttcatgtagtgacgaatggtgaagcggttagtgaagtttattgtgaatataatggtgtgaccgctgataagaatatccgatttggagggcagacaaatactggagaacgacatctgtttggtcacattcgtaatttccgtatatggcacaaagaattaaatgacaggcaattaagagagaccgtatga

SEQ ID NO: 39815 - DNA, 504 bp, Escherichia coli
gtgggacactttgaggatttgtgttgcatcaaccgggatgtggaaagaaagcgttgtcgggcagctgaaatcttacgggatgaggcccgcaggctggtcgggttttatgaggactggctggggcttccgtcactgtaccgcgaacacgaacacggcgagtcgcggccttatgtggaaacaggactgccccaccagtatgcaaaagaattccgcgcctgttctgttaatcaaatacctgtcgcagcagacggtattttccatgtggccgtgcgtacatggattgaatcactgtcgggtattgagccggttgatattgttgttgcgtttgagctgcattcggtgaacgaagctcgcaccacgctgaaagtcaccgtggaggatgatatttctgttcgcgtgagtattactgcgccggaagacaggaaatggacggaggtgacgaaaagcatgaaaagacacatcgccgcccgcctgaaaaaacgtactccttttgcacttcgttaa

SEQ ID NO: 39816 - DNA, 1113 bp, Escherichia coli
gtgttttacggttctaatttaagattggctcgtctgtatcacgagctatcactagagcaagtagccgagcgggtcaataagacccgccagtatatccaacggctagaatctggcacagcagtgccaacagctgacctcacgaataaattagctgccgtcttgctggtaacgcctgagttttttgaaatgcaacagcaatccccggtcaatgaggagcttgttcatttccgtaaacgtagctctactagaatgggaacaaaattagcaacgctcgctaaagctgagctatatcggcgtcttattgaagtatttgaggaatatctggatttaccagcagtaagattcccagaaatgaaagtaaatacgcaagaggatattgaaaaagctgccgaaaaatgtcgccgtgattggggtttagggtttgggcccatagataacatgacacggttagctgaaaagttaggcgcattcgttacttcttttgattctgtttcagatgatgtagatgcactttcagtcccattaagtcgcccattcattgtacggaatatggctaaaaagtctccttgccgtcagcgttttgatattgctcatgaagtcgcgcacttaattttacatgggggaatttctaccggagacagagaaactgagtctcaagctaaccgttttgcatcagcattacttttaccaagaacagccatggctaaatattttccacgccctgtcggtggcaggatcaactggcacggattaagccaattcaaattaacgtggaaagtaagcaaagcagcaatcatctatagagcacatcaattatcactactaacagatgctcaatataaaacagcttttttcggactaaaacgtaagggagaagcaattgatgaaaaagaagactgtctaatacctaacgagaaaccagaactatttacaaaagctctgcaatgccttttgacagatttatctgtagatgttcaatcattagctcgtagattaaacataacccctaccatgcttgcagaactcgtaaatgactacactttgacgacaacaccaaatgtcgctacagaaaatgtgatttcaatgtttgcatatcggataaaaacaagctag

SEQ ID NO: 39817 - DNA, 600 bp, Escherichia coli
atgtctaagaagccgttaccgtggcagtttcacccacagttaacagaagatcgcttaacgattattgctaaagaattgttacaagtcctgaacgatacttatgctcagctttctacgccattagataataactatacgcgttctacttgtacgtttggtcgccagtggaagctacttattgatttgtgcctcagtggaaaatatgagtggcttcatcttactaatgcgggtttagacatcacttttacaattgatacaatccctgttcgtttttttacagatgaccctgctaaccctaaaaaagatggtttttatcgcagaaatctcgcggatcagcttttttctccagaagtagatattcccgttctacatcggtttgttgtcgagaagcctgaatttgaaggggaaggagcaaaagtacattttattggctataacgctttagatgaagaagtatccagatggacgtataacgaagaaccgacaatcacattgttgcattctacagatgatactccaccggaaccagttaagatcgaacttgatgaaattcgcccttctcttcccgaaaaggaagaaaaagaaaacaaaagcgattaa

SEQ ID NO: 39818 - DNA, 315 bp, Escherichia coli
atgacaacatcaaccaagcggataagtttctatctgaagccagctgccgtcaatagtgaacgggaggcgtgtaattacctcgacagcctgccagcctctgaacgcagccgcgcgcaacgtgcagcctttctggcgggactggcactcataaagcacgatccagcttttgcttactggttggctgaatggccggaaaaagagactatgctaatcagcgattacattcgaaacgtacaagttacctcaccaacaaccgttagcgatcattgtactagccaaatgaaaaagaatattcaggcattttttcctgaataa

SEQ ID NO: 39819 - DNA, 231 bp, Escherichia coli
atgacagcaatcagaagctatccacgtaaaccaggcaaggcactcgccacactgaaaagtcttcttcactccgaagtatgtgatttttgcgcggggctcggttcaccaggtgagccagtctcacctgcagcgattcaggcagaactcctgatgcgcctcgatgcggtatttgatttttacattcatatgccaccagagaccagcacagcatccgttgccgtaaaacgctga

SEQ ID NO: 39820 - DNA, 213 bp, Escherichia coli
atggcttttgaggtgtacaaggttgtccgtttcacggttgatggtcgcaactatgacgtggatgagcgcctgatagacatgaacagaaccgccccatcacgcactgacccaaacgtccaccatatctggtttaaggacggggaaacccattttcgcgccaccgacgtgacgcacgtaaatctcatctggcaaacacgggagaaacagcaatga

SEQ ID NO: 39821 - DNA, 345 bp, Escherichia coli
gtgcgcatgacacatccactggacaaactgaaatatttcaaagcgttcatggctcacacagccagagcgtttgcagggttttacgcgtatccatgcagaacagaatgggatgcccttctgcaacgaattttaaaggaagggagcctggtggccattgacgagttcaccgcgaaatttcagttcaacgataacgaatatgaaatctggattgctaaccgatggtacgcattcggccatctgcgccgcctgaacggcctcttgtccgacgaagcattccgcccctgcttcagaaccatgtatcgcctgcatcagatggttcagacatttctggctgcggaggcgtaa

SEQ ID NO: 39822 - DNA, 375 bp, Escherichia coli
atgaatgcaaaagaagaaggcattatttttggtctgaaggaaatcgcaaaggtggaaaacgaaacttcaaaagcatgcataaatgccggagatattggactcggaatctatgcaatgacggcagccaaactgataaccgaagctgtttcgatcattgaacaacaggccagagaaattaaagccctgaaatcaggaaacgccagcgaggctgcattaacgctcaacgactgcgttaatcatcttgttcataccgcccattccacatacccggatgcagtcctgaaaatcatcaagaaaaacacctgcatcgttgctccggttgctcctggccttctcgtcgaattgcccaaagagcaggttttcatcacaaagtaa

SEQ ID NO: 39823 - DNA, 243 bp, Escherichia coli
atggacgaagaatataaaaaactcatcaacaaagctcttgagcgtttttactttcgcttaagcgcatcgggcgctcatgctgaacgcgcagcccgcgagtcattaaacagagccatcaggagtctgttcgacacagctttttacattgatgacccggacgcactcgacgaactttcaaaactcgtctgcgccgcagaaaacggggagcatatcgaaccgtataaggtggggaatatcgcatga

SEQ ID NO: 39824 - DNA, 258 bp, Escherichia coli
atgacagcctcaacaacaggcgaaaaagcaacaccggaggcggtctaccgatgtcttgctcatcgagtggtcacgcactgcgctttcaaaatgcttaacggagaaagaagtccagccaaagcaaaacgccaactgattaacggactggagtcattaagagaggttgccgcagccgcaaatgattatccaccgttcttcatgattaacgaaatgattgaacagattaaatccggtaaatcaatcgagcatcttctttaa

SEQ ID NO: 39825 - DNA, 354 bp, Escherichia coli
atgaataagcaacagcgtaattcttcacaacaacgttcccgcaacggaacgaaacgccacaccaaccgcttcgctaccagtacatcacacaataacacgcgctacagcctgagcgatacacacgcgacgccgggtggccacgctgtaaaacaaatcgacgaacatgccttgctgattgagaaagccggaattgtgattcacaaatgcccgcgcaatccgtttaccggaaaccgcatgtttgcactgagcatcggcaacaatcagttcggacaggatttcacattatacgaagcactacgcaccgctgatcgcttaattgcaggccgtagttttcagcacccgtggagctattga

SEQ ID NO: 39826 - DNA, 207 bp, Escherichia coli
atgaccaacaacatcaccaatatcattttgaccctcgttctttttgaagtgggcgtggtagtgatttggctttttcgcaaattaacagggcatgaggaacgctttatggctctcaatgttgaatacatcactgcttatgccagagggctttttccggctgccattggggcaatgatcatggtgtttgttatctggtttatcgggtaa

SEQ ID NO: 39827 - DNA, 486 bp, Escherichia coli
atgacagaacgacgagatctccaacaaatcacgactcatcaacattgtcgtcaatatccgctggacgggcatctggccatgaatatctgcaagatgacagcccgccagataaaccgcattcgagacatgagcttgagtgagttacgcaagcaagagtacgtatccagggaagaatttgcctatatcactgggcgcactttcaaggccgtagggaactacctggaccgcaatgaggatcttgtccgcagggagtacgtaacacctaacgccgcatacccgaaacgttatgcgaaactccagtattactgggcgacaatccttaacaacaaggcgtccatcacgccgcaggaacagcaagcaatcagagaactacggagccagcagaaaacacacagaaaattaacgggggtgaatctggaaatcagagaaaaacgaaaaaagccccagcccgaaggtcacaggagatctgaacgcgtctccgcttaa

SEQ ID NO: 39828 - DNA, 300 bp, Escherichia coli
atgtcaatttcacaaggcgaaaagttagctcttatacgtgattctgaaagactaacaaaacaacaacttgttgatttagttgggctgaattacacgacctatcacggatatgagcgagataaatcaaaaatgactttagaggctgcaatcaagatttttgggcatcctcgttttaacaagtatcaggactggtttatgtatgaccgtattgatcctgctcgtgggcaaattgccccggctctcgcacactgtgggccgagcgaaacaacatctaccccatccgggaaactaactggttaa

SEQ ID NO: 39829 - DNA, 1017 bp, Escherichia coli
atgtcaattaagaagctcgaagatggtcgctatatcgtggacatgaggctgaacggaggcaaagggaagcgcgtccgtcgcaaatttgaaaaaagaagtcaggctctggcgtttgagcgcgaaattcttgcgagccgcccctcacctgattgttttggcaatctgattgataagcgtcatcttagcgattttattgctatctggtggaggctgattggccgccataaggattatgcgaaccgcaggttgagtaatcttcggtgtatttgccttgatatgggggacccaatgatgtgtgagattgatgagcgtatgattgccgattacagatcgcgccgtcttgatagtggcatcaaggcatcaacaatcaaccacgatctctttgctcttagtgctgtactgaaagcaatgactgagattggggaatatcacggcggtaatccggtgttagctcttcctcgcttaaaagaaaaagtgcccgaaatgtcttatctgacaacagaggaaatagagagattcctctctctctgtggagaaaaaatagactactaccgcatggctgttttgttgctttccacaggggcgcggtggaatgaggcttaccaattgatggctgaacatattgtcggtaacaaggttgttttcaacttcacgaagaatggcaagcgtcgtgtggttcccgtttctgacgatgttgtccggttggtgaaagatcgcaatgaggggcgactgttccgcgtgagttataagtggttccgtttaaaactcaaggaggctaagccgaacctgccagatgggcaagcggttcacgttcttagacacacctttgctactcatttcatgatgaacggcgggaatattgtttcgctgcaaagaatactcggtcatgcagatatatcgcagacgatgacttatgcgcatttttcgcctgaatatctggaggacgccgtgttgcataatccattgcagagaatgccactcgagtgtccaaactttgagaaaaaaagggaaagttaa

SEQ ID NO: 39830 - DNA, 294 bp, Escherichia coli
atgataagaggtgtagggtcgtttattactatggctgtactattgttggctgcgggatgtatggctggttacatttacggcggtatcccgtggtctacctattacgcagttggtagagccgttaaggcgttttggtgggcctcaggagctttattcatttctggcataatataccgtgttatttttaaccggttgtcgaccgtgtgcggtattcttttctgcgtgacaatcgtagtcgctctggtacttactggttttcactatgccgtcggtggtagtgcttggtggcgttga

SEQ ID NO: 39831 - DNA, 630 bp, Escherichia coli
atggcagttccgtatgaaccagcggagtttaataaagaggcttttaactgcccgtactgtcaggcttatgctaagcaaaagtgggaacaattatatccttactatgaagaaatggctttcccggtgcatgtgtcacaatgtgagcgctgtgaggaatacgcatattggttcgaagagtctctcctgattcctgcttctgcgaatgttgaaatgccgaacccagacatgccggaggattgtaagtccgactatatggaagccaggagcatcgtcaatctgtctcctaaaggggccgctgcacttctccgtctgtgcctgcagaaactgatggtccacttgggcgagccggggaaaaacattaacgacgacattaagtctctcgtggaaaaagggttacctccccgcatccagcaagcagcggacatctgtcgtatcgttggtaaccaagctgtccaccccggggagattagccttgaggatgacccgcagttaacgcatggtctctttaagctgttgaatatcatagtcgatgaccgtattactagaccaaaagagatcgaggcgatgttccagagtatgcctgagggaccacggcagggcatcgaaaagcgcgacaaaaagacagcttag

SEQ ID NO: 39832 - DNA, 324 bp, Escherichia coli
atgatagataagataatactggatataacactccgttttatgcatctaagaaaaaaaacgcctcgtgcttttaatgcatatttaactgaggcacattttttcaaaattaaattattttgtcctaaagaggatagggacgatattattccagttactgataataggaagaaaaccccaccagcctcactcatattgagcgttcttgatatcatcacactcgttgacagcgcaagtatagcgccgaatatcctcaacacaaatacagttttaattgtaaacattaacttctcgttatttacccaaagacctctttgcaacaaataa

SEQ ID NO: 39833 - DNA, 1686 bp, Escherichia coli
atgagcattattcacgtaaatcaaattggcagtaaagttaaggcattatttgctgataaaattgataacagtgatctcaatcataaagataaagaaatacaaactaaaatattgactcgttgtctttctgcttacgctgttttttgtattggagatacctcgatagatgaggctgcgtcagcagttgttgatggtgccgatgataatggtatcgatgcaattcattattctccttcaagtaagaggatgattattgttcaatctaaatggaaaaaggatggaacaggagaacctgataatggtgatttgaggaagtttaaagatggtgtattagacctcattaatcttgagcttgataaatttaataacaaagtaaatctaaaaaaacagatgattgaaacagctttgggtgagtttgatacaaaatttgatcttgttttaattcacacaggtgcgaatactctaagcaaacataaccaacaagtaatggattcaattcttaatgaattaaacgatgccggtgatggaaccagtgaggatgttgttagtttccaccatctgaatcaagcgataattcatagtggtcttgcctctggtatggatggggaaccaatcgatttggaaatcggtctttcacaatggggaaaaattgaagagccacatcaaggttttttcgggattgtagctggtgaggaggttgcaaattggtggttaaaaaaagggaaaagactatttgccaaaaatattaggcaaatgttaggtgctactgaagttaatgatgaggttaagagaacaattgaggaacaacctgagaatttttggtattacaataatggtataactattgttgctgaatctataaaaaaatcgatggttggtggaaatagtagagatattggttcgtttaaagcgagtaatataagcattgttaatggtgctcagactgtaagcgtaattggtaaatattcgcaagaaggaggggcaaatcttgctaaattgcgtttacctatccgattgatttcattagaaggtgcgccagaagactttggtgcaaatgtgacaaaaactaataaccgtcaaaatagaatcgaaagcagagactttgtttccttagatgatgagcaaatccggttaaaaagagaactatccttggaggggattgagtataatatagtaaggagtgagaatgttaagacatcggctagcataatcgatttatctgaagcgaccattgcattggcttgtgcgtctacgcaggtgggtttagcagttcaagcgaaaagagaaataggtcgattctatgacaatcttaataaagcgccatataaaacaattttcaacccgcaaaccaatggtatttatttacgaaatacggtatttgcattacgaaaaatagatgaaataattggcgaaatgattgcgaacatacctaaaaaatctggtaaagagtatggtgttcttgttcatgggaataggatgttggcatttttggtttttagaaagttgatgatacataaaatcgcaaataactttgattttgatatgtcttcaattgattggtatgaaaccacatcagatatgcttgagaaattgatgtcggaaattgaagagaattataaggataagtttcttgctactttatttaagaacgcaagtatttgtaaggctatatccgagaaaatataa

SEQ ID NO: 39834 - DNA, 564 bp, Escherichia coli
atgagagagaaaattcttaagggggcggtagagctctttctggaaagaggtatcgacaaggtttcaacacgtgatttgacggaatatttaggaatatcgcgcagtcacatttatcactattttaaagactggcagtccctgagtctggaggccgttgaaggctttcttaataatgaactggaagagttctgcgccatcattgagccgttatctgcaagagtgaaattaagagagtttgttgatggtctgattgcagataaacctgatccgacccgtaagctatacagctctttgtggttgctttccagccatgatgaaaattataaatgtctggtacaggcttgtctggcgaagtggcagcaggtactcacggacataattcagtgtgggatggacgaacagacattccgtgtcgttgatgcaaagcgaatcgcgcgacagcttgatgccatgttattgggttacagtgaatatctgtcaaatccggcatcagaagatgcagtaaaagatgccagagaggatatagatgactttattcagagtaatctgttgacaatcgaataa

SEQ ID NO: 39835 - DNA, 888 bp, Escherichia coli
atggacacgaaaaatccacagatactccccattaccggcaggacgtcggacatactgaaactgctggccacccggcaccgcaggaaactgttcgtcacattcttttttgtcatggccgaaaatgtcatttttctgctctacccggtcctggcggctattgcgataaacgccatggtaaacggtgagacgataactgccgccatgtatggcctgatggtgttatttatctggtttattggtgcagtaaggcgaagtattgatacccggacgtttgccagaatttacgccggacttgcagtctctgtgatactggctcagcgaagcttaaaacttaatcattccgtcattgcagccagagtgaccctgtcaagggagtttgttaacttctttgagatacatcttcccatgctggtgacttcagccatttcactttttggcgcaacatttatgttgttaatgattgaagtcagagcaggaattatctgtatcctgatattgttatttttaatgtgttttgtccccgggtatgccagaaaaaatgagaaactcttcagaagagtgaataatcgtctagagaaagaagttgattatatacatacggcatcccccgtcgcactgaacagacattactccactcttgcccggctgcgtatccgattatccgatcgcgaagcctggggctatctgaccactggggggcttatttccttgcttttttccctgacgattattgacctgagcctttccggaggtattgatgccggtcatatctatgctgtgatgacatatatgtggatgtttgcaatgagtcttgatgatgcaccacagcttctggagcagttttcccaactgagggatataggaaaacggatgatgatcagagaataa

SEQ ID NO: 39836 - DNA, 3123 bp, Escherichia coli
atgcctcagtttttcatccgacggccggttttcgcctgggttattgcgctttttatcattctgggcggtgtgttatcaatcccacaactgccagtggcacaatatccttctgtggcgccgcccagtattattatctcagtatcttatcccggggccagtccggaggtaatgaacacatccgtgatttcacttattgagcgtgagatatccggtgttgataatttactgtattttgaatcatccagtgataccaccggtatggcatcaattacagtcacgttcaaaccgggcaccgatatcaaattagcccagatggatcttcagaaccagataaaaacggtggagccccggttgccccaggctgtccggcagaacgggcttgatcttgaagccgcaaactccggttttttgatgatggtggggctgaaagcaaccacccctgcttttcaggaagccgatctgagtgattattttgccagaaatgtctcggatgaactccgccgcgtccccggggtgggtaaagttcagctgtttggtgcagagaaagcactacgtatctggattgatcctcagaaattacatggttttgggctttctgccagcgatgttctcactgctgtcagtcagcaaaatatggtggtttcgccaggcagaacgggcgatgaacctgcggcagaaggacagaccgtttcttatccggttaccgtcagaggtcagcttacctctgtggaggaattccgtaacattaccctgaaatcagacatcaccggggctcgtctgaagttggctgatattgcgcgcgtggaatccggtctgcagagttacgctttcggcatacgggaaaatggtgttccggcgacagcggctgcaatacagctggcaccgggggcgaacgcaatcagtacggctgccggtatacgtgcacgccttgccgaactttctgccgtattaccggaagggatggaattcacggtcccctttgatacagcgccgtttgtaaaactgtccatcgtgaaagtggtacagacctttgctgaagcaatggtgctggtattccttgtgatgctgctttttctccataaaattcgttgcacgcttattccggccattgtggcgccggtggcattactggggacgttcaccgtgatgctactgagcggttattccattaatattctgacaatgtttggtatggttcttgccattggcatcattgttgatgatgccattgtggttgtcgagaacgttgaacgtctcatggaagaaaaggagatgtcgccggctgaggcaacacgggaagccatgcaggagatcacgccggcaatcatcgggattacgctggtactcacggctgtatttatcccgatggcatttgcaggtgggtctgtggggatcatttacagacagttctgtatatcaatggctgtgtccattttgctctccgcctttctggcactgacactgactcccgcactgtgcgcaactctgcttcgaccgcacaaccataaaaacaatttcggaagccgtttttccgcatggtttaacgcacatttccggagaatgaccgctttctatgaagctggtctgggatttgtgcttaaacgtaccggccggatgatgatgttatatacggcgctgtgcatcgctttatatgcaggtgtgtcatcattaccctcttcctttcttcctgaggaagaccagggatattttatgtcctccatccagcttccgtctgaagccacgatgcagcgcacacttgatgtcgtgaaaaaatttgaaaatgagctgacaacacgccccgcagttgaaagcaacataatgatcatggggtttggtttctcgggttctggcccgaacgctgcaatgtccttcaccacactgaaagactggaaggcgcgtaaaggtgtatctgcccagagcgaagctgaccatattcagtccacgatggaaagtatcccggatgcaataacgatgagcctgttgccgccggctatctctgatatgggcacgtcttcagggtttacttattatctgcaggacaggggagggaacagctaccaggcactcaaacaggcagcagatgaactggtgtcacgtgccagtcacagtaccaaactgtccgatgtctatatcgacgggctgccggaaggcgcgagtctgtcactcaatgtggacagggaaaaagcggaagccatgggggtgtcatttgaagaaattaaccaggcaatttccatcacaacaggttcaaattacgtcaatgactatacaaacaatggccgggttcagcaggtaattatccagtctgatgcgccgtacaggatgcagccagaacaattattgagcattcctgtaaaaaaccggacaggacagatgttaccgttatcagcttttgttgatatttcatggtctgtcgcaccacaacagttaaaccgttatcagggttaccctgcaatacgcattaccggaagtgctgctccgggggtatcgagcggcacagccatgcaggaaatgaacacactggcaaaaacgctgcctccggggtttaagggggaatgggctggcagttctttacaggaaatcgaatcagcagctcagcttcccgggctgatggcactctcagtactggtcgtgtttatggtacttgccgcactctacgagagctggtcaattccgttggccgtgatgctggtcgtgcctctcggacttatcggggcagtgattgcggtgaatgttactgatatgacgaatgatgttttcttcaaggtggggctaatcacccttatcggtttgtcagccaaaaatgcaattctgattatcgaatttgccagacagttacgtgcacaggggaagacattatctgaagcgacgataacagcatcaaaacaacgtctgcgcccgatactcatgacttctctggcttttgctcttggagtggtacccctgatgcttgccagcggagccagtgacaaaactcagcatgcgataggcaccggggtttttggcgggatgatcagtggaactgttctggcaatattttttgttccggttttctttatcgtaatcagtcgttttacagaagcgattgcaggtaagaggaaaaataagaataacagttatatataa

SEQ ID NO: 39837 - DNA, 540 bp, Escherichia coli
atgaaagaaataaccacttcccgattaatcattcgctcttttatggaaaaagatgcagaagccctttttgagtatcttaagtccccgataaccccatgttttaatgatgaaaaattaaattcattatcagaagctaagcacgaagttctgagacgttcccgggatcaaagtcagtttgccgtctgcatgaaggacaatgatgttctgattggtcacctttttgctgataacagtaatgaaccagacaatgatacctgggctgtgggctggcattttaaccaacgttatgaaaaaaagggttatgcaaccgagtcggttacagcactgtttgattatttatttaacaaaaagggagcacggcgtctgtatgcctgggtggaagattataatcgggcctctcaaaaattatgcgaacgcttacagatgcggcgtgaaggctgttttaaagagtttgtatcattcgtaagtgagaatggaaaggacagatatgatgacacatacatctatgcactactgagtaaagaatggattaagcaatga

SEQ ID NO: 39838 - DNA, 768 bp, Escherichia coli
atgtctgctaccgcaattgaaaggccaggcgcttatgaaaagctggggctgagggagcagatcggctacggtatgggtgacgccggatcaggaatgatatggagcgtgctggtactgtatctgacatggttttacaccgacgtgtatggcttaaatgccggagttgtgaggaccttattcctggttatccgtatctttgacgcttttagcgatccgctgatggggggcatcttcgaccgcaccgtgacccgttggggtaagttccgctcatggttattatggatggcgtttccgtttgggctgggggcgctactgatgtttactacgccagaactaagcatgaacggcaagattatctatgcctgggtcacctatttaatgatgtcgctgatttataccgcgctcaatattccctattgctcggtcggcggcgtgattactctcaatcagaaagagcgtataggctgcctgttatggcgtttattccttaacgggctggcaacgttaattatctcctcatctattttgccgttaacggactggctgggtaacggcgaccgcgcctccggtttccggctgacgatgatgattatgggcggtgcggcaaccctgatgttcctcttctgcttttccagcataaaagagcgcgtggtgtcggttaaggaaaacgagtcattaaagaaagacctgcgggatattatcaagaacgatcagtggctattgatgatctctataacctttcgaagctgtagatatattacagactaa

SEQ ID NO: 39839 - DNA, 207 bp, Escherichia coli
ttgattaccattaccagttttgataataccttgatggcgcaaacaaaaagaattaccagcgttgcgcagccggtaagtgaaatcgctcatctcgctttccagatggtgaaatatcgacagcagccggacagtattgaaatgcacgaaattgtctctgggttaattattcgtgagaacagagtaagaattaatattactaccctgtaa

SEQ ID NO: 39840 - DNA, 399 bp, Escherichia coli
atggcatcgattaaagacgtagcaaaaagagctggggtctcgacggcaaccgtatcacgagtcctgaataatcatcccagcgtggtcgcggaaacgcgtaaggtggtgcgggaggcgatggattatctttgctatgttcccagcaaaagttcgtttcagcttagcggtaaatgttccggactgattggtgtggttgtgcctaatctggtcaatcctcacttctgtgaactgttagcgacagtggaagaaaaggtccggtacatcggtaaatcggtgatcgtcaaaacgcaccagaagtttgctatgggggccgacagaagcagaagccggtctttcagaatggttaactattacccgaatcccggttgtcgtcgttacgcaggtgtcccggatctttaa

SEQ ID NO: 39841 - DNA, 1377 bp, Escherichia coli
atgaataaaacagcattatcgatagccataggtttgtctttgataaccggttcagcggtagcgaaaaataatcatctgacgctggaacaaaggatggagctgcttgaagcgcggcttgccgccgctgaaagccgggcggcggtggccgaaggccaggtgcgggatttacaggcgaagcagaatgccgctatgcaggcggcgcaaaccagcgtagcggttaaaagcatggccccggctgcagagagtaaaaatatttcagttcctgagctgaaattatccggctatggcgatctgaaaatctacggcgatgtcgaattcaacatggatgcgaaaagcaaacatggcttgctggccatgaccaatgccgatgttggcagcgatacaacctatgataagttggatttaaacggccgcattctgctcggttttgacggtatccgtaaaatggaaaacggctattttgccgggttctctatccagccgctagccgacatgaccggttcgatgaaacttgatgatgcggttttcttctttggtcaggagaacgactggaaggtgaaagtggggcgttttgaggcgtacgatatgttcccgctaaatcaggataccttcgttgagcattcaggaaataccgctaacgacctgtacagtgacggtcatggctatatctatatgatgaaagagggacgcggtcgttctgacgcaggcggtaacttcttgctgagtaaacagttagataactggtattttgagcttaatacactgttggaagacggtacttcgttgtataacgacggcggttatcacggtcgcgacatggagcagaaaaagaacgtggcgtacctgcgtccggtggtgtcctgggcaaaggatgaattttccgttgcggcggccgtggaagcgaacgtggtacagaatgcctacggctataaaaatacgcagggtcacttcgtcgatcagtctgaccgcaccggctatggcctgaccatgacctggaacggcctgaagagcgacccggcggacggtgtggtagtaaacctgaataccgcttatatggatgccaataacgagaaggatttcacctccggggtgaacgcgctatggcggcgctttgagctgggatatatctacgcgcataataaaatcagcgattatgccggcgtgatttgcgagaacgactgctggattaaggaccagggcacttacaatattcatactttgcacgcctcgtatcaaattccgaacgtcatgaacatgcagaactttaatatttatctcggcgcttattactcctttctcgacagcgacgacaagctgagtcagggggatgatgacgatcgctacggcgcgcgggtgcgctttaagtattttttctga

SEQ ID NO: 39842 - DNA, 429 bp, Escherichia coli
atgatggatatgaaagaaagaatgaacagcggcgagctctatattgattcagaatatggcttaccgcagcagcggctgatggggaaggtgcgagcctatgagtacaaccactcccatccgtttaaccaggaattaagaaacgacattattcagcggatgtttgcccgcgtgggtaaagaatgctggatagaaccaccgattaatcttgcctacggaactcatatctccattggcgataatttttacgctaactttaatctgacgcaggttgatgatactgagatcaccattggtaataacgtgatgtttgcgtcaaatgtgacgatttcaaccgccggccacccgatccatccggatctgcgccacacccagcagcagttctctttgccggtggttattgaagacggcgctggctgggcaccggggtga

SEQ ID NO: 39843 - DNA, 1308 bp, Escherichia coli
atgacgacgggccgcgcggcggccctttttgaggaatacaccatgaacccgaccgtctgtacccataaaaacaaccccaatttctggattttcgggctgttcttctttctctactttttcattatggccacctgctttccgtttttgccgatctggttatcggatgtcatcggcctgaataaaactgagaccgggattgttttctccagcctgtcgctgtttgctatctgttttcagccaatactgggcgtgatctccgataagctggggctgaaaaagcatctgatgtggattgtcaccgtgctgctggtgctgatcgcgccctttttcctctacgtctttgcgcctttgctgaaaaccaatatctggctcggcgcgctgagcggcggagcctatattggctttgtgttctccgccggatccggggcgatggaagcctatatcgaacgcgtgagccgcaatagcgggtttgaatacggcaaggcgcggacttttggctgtctcggctgggccctgtgcgccaccacggcggggatgctgttcagcgttaaccccgagtgggtgttctggatgggctcggccgccgcgctggtactggttgtgctggtgattatcgctaaaccgcaggccagtcagagcgcacaggtgatggattctttaggggctaatcgtccggcggtggatttaaaaactgccgtgagcatgttccgccagcgcaaaatgtggatgtttattctgtacgtcatcggcgtcgcctgcgtttatgacgtcttcgatcagcagtttgccaccttctttaaatccttttttgccaccccggagtcgggtacccgcgcttttggttttgcgaccaccgccggggaattatgcaacgcgattattatgttcagctcgccgtggattattaaccgcatcggggcgaaaaatacgttactgattgccgggatggtgatggcggcaaggatgatcggttcatcgtttgccacgacggctgcagaagtggtggcgctgaaaatgctccacgcgctggaagtgccgttcctgctggtaggggcctttaaatatatcaccggcgtatttgacgtccgcctgtctgcgacgatttatctggtcggcttccagttttccaaacaggtggcggcgatcttcctctccgcttttgccggcaacatgtatgaccgcatcggcttccaggacacctatatgatcctcggcggaattgccctggccgttacgctaatatccgcctttaccttatcgggtaaggcaaagccggaaaagattaacgataacgctatgacggtttag

SEQ ID NO: 39844 - DNA, 2124 bp, Escherichia coli
atgtctgattcgattttacgcctgcaaagcgcagcggctgatgtggtgatcaaaacccgcccgttcgccgaaattatctactgggggccgcatttaagccatttttcgccgcaggatgccctgagcattgcccgcccggtggccaatggtcgtcttgatgtggattcaccggtgaccttaatggctgagctggggcacggcctgttcggcgcgccgggcatcgaaggccaccgtcaggggctggacgcttcgccgatgttcaccacgaccgaggtggcgcaggatgggcagaatttaaccatcatcagtgaagatgctcaggcaggcctgcggttatacagtgaaattcagcttgataacagcggcgtgctgagcgttcgccatggcttgaccaacctgcgtccgcagctgtggcaggtagatcgcctggccgtcacgctaccggtcgccgagcgcgcccgcgaagttatggcctttcatggccgctggatccgcgaattccagccccatcgtctgctccttgaacatgacagcttcgtgctggaaaaccgtcgcggacgcacttcccatgaacattttccggcgctgattaccggcagccaggcctttagcgagatgcagggggaagtatggggcgtgcatctgggctggagcggtaaccatcgcctgcgggcggaagtgaaaaccgatggccgtcgctacctgcaggcggaagcgctctatctggcaggcgaaatggcgctggcggagggggaaactctctggactccgcacctctacggtagctattcagcgcaggggctgaatggcatgagccagcagttccatcgttttctgcgcgaacggattattcgctttccgggcaacaaaccgcgcccggtgcatctcaatacctgggaagggatctatttcgaccacgacccacagtacatcatgcgcatggcggatgaggcggcggaactgggcgttgagcgctttatcattgatgacggctggtttaaagggcgcaacgacgactgggcggcgctcggcgactggtatcttgatgagcaaaaatatccgcacggtctgaccccggttatcaaccacgtaaaatcgctgggcatggagttcggcatctgggttgagccagaaatgattaaccctgactccgatttataccgcgcgcatcctgactgggtgctggcgatgccgggctatacgccgcttcccgggcgccatcaatttgtgctgaatctgaatatcccggaagcctttgattatctgctggagcggatgaactggctgctgggcgagcacgcagtggattatgtgaagtgggatatgaaccgcgaactggtacagcccgggcataacggtaaagctgccgccgatgcgcaaacccgccagttctatcgcctgctcgatacgctggtggctcgcttcccgcatattgaatttgagtcctgttcctccggcggcgggcgaatcgactatgaagtgctgaagcgcagccatcgcttctgggcttcagataataacgatgccctggagcgcaacactatccagcgcggcatgagctacttcttcccgccggaagtcatgggcgcgcatatcggaaaccgccgctgccacgccaccttccgccagcacagcattgcgtttcgcggcctgacggcgctgttcggccatatggggcttgagctggacccggtaagcgctgacgaacaagagcgtgccggctaccgcaaatacgcggagttgcataagcagtggcgcgatgtgattcatcacggcgtgcagtggcgtatcgatatgccagatgccacgacgctggcgcacggcgtggtaagcgaagatcggagccaggcgattttcctcgtcagccagctggcgatgccggactacaccctgatggcgccgctgcgcgtgccgggactggaagcgggagcgcgctaccaggtcacgctgctcgaccatccgaatattcagattacgggcgagggcggccacaccatgcgtaagctgccggaatggatgacgacgccgcagaccgtaagcggcgagtggttgcaactggcggggctggcgctgccaatccttgacccggaaagcgccattttgattggtctgcaacgcgtgtga

SEQ ID NO: 39845 - DNA, 996 bp, Escherichia coli
atgtcgctgaaagccattgctaaagaacttgggatctcggttacaaccgtcagccgcgcgttgaacggctatgacgacgtgtcgcaggagacgcgcgcccgcgtcgaggccgaagcgcagcgtcgcggctatcggccaaacacctttgcgcgccgcctgaaaatgggcaaaatcgacgccgtcggcctggtgttccccgtgcgtcccgcgccgttgaatagcaacgtcttccttgagatggtcggcgaaatcagccacgagctggcgcgctatgagatcgatttactgctgatagccgatgacgaacaggccgataaacacggttatatgcgtatggtgcagagtcgtcgtgttgatgcgctgattgttgctcatactctggacgatgatccgcgcctgattcagttgctctcttccggctttccttttctcgccctggggcgcagccgtctgccacagccctatgcctggtttgatttcgataaccaggccggaacgtaccgcgcaacccgccatctgattagccaggggcaccagcgtatagcgctgctgagcgaaaataacaatcaggcgtttattacgcagcgccgcaatggttacctgcaagccctgcgcgaagcggggctggcggaaacctggctgcgcagcgtgtcgcccacccgccgcggagggtttcaggcgacgatggagctgctgcgtttgcccgaaccgcctacggcgatagtcaccgattgcaacacccacggcgacggcgcggcgatggcacttgctcagctcgggcggcttaccggttccgatcgcgtcccactggtggtttatgatggcttgccgcaggacagcatcatcgaaacgccggtgggcgcggtgatccagtccacgcggcaggacgtaggccgccagatagccagcatggttcgccgcttaatcgccggcgacgatcttgcctctctccaggtgctctggcagcctgaatttatccccggcgaaactgcctga

SEQ ID NO: 39846 - DNA, 123 bp, Escherichia coli
atgctgaaattcagtgcaaaagacttaaaaccggtactgcttgaggcacgtaaaaaccacgacagaaagcatgaacaactgcattctgaacgagaggaaaccgttgtacatcacggtcagtaa

SEQ ID NO: 39847 - DNA, 315 bp, Escherichia coli
atgcgtatatttgtgggaccgcaggatatcgatgggatagatattcttgagttcaatccggaatacatcgtgtcctgggtcgacagagttgcagacgggctgtttacgccggtctgttttgtggtgaatgtacactacagaaacggtgcgttgctggagtcgtttccttgggacagtgaggtggacgacatcaaccggctgaccagtaaggactacggtgaggcgatgagtcaggctatcaactgggtacgtgaacagtttgagcagccggtgattgatcagccggtaccacagcagccgcgactggcggcataa

SEQ ID NO: 39848 - DNA, 318 bp, Escherichia coli
atggacacctcacttgctcatgagaacgcccgcctgcgggcactgttgcagacgcaacaggacaccatccgccagatggctgaatacaaccgcctgctctcacagcgggtggcggcttatgcttccgaaatcaaccggctgaaggcgctggttgcgaaactgcagcgcatgcagttcggtaaaagctcagaaaaacttcgcgcaaaaaccgaacggcagatactggaagcacaggagcgaatcagcgcacttcaggaagaaatggctgaaacgctggctcagcaatatgacccggtactgccatccgccctgcgctag

SEQ ID NO: 39849 - DNA, 2847 bp, Escherichia coli
atgaaacgacatctgaacaccagctacaggctggtatggaatcacattacgggcaccctggtggtggcctccgaactggcccgctcacggggaaaacgcgccagtgtggcggttgcgctgtctcttgctgctgtcacatcagtcccggcactggctgctgacacggttgtacaggcgggagaaaccgtgaacgacggaacactgacaaatcatgacaaccagattgtcttcggtacggccaacggaataaccatcagtaccgggctggagtatgggccggataacgaggccaataccggcggccaatggatacaaaatggcggtaccgccaacaacactactgtcaccggtggtggtcttcagagagtgaatgccggaggaagcgtttcagacacggttatcagtgccggaggcggacagagccttcaggggcaggcagtgaacaccacgctgaacggcggtgagcagtgggtacatgaaggcgggattgcaacgggtaccgtcattaatgagaagggctggcaggccatcaaatccggcgcagtggcaaccgacacggttgtgaataccggcgcggaagggggaccggatgcggaaaatggtgataccgggcagaccgtctacggagatgccgtacgcaccaccatcaataaaaatggtcgtcagattgtggctgctgaaggaacggcaaataccactgtggtttatgccggcggcgaccagactgtacatggtcacgcactggataccacgctgaatggggggtaccagtatgtgcacaacggcggtacggcgtctggcactgctgtaaacagtgacggctggcagattatcaaggaaggtggtctggcggatttcaccaccgttaaccagaaaggcaaactgcaggtgaacgccggtggtacagccacgaatgtcaccctgacgcagggcagcgcactggtcaccagtacggcggcaaccgtcaccggcagcaaccgtctgggcaatttcacggtggaaaacggtaaggctgacggcgttgttctggagtccggcggtctcctggatgtactggagggccattcagcgcagaaaacacgggtggatgacggcggtaccctggcagtgtctgccggtggtaaggcaacagatgtcaccataacatccggtggtgccctgattgcagacagtggtgccactgttgaggggaccaatgccagcggtaagttcagtattgatggcatatccggtcaggccagcggcctgctactggaaaatggcggcagctttacggttaatgccgggggacaggctggcaacaccactgtcggacatcgtggaacactgacgctggctgccgggggaagtctgagtggaagaacacagctcagtaaaggcgccagtatggtactgaatggtgatgtggtcagtaccggcgatattgttaacgcaggagagattcactttgataatcagacgacaccggatgccgcgctgagccgtgctgttgcaaaaagtaactccccggtaacgttccataaactgaccaccacgaacctcaccggccagggcggcaccatcaatatgcgtgtcagccttgatggcagtaatgcctcagaccagctggtaattaatggtggtcaggcaaccggtaaaacctggcttgcgtttacaaatgtcggaaacagtaacctcggggtggcaacctccggacagggtatccgggttgtggatgcacagaatggtgccaccacagaagaaggtgcgtttgccctgagtcgcccgcttcaggccggcgcctttaactacaccctgaaccgtgacagcgatgaagactggtacctgcgcagtgaaaatgcttatcgtgctgaagtccccctgtatgcctccatgctgacacaggcaatggactatgaccggattctggcaggctcccgcagccatcagaccggtgtaaacggtgaaaataacagcgtccgtctcagcattcagggcggtcatctcgggcacgataacaacggcggtattgcccgtggggccacgccggaaagcagcggcagctatggcttcgtccgtctggagggtgacctgctcagaacagaggttgccggtatgtctctgacgacaggggtgtatggtgctgcaggccattcttccgttgatgttaaggatgatgacggctcccgcgccggcacggtccgggatgatgccggcagtctgggcggatacctgaatctggtacacacatcctccggcctgtgggctgacattgtggcacagggaacccgccacagcatgaaagcgtcatcggacaataacgacttccgcgcccggggctggggctggctgggctcactggaaaccggtctgcccttcagtatcactgacaacctgatgctggagccacaactgcagtacacctggcaggggctctccctggatgacggccaggataacgccggttatgtgaagttcgggcatggcagtgcacaacatgtgcgtgccggtttccgtctgggcagccacaacgatatgacctttggcgaaggcacctcatcccgtgacaccctgcgcgacagtgccaaacacagcatgagtgaactgccggtgaactggtgggtacagccttctgttatccgcaccttcagctcccggggagacatgagcatgggtacagccgcagccggcagtaacatgacgttctcaccgtcccagaatggcacgtcactggacctgcaggccggactggaagcccgtgtccgggaaaatatcaccctgggcgttcaggccggttatgcccacagtgtcagcggcagcagcgctgaaggttataacggtcaggccacactgaacgtgactttctga

SEQ ID NO: 39850 - DNA, 1233 bp, Escherichia coli; identical to SEQ ID NO: 35737

SEQ ID NO: 39851 - DNA, 1776 bp, Escherichia coli
atgtcaaccggattacgtttcacgctggaagtggacggcctgccaccggacgcgtttgcggtggtctcctttcatctgaaccagtcactctcttcgctcttttccctcgatctctctctggtcagccagcagtttctctcccttgaatttgcgcaggtgctggacaaaatggcctacctgacggtatggcagggcgatgacgtacagcgccgggtgaaaggtgtggtgacctggtttgaactgggggagaacgacaaaaaccagatgctgtacagcatgaaggtgtgcccaccgctgtggcgcacagggctgcgccagaacttccgtatcttccagaatgaggacatcgaaagcatactcgcgacgatcctgaaagaaaacggggtgaccgagtggagtccgctgttcagcgagccgcatccttcccgtgagttttgtgtccagtacggcgaaaccgattacgatttcctgtgccggatggcggcggaggaaggcatcttcttttatgaggagcacgcgcaaaaaagtaccgaccagagcctggtcctgtgcgacaccgtgcgttatctgccggagtcctttgagatcccctggaatccgaacacccgtaccgaggtgagcaccctatgcatcagccagttcctctacagcgcacaaatccgcccatcttccgtggtgaccaaagactacacctttaaacgacccggctgggcagggcgttttgatcaggaaggccagcaccaggattaccagcgcacacagtatgaagtgtatgactaccccggacgtttcaagggtgcccacgggcagaactttgcctgctggcagatggatggctggcgaaacaacgcagaagtggcgcgcggaacaagccgttcgccggagatatggccgggacggcgaattgcgctgacggggcatccgcaggcgaacctgaaccgggaatggcaggtggtggcaagtgaactgcacggcgagcagccgcaggcggtgccgggacgcaggggttcaggtaccacgctgaataaccactttgcggtaataccggcagacagaacatggcggccacagccgttgctgaaaccgctggtggacggcccgcagagcgccgtcgtgacgggaccggcaggagaagaaatcttctgtgatgaacatggccgcgtgcgggtgaaatttaactgggaccgctataacccgtcaaaccaggacagttcatgctggatccgtgtggcacaggcgtgggcaggcaccggctttggcaacctggcgataccgcgtgtgggtcaggaagtcattgtggacttcctcaacggcgatccggaccagccgattattatggggcgtacctaccaccaggaaaaccgcacccccggcagcctgccgggaacaaagacgcagatgaccattcgttcgaaaacctataagggcagcgggtttaatgaactgaagtttgacgatgcgacagggaaagaacaggtctacatccacgcgcagaagaacatgaacaccgaggtgctgaataaccgcaccacggatgtgataaacaaccatgctgagaccattggcaacaatcagatgattgcggttaccaacaatcagatacagacggtgggtgttaaccagatagagacggtgggcagtaaccagatcattaaagtgggctctgttcaggtggaaacgattggacttgttcgtgcgctgactgtgggcgtggcgtatcagacgacggtaggtggcattatgaacacctcggtggccctgatgcagtcctcgtag

SEQ ID NO: 39852 - DNA, 312 bp, Escherichia coli; identical to SEQ ID NO: 26039

SEQ ID NO: 39853 - DNA, 918 bp, Escherichia coli
atgaataaatttaaatattatattaaatacattgaatattttatcaaaaaaaacattacggtttttactaatgatatttcgtttcatgcagccagacttaaaaaaatatcagggagagatacagatctgcttaatccagtaacacttaatgagaagatttgtcacagactcatatttgatcacaatccattttatacaatattagctgataaactagccgtcagggcctatgtagaaaaaaatacaaatttagttaagcttattccgttgcttggtatctataatagagtcgaagatatcaacctcgataacctaccagataaatttgtgctgaaatgcaaccatgatagcggtagtactgctatatgcacaaacagagcaaagtttgagcgcgcgaaagtatttaataagttaaaactttcacttaaaaagaatatgtattacacaaccagagaatggcaatataagaacatctctcctgttattatctgcgagatgtatctggatttactttctgataaagataaaagtgttactcctgaaatgttaagaatacactgctttcatggcatagcctgtttcattgaggctgactttactgatgaaaatggttgtgaatttattaatgtatatgacagagcgtggaatttacaaccctttcagatggaatatccaaatacacccactccggttaatgaacccgaattatttcataagtccgtgattgcagcacaagagttagcaaaagaaatagactattgtcgagtcgaccttatgttaaaaggacaaaatatctattttagcgaaataacgttaagccccaaaagaggcaagcttaaaatcacccctgcaatatgggatgtcagactcgggagtatgtgggatctgtccccaactactactcacagactcaattga

SEQ ID NO: 39854 - DNA, 1095 bp, Escherichia coli
atgaataaagaaaccttgttaagtcgtcagatattgacgcatatgttgtcgttaacatttattattattgccattactgtacttgggtcctatttattttatactttcctgatcgactttctacctggagagatgaatgcgggacatgaagatgatatgacctttattgactggatgtggattttgatcgcttcaaccaccagtctggttgtttcccttttttttactataaaactgtctataagaatattaaaaccattaaatgatgtggcattgagcctgaaacaaatctctcagggaaatcttagcgcaagagcgtctggttgcagttttcagttgggagagatgaatcatctcgtcaatgactttaatgaaatggcggaaaaattacagacgttggatactcagcgaaatttatggaatgctgcgattgctcacgaactccggaccccggtgactattttacgaggaagacttcaggggcttgttgacggtgttttcgaaccagagcaggctctactcagaaatctccttaaacaaacggaaggtctgaccaacttaatagaggatcttcgtgtcgtgagctcctcaggcagggctggatactccctgacgcttagagaagtcgatctcagggcaatgatttcgaatgcgattgatacttttttgccagactttgaaactaaacaacgcaaaattataactaaacttaagtgtcagcgttgtgtctgtgatcctttacgtattattcagtgcctgaatattctttttgataatgcgttaaagtattctacatcggaaacgctttttgttaagaatggtgttaccgggaactataatttcattatcgttcaggatgaaggacctggaattcctgaagaactccagggggcattatttcagccttttcagcgaggaaaatgtgccaaacaaattaatccggagggatgtggtttaggactgtcggtagttaaagccattatgcgtgcccatggtggaaacgtaagttatagattaacacaagaaaacggctcaatatttaaactaaaatggcctgttcgaagaaacacagcacatactcaattgagtctgtga

SEQ ID NO: 39855 - DNA, 702 bp, Escherichia coli
atgaacaacactctaatcatcgtggccgaagacgatgatgacatcgccgccatactgacaggctatttacataaggcaggaatgaaaactataagagccaatgatggtgaacaggcgataaatcttacccgtctacacaagcctgatctcttattattagatatctatctgcccggatgtgatggatggcacgttctaaccaccttaagaaaggaaactaatgttcccgtcatcatggttacagcactggatcaggacgttgataaactgatgggcttaagactcggtgcagacgactatgtgataaaaccttttaatccgtcagaggttattgccagagttgaagccgtacttcgcagaaccagaatgaatgcagaggccacgcattcccggcctttaagaacgccttttcttacaatctatcccgatgaattttatgttgaaatcactacccaacgtgggggggccacgccagtattaaccacaactgaatttaaacttctgacctatttggccaggaatccgagaaaagtgtgttcacgcgaggagttactggaaaaatgtttgcctgagagggactcgctcgatcgcactgtcgacagtcatatgagcaaactccggaaaaagcttaaacatgcaggacttaaaggcattccggaaagtatcagagggttaggctaccgtttgggtgataataaatga

SEQ ID NO: 39856 - DNA, 966 bp, Escherichia coli
gtgacggagactttttactgggtggcactccccctgactacggtaaacggtgtctctcagtttcagccggaatggatatgctgggaaccaggtgtggagtgggttcgtcagccaccagatgacgctattacagatatgtcgtacttcccattttatcggtatgccatgacgtttgaagaatttgttccggcattttcttcctggtttgccggtaaccggtgtggagtggcaatactgactggtgttcgtgctgatgaatcgctcaatcgctttgtgggactggtgtctcagcgcaaactgagatatgcagatgataaaccctggaccacagcgtcacctgaagggttttattacaccttgtatccgttgtatgactggaaagctcgtgatatatggatatataacgccagaacccgagctatctacaatcccctgtatgacctgatgtaccgtgccggcgtgccgttacgcaacatgcgggtctgtgagccttttggcccggaacagcgtaagggactgtggctttaccatgttctggagccggaaacctgggccaggatgtgtgagcgggtgtcgggtgctgccagcggggcgctttatgccaatgagagcggtgcctattttgccctgcgtaagcgtatcacgaagccgcctcatcatacctggcgtagctatgcgatgttcctgctggatgtgatgccggaaagaacggcagaacattaccgtaataaaattgctgtctacctgcgctggtatcagacgcggggcttcccggatgacatcccggatgaacaggagaatgacctggggagccgggatatcccgtcctggcgacgtatctgtaagacactcataaagaatgatttctggtgtcggaccctctccttcagtccgaacaaaccccggcactatgaacgttatctgcagcgtatgaaagaaaggaggaaggaatgggggattctgtga

SEQ ID NO: 39857 - DNA, 732 bp, Escherichia coli
gtggcttattacagcattggtgatgttgctgaacgttgcgggattaatcctgtcactctccgggcctggcaacgccgctacggtttgttaaaaccacaacgcagtgaaggcggacaccgactctttgatgaagaagacatacaacgcatcgaagagatcaagcgttggataagtaatggcgttcctgtaggcaaagttaaagcattactggaaactacccgccaggatacgcaagatgactggagccgcctgcaagaagagatgatgtcaattcttcgtatggctaatccagccaaactacgcgcgcgaattatttcactgggtcgagagtacccagtagatcaattgattaatcatgtttaccttcctgttcgccagcgtctcgtgcttgatcacaacacctcccgcattatgagcagtatgtttgacggcgcattaattgaatacgcagcggcctcacttttcgaaatgcgccgtaagcccggtaaagaggccattctgatggcgtggaatgttgaagagagagcacgattgtggctggaagcatggcgtttatcattgtcaggatggcacatttctgttcttgctgatcccattgaatcgccgcgcccggaactgttcccaacgcaaacattgattgtctggacaggcatggcaccaacgagaaggcaaaacgaacttttacaacactggggtgagcaaggttataaagtcatctttcatgccccctaa

SEQ ID NO: 39858 - DNA, 471 bp, Escherichia coli
atgattatcggtaatctcaaccatttgtcgctggcggggcttcctgcctgggtgagaaatattctgctgcgcccggagtgttcgttatcggcgttatccaccagagaggacggtcgctggcaacctgaaggatgtcggtggttctgctcgctgggaacttcagacacgcaacccgccgaacttcgccatacggagtatcaccatctatgggccgatatacaggtggtgattactggttgtgagggcattaatgcgggaacgcggcccatcgctcgcgaaaacgatgaagaacgtaagcccgatctgtttatcgccccatcccctgaaaacagtgtcgccatcaccctacacgccggtgatttcgccgtctttatgcctgaggaacctcaccaggcactgtgcgcaattggcacggctacttcaatacgcaaagcggtctttaaagtaccgcgcgacatgctggaagcctaa

SEQ ID NO: 39859 - DNA, 573 bp, Escherichia coli
atgaacataatccccctccctactgtagaaaaccttattctctggttttgcggtgccattgtactgctcggcactctattcttcaggcgatctgtacggcaccggcgccacaaattgaaacaacaaagcgcgcggcgggtattggagcgtataaagacactaccgggcttccctcaaaaaattagctacctgcggaaaatagaccccttcgtttttgaagaactactgttacacgcctttgcagatgccgggtttgagatcaccagaaatgcaaaatacaccggcgacggcggcattgatggccggttctgcgttgatggccgcaactttctcattcaggccaaacgttattcatcctgggtatcaactgcacacattcagcagctggatatgcttgctaaaagggaagatagtcttgctgttttctgtcacaccggtaaaacaaggaaacagacgctggacgcattcaaagcgcataaacgggtgatgatcattagcggagaagcgttaataagcctggtcgaaggcgataccagacttgcgaaccggttacggttattcgcggggcagtaa

SEQ ID NO: 39860 - DNA, 321 bp, Escherichia coli
atgacaacacaaacccttgagcaaattacggaagattttcgtcgccagtgtgatgtttttgcccgcgaacagcagccacgctgcgggctgatttatgaactttatcagcgacgcctgagcgcagatatagacggctaccttgcaggcgttccggctgagtatcgggatgaactgatcgcggtggcacggcgtgaatttgattacctgacccaagacgagatccaggaagaaatccgccaggatagtgagagaggctattgcagccacggtattgatcgtaattgttgcccgctgggctgcggtgatatagacgagtattga

SEQ ID NO: 39861 - DNA, 180 bp, Escherichia coli
atgaccactgttaccaccccttccaagctgaaaaaagaagttgaatcggaaaaggagttgatgctgcgcgcctgcctcgaagcgtttaaccagctgcctaatcagcgcctgaaaggtgcgttcccatcaacgtatgcgctggccgcaaagttaaaccagctgttgcagcatacaaaataa

SEQ ID NO: 39862 - DNA, 378 bp, Escherichia coli
atgcgtgtattaaccccccaccagttttttaacctcaactggtttgtcagtaaccctgaattgacctcactaaaaccggccatgaatggcgaacctgccctggcaattggttatgtatggttccacgtccaggatgaagtgaatggcggcgagcctgacgaggacatgatgtgtgctgttttcccctggtatgccgagatcacttcaaccaatggtgcgccggacattcaggtattcaccgagcaggacgattgctggctttccgcgcatcagtttatgtttgcgcgtgacactgttccttcacatgaagaatttctcgtttatttcgattcgcttaactggcgcgccgacgttcaaaaactgcttcttaatcgctaa

SEQ ID NO: 39863 - DNA, 426 bp, Escherichia coli
atggaaactatcgaaatcaccgctcgctacatttctgaacacgcccgcattaacttcatgccagcagcctttcacagcgcctttttaagcgccgatctttatattcagtcctttcttaatcgttacgctaaagactaccaggggggatattgggagtttctacaggccagcaatggcgcatttttcctggaagcgcccgcctctctttggctctcgttgcctaactattttgaagatgaatgcagcccgcgcgaagtaggaattattgtttgtctgtacgcctacagctactttagcgcgctggcatatgaagaaggtaaagccgagctgacagaaacgatggctaaccggtatcacctgttgcgcgagtacgtgaatacgctggagaaagaaagccagaatcgcatttatcgtgccattgattaa

SEQ ID NO: 39864 - DNA, 381 bp, Escherichia coli
atgttagcgacacttcaacaccctaccgcctggcaattgccagcccggttaatgcttttggaactattaatgttcgattaccgtaattccgatcaggagcgctacggccagcaaatctatcaccactttcgcaaacagggtaatcatcgctgggatactgctgttcatcaggataatgacggcaagtttacggttattttccgccattcattcagcaaaaaacaggctgatggcgttaagcgaacgatgatccgcgatgaaaccattatacaggcaggaagcgcgcaggaactgacagaagcgacgttccccgcataccaggacagcgatattctgaaagcgtctgatttcttcacgtcgcttaaaaatgacaacatatga

SEQ ID NO: 39865 - DNA, 255 bp, Escherichia coli
atgctgaataaaaccgaaaataacaccgacattacaagtatcaccccctgctctgtagagggtttaatcgccatcaaggatgataagggccggacgcatattatccagcgagagttgatatcccatactgaggacagatcagatattgaaaggaaacctgcgacctccgttttcttagttaccggggaatttataagggtgtttttatctggcgaaaagctggcagaaaagctgaatttaaacgtacctgactaa

SEQ ID NO: 39866 - DNA, 207 bp, Escherichia coli
atggaaagaaaggctatagaacaaattctggctgagcgaccagtaacactggttaatgtggaaatagcggcagttaccaaatatggcgatcatcaggttgaaatccgtcgcaaagatacgggccagcttatctggcgagcctgggactttgagaaggattttaaggaagatctggagcgtgaacttatgcgccacaccccgcattaa

SEQ ID NO: 39867 - DNA, 285 bp, Escherichia coli
atgcactatcttttcgttttaatcccccttgccctgtttgcaagcgctgcctctctcgccctgccctggtttatggttcgtgccggtatgcgcgaaatcgtacagctctcatgcgtctgcgctgcggtgttaggtctgtgtgctgctacaggtatttttagctatgccgataatggcccgctggcgctgttgtatggatgtgctgcgctggcttgctttttatacgctattgactgcgcattaccgctgtatatgacgcgtaaacatccacgtaagcagctgtaa

SEQ ID NO: 39868 - DNA, 249 bp, Escherichia coli
atgaaatggatgcttcccttgtcacactccgaatataaagaacgtcgctactactatctgatgcgcttcagagcttgccgccagcgcgatacgctggaaaaggtctatcagtcgatgttagatcgtgaccaagtgccagattgcgattatggcgcttttgagtctgctgccgatcaccggcgcgctgaaattgtgtcaggcaagctatgggacaaagtgccttcgcatgtctggcgctatgtcgattaa

SEQ ID NO: 39869 - DNA, 201 bp, Escherichia coli
atggaatatggaaaactggccgctcaaatcgggatgcgcctcaaactggaagtgatggagtcagcccgcggtttttacatcggtacgcaaactgatgaaggtatgccggtatcacgcgaatcaaacgagtattttgataccgagcagcaggcagaggccgcgctgactgaccggttatggacacaaaaaccaaatccctag

SEQ ID NO: 39870 - DNA, 630 bp, Escherichia coli
atgcttgtggttatgttctgtttcctctacggatggccactgcaggcttttcttcctacatggcttaaggttgatatgcagtattcaccagaaactgttgctctcatatttatgctggcaggttttggctctgcagctggaagttgtataggtggttttatgggggactggcttggaacccgaaaagcatatgttatatcacttcttatcggtcagcttgttattatccccgtttttcttgtggaccgggactatgtatggttacttggccttctaatctttactcagcaggtttttggtcaggggattggtgctctggtgccgaaaataatcagtggttattttaatgtggagcagcgtgcggcaggactggggtttatttataatgtaggttcacttggtggagcatgtgcgcctattcttggtgcagttgttgcgtctcatacaagtcttggtacagcaatgtgttctcttgcttttatcttaacatttgttgttcttgtccttattggttttgatatgccatcacgtgtacagagatggatccatccagaagctgcgcttgaatatgatactgtcgatggaaaacctttttatggagcaagaaaaaagaatgttgcagaagaataa

SEQ ID NO: 39871 - DNA, 309 bp, Escherichia coli; identical to SEQ ID NO: 31415

SEQ ID NO: 39872 - DNA, 156 bp, Escherichia coli; identical to SEQ ID NO: 31414

SEQ ID NO: 39873 - DNA, 552 bp, Escherichia coli
gtgcaacaggccgcccatgcatgggtcgatgcatactgtcagcaagtgctaaagccgctgtttacggctgaagcggattacggcctggtgctgctggcgcatcagcaaaatattcttgtccagatgcttggggatctgccggtcggatttatttaccgtgactgccagggcagcgcgtttatgcctcacgcgacagactggctcgattctattggcgaggcgcaggcggaaaatattttcacccatgagcagttgctgcgctatttcccttattacctgctggttaactccacttttgctgtgaccgctgcgctgggggctgccgggctggacagcgaatcgaatctgatggctcgtgtacgagcatcgctggctgaagtgcgtgatcaggtgactcataaaacctgtctcaactacgtgctggaaagtccgtactggaacgtaaaaggtaactttttctgttatctgaacgatcataacgagaacaccattgttgacccttcggtgatctatttcgatttcgctaacccgctgcaggctcaggaggtctga

SEQ ID NO: 39874 - DNA, 153 bp, Escherichia coli
atgacatcagacaatatcgctgaatatgttggtgagaataatcaatttactgagaagcctgtaactgaataccccccggtgatacaggataatacagtgaccactaaagactatctgtacagcaataatattgatactgaccttttagtgtaa

SEQ ID NO: 39875 - DNA, 471 bp, Escherichia coli
gtggaacagtccctccgacacagcctcctggaaagtaatgcggtgtacgctgcccccctgacgcccggcccggatatcaccgataagcgtattgaacgggttatcgtcaccgtcatgggtggagataacccgcaccttgccaccccagataagcatcgccagcgccgccttcagcagttcatccagttgctcatggaacgccgcttcatcgataacgatgatgccctgacggccacgcaggttagacggtcgactggagagcgcgacaacgcggaaaccggagtcgggaaacttgatggtgtaggtcttgatgtgcttgtcgtcttcgtcctcttcccagaaaccctcttcgatttcactggcggcatagttgaatgcccgcgcccacatcgcacacgcctggatatattcgacggtcatgtcctggttataagcgatgtaatacacgttcatcccgcccgcaggcgctga

SEQ ID NO: 39876 - DNA, 258 bp, Escherichia coli
atgacttcggcaactgctaaatccagctcactttgtctgatggggattacctgcgatgagtatgaaactgcggcaaaaatttacaccctcagcgtcaatgctgacaatcttgcagaggcaataagagagatgcaggccgcgcttgagcaggtggagaaaacgccacgaatgctccctgaaaataagctgaaaggaatactcattggacaaataagactgactatcagcgccaatccaaaaagcagatcggcttgctaa

SEQ ID NO: 39877 - DNA, 573 bp, Escherichia coli
atgtaccttccgttggaaaaatattacacgctcgattctgcaaatagcctgtttccatttcatgagataacgctgcgtcaccacacccccaaacagccagagttggctgaatttcttaatcaaatacatcccgatgggttgtcgaagcacggccataactatctctataatcctgcgcttttcgatgaagaccatcaaagggataacgccttactgattggtctcatccttgaacttgtacggcgcagcgactttcctgataaaccgtcccgatatcagtcgctgtttgcctgtcaggaaatcagtgaggttaaacaattcagggaattgctggccaacgaacgtggtgatgatggaatacggacagcgccgatatatgaagtaaggaatcagaaccctgttcaccgtggtgatatgagactgcttaacagtgatggtccgattctggatatatatcgtcgggcgcatctgtactggtcaggtgaaagtcttacacatgcaaatggtgaagatccattctgggagatactgatcccacttccggcatcaacaggcaggcgggtaacggaataa

SEQ ID NO: 39878 - DNA, 432 bp, Escherichia coli
atgactaaacgaaagtttcttttaccgacgatatttcttttggctggatgtggcgataatgctgaccctgctgaggctcaaagcccatctgtagagcactcagtcttcagtgttaagaccgataatccgattgtgaagcgcgaattgccttttattcgccaacagtgtcctggactggataaatacgcagctaacttcgaaaaatttgaagtgtctgatgacagcatacgaccagtaacaacggtgcaattccatattaaggacgacaataatattccaaatgattatgctgcatctgggcataactgttttttgtttatatcgaataatgcgcaagaagttaaaatatctaaatcagcctgccagtctgtttgtctcgacagagtggatgtccctggtggggatatgatccttaaactcgataaagaataa

SEQ ID NO: 39879 - DNA, 411 bp, Escherichia coli
atgaataaaaaggccgttgatgcagtgcttctgcgactcatgtcactgtttaatgttgataacgacagtgagctggctcgggtgctgaacgttaacagacagactttagccagctggagaaagcgagactctgtgccttattcaatttgcataaacatagccgaagagagaggagtctctctggactggttactcacagggaagggagaggaggaggtatcgaaggttgaatcagtaacacaaagcttcagtcaagcggaccttaaaatgcttgagttattaaatcagctagaccctgaggttcgacgagaccttatgcgaggcgctgaagaaaaacagcgtgtgattgaaatggaaaaacagatccaagagctatccgcacagctaaataatttaaaaaatgtgggctaa

SEQ ID NO: 39880 - DNA, 204 bp, Escherichia coli
atgaaaattaatccatcagcggcaacgtgtttagaacgaataaagactttgaatgctgataaccagcgttcagtcagggttaatctcggtgtacttaaagcggctcgcagtgaaatcctggcccaggttgcgataaacggaaaaggcgtcatgaccgatatggttctcaatgcgctgaatagcgccattaatgatggcaggtaa

SEQ ID NO: 39881 - DNA, 471 bp, Escherichia coli
atgcaacagaatagcaaattaactaatgagcgcctggctcaggtctatcaaagtctgaagcgctgggctgaccacgatgacgctttaaatagctatatcagcggtcaaaagatagaccccatatttcatgattgtgttgtagctctggctgagctgcaggaataccggaaagctgccgctgagtccgctgagtccgctgagtccgcagggtggcaggccaaaaggccgggtggtaattgggtaagcatcaagaatgaggatattgaccactacaggtttaacgaagaggttccggtcagggaggtcttcaccgccccgccagcgctggtagtgccggatgaaattgacgttaatgaccccgcacttgatacgcatagaaaatggatggcagaaggctggaatcgttgccgctcagccatgcttcagactagacctgcaaataccagaggaccagattatgccaatgactga

SEQ ID NO: 39882 - DNA, 693 bp, Escherichia coli
atgccaatgactgataaagaaaaagtgctggaaaagttaaaaaaacttctggcgctgtcaaaatctgataatccccatgaagcctcactggcactgcagcgtgttcagaaactgatgcaggcatacggcattacccgtgacgatatcgcactcagcgatatagacgaaagcatcagcaactactgggctgcaggcagcgttaatccaccacgttacatgctgggtctgctgggcatcatccaggctgcctttggtgtggaatctattattcattcaggtcataaacccagcgttggcttttacggtaataaagaccgcgttgagctggcgtcttatacctgggatgttctcgcccgacagcttattacggcgcgaaaaaaccatatcgggcagcagaataaaagaatcaaaagcacgacaaagaccagccgtggcgacaaatttgccgaaggttgggtactggctgtgcgtagtgaagtgcagttttttgctatgacccgtgaggaacgggagctggctcaactctggctcgaacagaaatacccggattcaggcacaactgcgggccgtgaagctggaaaatcacgtgacgcggataagtcgcgccatatcggttacagagaaggggaaaacgtccgcctgcatcagcctgtcagcgggcatgagcagcggaagctggggagtggcttatga

SEQ ID NO: 39883 - DNA, 216 bp, Escherichia coli
atgatggctgaatatattgtatgcgccctgttctggtactgcctcgtggggtggtgtaatgctgagctgcaccgccattcaggtttttgttcacgatacagcggcgctaaatactggattagctggacagtaatgctcctttgctggcctgtagcccttcctttatatgttgactatgtcaggggaaaatcaaaaggtgaggtcgatgatgactaa

SEQ ID NO: 39884 - DNA, 579 bp, Escherichia coli
atggctgagccgttacaactcccgccgccgcttgagggtgatgtcagtctcagaacgctgggaagactggccgggcggctggataatatcaacctgagcgtactgatggtctatctcgtcgatatcgtcgacagttccgcgctgccatggctgggcgagcagttctcactgttcggcgatggctgggagctggcggagtcggacgatgtacgccgcatgcttatcaaatccgctatcgagctgcatcgttacaaagggacgccgtggtcaatccgggaaattatccgccgtttcggcttcggcgaagtggatctgattgaaggcactggccagattggctacgacggcaaacacacttacaacgggcttttcgtccatggcgatgcggaagcctgggcggtctatcgcgtcatccttcaacagcccatcactaacgatcaggcggcgctgttacgtcagacgctcgctgcttttgctccggcccgctgccatctggcgagtctggagtatcagtctgtcgccattcgctacaacaacaccgtcaactatgacggcagctataaccacgggagcagttaa

SEQ ID NO: 39885 - DNA, 600 bp, Escherichia coli
atgacgcaggcaaaactaaacaatgaacttatagcctcgttggcaggggaaatcaccgtctacaactacgatggcgaaacacgagaatatctgtcttcatccatcgaatatctggctgcgggggttggtattccggctaattcatgcattgatgcgccaggcgaaagcaaaatcggtttcgccatttgtcgcacagcagaccgttcatcatgggaatatatcaccgatcacagagggcaaaccgtttataacacagagacaatgcaacaggttgaagtgacggtactgggggattatcccaaacatacaacccccatagctccagcatcaccgtatgataaatgggacggagataaatgggtcacggatgctgacgcaaaacttcaaggcgatattgcagatgcagaacaacaccggcaaatgcttatcgctcaggtggatgaaataacctccgactggcgagtggaactgatgctcggtgatatcagcgaagaaaacaaaaagaaactgtcgtcgtggatggcttataaaaatgcggttaaagccgtcgatatttcgacggctcctgatattaactggcctgtccaaccggaggtgtag

SEQ ID NO: 39886 - DNA, 609 bp, Escherichia coli
atgtcgaaagctgaattgaataaagagctgattgcaacggttgccggtaatatcaccgtgtttaactacgatggtgatacacgcgaatatctgtcttcatccatcgaatatctcgcccaggggatcggaattcctgcaaattcctgcattgatgaaccaggcgaaaaaaaggagggttttgccatttgccggactgctgattttaccgcgtgggaatatatagccgatcatcgtggtgaaatagtttatagcactgaaacaggtgaagcgcttgccatcactgtgcctggcgattatctggagagcactactacgctggcacctgccacgccatacgatacgtggaacggcagtgagtgggtaacggataccgaagaacagcatattgcagatgtgaaagcagcagaacagcaaaaatcagctttcttagctgaagcacaggctgcgattagtctatggcagacagaactacagttaggcattatcagtgataaagataaggccagcctgatactctggctgacctacataaaggaattgcaggcggtcgttcctgacgctgcaccaggtatcaaatggcctacacctccggttggacaggccagttaa

SEQ ID NO: 39887 - DNA, 1257 bp, Escherichia coli
gtggttgccattctgctatggctgaacgtacttaccctggcgggaccaagtttctccttgtggccagccggtcaaccgacgaccactgtaacaacgacgggtggcaacgcagcggcaaccgttgcggcgacgggtggcgcaccggtagtgggtgatatgcccgcacaaactgcaccgccaacaacggcgaaccttaacgcctggctgaataatttctataacgcggaggcgaaacgtaaatcgaccttcccgtcttcgctgcccgctgatgctcaaccatttgaactactggtgattaatatctgttcgctttcctggtcggatattgaagccgccgggttgatgtcgcatccgctgtggtcgcatttcgatattgagttcaagaactttaactccgccacctcctacagtggcccggcggcgatccgtttactgcgcgccagctgcgggcagacttcgcacactaatctgtatcaaccggcaaataacgactgctatctgtttgataacctgtcgaaactgggctttacccagcacctgatgatgggacataacggccagttcggcggttttttgaaagaagttcgcgaaaatggcggcatgcagaccgaattgatggatcaaacaaatctgccggttattttgctgggctttgatggttcgccggtttatgacgataccgccgtgcttaaccgctggctggacgttaccgaaaaagataaaaacagccgtagtgccacgttctacaacacgcttccactgcatgacggcaaccattatccgggcgtcagcaaaacagcggattacaaagcgcgggcgcagaaattctttgatgaactggacgccttctttactgaactggagaaatcgggtcgtaaagtgatggtggtcgtggtgccggaacacggcggcgcgctgaagggcgacagaatgcaggtatctggcctacgtgatatccctagcccgtctatcacagacgtccccgttggggtgaaattcttcggcatgaaggcaccacatcagggggcaccgattgtcatcgaccaaccgagcagcttcctggctatctccgatctggtggttcgcgttcttgatggcaagattttcaccgaagacaatgttgactggaaaaaactcaccagtgggttgccacaaacagcaccggtctcagagaactcaaatgcagtagttattcaataccaggataaaccgtacgttcgcctgaacggcggcgactgggtgccttacccgcagtaa

SEQ ID NO: 39888 - DNA, 570 bp, Escherichia coli; identical to SEQ ID NO: 9851

SEQ ID NO: 39889 - DNA, 480 bp, Escherichia coli
gtgacgttatccgcatcctgcgcggggtgtgacatgtactgcaccctggcggatttgcttgaacaagtaccggaaaggacgctcattgagctgaccaacgagtcggtgggctttgatgagcagcctccggtcaatgctaccgtggttgagagttgcatccgctacgccggtgaactgatagatgcccacctgcgtgggcgctataccctgccactgacggaagtaccgaccgttctgcgcgacattgccatcacgctgacccgttaccgcctgtacgtccgccgtcctgaaggtgacctgcctgacaccgtcaaggacgacaacaaagaggcacggcggcaactggaggctatccgcgacgggaagctcacgctggggctgcagtccactcagaaagatgtgcctgagtccggtgaaatccgggcacgggcacgccgtcccacctttggcgggcgcgatggcttactggagaaatactga

SEQ ID NO: 39890 - DNA, 294 bp, Escherichia coli
atggtggtacccaaagttgagcgcaaaacgatagacgacctggtagcgtcgctgaattatcagacccaccactttccgggcaccacgctgaccattgctgttgcactgatgccggatggctttatggtcagcagtggattcagcgccacggcgcatccggggctgtttgatgaagagaccggcaggaaagtagccatcgctaaagcgcagcacaatgcgactgaagcgctgtggcagtttgagggatacaggctgaagtcccagctggcatcggggaaccacgatgaccgttga

SEQ ID NO: 39891 - DNA, 483 bp, Escherichia coli; identical to SEQ ID NO: 36936

SEQ ID NO: 39892 - DNA, 564 bp, Escherichia coli
atgatttacgggtatgttcgtgtatcaacaaatcatcaggatacagagttgcaacgtcttgcacttgagtcagctggctgtgagcgaatttatgaagaatatgccagtggcagaacagctaatcgccctgtgttaaaggaattaattacggtgatgaaaagtggagatgagttgattgtctggaagttagatcggatagggagaaatgtgctgcatgcgctattgatgtttcaaaatctgcacgaaaaaggtgttaattttcggagtattacagatggcgtagacctgaaaacagcaagtggtcgctataatttccgtaatattctttctgctgcgcagtatgaatctgatttgaatagcgagcgaactttagctggtttggctattgccagatccaaaggccggattggtgggcgtagaccgaagtttagcgacgagcagtggaaacagatgggagcgctcatagcggcagggaaatcacggcgttatgttgcacgtatctataacgttgggctatcaaccctatataaacgatttcctgttactggcattcaaacgaaataa

SEQ ID NO: 39893 - DNA, 477 bp, Escherichia coli; identical to SEQ ID NO: 4554

SEQ ID NO: 39894 - DNA, 387 bp, Escherichia coli
atggatacgttttcctctggcactgcgaccggaaatcccgcctttcagcatattctcctggatggtctgataagcactccacaggtccttaccgtaatcctcccggcgtcgtggcgtcagaatgtcggtagtggtgacgggctgatgttcatcaccataacggtaagtcagcgccgcctgtgccagcgcctggcgtgccggtggcggcaggaccagcgactgcatggcatcacgcttttcctcaatcaggtcaaacacgcccaccacttcgtaagcaccttctatgaccctgtccaccacgtttccccggtgtggcacccggacttctcccagcgactgaccgcagaccaggccattggtacaaatggcacgaaaatatccgggtaa

SEQ ID NO: 39895 - DNA, 351 bp, Escherichia coli; identical to SEQ ID NO: 9152

SEQ ID NO: 39896 - DNA, 1077 bp, Escherichia coli
atgaatttctcattaagcgatgttattacgggtttagtgactgctgtacttacatggatatcaggaagatttttctctctctttagaacaaggcagctgtatttgctcatagaccaccccatgtattatcccataggtaatagtcgtaacttacgatatacagtgactgtatttaataaaggaaaggaaaaggaaagtaacgtagaaatatcattcccacaagctcaatcgatcaaagtgctttcatcagattatgagtctttttcaattgcaaataaaaagctaacaatagatagaattctctctgattcacaatacttttttgtggttgaggttgaaagtcaatataagtattctggagactttttgcctattataaagtcagatgataaggatggtcgttgttatacaaaacttgctgatgtccctgccagtggcgctacctatgtagcatggggcgctgtttttatctttatgattttattcttctttcttataccgaccgtgtttaagaaaagcgaggaattcattaactggtataactatcatgaatttaatgataatggattttcgtttgatgactatacaaactacgatgctgttgataaattcaaatttaaaggaaatgacacgccaatatcattaaattcctttgacgtaaatgatggtattgcaacgtatgcttttattgtcaggaataatcaaatcgataacctaaatgtgaatatttctttcattccaagagatgaagatagttacaccaaggaacacaatattatttttgataaatttatatattctgactacgataaatacataaaattaaataaatctttgagcaaaaaatattttatctatgaaggaaagccaagtaaatccatcataccttcaatgcaaagtaaaaaaatagaaataagtcgaaaagtcactcctggtatgagcatgcaagactttaatatcaagttccgcttaaaactagagggttctgaaaaatatagagacactgtgataatatttagctctcaaaaaaataaggaggtaaataccattctttccagttcattcaaatcagattga

SEQ ID NO: 39897 - DNA, 726 bp, Escherichia coli; identical to SEQ ID NO: 12884

SEQ ID NO: 39898 - DNA, 564 bp, Escherichia coli
atgagtgaagacctgtcgcaacagtttgcacagtatgtaatgaaacacgcgccacaggatgcagaagctattctgacaaacaccagttcaccggagattgcagaacgtcgtcgggcgatggcctggtcttttgtgcaggaacaggtacagcctggtgttgataatgcctggcgtgaatcccgtggggacatcggtaaaggaatggagagcgtaccttcgggtggtggcagccaggatattattgctgatcatcaggggcatcaggccattattgagcaaagaacgcaggacagtaatatccgtaatgatgtaaaacatcaggttgataatatggtcacagaataccgaggcaatatcggagatactcagagcagcatacgtggcgaagaaaatattgtaggaagacagtattctgaactacaaaatcaccataaaacagaggcattatctcagaataataaatataatgaagaaaaatcgggtcaggaaagaatgcccggggctgacagtccacaggaactgatgaaaagagcaaaggagtatcaggataagcacaagcaataa

SEQ ID NO: 39899 - DNA, 318 bp, Escherichia coli; identical to SEQ ID NO: 7542

SEQ ID NO: 39900 - DNA, 573 bp, Escherichia coli
atgtgctgcgtataccggatgaaccgccccgccgctggtttgaccgtggtgttctgcgggaggtggtccgggaagcccgggccgaaatccgcagcatggcggatgccctggcaaaaatccggaaatgatgacgttggcagggataaatccccgccttttcctgccggtccccggacagagcaaaaggaagtcgccgccggctccgctttacccggccatgcagggcatgaccttgtggtttttcagttatgtggcctcagcgtcgtgtgcgggctgtgccgtgcctccatcgtagccgggcttgcgttgatgcaagggtacgcttcgccgctgcggtcacccggtccctccttcccgtctgccgtgattttccggtcgttcacccgctcagatttcgcggtctcaccctgcaactcccgtcagccgtgtgcgtcaggctgcggcttcccttgcgcccttgcaaccctgcaggcccggcaaagatggaggcacggcaccgcccggtgtcgcggaatatgtgaacaacggaggaaaactcatgcaatatgcgaaacctgtcactctgaatgttga

SEQ ID NO: 39901 - DNA, 585 bp, Escherichia coli
atggataaaaaattactggctcttttgatcctggcgagtctcagcccggcagaggcggcattaaccaaaatccccgcagggtttgaggttattgctcagggacagcaggagtatatcgaggtttatttttcagggaaaaatctcggtaaatattatgcaatggttaatcttgataccgtaacatttcttgatccagcaagtttatataacaagctggaactggatgtcgacgatcagaaaatcgcgcatatagtgaaagaaaaattatcgcagccgctagctcgccacggtgaattggcttgcggttatgtacgtactgactcagggtgtggttttctgaataccgatacgctggaaataatctataatgatgaagaaagttcggcaacgttgtttattaatccgcaatggaattcagctttcgatgcgaagtcattatatttaaatccagacaaaaatacggttaacgcttttatacatcagcaagacatcaatgttctggcacaggatgattaccaatcgttgtctattcagggaaacggtgcgctgggaataacagaaaatagctatattggtgcacactga

SEQ ID NO: 39902 - DNA, 753 bp, Escherichia coli
atgtttaatctgactaacactgcaaaaatcgttgtcccggcactggcgctgctggcgacagcggtcagtttctccagccacgcttcggtgacgcccgacaggacacggctggtgtttaacgaaagcgacaagtccatcagcgtcacgctgcgcaacaacgatcccaaactgccttatctggcgcagagctggatagaggatgcaaagggcaacaaaatcagctcgccgcttgcggtgcttccgccagtgcagcgcatcgatgcgatgatgaacggccaggtgaaggtgcaggggctgccggatatcaacaaactgccggccgaccgcgagagcgtgttctatttcaacgtgcgcgaaattccgccgaaatcaaataaaccgaacacactgcagattgcgctgcagacgcgtatcaaactgttctggcgaccgaaggcgctggagaacaccagcatgaaaagtccgtggcagcataaggtgacgctcatccgtaacggccaggacttcaccgtcaataacccgacgccgtactacgtgatcatcagcaacgccagcgctaaaaaaggcggcaacccgccggcgggattcacaccgctgatgatggagccgaaaacctccgcaccgctgaatgcgaagatggacagcgtgccggtgctgacctacatcaacgactacggcgcgcggatgccgctgtacttcaaatgcaccggcaacaactgccaggtggatgaagagcagagccgcaaaggctga

SEQ ID NO: 39903 - DNA, 510 bp, Escherichia coli
atgagtcacaagtttttagcgggcgcggggctactggtactggccggatggggtgtcagcggtttagccgttgctggcagcgatatcaaacaggtggatctgacgctgcgaatcctggtcgatggcccgccgccgtgctccgtgaagggaagcgcggtggaatttggcaatgtggtgatcaacaggatcgatggtaccaattaccaacaggatgcgaaatacaccctcaactgcggtaataaagtcagcgatgacttacggatgcagctcaaaggcaataccgccgtgatcaacggagaaacggttctcagcacggatatcgccggcctgggggtgcggatagaaaacgccgccgacaactccctgtttgcagttggtgaaaataactggacgccttttaatgtcaacacacagcctcagctgaaagcggtgccggtaaaacagagcggggtgcaactgacgccgtcggagtttaacgccacgatgaccatggtggtggattaccaatga

SEQ ID NO: 39904 - DNA, 489 bp, Escherichia coli
atgaaaaaattcctgctccttttactgtgcgctggttgcggggctgtgctggcggcggaagatgacatcacattccacggtacgctgatgtcgccgcccgcctgtagcatcagcggcgggcaaaccatcgaagtgcaatttcgcgatctcattatcgacagcattgacggcaattatggtcgtcaggaagtggactacgaactgagctgtgagtctgatgtccgcgatcccgagtggaatatgacactctcatggacggggactgccacctcctacaacgactctgctattgagacggatgtaccgggcttcggaattgagcttcagcatgacggtcagcgttttaagctcaacgagccgctttccattaacgccaccgattttagccagaagccaaagctggaggcggtaccggtcaaagcggctgatgcggtgctgacggacacgaccttttctgcttacgcaaccttacgggtggattaccaatga

SEQ ID NO: 39905 - DNA, 540 bp, Escherichia coli
atgaaaacagcacacatttattcacccggttatgcgctgttagcaggcctgctgctgaccgccagcacgggggcacgggcagtcgataacaacctgcatttttacggcaacctgctgagtaaatcctgcacgctggtggtggatggtgccaatctggcagaaatccattttcccaccgtcagcaaccgggatttgatagtcgccggacagtctgtgcatctgccggttgtgtttaagctgaaagactgcaaagggccagcgggctacaacgtcaaagtcacgctgagcggcaccgaagacagcggtcagccgggttttctggcagtcgatgacacctccaccgcgcagggcgtggggatagggatggaaacgctcgacggcaagcgggtggatattaacaacactaccggggcgacttttgcgcttaccaacggcaacaatgatattaatttccgggcctggatccaggcgaaaagcggtcgcgatgtgacgatcggtgaattcactgccagcctgaccgctaccttcgagtatatttaa

SEQ ID NO: 39906 - DNA, 858 bp, Escherichia coli
atgaaaattctacgttatgtcttttactttttgctgctcatttgcctcagcacaggagtgcaggccgcgaaaaagatcgcgacgttatacattcctgcgggatcaatgggagtgctcacaggttttcagtttaatctttctatcctcacaccagaaggcgcgcaatatggggtatatcaatccaggtcagttgcgattttgaatgtgccactagtatcatggactggtcaaggtactgctccggaactgcatttagaagacgcaagaaccatattaccaacttcacgttgcccgggccttgaagaatatgatgctcgcaccccacaaacgacctgggcctgcgtggaaatgaaagtcacagttttctatgacggtgatatgcatggttgtccgtggatagtttcctcgtatgtaaagagtgaggacgcaacggaggcaatatatacaggtaataatgttccctatattggcccgacaaaagtcagttctgactgtagcgcaatacctttagatccttatgatgtctcctggaatgaaaatacggtcgtgcataacaaaatagtcaggatgcaatcaacaggtgctgtgattgaacaaacgctgcccacttatctgatggaaggtggaaaactgtgtgatggtagtaaatatgacgagcgtggtgcttactgccgttttgtcgcacagcagatgaccttctccacttcgggctgtgacgatgccaaagtgacagtgacgccagagccgcaaccgatcacgtccaggcaactgcatgatatgaagctacgcgtggacacaacggcgcaacagccaatagatgccacctgccggttcacttacatactgaatatgtactag

SEQ ID NO: 39907 - DNA, 2676 bp, Escherichia coli
atggtaggttcgcgctggtataaatttgattttcataaccatactccggcttcgcatgattacaaaattcctgacatcagccccagagagtggcttctggcttatatgaaacagcatgtcgattgtgttgtaatcagcgatcataacagcggagcctgggtcgacgtgttgaagggtgagctggagaatatgtcccgggacgccagcaccggcgacctgccggaatttcggccactgacactctttccgggggttgaactgacagcgaccggtaacgtacatattctggctgtgctgcacacgcacagtacaagtgccgatgtggaaaggcttctggcccagtgcaataataatagccccattccgagtgaagtccctaaccatcagctcgttcttcaactgggccccgccggcatcatcagtaatatccgccgtaatccgaaggctgtttgtattcttgcgcacattgatgcagccaaaggtgtcttaagtctgactaatcaggcagagctcaccgcagcctttcaggaaagtccccatgccgttgagattcgacaccgggtggaggatatcaccgacggaacccgccggcggctgattgataatttaccgtggctacggggctctgatgcgcaccatcctgaacaagccggcatgcgaacctgctggctgaaaatgtcatcccctgattttgacggactcaggcatgcactgctcgatccggaaaactgtgtgctgtttgatcagctccctccggaggaacctgcgtcatatttgcgcagcctgaaattcagaacccgccactgccatcctgtgggtcaggattcggcctcggtggaattcagcccgttctataacgctgtaatcggctcaagaggcagcgggaagtccacgctcattgaaagcattcgtcttgcaatgcgcaaaacagaaggtctcactgcgacccaggggagtaagctggaccagttcattcggacggggatggaagcggattccttcatcgaatgtattttccacaaagaaggcacagatttccggctcagttggcgaccagacagtaagcatgaattacatatcttcagtgacggagaatggatgcctgacagtcactggtcggctgaccgttttccactctcgatttacagccagaaaatgctctatgagctggcttcggatactggtgcattcctgcgcgtctgtgatgagagcccggtggttaacaaacgggcctggaaagagcgctgggatcagctggaaagggaatatctgaatgaacaaatcacgttgcggggcctgcgtgccagacagggaagtgcggattcgctgcggggggaattatcggatgctgaacgtgccgtcagtcagctgcagtcaagcgcctattatccggtttgcagacagctggccctcgccagaaacgagctgtccgcagcaaccttacccctggagcactttgagcggcgtattgcagccattcaggctctggcagaagaaccgctgcagagatccgatatcccgccggaaccttccggtctgctgatggcatttatggcgcgcctgtcatctgtgcaacagcagtatgaccagcggctcaatactctcctggcagaatatgctgcagagctcgcgggtatcaggagagagcaatcttttattgccctccgaacagcagtgagtgaccaggaaacaaatgtagaaagtgaagctgtttccctgcgggccagagggcttaatcccgatgttctcaacgaactgatggcacgctgtgagtcactgaaaaatgagctgagaaattacgacggtcttgatggggcgatctctgcctctgttgcacggtctgagcagttgctggctgaaatgcgtgcccacagaatggcattgacagataaccggaaggcgtttctctcctccctgtcgctcagcgctctggaaatcaaaattcttcccctctgcgccccttatgaagatgttatatctggttaccagacggttaccggcatcagtaattttgccgaacgtatctacgataacagtgacgggagcggattactgagcgactttatcagtgaacgtccgttcagcccgttgcctgccgcaacagagaaaaaatacagggcgctggacgagctgaaagcgctgcatcacagcatccggctggataattcagaggctggggcggggcttcatggttctttccggaatcgtctcaggagtctgaatgaccagcagctggatgccctgcaatgctggtatcctgatgacggcatccacatacgttaccagacccccggggggcagatggaagacattgcctttgcttctccggggcaaaagggagcgagtatgctgcagttcctcttatcctatggcaccgatcctctactactggatcaaccggaggatgacctggactgcctgatgctgagcatgagcgtgatccctgccatcatgtcgaacaagaaacgccggcagctgattatcgtgtcgcactctgcccctatagtggttaacggcgatgcagaatatgttatcagtatgcagcacgatcgcacaggcctgtatccaggactctgcggtgcactgcaggaagctccgatgaaggcactgatatgccgtcaaatggaggggggagaaaaagcgtttcgttcgcgctatgagcgtattcttagctga

SEQ ID NO: 39908 - DNA, 168 bp, Escherichia coli
atgtttactgaaaaacaaaaaatccgcgccattgagcttttttgtcgggataaaacggaaagccgctggccagccagctgttgtttactcgtcacgcgacaggcaagcctgttcaaaaaacaggcttgccgtacaataattctctatatccaaactgaccccttatag

SEQ ID NO: 39909 - DNA, 438 bp, Escherichia coli
atgggagagatggatcagtacggtaacgtcaacgtctcccatctcaatggcaatctgattggccccggcggatttctcgaaattgcgcaaaatgcccgtaaagtggtgttctgcggcacgttcgacgctaaaggcagcaagatcgatataacaccagatggcttgcatatcgcccagtcaggtcaaatccctaaactggttaccaaggtggaaaaaatcacttttagcgccgcctacgcacagcaaagtggtcaggaagtgttgtatatcactgaacgcgcagtattccagttaacggcagaaggcgttgaattaattgaaatcgcgccgggtgtggagattgagcgcgacattctgccgtatatggctttccgtccaattatcaagcacccacgcctgatggaaagtagcctgtttacgccgatggaggatgcatga

SEQ ID NO: 39910 - DNA, 192 bp, Escherichia coli
atgaaaataaaagtatccgctggcattatcggtgctgttcttatgttatccgcaagccagtcctgggcagtgacattaaaactgagtcataatcaggataagtctcatcctgttcataaagcgatggagttctttgcgaaaaagagcaaagagtactctaacggtgatatggtaatgactccaacttattga

SEQ ID NO: 39911 - DNA, 162 bp, Escherichia coli; identical to SEQ ID NO: 27637

SEQ ID NO: 39912 - DNA, 1641 bp, Escherichia coli
atgctcgccaacggaataattagcggcgaattaaattccgccatttatatagcaccaacccgtgctttagtaaatgaaataacacaaaaatttataatcaagactttaccatatcaaaatgaggtcagagtaacatccataccaacaattaataacgaatataataagcagatatttgtcttaacacaggaaagacttcaagtattgcttgataattttgaagaaaaaatagacttggtagttattgacgaagcacaatcaatttctgacgaaattaggggaatgatattacaggactgccttgataaaattagcacacaaaaccctaatgcaaaatatgttttcctcgcgcctggtgctgaaggttttgatgatttagcagatattattggaatcgatgcaatccatattgaaaaaacaaatctatctcctgtagttcaaaacaaaattatcgtcaaagttgatccatcaaaagaaaacaacttacaattatcattattagacaattcagacatattaccgatcggagaaatagaatcgacaaggggtttcgccaatgaaaatacaagattggcggctgtcgcattagaattaggaaaaaatgaggggtctttagtttacggaaccggagctgaaaatgcagaagatgtagctaagcaaatatcttctggattacctcttttagaggatgacagtgaattacaagaactctcaaaatttataaaaaaacatgtccacgaggattactctcttgcaaacctcgtattgagaggggttggataccattatggtaaaatgccaagtttattaagagaaacattagaaaaaaatttcacgaataataaactgaagtttttagtttgcacaacaaccctttttcaaggggttaatctgcctgcaaagaatgtttttattgatacacctacacgaggaaacaggggagaaaaattagatccagcatcgctatggaatttcgcagggcgggcaggtagattaggttatgcattttcgggaaatgtttatcttattgactatgatgattgggtaaccaagcctttagattccaaaatagacttcaaaattacttcatctttaaagaaagtaattaatgaagattttgacacagtaatatcacggttagacaaaaataatcattcaggagtgacgccatatagtaatattgatgcagcggcaggtcttttaatctccagagccgcaaaaggagatttgcataattttcttaaaagatcatttcgaactttatctgataaatcaaaacttgaaactattgataatgccacttatatctcattagaatcacttaaaatacctcatgaggttttaactctgaactggacagttgatccatttggacaggaacgattgtacaatagatttatccagaaaataaaggaaggtaaagttgacgaacttatacctcgccatccttcaggtgatgtttacaaaaattatgttggtgtttttagcagaataaataaatacatccttaaccataacacatctaaattttctaactatctaacttcaattgctttgaattggatgaggggtaaatctctgccggagataatctctctctccataaataagaaaaaagaaaaaaatccactaggcctgtaa

SEQ ID NO: 39913 - DNA, 558 bp, Escherichia coli
  misc_feature (479)..(503): n is a, c, g, or t
gtgaacactttagctgctgaaatcattagccaaataaaaaaacatttagagttcaaaaacgacctcagttttctttttgcacactcttttttgcaaaatcataaaagaacctcttttgctacaaaacaaagcaaaattggcgatgaaaacatagttatttataaaagattaattgaatctgcatatttgttttctcaatctgagtcagatgaagataagaatttagctcaaagcattgcataccatttaaatgtagtaaccggtgatgattatttgaaacaaatgtcagaaaatcttttaagagttttgggcaacttccctggagcaacttatcttcaacaagaaaatggatttataccagaaagtttttatgccttcttaaaaagatctttcatagaaaatgaaaataaaataaagatctccaacaaagaaataacattaacaaactttcagaaaagagtatgggagtcattgcactnnnnnnnnnnnnnnnnnnnnnnnnntcgaatgtccctcaagctatatcagctccaacatcagccggaaaatcgttcttag

SEQ ID NO: 39914 - DNA, 360 bp, Escherichia coli
ttgcgttctgaaacgttttttgtcaaatttattgaacaactgaaaggtgtttcggttgaggatgatgttgaattcaatttttttgaattgggtggttccggatatctcgaaaatccaactacggatttgatggctttgtttatgggagcccagaaaatggtgccgccatggttgctcaaagcattgctatgttgcctggatgattccctcgatgttgatgaaattgatttcacttctctggagctaatgagagaggcccgaacagaagatgggaaatatattgatattcttatcagacatgatgaatcaagagttcagcaagtggacttttttttatcaggagtttttaagtcatcttaa

SEQ ID NO: 39915 - DNA, 1032 bp, Escherichia coli
atggcgttgaaactattagccaataataacgcaaagagtgtgctcgctgcgggtattagcgcgtccgctaccgttattaccgtgggtactggagcggggtctttattcccatcgccagtttcgggacagagttatttcaaattaacgataaccgacgcggccacgaaaacaatttctgaaattatgcacgtcacatctgtatctggtgacgtgatgacagtaattcgtggtcaggaaggaactacggcgcgcgtatggtcaacgaatgacattgtcgcgaatttaatgaccgccgggtcattattatctttcctgcagatcagtaataacctgtcagaaattaaagatgccggtgaagatgcggtaaatgaagcccgttataacctcggaatatctgattcctctggttttgtcgggcgttctcttggcgctccaaaagctttctatgcaaacggaacctatacgcgatctcctctggcccgttatgcaaaagtaacgttgaccggcgccggtggtggcggtggcggctgccaggcctccaacaatacagaaaccttctccggtgccggcggcggtgcgggtgcgaccattatcgtatgggttgacctgtctgctgccagttcttacgcgattactgtcggcaagggtggtaagggcggagttggcgcagtaagtggtgcggatggtggtgctacctcgtttgccagcctgttctcagctcctggcgggaaaggcggcgtgaagtcaggcgtgtccaataccgccggcggcgccggaggtacggcggcgaccggagatatcaggatcaacggtggtaccggctcagatggacagacaggctcaagccttctaacgggcaacggcggggcgtcgtattttggcggcggtggccgggcgggttctcaggccggtattgctggcgcagctcccggatccggtggtggtggcgcgtatgaccttgggtttaccggtacggcatttaccggtggtgatggtgctactggcatggcgatcgtggaagaattcgcgtaa

SEQ ID NO: 39916 - DNA, 1890 bp, Escherichia coli
atgaaatccgagacgctaactgtccaacaactttttcaagaccgccgacaatactgtgttccattctatcaacgtgcctatgtatggactcagcgaaaccaatggtcagctctactggaggatatcctagagaaagcacaatcccggctctcgggtacaaaaccaactccccatttccttggtgcagtggtactggaacctcaaccaaaaaaaggattattcggtgtagattccatacatattattgatggtcagcaacgattgaccactcttcaatatgttctggcatccatccgattagcattacgtgcgacagatctttccaacttagagcctctcatttcgtcttgcctgaaaaactcaaacgaagacacaatgcgaaataaagaagtagagcgcttcaaactgtggccaacttttcgggatcaaactcattttattcaaagttttaatgttgaaaatattgacgatatccggaatgtattctctgatagtttcacgcagcatggtacgttgcgtaagcattttaatcacccgccatcactagaagcattatgtttttttactgaagcctttataaagtggattaaaatagaaaatcactcaccacgagaaaatgctgtagcattaattgaggctgtcttgacggatctgaaactagtaagcatatttctcgaggctgaagatgacgctcaaataatttttgaaacattaaatggcagaggtgcggaacttcatgccacagatcttattcgcaattatatttttatgtgcgctgaacatgaaaatattaatgctgttgaattatatgagaatgagtggaagatctttgaagatacgtactggtcagaaagacaacgtcgtggtcgtattaataaaccacgcatggagtggctagtgcatgcaacattgcaatcagaaaggcaacgtgaaatcgatctgtctcgtctttacaatgagtatcgtgattatgtaagtaaggacttgccttcacaacgagcagatctgcaagtaaagcgcctcaaacaatatgcatcacaatataaagaattggttggtggttttggcacaacccccatctcacactttggacatcgcatcgcagcctatgatgtgacgacactttatccgcttgctttgttcatttcgatagctaacatcgccgatgatgagaaagcagccatgtataatgatcttgtctcctacgtagtacgaagagccgtatgtggcctgacgccaaagaattacaacaatgtatttatgaatgtattgcggcacttgtctaaaacagaaatttccagtgttgagttacgtaatatcctcaatagcttaaatggcgaagcctcacgttggcctggggactcagaatttctcaacgcttgcatcaatgctccactttatcctggcaggctcgacgcaccgaaaatgcgctcaatgttaacggaacttgaaagagaactttgtcgccaagtgaagacagagaagcctgatgttccaaatctttctaacctcgatatcgatcatcttatgcctcaaagttggtattcctgttggcctctcgaaaatggtcatatggtgacaaattcagatgctacggtattgaaccaaattgttctgtctggaaccgatcttaccccagaacagctactggtaaggaaacggcaacaagcgatagctacgttgggaaatctaactttgcttaaccttagcgtaaaccgttctgttcagaatgctgtatttctgaaaaaacgtgatgctctcatcgtccacaccaatctacgactgaacattccacttatagttaaggataaatgggatgaggatgaaatcctggagcggggtaaaaagttgggggaaattgcattgaaagtatggccaaaacacgattaa

SEQ ID NO: 39917 - DNA, 147 bp, Escherichia coli
atgagcgtgctggagcacctcaatgcaaaagacgggaaggaaacactctgtttcgctgggcagggcattcagcagcagtggcagatgaaacgcgagatattttcgcaccggtatacaactagattttctggcattttaggtggttag

SEQ ID NO: 39918 - DNA, 666 bp, Escherichia coli
atgctcacgcaggatcccttcaacattggaagagatgtaaattattttagagcggaggtgcaaaagcacctcagaaccactgatgaaataaacaaatcagtatcaatatttaggcaaataagtctttgtaatacaattttaagtcacaatcctaatctaaatcactcttcttatataaaaggttttatatatgataccttaaactccttaattgccattataaaaaaaagagaacggtatctccaactgaacttccgctcaatggtggagcatgtggccagaataagcctcaataagaactacaatggtggggattttgaccaaactgtacgtcgtagagactttgacttcttaaaagcccaacaagtcgatgaaggctggtcttatttacataatgtctatatcaacgcctgttattatgttcactcctccccccaagcgaacctaaatgttacatcaacatttatatcacttatggagggagattgtaattcaacacagcataaaatggtgaaaaaacttcatgaggtagtatcggcgctgatgagaatcattataaagtattatcatcagcatatctcaaacattttctttagaaacaaaaaggatttagagaaaataatgggaaaaagcctttattcatattataccagcttagacaattaa

SEQ ID NO: 39919 - DNA, 399 bp, Escherichia coli
atgaataaacaattaattaaagcgctcaataaagctaataatatgcccatgaccaaagaaaacttcttaggcttggtaattatgttgattctttcaaaagaggtttttagatcaaattttgatgttagtaaatttattaacaaaaccttcaaaatatcttttttgaattatgctgtacggtcaagaactttgatgtgcgctaaaatttgcagacatattaatgaattaagtgagaatgacataaagatggcttatacgcatttcttaaacaacattaacacattagacattatttttaatgatgcaaataaaacaagccaaaaatccacatctaaaagcaagcatgctataaggaatttaaatatttggattaatgcaaataaaaaggaagaagaataa

SEQ ID NO: 39920 - DNA, 846 bp, Escherichia coli
atgactgcaccagtaattagttttatcaatatgaaaggtggggttggtaaaacaactttatgcgttgggattgctgagtttttagccaaccatatggggcgcaaggttctagttatcgatattgatcctcaatttaatgccactcagtccttaatggggcattatgatcgagtagaagaatatatgactgcccttcgccctaataatcaaaccattcgaaagatttttgagcttccaaattcattaatggaagatgaaaagaaagtgacaccagaacaggtcattactaaagtttcagacaatcttgatattatcttaggtgatataaacattatctttgatactaaccaagagggtattagaataaaaatgttgcgtaaattcatcaccgaaaatgacttaaaagaaagttacgactatatctttatcgatagccccccaacaatctcattatttacagataccgcactccttgcttctgattattatcttactccggttaaaattgatcactactcggtgcttggagcaagcagtttaaatagcgttataagaaatatgcgcacacatcatgagaaagaaatcaagcaagtcggttacatttatacaaacactgatgctgaaatgaccaataaaacaagggaaattaaagaacaattcgaaaaccatactcaatttacaaatttttatttctttgaaaatcaattaacctacgtgcgtgatttaatggtaggttatcaaggaaatattccttcttgttattcaaagtcacgccaagatatagaaaagatctgtaacgaatttattaacagagtggctcacttggaaggtaacacaaatgaataa

SEQ ID NO: 39921 - DNA, 591 bp, Escherichia coli
atgcgagaaaacatcctcaacatgccccatcatcttcgccgacaacgtgtggtcactgctgaacaggctgcaatggctatggccggtgtgtatcgttttgcatgcttaagagaatttgataaaagttatgaccccgaaagatacaacatggcttgtagctattttcgtatcattcaagcggctcttaacaaagagctaagcccgaaaactgtttggactgatatcggcggtaattttgtcaacgctgagttttacgctgaagatatttggtcctgggcaatcaaagagctatctgctgaagatgtatggtatggctgtgaggaagaaaatgcagctcatgctaatgaacatgttcctggggtatggggcgagttcgctggcaaagacactgctttgaaattgatcgctggtatggcgattgcgcttgaaaaagcgggtggaaaatatgttcgcggtaagaaattgaacaaatccgaagttgccagaagtgcctcaagaatcatattggagcatggcgatggcatcgatgtgactgataaggcattgactatgctaattgatgaagctctgaacacgtacgcttccaaatag

SEQ ID NO: 39922 - DNA, 198 bp, Escherichia coli
atgtcccaatcccttatccgcttacctgaagttcagcgtagaaccggctatagcaaggcttggatctatcgactcatggctgagcaacgtttcccctcatccataaaaattggttctcgagcaattgctttcattgaaagcgaaattgatgaatggattagtgagcgcattgaatcgtcacgcagccaaacgaactga

SEQ ID NO: 39923 - DNA, 246 bp, Escherichia coli
atggctactaccccaacccaaaaactgcccaaattcacctggcttttcctcggtacgccgaaaggccggacctgtactcccgttgttatccgcatcgttgccgacagtgagcaagaagcccgcgagttttattcccgctgggatcttatctttgccgccaaaattcgctctgaatgttcgctttatcaatacagtagcggcgcgtttgaactggatgttgcgaaactgggaggtagccatgtttaa

SEQ ID NO: 39924 - DNA, 876 bp, Escherichia coli
atgtttaacctccagaccctgacagctaaagcccgcgagctgcgcggcaacgtggtaaaagccactaccacgaaaggcacccgcaccatgacccccgtttacgaacgggaagagcagcgcaaactgcgcgaacgcatccagcagacccagccggagtgggttttactctggtgggatattgcgaccgtaaccggctggcgtaccagcgacgtgtgcaacttccgttactcctgcatcaactgggaaaccggcattgcaacaatcatcgtggcgaagcagaccaaagcagcggaagccagagcgacccggaaggggatcgagattgttcgccagcagcgcaaggacgctgcccggcttgctggcgatcacattgggtacatgcactgggatagcgtgagctgcgacgagctggccgccggcatgacggaagaagaacaggcgattgtgtttgagctggtggcaaaggctgaagtgaagcacgacaccaaacagctgccgccgggcatcatcaaacgactgcgggaacgcatggagcgcaatcttatcggtgacgacctggtattttcccgcagccagattgaaagtaaccgttgccagtctctggaaggtagcgttagccgtcagacgatctggaagaaactgcacaacgtcatggtgtggtttacccgcgtagtaaacacgcgtctgcgcctgagcgcctattccagccgcaaaattgccgcctttaatctcatgtccgccggcggcgaacagggcttgctggtcgcctctgaaatgctcggacacagtaacccggcaatcacccggacttatctccagctggggagcaaggccgcggctatccagacacgcctcgctatggaggtgaatgcatga

SEQ ID NO: 39925 - DNA, 216 bp, Escherichia coli
atgacaaagccaactcaaaacgaatccattgccatgctgacgaccagcgcaggccaggcgcttgaatacagccgtcaggcgcttgccgttctcgatatgtggataaacaccctggcgccggatgatgaaatggaaagctttcgtgtcgcggcggttcacagcctggtcagtcaggcatcggaatatctggtgaaagtcagggaggtcagaccatga

SEQ ID NO: 39926 - DNA, 204 bp, Escherichia coli
atgaccgctatttataatctggtgcgctgtagcgatggcaaaactgtattcagttttccggccggcggccgctatctggtggacacgtcgaacgggttgcagtcgatgcgcccccttatggacgacgagatccttttcacggtggagagtgccgcgcgctttctgaagaagattggttatcaggtaatcccgccagcggcgtga

SEQ ID NO: 39927 - DNA, 315 bp, Escherichia coli
atgacgattaaaatttccggcttagctgctggtggccgcgctcaccctgaaatcaggccgggcgataaatggaaggacagccggggcagcatcgtaattatcgaaagttaccgattcgacagagtgacatattgccgcgaggggtacagctcaccgtgtttttgcacgccagaaagactggtgcgggaatttgaatttgtttcttccgcgccggtcgccggcgaaaaagatatcgatcggattatgcgggtacagggcatcgagcgaattcgtgtcatgcgggaaatcatcagggagcgagggaacagaaaatga

SEQ ID NO: 39928 - DNA, 1764 bp, Escherichia coli
atgaagaatgcaccaaaccttaaaaagcagccggcggatctcatggaggagtcaatcatctttgccggcgccgatgcctggacgttcgccaaagcatggcaggaaatgaacccgattggcgacacggtgccgccggttgtgctggataaaaagcagctggcggagctggagaatatccgcattgttgatgatggccggctctatgcccgggtttgccgcggcgggcatctgaccgaacggcagataaccattctcgcgacaaagctggcggtggccggcgtggagcgcgcgcaattctactctgaaggttatcagcttctggaggactggacgccgcagctgccgcgcctcaaagccgatgcggaagccggcaaaagtatggtgatcggcaaaccgctgacggatgtaaacctccgcgacctggctgataacgaaaaggcgctcatactggccgcgcgttacaccggcattgcaatcaacgaaaacagcgagggcgtgtacgtctaccgcgccggcatttgggagaaaacgtctatgctcgagctgagccgcgaaatggtggctatctacaacgagaacaaaaccaacttcagcaagcgcgcgatcaacaacgttatcgacgccctgaaaatcgttatcccggtgatgggggagccgcggcggagcctgatcccctttgcaaacggtgtctacgatatggaaaccggcattttctccgaacacagccaggacaactggctaaccaatcataacggcgtgacctacacgccagcggtaccgggcgaaaacctccgcgaccacgcgccgaacttccataaatggctaagttacgcatcagatagagacgcaattaagatgcagcgcatcgctgcagcgctctttatggtgctggcgaaccggtacgactggcagctgttcctcgagataaccggtgatggcggtagcgggaaaagtgtctttacccatatcgctacgatgctggccggtgcgcataacaccgccagcgggaacatggcggcgctcgacagcgcgcgcgggcgggcgcagttcgtcgggaaaagcatgataacgcttcctgatcagcccaaatattcaggagagggtaccgggataaaagcgataaccggcggggatgccgtggagatcgacccgaaacacgagcaccagtacaccgccgttttgcgggcggtggttgtggccacgaacaacacgccgatgattttcaccgaacgtgccggcggcgtttcccggcgacgcgtaattttccagtttaaccggcgcgtcagcgaggaggataaagatcccgacctggcagaaaagatatccgctgaaattccggtggtggttcgtcggctgctggcgaactttgcgaacccggaaaaagcgcgggcgctgctgctggagcaacggaacagcgaagaagcactggaggtgaagcagaaaacggatccgctttatgccttctgcgcgcatcttgagcggctggctgattgtgcgggaatgatggtaggaaaccgcaatccgcctcactatccgcgaatttatctctatcacgcttacctggcattcctggaggccaacggtttcgacaagccgctgacgctgaataaattcgcagaggggatggaaagcgcgatgagggagtttaatcacgagtaccgtaaggaacggagagcccgtggcatggtgaccaacgttgaactttcagagagtgcggaagactggttacctcagacgcatcctgtagccggtcataaagaatga

SEQ ID NO: 39929 - DNA, 165 bp, Escherichia coli
atgttttataagcaatttatagcctttatgaacaccatgtataccttgagggcaaattctttaaaacgcatccattcatttcacgttgtgcatcccctcgatttcattaccatcatttcattacttgcaatgattattgtgattgttgcgttttttatcatgtga

SEQ ID NO: 39930 - DNA, 174 bp, Escherichia coli
atgaaaaaggaacacgtgaaacccgttcttctgagcgctgctcaggttgcggcattaaaagccatccaggagcaggaacgccagaaatccgggtttggtatcgcaccatcaatccatgatgtggcgagaaaaatatttgatgttgggctatccagaatggaggtaagccagtga

SEQ ID NO: 39931 - DNA, 795 bp, Escherichia coli
gtgagttacgaaattaaaattgggcaaagaagcattgctatcactgataacgtttctgaagtggttgcgcctaatgagcagatggcgattctttttaaagggatgacgaatatttttggtgatctgcgggccgtggcaatgttagctgaggcggaagccgatgccgtagaggttatccgcaatgatccggatttaaacgaagcagcaaaaaaccgccgggccagagatgcggcaaatagagacacactcacggctttcactagaagtacggcgatgatcagcgaacaagctgaaaatattctcaattatcttaagaccaaactggccccagttgctccgttggccgagggtgatgttgtcggatttatgcgagatagtgagctacggaatgtatttcgctcgctggatggagctgcgaaagaaaagctgatggtagcaatgtatgccgggaatcagactgatttatgtgacgccctgctacgaggtaacgccatttgctcaggcgtaacagattctcagctggagcgactgacttttgcccgtatcgccacagataacggagccgttatcaaatctgtttctaacctggtaaaagccattaaccgcaacctgcagcaaatcatcgctgttcgcacatggtatgcaaatctggtatttggaagcaatgacgaccctcgcgatgtggctcctcgagtctccgggctggcgaatctgtccgagtacattgatggtatggaaaaaattaattcccgacagggtaaagcagatgatgaagatgggaaacaggccgcctga

SEQ ID NO: 39932 - DNA, 498 bp, Escherichia coli
atgctgttaagtaaatcagcctacgccaggcatatgggcgttagccgacaaacagtttacggctggatagcacgtggtgagattgtgctatcaggcgataaagtggatgttgaagcaacacaggcgaagcaaaattctgctggtgctggtgctggtgatcatcacaatgcaatgacgtgggcgcaggccgccgcgtgggtatgggggcatgacggcgggaaagagctgccggctgatattaatgctggccagcgaatagaggcagcagccgctgagctgggttttgatgttcagcacgagtccgatgaacaattgctgattctcttccggccggatgaagaaacccacagcttctatggcaaagaccgtgcagcaggcgctttacggtttcttcgttctgagctggcttacgttgccacaatgcaccccgatacgctggatgactggaacaaaactggtttaatgtcactctgcctgctggacggcgaaaaactgtaa

SEQ ID NO: 39933 - DNA, 1431 bp, Escherichia coli
atgagatacttatcaatttcttatagctggccggcactcttagagaaaattagtattgacctgacaaactctaatgaactatataaagatcttgtcagagaaaacagtaataaagatggtattatagaccttccaaaagtggcaacgcaattagagcaaatatttgatgcaacacttaaagcagataggaatggaaagttcaaaaatatcaatgacttatactacagctcggaagatacctcctcaaatattagcagatttaaaatctatctttcacagttagtgaatatcacagatttaaaattaggagttcaagatgaaatatctgaattagtaaaagcctccaaaaatattgcctctgtgattacaacaaactatgataattttatcgaaagtgcaattggttataaccctgtaattgggaatgatatacttttaagcaatccttatggttctgtttataaaattcacggatgcgttagcaaaccagaatccataataataactggtgatgactatgttcattttgataaaaaatatgagttgattcgtgctcaactcctatccttatttatacataacccgattatatttatggggtatagaataggtgaccctaatattaaaaaagtattaaaaacaatattttcatacataccacctcgttctaaaattgcagaaaaaataaaaaacaacttccttctgattgaaagagaagaaggcattgataatttaaacgttgtctctcacgatctcgaagtagaagatgctgggttaattagcattaataaaatcgttacagataacttctcagacatatataaagaacttgctcaactgcacttaccagtttcggtaatggatatacgcagagcagagagtgtctttggtaaaataaaggaaggcggagacataaaagtaaaacttgttggggatttggacacgctcagaaatgatgaacttgttctagccgtcggttctgttaactctataaaaatacacatgcaaacacctcaggagatgatggaaaactattttgatctaatttcaaatcaggagtcgcatgttgtcgagttgcttgacaagttcaccatcaataaaagatcatatttcccagcttatgcttttcataaattcagtccaggtgttaaatgcttaacatcattaatgaaaaatcaaaaaagattaatagcgtcaaactatgctaggttacccaagaatcaaagaatagtagaacacaccattgaagatatttacgctaaacattcagatattgatagcaaattacaaaatattattttcttcaatgctcatgatggacatatatccttggaagatttagaaaaacatgtccgagaatttaaggacaagtctcatactgattatcgcaaacttttagcattgtatgattacctcgcacacaatgtataa

SEQ ID NO: 39934 - DNA, 1128 bp, Escherichia coli
atgacgataacagcctattctagaaaatttaagcgtgaactggatgctaagcagttggaaaaccttttcgaacgtagcaactcagatccttctttaagttttagagattttgttaaagaggatgttgaatgcccggcatgcaatgtttctggtggttattacgtttcggaaggaagatcgctcagtaacggcaaagttgtaaagcaagcacactttgcatttcgagacaatctaggtaaagactctcacctcccattttgtgatttttatactggagatgataagttgaacgttgtttcaaatgaaggccgaattgattttatgcgctcgggttctgaagcgacacgcttaataggtcttatggtctgcgcgggaattcaggagaagatttttacgcaagaagatatacgtaacatgcgccaatggttcttagatttaagagaaaaaggcacttttacatttaatttaagccctcacataatttaccttgcaaaggcctcattgattagatacaagagaaactatgataattatgttgtcgatctcagcgccacaaacaaaagttggttcgacatcaatgaggaagtatatcaatccctttatttcaagtaccctcaattctatctaaaccgtaatgagaatcctgaactttggaatgtaaggcttaaatcagtagtcaaaaaagcaagaactatagtaattaaagactctggaacatcaacatttgacagatcaattctcaacgaaaaatatgagatagctactcaaatggcaagactgattcgagactaccaccctcgactccgtatgattattagttacacaccaacatctatcaaagcaaacaacccactcatggctttatctgcattattattacatgtttccgattggaatattcaggaaagttgtaaaaaaatccaagcaattttagcagttgagaaagttgacgataattctgcaggaaacattattggattaaacccattcattcaccatagcgcttggattcttgttaaagctttaaacgacttacattctaatttagacaaagaaattgattttgataaagcattcaacgaagaaaaagagaggctcatgaaaatttactatccaaatggtcaataa

SEQ ID NO: 39935 - DNA, 630 bp, Escherichia coli
atgaactggcaactcatctcattttttggcgatagcaccgttttgctgcccagcgcagcggcgctgtttattgtcctgatgctgcgtaaaacgtcgcggttgctggcgtggcagtggagtttgctgttcggcatcaccggcgccatcgtctgcgcctccaaactggcctttatgggctggggtctgggtattcgcgaactggattacaccggcttcagcggccactcagcgctctccgcggccttctggcctatcttcctgtggctgcttagcgcgcgtttttccgcgggcttgcaaaaagcagccgtcgccaccggctatattctggccgctgtggtgggttattcacggctggtcatccatgcgcattccgtctcggaagtgatcgctggcctgctgctcggcgctgctggcagcgctttgttcctgttgctgcaaaaacgaatttctaattccgactacaagactataccttggggtggggttgcatgcctggtgatggtcccgcttattctgttgcatagcggcagtaaagcgccgactcagtccctgctggggcaaatcgccaccgcaattgggccgctggataaaccttttactagagaagaccttcacaagcaggcctggtaa

SEQ ID NO: 39936 - DNA, 951 bp, Escherichia coli
atgagcaaacaatcacagcatgtattaattgccctgccccacccgctgcttcacttggtcagtttaggtttagtctcgtttatctttacccttttctcgcttgagctttcgcagtttggcacccaactcgccccactgtggttcccgacgtccatcatgatggtggcgttttatcgccatgccgggcgcatgtggccgggaattgcgctgagctgctcgctgggaaatatcgccgcatccatcctgcttttttccaccagctcgctgaacatgacctggacgaccatcaatattgttgaagccgtggtcggggcagtgctgctacgtaaattgctgccgtggtataaccccttgcaaaatctggctgactggctgcgtctggcactcggcagcgccattgttccgcctctgttagggggtgttctggttgtcctgctgacgcccggagacgatcctctcagggcatttttgatatgggtactgtcagaatccatcggcgctctggcactggtgccgctgggattgttatttaaaccacactatctgctgcgccatcgcaacccacggttgctttttgagtcgctgctcacgttagccatcacactgacgttaagctggctttcgatgctgtatctgccgtggccttttactttcattattgtgctgttgatgtggagcgccgtgcgcctgccacgaatggaagcctttttgatcttccttaccacggtgatgatggtgtcactgatgatggccgcggatccctccctgcttgctacgccgcgtacatacctgatgagccatatgccgtggctaccgtttttgctgatcctgctgcccgccaacatcatgaccatggtgatgtatgcctttcgtgcggaacgcaaacacatttccgaaagcgaaacccgctttcggaacgcgatggaatattcgccatcggcatggcattag

SEQ ID NO: 39937 - DNA, 2379 bp, Escherichia coli
gtgggtatcaatgtcggtaattttggtagcggtatcgtaaatgtcagtaatggtgccacccttaattcaacgggctatggatttatcggaggaaatgcctccggtaaggggatagttaatatttcaacggacagtctctggaatttaaagacatcatctactaacgcacaattgctacaggtcggtgtattaggcacgggtgaactgaatattaccaccggaggtatagttaaagcgcgtgatacacagatagctctcaatgacaaaagtaagggcgacgtgagggtggatgggcagaactctcttcttgaaacattcaatatgtacgtagggacatctggtacgggtacgttaaccctgacgaataacggtacgctgaatgtcgaaggtggagaagtttacttaggtgtttttgagcctgctgtaggaacgctaaacattggtgctgctcacggtgaggcggcggcagatgccggatttatcaccaatgcgacgaaagtggagtttggtcttggcgaaggcgtttttgtctttaatcataccaataacagtgatgccggctaccaggtcgatatgctgattacaggtgacgataaagacggaaaagtgatccatgatgcaggccatacggtgttcaatgcagggaatacttatagcggtaaaacgctggtcaatgacggcctcctgaccattgcgtctcatacggcagatggggtaacgggcatggggtcgagtgaagtaaccattgcaaaccccggtacgctcgacattctcgcatcaacgaacagtgcaggagattacacgctgaccaatgcgctcaaaggcgatggcttgatgcgagtgcagctgtcatcctccgacaagatgtttggctttacccatgcaacagggactgaattcgccggtgttgcccaactgaaagacagtaccttcactctggaacgcgacaacaccgctgcgcttactcacgcgatgttgcagtctgacagtgaaaataccacatcggtaaaagttggagagcaatccattggtggactggccatgaatggaggtaccatcattttcgatacggatattcctgctgcgacgctcgcggagggatatatcagcgtcgatacgctggttgtcggcgcgggtgactacacctggaaaggccgtaactatcaggtaaacgggacgggcgacgtgcttatcgacgtgcctaaaccgtggaatgatcccatggcgaataaccctctgacgacgctcaatttgctggaacacgacgatagccatgtcggcgttcaactggtgaaggcgcaaacggttattgggtcgggtggctcattaacgttacgtgatttacagggcgacgaggtggaagcggacaaaacgttacacattgcgcaaaacggaacggtggtcgccgagggtgattatggattccgcctcacgaccgcaccaggtaatggtttgtacgttaactatgggctgaaagcgctgaacatccatggtgggcaaaagctgacgttagccgaacatggcggagcctatggcgcaacggccgatatgtcggcaaaaatcggtggtgaaggggatctggcaatcaatacggtgcgacaggtttcgctttccaacggtcagaacgactatcagggggcaacctacgttcagatggggacattacgtaccgatgcggatggtgcacttggcaacacccgggaactgaacatcagcaacgcggccatcgtcgatcttaatggatcgacgcagacggtagagacattcaccgggcagatgggttcgactgttttgttcaaagagggggcgctgacggtaaataaaggtgggatcagtcagggtgaactgacaggtggcggaaacctgaatgttacagggggaacgctggctatcgaggggcttaatgcacgctacaatgcgttaaccagcattagcccaaatgcggaagtcagcctcgataatactcaggggttaggcagaggaaatattgccaatgacggtctgttaacgctaaaaaacgtgactggcgaactgcgtaatagcataagcgggaagggtatcgtgagcgcaaccgccaggacagatgtagagttggatggcgataatagccgctttgtggggcaattcaacattgatacaggcagcgcgctcagcgtcaacgagcagaaaaacctgggtgatgcttccgttatcaataatggcctgctcaccatctccactgagcgtagctgggcgatgacgcacagtatcagcggtagcggtgatgtgacaaaactgggtaccgggatcctgactcttaacaacgattccgcggcgtatcagggtacgacggatatcgtgggggggggaaattgctttcggttccgactctgccattaa

SEQ ID NO: 39938 - DNA, 405 bp, Escherichia coli
atgttccctgtttcatcaattggtaatgatattagtagtgatttagtccgtcgaaaaatgaatgaccttcctgaaagccctataggaaataacctcgaagcactagcaccaggtatagaaaaactaaaacagacctctattgaaatggtcactttacttaacgcgttacaaccaggtggaaaatgcattatcactggtgattttcaaaaagaattagcgtacttacaaaatgtaattctttataatgactcgtctcttcgtctggattttttaggttataacgcccaaattattcaacgatcggacaatacctgcgaacttaccattaatgaaccattaaagaaccagaaaatatccacaggcaatatcaatattaattgtccattgaaatatatttacaattaa

SEQ ID NO: 39939 - DNA, 171 bp, Escherichia coli
gtgtttacacaggagctgctccagttcgtgcaacgaagaaacggtccaggtgggcgcgatgccttctggttgctcgcgattgtgcgcattcagctagcaggtcgcaagcccggcgttgatgccaccgagaatatcggactcggcagtgtcgccaaccatcagcacgcgtga

SEQ ID NO: 39940 - DNA, 435 bp, Escherichia coli
atgttcaattctattctagttgtttgtaccggaaatatatgtcgttctcctataggggaacgatatttacgaaaaaaattaccaaataagaaaattgactctgcaggcaccggtgctttaattggccatgaggcggaccaaagtgcaatttatatcgcagaacaaaatggactatcattagcagatcataaagcgaagcaatttacggcttcacttggtcatcaatatgatttaattttggtaatggaaaaaatccatatcgagcaaatatgccgaattgcgcctgaggtaagagggaaaaccatgctattaggtcattggaacaatcaaaaagagataccagacccttatcgaaagagtcaagaagcattttcctcagtatatcagttaatcgttcaggccagtaactattgggctgaaaagctagatgtttaa

SEQ ID NO: 39941 - DNA, 156 bp, Escherichia coli; identical to SEQ ID NO: 11556

SEQ ID NO: 39942 - DNA, 444 bp, Escherichia coli; identical to SEQ ID NO: 11555

SEQ ID NO: 39943 - DNA, 576 bp, Escherichia coli
atgggtagaaattatagtcttcaggcactcagagcaattgccgcagttttagttgttttcgctcacaccataactcagattaatatggcctcagaaattaatggatatttgggatatgtgctgaaaacgattgaaagtctaggtggtcttggcgtttatattttttttatcataagtggttatatcatgtcttatactacatgtgataaaaaaggaggaaggcaggaagctatttccttcttaaagaaaagatttcttcgtgtctatcctgtttactggatttgtttgtcaattatgactattggttgggcgggcggtatttttttaaaatcacatgattatagtatatacaaagtcatagcatcgtatcttttacttcctttctctgacccttattcagggaatattaatccaattctgtcccagggctggactttaatgtacgaaatatttttttacttttcattttctgttttgctatatctggatgtcaaaggtttaaagaaggtttattatctttttggaccttcaaaaaccatcctttttcttatttattcttggtatgatattctttga

SEQ ID NO: 39944 - DNA, 984 bp, Escherichia coli
atgatacgttttaaatttaaaaagaaaacggccattgaattctttgttttattgttactgacaatcgttggtgctttttttataagtggccgtaatcagtatttacctgattatcaaatgtaccttactttgtatcactatgcatctgatctcgtagagttttcatttaatacaattgctggtttttatagggggttttttcctggtgatgatggttttatatattttttatttacgtatgccatcttagggtttgtgctccatatgtattttgcttatttctatataaagaaagagcaagggtggattagatatttattttttttaatgccatatttttgttatttttttattttctgggatttgattcaaattagatacgctgcaggaatcagttttcttttatttggtatatttgcaagttctgttaggtggcggtttttcctctttgctttagctattttatttcataattcgatggttttacctgaggcactttttttattattcactctcataagaaaggattatattaaactgatagctgttccgggaattgcaataactgcattaataggattacagtttacaagatattcggtgaagtatgaacaaagctcagctgagtgggatcatttaaatttacttggtggtaattgtttaatgctttatctaatggtcttgtctatgctgtattttaaaaaatatttaaataataattataaaaaaactgtaacggcacttatttatactgtttctgtattaacgcttttgatagttgtacttaacggaaattatcctgctatagcaaacaggttacttgcattaacattgtttcttgcttttatatgtgtttcttttgttaagggtaaatataatttaatcttttttatagcgttatcaatagtattctctctatggaatttgaatattattgtccttgatccaaatagttttttcaataccccatggtatcattattaa

SEQ ID NO: 39945 - DNA, 300 bp, Escherichia coli
atgttttctataaaaccaggacccagaaatttacctatcgacaaccccacattgttatcatggaacattactgacggggatctaaattccaaattaaatacattagaatatctaaactgtataacaaatattattaattcttgtggagtttaccctcaaggattaaaagacagagaaattatatcaacttttcacgcagaaaaatttattaatgatctgttaaaaaacgattataaaatttccctttctccagatacaacttaccgagagttgggtgatgctgccaacttactgatttag

SEQ ID NO: 39946 - DNA, 450 bp, Escherichia coli
atgagagaattagccacttttctctggaaatgcgtcctctggattctgttgacctatgcagcgacaaaactgtttaaaccgatgaagcatgctgacgtactcacaacagcgggggtgctctcgactatatcaggcatcctgtttggttttgttctggctgcaatatctatatttagtagtgcaaacagcgataaggaaggagcaattaatgcccttaagcaaaacaacgtgttaccaactctggtaaatcgattactttcaacagggttaactctcatcgtcgcatgtatatttccattgatagcgatgtttctaccagatgatgttattgttgcgggcaaacctattgatttcctattcatactgttaggcttatcctcccttataatttcgctatataccttcggaaggtgttggttagtgttacgaaaaatcttcccccacttgtga

SEQ ID NO: 39947 - DNA, 942 bp, Escherichia coli
atgagtacagaaaataagaataaaactaggcgagtgagagttggttttttcactggtaatggaagcaaaaaagatggcacatctgctgcaaaactagcctttgagcaaatgaccacagcagatactgtaacttttccaataacttacacaacagacaccccaaatcgagggttaaagttagttattcttcaaaaagataccacactgcaatgttactttggttacgtatcgtggagaagggaatgcctactaccgttcatcgaggatgctacaggtagtgagagaacaattcctttaaatgataaagattctgtagttgaaagaacatattttatctattactacgaaacggatttattagctatgaccctcaaccatatagggcccaaagtaaatgatctggcattcattttgtataacaaaactgatttaaaaagcgtcacttttgaagccatttggaaacaagagagcatgaaggaactgcttgaggacggaaatatcctacgtagtttcgatcttatagttgctgctccaagaaactttaacaaagctaattataagattaaaaaccctttagctaatgaaattattgacatggttgttggtatgggcgggtcgcatctaagattaaatatgcgaggtcggattcgcccgaaaaaacaaggttttaactatctaaaaacttctgtcaccgatgctattaaggaactacttgaactttttccaaaaggttctggaggtctaaaaattaaaaaaattgatgtaacagagccatccaatagaacgcccaaaagtctacttgaccaagtattggtcagtacaaagacaatcattgtcaaaagcggttatccatccgattctgatatcagaacggcgatgatatctgctaaaattgataacgcgaactatcttgcacagtatgagctcgctagcagagactaa

SEQ ID NO: 39948 - DNA, 810 bp, Escherichia coli
atgaataatctgatggtcattgatggtattgaagttcgtcgtgatgcttatggacgttatagcctgaacgatctgcatcgcgcagcagtagcatctggtgcaaatgccagaaccaaggagccaggaaagtttctttccagccaacaaactgttgagcttgttcatgaattgaccaacacccagaatttgggtgttgacccggtgagtgtgattcatgggggaaatgaacggggaacgtatgtctgtaaggaactggtgtatgcctatgcaatgtggatcagcccgtcattccatctgaaggtgatccgtactttcgatatggtaaccagcgcaccggaaaaattatccgggcaggctgctgacaagatgcaggctggagtgattctgctggactttatgcgcagggagttaaacctgtctaactcatctgtgcttggggcctgtcagaaactccaggaggctgttggcttaccgaatctggcaccgcgttatgccattgatgctcctgctgacgcgcctgatggctcaagccgccccacgctgtcactgagtgcactgctgaagcagtatggtatccgcctgacggctaatcaggcatatcaccagatggcgaagctggggatcgtcgaacagcgcgaacgatacagccgtacagcgattaacaacatcaaaaaattctggtcgctgacagcgaaaggctgcatgttcggcaagaacatcaccagtcccgcaaatccgcgcgagacgcagccgcatttcttcgaatcccgattccctgagctgttaaagctgctcgataccgttcattga

SEQ ID NO: 39949 - DNA, 549 bp, Escherichia coli
gtgcttaacctgggtactattgatgaaccaggtcacgcagataacaccgccactctcaaactgaaaaagacagcaccgttctctgccctgttgtctgttaacggcgagcgtaactcccagaagtcactggcagaatggattgaagactgggccgactaccttgtgggctttgatgctaatggtgacgccattcaggcaacaaaagcggctgcggcggtccgtaaaatcacgattgaagcaaaccagaccgctgattttgaagacaatgacttcagcggcaaacgctctctgatggagtctgtcgaagcgaaaaccaaagacattatgccagtagcatttgagtttaaatgcgttccgtttgaaggcctgaaagaacgtccgtttaaattacgcctcagcattatcactggtgatcgccctgtactggttctgcgcattattcagctggaagcagtgcaggaagaaatggctaacgaatttcgtgatctgcttgttgaaaaattcaaagacagcaaagtagaaacctttattggtactttcaccgcctga

SEQ ID NO: 39950 - DNA, 564 bp, Escherichia coli
atgcgtgccgtcagtgtgcttaacctaggtactattgatgaaccaggtcacgcagataacaccgccacactcaaactgaaaaagacagcaccgttctctgctctgttgtctgttaacggcgagcgtaactcccagaagtcactagcagaatggattgaagactgggccgactatcttgtgggctttgatgctaatggtgacgctattcaggcaacaaaagcggctgcggctgtccgtaaaatcacgattgaagcaaaccagaccgctgattttgaagataatgacttcagcggcaaatgctccctgatggagtctgtcgaagcgaagaccaaagacattatgccagtggcatttgaatttaaatgcgttccgtttgaaggtctgaaagaacgtccgtttaaattacgcctcagtattatcactggcgatcgtcctgtactggttctgcgcattattcagctggaggcggtgcaggaagaaatggctaacgaatttcgtgatctgcttgttgagaaattcaaggacagcaaagtagaaacctttattggcactttcaccgcctga

SEQ ID NO: 39951 - DNA, 162 bp, Escherichia coli
atgaagtttttggtcactggtgccgcaggttttatcggctttcatatcgcgcagcgcctgctgaatgaagggcatgatgttgtcgggatcgacaacatgaacgactattatgacgtcagcctgaagcaggcccgtctggatcgcctggcatcgccggcatga

SEQ ID NO: 39952 - DNA, 408 bp, Escherichia coli
gtggcgcgcaatgttgcgaaaccgctggtcagttatatcgacaaagccctggtcaccgatcgcaccagtgcaccgaaaatcacggtattagttgggcacgactccaacattgcctctctgttaacggcgctggatttcaaaccgtatcagttgcatgaccagaacgaacgcacgccgattggcggcaaaatcgttttccagcgttggcatgacagcaaagccaatcgcgacctgatgaaaattgaatatgtgtaccagagtgcggaacagttacgtaatgccgatgcgttaaccctgcaggcacctgcgcagcgcgtgacgctggaattaagcggttgcccgatagatgccaacggtttttgcccaatggataagtttgatagcgtattgaatgaagcggtgaaataa

SEQ ID NO: 39953 - DNA, 1188 bp, Escherichia coli
atgaaattaccgatttatctcgactactccgcaaccacgccggtggacccgcgtgttgccgagaaaatgatgcagtttatgacgatggacggaacctttggtaacccggcctcccgttctcaccgtttcggctggcaggctgaagaagcggtagatatcgcccgtaatcagattgccgatctggtcggcgctgatccgcgtgaaatcgtctttacctctggtgcaaccgaatctgacaacctggcgatcaaaggtgcagccaacttttatcagaaaaaaggcaagcacatcatcaccagtaaaaccgaacataaagcggtactggatacctgccgtcagctggagcgcgaaggttttgaagtcacttacctggcaccgcagcgtaatggcattatcgacctgaaagaactcgaagcagcgatgcgtgacgacaccatccttgtttccatcatgcacgtaaataacgaaatcggcgtggtgcaggatatcgcggctatcggcgaaatgtgccgtgctcgtggcattatctatcacgttgatgcaacccagagcgtgggcaaactgcctatcgacctgagccagttgaaagttgacctgatgtctttctccggtcacaaaatctatggcccgaaaggtattggtgcgctgtatgtgcgtcgtaaaccgcgcgtacgtatcgaagcacaaatgcatggcggcggtcacgagcgcggtatgcgttccggcactctgcctgttcaccagatcgtcggtatgggcgaagcctatcgcatcgcaaaagaagagatggcgaccgagatggaacgtctgcgcggcctgcgtaaccgtctgtggaacggcatcaaagatatcgaagaagtttacctgaacggtgacctggaacacggtgcgccgaacattctcaacgtcagcttcaactacgttgaaggtgagtcgctgattatggcgctgaaagacctcgcggtttcttcaggttccgcctgtacgtcagcaagcctcgaaccgtcctacgtgctgcgcgcgctggggctgaacgacgagctggcacatagctctatccgtttctctttaggtcgttttactactgaagaagagatcgactacaccatcgagttagttcgtaaatccatcggtcgtctgcgtgacctttctccgctgtgggaaatgtacaagcagggcgggatctga

SEQ ID NO: 39954 - DNA, 186 bp, Escherichia coli
atggtcagggactccttgaagttcttgaaggtggtggttactcgcgaacgcagcgttacacgacccgccgtggaaatgtttatgttcgctgtctttcggcctcgtgggatgcagagaacccacagtgggagccgtggtcaagagtgggctaccagtcagaaagccgttattacgacggtgatttga

SEQ ID NO: 39955 - DNA, 249 bp, Escherichia coli
atgctggcgcagctggcgtgccaatccggtacgtggtcaggggggaataaaattaattactcagcatgtagttggtacaaatcatccgtagcaatggatcactttatcggcggtaagagtggtggttcgatctattacaagccgattcaatgtccgactggatacattatgactggaacacgcatgtacggtattggtgatggtgttgatgaggaacatgtcgatgcctactgttgcccttttaattaa

SEQ ID NO: 39956 - DNA, 303 bp, Escherichia coli
  misc_feature (283)..(292): n is a, c, g, or t
atgcgtcccactcaacgtaatctgatgaaaaaatcaattctgcttctgtcgttgctattcagcgccacttcccctgtggttgcaggacaggatgttgacattgttgcaaatataaaaaataacacctgccaaagtggaatcagcaacaacggaaatattgatttaggtgtcgttggcgtgggcgattttaccggaaacatttcagccgaaaattatcaccccggtggaaaagagttcactattacagtacaggactgcacacttcagggcacagggaatgtgnnnnnnnnnngaatgtgttaa

SEQ ID NO: 39957 - DNA, 306 bp, Escherichia coli
gtgcagagtggcattgttatcggcaatgtaatttctggctgcggtattgtaggcatctgcatgggaagcagcactctggtaaagctgttcattcagccagttttctatttcggaataaatcagcggcgtggcgataccaatcactatcagtcccgccagtatttcaagcagaataaaacctttgtcgtcatcgtgtctgaactttttcacgtgaatatctccgaagtgcggaaaacggaatcagggaggagggttagtgcatacagtgatgcgcagagaaacggggcgaacggcagtgcctgctga

SEQ ID NO: 39958 - DNA, 222 bp, Escherichia coli
gtgacgccggatacaccggaaatacgggctgccatcaccgcggagttgcgttcgttcctgctgcgtgatggttatccgcagggagaactgaaggtgtcgcgtatcagtgaagcgatttccggtgcgaacggggaatacagccatcaattgcttgcaccggcggaaaatatctccattgcaaaaaatgaactggcggttctggggacgatttcatgggcgtga

SEQ ID NO: 39959 - DNA, 315 bp, Escherichia coli
  misc_feature (116)..(125): n is a, c, g, or t
atggcaatgggtccgttaaccattggtcgcccgactgaggcgaaaatcaacagcacaagcaacgatagcaacggtagaacaactaaagggggtaacggctttgcgatcattacctnnnnnnnnnnggcagtggtgcaaatgctgcttacaatgactaccaggcattatcatttgatagcgtggaatcgacgaaagttagccgaaatgcagacgttacaagctatgccgtcgaatcaggatcagaagttagtgatcatgttcaaatacggaataacaagttcacattacaggggcgtatctctgaaaccgtattga

SEQ ID NO: 39960 - DNA, 315 bp, Escherichia coli
atgcacgttacagccaagccctccagttttcaatgtaatctcaaatgtgattactgtttttaccttgaaaaagagtcgcagtttactcatgaaaaatggatggatgacagcactctgaaagagttcatcaaacaatatatcgcagcgtctggcaatcaggtctattttacttggcaaggcggtgaacccactctggctggcctggattttttccgtaaagttattcactatcaacaacgctatgcaggccaaaaacgaatttttaatgcattacaaacgaatggcattttattgaataatgaatatcggcagtaa

SEQ ID NO: 39961 - DNA, 513 bp, Escherichia coli
atgtcgatgattattctgggaacagcaggacttgcatcctttgaacctcaacatttcattggtgcagtattaccatttctcattggctttttactcggtaacttagatgaagaattgaaagaattcttcacgaaagccaaccaagtcctgatccctttctttggattcgcgttaggtaatgcgattaatcttggcgtgattttagatacaggattattaggtataattcttggactggcggttattgtcattaccggaataccattaatattggcggatcgtattattggaggggggaatggcactgctggtgtggcagcctcgtccacagcaggtgctgcggtagcaaacccagttttaattgcacagattaatccaatatttgagcctgttgcagcatcagctacagcattagtggcaacatgcgttgttgttaccgctattttagtgccaattattacggccttatatgcaaaacacatatcaccaaagatgaaaactaaaactctttag

SEQ ID NO: 39962 - DNA, 1023 bp, Escherichia coli
atgaataaaagtagttctatctctgatgttgcccaactagcaaaagttggcaagacaagtgtgtctcgatatctcaatggcgaacatcatttgttatcagaaaaactcaaggagcgtataaaaaatgcgatagaggttcttgattatactccaaatcccttagcaagaagcctaaagaataaacgaagtaaacttatagggcttttactggctgatataaataacccatattctgtaagaatcattaatagtgttgaaaaatattgctgggaaaatgactttgttcctattgtctttaatacagacaatagttttgaaaaagaaagtaaagctcttgatatattaaatagatatcaggtagagggcgttgtaattaataccgtcaattcttcaaaaccatttggtgagtatcgctttccggtggtcttaattgatagaaaaataccaggaaaattattcgatatggtagggcttgataattatcatgccgtaaatacagccgttcaacatcttgtgaacgagggttttgatgatatactatttattagtgagccagttatgggagtgcatacaaggcttgagcggcaacgtgcattttataattcatcaagatgttttcacgatattcaatatcatgcgcaagaaatagggtgtttggatattgatggtattgagaaaattctacttaccttttgtgataaaagaataaacgcaaaaagaaaagctattatatcagcaaacggcgcattaactataagtctaataaaggtaattaactatcttaatataagaataggtgttgatgtcggttttctgggagttgatgatgttgaatggtctgaaattattggcgggggaattactataataaagcaaccaacagatcttatagggagtgcagcgatggaattgctgcactccagaatagatactcctgatattccttcacgggatgctatattccatggcgatttgataattcggcaatctactataaacttaagtaggtttcaatctaagtaa

SEQ ID NO: 39963 - DNA, 363 bp, Escherichia coli
atgaaaatcaaagcaacaatagaaaaaatcccaggtggtttaatgcttgtaccattactgcttggtgcgatattgaacacctttgccccagagacaggcaattattttggcggtttcactaaaggcttaataggaggcacagtaccaatattagctgtatggtttttttgtatcggtgcctcaataagcctaaaagcttccggtattgttctaaaaaaatcaggtacattggttttgacaaaaattgcagtagcctggttagttgcgttcgtttgtaccaaattcattccaagtgatggtatccagaccggttttttcgcaggtctgtctgttttagctattgtatccgccaggctttgttga

SEQ ID NO: 39964 - DNA, 816 bp, Escherichia coli
gtgctggataatgccatcaaaatccccaaactggccccgatagaagcacgccttcatcgtgaacttcatggaaagctgaaaagcatcactgtcacccgttctgcaacggggaaatactacgcttccattctttgtgacgatggcgcttccgcaccagagaaacccacgcacctgaaggaagaaaagattacaggtctggatatgggactggagcactatgccatcacttctgatgctgtaaaagttccgaatcctcgccatctcatcaatgcaggtcgtaatctgcgacgcaaacaaaaagcattatcccgtaagcaaaagggaagcgcgaatcgtaaaaaggccagaatccgtcttgcggccttacacgaacgggtggcgaatgcccgtgctgattttcaacacaagctctctcgcgcgattgtcgacgaaaaccaagcggtaattgtggagacgctgaaaacagccaacatgatgaaaaaccacaatctggcaagagcgataggtgatgctggctggcacagcttcatcacaaagctggagtacaaggcagcagaaaaaggcgttcacctggtaaaactcgaccagtggtttgccagctcgaaaatctgccattgttgtggttacaaaatgccggagatgccacttcataaacgcatctggcgatgccctgaatgtggaacggagcatgaccgcgataccaatgcggcactcaatatccggcaaaaaggaatactggaactaaaggcggcgggactcgtcgtctctgcccatggaggccagcgtaaatccgtcgaacagacggttgcggcctga

SEQ ID NO: 39965 - DNA, 288 bp, Escherichia coli
atgttaagagcaacaaaaatacgcatctctcctactcctgaacaggctgcatttctcaacgcccagttcggtgcggtacgttttgcgtacaacaaagctctttacatcaaaaaacacgcttaccagagacacggagtaaatttaagtccgcgtaacgatctgaaaccgttgttgtctgtggccaaaaagtcccgtaaatatgcctggctcaaagaatttgactcaatggcattgcaacaggcggtaatcaatcttgatgtggcattttcggcactgttgcaaagttag

SEQ ID NO: 39966 - DNA, 351 bp, Escherichia coli
atgatgggacagttaccgggaggacagcagcgcctgttctactcgttcaatctggaagatcacgtcccggcccaacatctcctgcgcagcatcgaccagtgcttggatctcagtgatctacgtgcctacctggcagatttctatagccccatcgggcgtccctcgattgacccggagttgatggtgcgcatgctggtcgtcggctacttgctatggcattcgttccgagcggcgattgtgcgaagaggtgcacctgaacctggcctatcgctggttctgccggttgggtctggaagacgaagtccccaatcactcgaccttctcgaagaatcgccatgggcgttttcgtga

SEQ ID NO: 39967 - DNA, 999 bp, Escherichia coli
atgaaaaatcctgaacttaagaatctgacggattactctccagcagataaaccgtgggatgaacaccgaagcttttccgacgatgtgggcggtatttatctgcgtgctgccggatttgagcactacggcgaacgtgtcggggcttgtagtggtattttgcggtttgggtggtcaacaaacacagagaccggagaaacgcgcctgcggttgcgtgatgcacggttctgtcgcgtccggcactgtccgatctgtcagtggaggcgttccatgatgtggcaagcccgtttctatcagtccctgccaaagattgtgacggaacatcccagcgcgcgctggttgtttctcacactgacagtgcgcaactgttccattgacgcgcttggtgagatgctgaccgcgatgaatgcggggtttaagcggttgaaagagcgtaaggaatttcgccatgtgttgggctgggttcgtaccacggaagtaacgcgcggcaaggatggtagcgcacatccccattttcacactctgctgatggttcccccttcgatgttgtccggccgtgagtatgtgaaacatgcccgttgggtggaactgtggcgtgattgtctgcgggtggcgtatgacccgaatgtggatatcagagtggtgaagtcacggaaaccaaaagacgatgaatctttaccttgtgttgttgcggaacagctgcgcagcgcggtggttgaaactctgaaatattccacaaaacctgctgatatgctggctgatcctgaatggttcctcgaattaacacggcaggtacacaagcgtcgttttgttgctacggggggagcgcttaagaacgttctgcaactggagcgggaaacgaacgaggatttaatcatggtggatggcatggcagagggtacagatgacggttcccgtctggcgttttcgtgggtgccggttgtcaaaaaataccagcgagatcgggcgaaagataaacgtcagctaagtggcgaggattga

SEQ ID NO: 39968 - DNA, 999 bp, Escherichia coli; identical to SEQ ID NO: 39967

SEQ ID NO: 39969 - DNA, 618 bp, Escherichia coli
atgcagtggcaaactaaactcccgctgatcgccattttgcgcggcattacgcccgacgaggcgctggtgcatgttggcgcggtgattgacgccgggttcgacgcggttgaaatcccgctgaattccccacaatgggagcagagcattcccgccatcgttgatgcgtatggcgacaaggcgttgattggcgcaggtacggtactgaaacctgaacaggtcgatgtgctcgccaggatgggctgccagctcatcgttacgcccaatatccatagtgaagtgatccgccgtgcggtgggctacggcatgaccgtttgccccggctgcgcgacggcgaccgaagcctttaccgcgctcgaagcgggcgcgcaggcgctgaaaatattcccgtcatcggcttttggtccgcaatacatcaaagcattaaaagcggtattaccaccggacatcgcggtctttgccgttggcggtgtgacgccagaaaacctggcgcagtggatagatgcaggctgtgccggagcgggcttaggtagcgatctctatcgcgccgggcagtccgtagaacgcaccgcgcagcaggcagcagcatttgttaaggcgtatcgagaggcagtgcaatga

SEQ ID NO: 39970 - DNA, 744 bp, Escherichia coli
gtgttagcagaagtgacgaccgactggcgtgaagagaatacgccagtggtaatggcaggaatggtcggcagcaatgtcggctggaaagttgcgccatatttatccgttccagcccgtttctcgtctattggcgaacaattaacatctgctggcgacaatatctggattattcccggattatgcatctctcatgacgataaccacaatgtgatgcgcggcgaagaaacacaattgatcggcgcgcgcactctcgctccttcctctctttatgtcatgcccggtacgcattgcaaatgggtgcaggccgatagccagcaaattaacgattttcgcaccgtgatgaccggtgaattacatcatttactgttaaatcactcattgattggcgcaggtttgccgccgcaggaaaacgctgccgatgctttcgcggctggtcttgagcgtggccttaatgctcccgacatattgccgcagctttttgaagttcgcgcctcgcatgtgctgggaacacttccccgcgaacaggtcagcgaatttctctctggtttgttgattggcgcagaggttgccagtatgcgcgactatgtgacccatcaacacgccatcacccttgtcgccggaacatcgctgaccgtgcgctaccagcaagcctttcaggcgatgggttgcgacgtgacggtggtggcgggcgacacggcatttcaggctggtataaggagcatcgctcatgcagtggcaaactaa

SEQ ID NO: 39971 - DNA, 441 bp, Escherichia coli
atgttctcacgcttcgattttaaacgtgtgctggaggcaggcggtatttcgattctgcaaccggatctctcccacgcaggcggtattaccgaatgctacaaaattgccggaatggcagaagcctatgacgtgacccttgcgccgcactgtccgctcggaccgattgcactggcggcttgcctgcatatcgactttgtttcctataacgccgtccttcaggaacaaagtatgggcattcattacaacaaaggcgcggagttactcgactttgtgaaaaacaaagaggacttcagcatggtcggcggcttctttaaaccgctaacgaaaccgggcttaggcgtggaaatcgacgaagctaaagttattgagttcagtaaaaatgccccggactggcgtaatccgctctggcgtcatgaagataacagcgtagcagagtggtaa

SEQ ID NO: 39972 - DNA, 195 bp, Escherichia coli
atgactattgcagaacgtcttatacagaaaggtttcgacgaagattttcaagaaggttttaaagaaggggctcttgaagtggcgcgggaaatagcctgccggcttcgggatatgggctggacgccggaacggattcaggaggcaaccggactttccggtgaagaactgaaaaaactgtttcctgatgagcagtag

SEQ ID NO: 39973 - DNA, 267 bp, Escherichia coli
atgagaccatcaattatcttcgcaaccgccgagtatgtaaagcgtctgcgtgaagagtgcctgcgggagaataaacccctgcaccgccatacccgcttcagacgtcaggagctggcacaggatgagattaacccggacgtcctggcgatgagcggtcatatcgccagacgctgcagtgagcagaagcgggtacgtatccccgccatgaaagtcagcgaatggggccacctgctccgcgcgcttgaaattgagcgggtctgccactga

SEQ ID NO: 39974 - DNA, 357 bp, Escherichia coli
atggaagcgcacctcttcagtgctttccgtggcgatggcctccctgaaagaacggtactcacgcgcctcactgtccatccggaaaccactgtcacgtccgtaataagccgtcacaccgtccaccgggttctgaagcgtatgcccggcgggtttgtcgcaacggggaccgaggcaacggatatcaccgtgttcaaccagggcttcggcctgctgaccggtggcatagtgggtatgcaggatgcgaccgttccaggtcggctccccgtgcaggtggcagtaaacggtacggaacaccccgtcgcggcaaaaaacggaaatcgtgctgctgactgtcatgaaaacgtctccttctgctga

SEQ ID NO: 39975 - DNA, 1059 bp, Escherichia coli
atgggatcaaagaaggccgggaaactgacttgggatgaactgcttgatgagtattttttctcgagaaacctacgtccagatacggaatggagttaccgcaaggttgtccggggatttgttgattttatgggagaggaggtatttccggcggatgtgacccaacctgatattcagcgctggcgacgtcaggttctgaaaacgcagtcactttcaacatacacgtggaataacaaagtagcgcatctccgggcgatttttggtttcgggatcaaaaaagggctgctgcctcatacagaaaacccgttatgtgaggcatcggtggcaaaggaggcgaaaaagaagaagacgctgaacaaagatcagatgatccagatttatctggttgttcagaagtttgctgagtatgaaacacagcagagggtgccctgcgatcggcgacgtaatgccctgtatccggcaagatactggctgacggttctggatgtgttgcgatataccggaatgcgttttaatcaactgcagcatatcagactgaaggatgttcgtcccggagaaggggtgattgaactgcaactggagggaagtaaaacacaccgggagtggggggtgccgatagtgacgccactgaaagcgcccctggaacttctcctgtcacgggcccggtgtctgggagcaggtcctgatgattttttgtttgatgtctgccggtttacagactgcattgagcctgataagtatgagtattgccccgcacgtgcccatcaggcagtcaagggatttttcagacgactgtcacgggagtgtggttttcttgtttctgctcaccgtttcaggcacacattggcaacggttctgatggaatcacccgagcggaacatgcatctggttaaatctttactggggcatcagagtattgtaacgactatggagtatgtggatgtcagtgttgtatctacagccgaaatactggaggttgcgctgggtctgtataccgatacacgaacggtcagtgaagtttgtaaagagggagaaaacaaggaagaagaaacggaaaattaa

SEQ ID NO: 39976 - DNA, 1614 bp, Escherichia coli
atgcttaatcgcctgaaaaaactgcttctcggtaacagcaatatcagtggtactgagacagccgccccagaaaacgtacgtcaatcggaacacctgccggaagggttttatatgccccggactgcggaggagctgatgtccacaccgcgtaggaaatactgtctgaaacagttgtgggaaaacagcagtatgccacctgacgtgtatcagcagttatgtattactccggtacaaaaactcctgatggcggcgcagaatgttcccgcagccagaaactcccggtgggcagatgccggcggttttggtgacttgacgctgcagttcaccacatatgccgttcgtctggccagagggtatatgtttccaccggatgccacaccggaagagcaggctgcacagtccggtgtatggaatgcggtggtattctggtcagctctgttttatcacctgccacttcttgcacacattgagggggaactggtcagcggaaagttatggcagccggggatgtcatcaccggatgaggcatttcgttttcgctatagacagcaacgtctgcaggacacaggggcgcagcaactggcagcgctgatggccgggcaactgttacaggagggggcgatagcatggctagccactgtgccaggggcattacagaatctggcgggagcgctctggcatcagcatccggagatggcattgattcgttcagtcctgaaaacagcggcagaagaggtggagagtccgattcttgcgtcgccagtaacggaacccataacggcacctttgtcctcagaaaacactgtgcagtctgaagacaatgcgccggaaacgccgacagctgctacggaggtggaaggatttactctgcagccatctgtttcaggaatcgatgaggcagaagcggaagtactggatacgttgcagtctgcagcaggagcggaggaaaaggcatcgaaggagcagagtgtccatgatgagaccgatatgctgctgagtctgttttcagccgtcagtgatgacactgagctcacggaggctgatgtggtggaatctattgaaaataaagagatagtttctgatgaaacagattgtgcaaacagtgaacaggctgtcgcggaaagtggacctgcgcaagacactggtattttggattctgttttatgtgtcagtgagccagttcaggagataaaaaagtcgcctgagcgttcacggggctggaacaatgcggaaagagtcagggctccaggcaatggtggtgaatttatcgaatggttgagacatgggctgaattcgggagatatcccggtgaaccagcctggtgccagggttcatctaattgccggatatgtatttctgtgtgtgccggatgtgttttacctgtatctgaaacagactgagagtcgtcatgagcgcaggtctgttcagtctgcatttgaacgcgtggggcttcaccgggttcgctcgggagagcgttttgttcaggcccggctgtatgattcggcagaacgaacagggcgttatcaacctgtcagtggctacctggtaaaaagccacaatctgttcagagggaatgagagccccggagatagtccgtttatcgcatttccgtga

SEQ ID NO: 39977 - DNA, 1299 bp, Escherichia coli
atgtcactgatacccactgatgaactgtctgccattatccactggcaggggcagacgctggttgtgaacgcctttgccggtacaggaaaggccagtaccctggttcagtatgcactggcaaaccccgacagcaggatgctgtatctggtttataaccgttctgtacgcgatgaggctgagcgtaaatttccgtttaatgtggagtgcaaaacctctcaccaactggcctggtcgcgcttcggcagacattaccggaatcgtctggttgccagcctgcgtattacggatgtggccagaaagctgaacacccgtcactggctgctggttcatctggcactcagcagtctgaatcagttcctgtgcagtgcagacaaggaatcggggctgcaacgtctgccggatgaggatgcccgggccggcacggatgtctcagccattctgcaggcagtacaggtgctctggcatgagatgagtcgccctgatggcacatttcccgtcacgcatgatacctgcctgaagctgttccagttgtcatccccggacctgtcccgacgttgggacaccattctgtttgatgaggcacaggacgccaatccagtgacgtctgcactggtgctctgtcagtcctgcagggtgattctggtgggcgatcgttaccagcaaatttaccgttttcgtggtgccgataatgcgctttctcatcctaccctgaacgatgcagaccgtctttggctgacgcagagcttccgttttggcccttcagtggctcggatggcgaatctgcttttgcagcgtgctggtgagacactgcaggtgaccagcagcggtggggaagatgaaatattgatgagctgtatcggcgcggataaatcggaagggcaccaggcggtactgagccgggcggtggcaggtgttatatgcacggcactgatggccagcctgagtgacaggaatgtgtacaggatgggaggtattaaaggctaccggacagaggcacgggaggacctgtactggttttctgttgagatgccgaaaaaaatgcagtctgatgttctgcggcgggatttccgcgattttgatgcatactgccggatagccaaatccacctgggatgtggagctgaatcaggccattcgcctgctggatatctgttttccgttaccgttgaaactgaagcttatacgggagcacaccgtcactagtgagaaggaggcggatattaccgtgtcaatgacccaccgcagtaagggactggagtggccggtggtgaaacgattccgtatacaggcaggaggatga

SEQ ID NO: 39978 - DNA, 981 bp, Escherichia coli
atgaaagcagttcaactatatttttttatgctgtccggaattatcccgttaaacggcaccgcacaaatgaataactatatacatagctcaactctgacagcatctttctcctctgtcactgaagttccagcgtttctgaaacagggagatatcgtaagaatcctgacacaaacccctccaggttctgccagatacaccggaacggcagttcataccagtggcgatgggtggtgtgtatcaccatcagtgagaccatacaaatatgaagcctataaatggcctgaaactattgatatggataatttaagactatctctcgttgagccagaaaatctgggtattacaacaggtacagcacccagaatatgttctgattatcaacctggcggagatgcgtccggatacagaacaaactgggtttttgtagggaatggcatgactgcgacatatcgggtgtcccaaatatatagcgcaggaagctccaccattaataccaatgtgaaagtcatatctggtcgttcagaatattcacctggagaaatcattaacaaaataaaaaatcttcaacactattttcaacctgttaacattaccctgaccacaaatgtaaagaactggtgctccgcatctgtaggtccggggcgtgatattttattaaatcatggcgaactcagtgccagtaaagtcaataaccaccaggtcagttctccagtacagttatcctgtacaggtgaaggagcctacttccaactgaaatggtttgaaggacaaactgcaggcacaaaaaaaatcattgatataaaggcagggctacagtcggagttaagtatcgaaggcattccggaagacggaaaggtatttgttcccgtaaatacgccagtaagactggatataagatctatattaaaaaccaacaacaatattaatattgatcccggtcctttttcggcctcacaaattctggtcattgacataacttaa

SEQ ID NO: 39979 - DNA, 654 bp, Escherichia coli
atgcaatttgcggatttttttaaactatacaaagagtttggtatagaaattgtgtttttgggaggtgtgttgttttttttatataggctgatgcttcctgataatatagaggtcgtttcttctttgttgtctagattcaggaaaaaaagcagactcaaaaatcttcttaaggatgattttctatccccggaggcacgaacgagggttaagctggaactgaatcagcttaataatatgtggcttacaggaatgttaaaaccgggcattgcagaagcggcagttatcctgacgattgaaaataatcttcgcgcacgttatctgtatggttggcgtgtatggttatatgagaaaaatggacgaattatttttgatgggcagaagtataagaaatttctttgcattaattattcgataggtgttctcgttgggctgttaacgacgttgtttattattgctgtatattatcaggggttttatccagaatttagtcggggtgctttccctgcagcgataaacttaattgtgttatgggtgataatattcatggcagtccgggttcctggtaagaaagcaacattacaaatgaaacgatatattgagcgttataataataaaagaaaagtagaatgtaaaagaagagcaggattgcattga

SEQ ID NO: 39980 - DNA, 555 bp, Escherichia coli
atggaggccgtatgggttgccggatgcagcagttatgaaacaaccggcgtaatacatctgttaagggagggcggtatcagtgcagggcttttcagaccgggagagcgactccggaccagagacacgctgatactctgtttcagcagtgcgcctttgctggggtggtggcggtatctgaagataacacaatgggtgatgcatcgttatgatatccggttgattgttctgtgtcctgatgaggtataccgggcgggtattgtgtgtggcagaaatacagtggcagtgaacggagaacgccgttgtattcatttgtcccggtcattacagcaggcagtacagcgtcgtctgcctgaggagatactggctccttatcgggaatgtgtcagggggttttttctggaaagggctgttcaggccctgcggattcatcccgccggggagtccgactgcccggcggcaagaagggcatactaccggcgtgagcagatggttctgcgtctggggtttacgtcgctgatgaagctgaaagtattcatggccggttttgtcgggtaa

SEQ ID NO: 39981 - DNA, 639 bp, Escherichia coli
atgcgtaaaagcagactgatatctctttttttgtgtctggtattgtcaggcacagtatatgcagaggaaaacacaacctattcggtactggataagcctgtggcgagtgctgttcaggataatgaaacggtggttgagtttttttctttttattgtcctccctgttatgccttttctcaggattacggcattgataaagccatccgcgaaagccttcctccggggaaaaaactggtcaagtatcatgccggttttctgggagagctgggagaggaactgacccgggcgtggtctgtggcaatggtactgggcgtggaggataaggtggaaccgctgttatttgatgccgtgcagaaaacgcggagactgaaatcagcagaggatattccggggatttttatccgtgcgggtgtttatccgggagaatatatgcaggcgcttgccagtaaggaagtggctgagatgacagagaagcagaaacgtctgttcagagagtatggcgtgaccggcaccccgtccgtgtatgtcaacggcagataccatattgagaacagtgcatttcaggcagacagtgtggaggctttccgtaaaagctacgttgctgcggtgaacgcactgactgaccggacagataaataa

SEQ ID NO: 39982 - DNA, 216 bp, Escherichia coli
atgcaatcacgatatgacatatatgacaaaatcattcgttttatggaagagcgtaatgcaaccgtatcaccactgaaaacgcgtgaaattgcggatggttgcgaaatgtctgtttatctggcgctttattatctccgggagctgaatcggcagcatatcgtggagcctgaccgtagtggtaagggaagcgctatctactggcatcttgtgaattaa

SEQ ID NO: 39983 - DNA, 984 bp, Escherichia coli
atgagttacttcaaaacaaagtatttttcattgttatctctgtttgtcatttttagtaaggtatcttttgcagcagaaccaacttttgcattgaaagttgcatcctggtatcaggattatcaggtttccgttcaaactccatcaataatgtatgatggatctgaagtgaaaatttcaatgtatgcgccaaatgctccttttttttctgcatcatcacatcttactcacggggggtgtgaaaatgttgctgcaatggatgtgcaggatgttctttcagtacctaaaagttttatatcaaatggtgttgagttcgaatatgtaagggctgagggggatttggttcagatagtaaatatgtataatggccaaattggcttagctgttgctaatacttctccatatagttgtcaatactatatggatttaactaatcaaggaggaatacatcctaactggtatggttctggaaaaacatttactgcaatctataaaataaaacggctgcctgaatctggtgtgcataatttgtctctttctgttgattcttattttactcgcagagaaagaggaagtcgttgggtaaatatggggtctctttctggttaccagagtaccagagttgtttcgagtgattatcgggttacagcctggtgtaaggttattaataaggatgtagaactggatcataaattaatgactcctgatcttgtagaaggtaatgttgtttctacagatgtaaggttggaatgcgggggtgggggcaaggggatagcaaaattgtcgctctcgaataaatcaaataaatcaactgtaaatctcggaaataatgttctgagtgaagttagtctgtctgcaacagaggttaatgtagctaaagatagctcagtaaatattgccgtatcatctaaactaactactggttcaaaggagataatagccggagagttaaatggaacagaagtgcttactgttgagtggttataa

SEQ ID NO: 39984 - DNA, 384 bp, Escherichia coli
atgaaagaatacattaaaccggtgtttctggttttgcttaccggtatgttgcttggtggatgcgaaagcaaacccggtatcaaacctttacagcagacgacaggaagcaaacctgtaagcagttcaggcgaccgtctggatgatgttgaaaaaatggaacgttgtcggcgtgaactggaggcactgaagagaatagattcggcggtatataacaagcgtaaagcggaatttgacaaactggtctcaggcgcatcgctttataacggagtaaggagtgatgtcggaaattatacccagagtgcagttgatgcattgtaccggttcaggtcagataaactgtgtgccgatatagccagtgatgtgttaaaggaactggctaaatga

SEQ ID NO: 39985 - DNA, 315 bp, Escherichia coli
atgcggcacagcgcgctaaatcctgactcagtccatgctgcgaaatatttatgtcccggaaaggttatgccggaacattttgaacagttgatgctgctgtctaaaataagagggaagaaaattaatgctgcactgaaggattttcttgttaacgggaaaacccgaaaggaaatattctgtatctatggtatcagtccgggatatttttctcataaacttaatcagttaaggcattgtagtcgaatgattatggatttacttccttactacgtgtgtgacgatacggataatattcaaaatgaaagaatacattaa

SEQ ID NO: 39986 - DNA, 561 bp, Escherichia coli
atgaaaaacagaatgaggctgatattatcagcgctgacgggcggagttatgttgttatcggcgccggttatggcagtggatgtccctataaaaataaccggaaccatttatatccccccctgtaaaataaaaaatgatactgactttaaagtctctttcgacaagattgcgcttcagaaagtggatgggcagaattatgcaaaatccacaaccgtggaagtcagttgtgagtattttcaggggaaaccatatatccgtctgtccggcggaacaggtcagctttccggtgcgcctgataatgtgctgaataccacaggtgctaatccttcggcgctgggcattgcattatatcaaggggggactgtggatcctcagaatccgctcagactgggagcaggagcacaggggcaatatggatatgaaatcacaaaaggtctttcagccgttaatgttcagaacagtcagtttacgtttacggcagtgccttataaacatggcaataaagatttgaatgccggaaccttcagtgcttcggtcacaatgagcatcagttacctgtaa

SEQ ID NO: 39987 - DNA, 1341 bp, Escherichia coli
atgaatgacagactgaaaatatgccgccggatactgcaaacgacgggaggtgttgcactgttattgtggggaggctgtgccggagccggagacaattcaggaggtgttccgggcatactgaagtttgcacagcagtatcagcagcaggaagcctctgccataaaagagggaggttcaggtggaaaaacggacagtgttgcaaggtctgtcggaaaaggtgaatcaggagcgggcagtaataccgaactgcgacgccggctgacgctgagggaacaggaggtccgacagcttaaaaaggaaaaccgggggctgcgtgaacgactgaaagtgctgcctgacactgcacaggataatgcagaaaaggacaaggtggtggcttccctgaaagcggaacttgatgaaagcaggaaacagcttgagaccatcaccagaaagggagagcaggctcaggaaacgcttaatgcgcaggttattgagctgaaacagcaactgtcccgtatggaagcggaaagtaaggctgctgctgaacaggccggaaaagaaaagactgagctgcaggccacgctgaataccctgaaagctgaaatggcggatatgccggtagtgacagcggaaatgctgaaacctgacgatatgcagcagacttatgctgccggtgtgatgctgggacgcgatatgctgaatctcctggctacacaacaacaacttggtctgaaaacagataaccgaattctgatggcaggaatacgcgatgcgctgaacaggaaagtactgctgaatgaatctgttctggatgtcgctctgcagcgggcggaagagctggcacagaaagcccgtctggctgtgattcgcgaacagaagaaggagggagcagcctggcttgagaagttcagaaaacagaaaggcgtgaaacaggcggaagggggattctggtaccggagtgagtatgccggcgatggtgagtttatccgtggtgatgacaccctggtggatgttgtggtgacagaaaaactgacggatggcacggttgttgaagatatggatgcaagaggccgggtgatatctcaggttctgggtgaatatccgcctgtgttccgcgaagcactgatgttgatgaagaatcacggaacaatggagcttgttgtccctccggagctggcttacggtgatgagggatatccaccaaaagttcctccgggagcaaccatggtttacacgctcagggttgaagaagtgaagtctgttgcagaacccgcgtccggtgaaagcaccgggaagaatatgtcatctctggccggaaagaatgacaaagcaggccggacagaaggagtgaaaaaatga

SEQ ID NO: 39988 - DNA, 567 bp, Escherichia coli
atgaaaggcattatttccggaacgggtatagcccgactggcgggctgtctgcctctgttgctgacgctgtctgccggtgcggtgaatgtcacttttgacggggagttacttgaccgcccctgccagattgactctgccagtctgaatcagacagtccagtttctggaacgacctgtaaaggattttcaggtgccaccgggtaaggggccggctgaaaaattcagtattcgtctggttgactgtgacacatcctccatctggaaaacagtgaagctgaaattcagcggtaatcctgagccaggaatgaaggaaaagtcggactggtttttacgtgtttccggagagaaccagggaaaacttgctgttggtctgctggatacggatggtgtcactccgctgaaactgggggacgcgcacaataacagacagggaacgcagattgagggcaatacggtaacgctgaattttaaggcttttgtgcaggcaacacctgatgccattgtccagaaaagcgtacagcccggagagtatgagtcagtagcgaattttgagttgttctatgaatga

SEQ ID NO: 39989 - DNA, 588 bp, Escherichia coli
atgttctggcgcatgatcctttcggtaacatttttcctgtgtgcagcggctcaggctgcgccatcgccctcctttccgccgccggggatgaccctgccggagtactggggagaagagcatgtctggtggcatggtcgggcgagttttaaggggcaggtgattgctccggcctgcacgctggccatggaagacacctggcaggcgattgatatgggggagaccccggttcgtgatttacaggacagttttgccggtcctgaaaagaaattccgtctgcggctgcgtaactgtgagctggcgggaacaggcaagcgggtttatacggcgagccgtgtccgggtgacctttgatggtctgcagggcgaaacgcctgacaaattctcgctgaccggtcaggcagaaggtatcagtctgcagatactggataaccagggctatccggcccgtgtcggtaaagtgatgccgccgttattgctgaacggaaatgaagaggggctggattataccctgcgggtggtccgtaatggtcagccgttaaaggcgggagattattatgccgcattacgttttaaggtggattacgaataa

SEQ ID NO: 39990 - DNA, 543 bp, Escherichia coli
atgaaaatgattaaaactgttatggctggcgcagttgcaatggctctggtttcttttggtgctaatgctgcaaatcagggacagggcgttgttaacttcaaaggtactgtaattgatgctccgtgtggtattgcaccggaatctgcggatcagtctattgattttggtcagatttctaaagctcatttgaaaaatgacggtatctctgtcaagaaaaatctggatattaaactggtaaattgtgatttttctgagcctgatgcgaaaaaaacagtaagtgtcactttctctggtacagctgttaatggtcatgctgatgagcttggtactgctggtgatactggcactgctgttgttgtatccggttcagatggttctctggttaaatttgatggtgcaacaccaagcaatgcaactcaattgcaggaaggtgacaacactctgaaatatactacctgggttaaaaaatccagcgcaacgggtgctgaagtcaaagaaggtgatttcactgcagttgctcacttcaatctgacttacaactaa

SEQ ID NO: 39991 - DNA, 249 bp, Escherichia coli
atgaaaatacgcaccctgaaccgttcggggtatccggcataccgcaggatgtgggggtcagcaacggacattgatccgcttgcagctggtatggcgtatatacaattgtcgctgtgtggtgtggcaggagaagtagtgattggcaactcattgtgtaatgagcgacgccgggtgctgctgacacccgggcattacctcggaaactggtcatatcgtctgcgtcattttcaggagcagattgtcgcctga

SEQ ID NO: 39992 - DNA, 978 bp, Escherichia coli
atgcaaggccgccgacaattcgttatcatgcccgctaaatttaacgacaaggccgtggaaattatcatgctgtggttcaaaaatttaatggtttaccgtcttagccgcgagatttcgctgcgtgcagaagagatggaaaaacagctagcctcgatggcatttaccccatgcggcagccaggacatggcgaagatgggctgggtacctccgatgggatcgcacagcgatgcgttaacgcacgttgccaatggtcaaatagttatctgtgcgcgcaaagaagaaaaaatcctcccgtccccggtgattaaacaggcgctggaagcgaaaatcgccaaactggaagcggaacaggcgcgtaagctgaagaaaaccgaaaaagattcgctgaaagacgaagtgctgcactctctgctgccgcgtgctttcagccgttttaaccagacaatgatgtggatcgatacggttaacggtttgattatggtggactgcgccagcgccaaaaaagcggaagatacgctggcactgctgcgtaaaagcctggggtcgttaccggttgtaccattgagcatggaaaacccgattgaactgacgctgaccgaatgggtacgctccggcagcgcggtacagggcttccagctgcttgatgaagccgagctgaaatcgttgctggaagatggcggcgtgatccgcgcgaagaaacaagatctgaccagcgaagagatcaccaatcacattgaagccggaaaagtggtgactaaactggcgctcgactggcagcagcgcattcagtttgtgatgtgcgacgatggttcgctcaagcgtctgaagttctgcgacgagctgcgcgatcgaaacgaagatatcgaccgtgaagatttcgcccagcgttttgatgccgatttcatcctgatgactggtgaactggcagcgttaattcaaaacctgattgaaggattaggtggcgaagcacaacgttaa

SEQ ID NO: 39993 - DNA, 240 bp, Escherichia coli
atggcgcgcctgccgaaccgcagtaacacattatcgactgaacgccggatgcgacaggtctggcgtgtggtattgttatgcgcaggtcttggatgctggctttgtccgctcattcgtcgccgtgaacctcacgttgccggacttgttctggggctaatcctcattcttggcggtgagatgatcgggcgtgtgctcttttatggcctgcacatgacggtaggaatggctattgcaggttaa

SEQ ID NO: 39994 - DNA, 234 bp, Escherichia coli; identical to SEQ ID NO: 18109

SEQ ID NO: 39995 - DNA, 165 bp, Escherichia coli; identical to SEQ ID NO: 17502

SEQ ID NO: 39996 - DNA, 261 bp, Escherichia coli
atggtaaagccgtcgtttaaatccctgacaaggcgtggacggatagtgtgcgtcggatgtggttattccggtgtgcgatttggtgatgctgcaggtcaggacacccggcagtgggtgaaggtgaatcatgatagcgggctggggctgtgctcctgttgtgacgcctttcttttgcaggaacgccagcgtcgtcagcggcatgacccgcttttttcatgtggttttaccggcaaaaagcgaaaaacgaaggaggtggtatga

SEQ ID NO: 39997 - DNA, 282 bp, Escherichia coli
atgagtgtttctgtaacacgcacctcagtttgtagcaaggtcatcaatgccggacggcagttgtttttctgtattcataagatttttcctttaaatcaacttgttatgaatgaacggatgctgtccgtaccttctgaccggggtcgccaaacttaccggtctgaaaatgtacagacagccaccgggattttattcccgacagctgtacgtccggcacccttttcccttttttcacatagtcaggtttccggcagtcagagggggagggtacgccatggctga

SEQ ID NO: 39998 - DNA, 1368 bp, Escherichia coli
atggctgaaatgtctattctctgtgcatacgaagcagagcaggccgttctgggcggcctgatgctggagaatgagcgctgggatgaagtggtgctgatactgaaccctgacgatttttatgtggctcagcatcgggccatattccgtgccatgtctgaactggcggtgaatggccagcctctggacctgattacactgtcagagcacctggaacatcagggcaggctggacgtactgggcggttttgcttatctggccgagctcagcaagaacacaccttctgcggccaacatcatggcctatgcaggcattgtggtggagaaaagcgttctgcgtcagttacaggccaccggaaacaccctgattgctgatgtggcggcaccgaacgccacatcacgggacgtgctggatgctgcagagcggcgtctgtttgctcttgcgcagaacaggacgctccgggagcgcacggaagcctctctttcatccgcgctcgatactgttctgcagcaactggaaagtgtgctcggctccggtggtgtgaccggtacccccacgggatttgactgtctggatgaaatgacctgtggcctgcagcccggcgacctggtcctgctggctgcccgtccgtcaatggggaaaacttctctggcgttgtccatgtgtctcagtgccgcccggcgacggacagaagaaagcgttctggtattcagcattgagatgccgaaggagcaactgattctgcgcatgctttccatgctggggcgtgtggaactgaatcatctgcgcagtggcaacatggatgatgaggactgggcgagggtgtcatctgcggtcggcatggcgctgggtgacggaggcatggatgcgctgggtgaacgcctgataattgatgactgcagccagcagacaccgtcatcgctgcgtgccagtgcccgccgttatacccgtctgtacggtaaacccgctctgattatggtggattatctgcaactgattcgggcgccggagctggagaaccgcacacaggaaattgctgaaatttcccgttccctgaaagcgctggggaaggagctggggtgtccggtgctggccctctcccagcttaaccgtcaggtggaacagcgtgcagataaacgccccaataacggtgacctgcgtgattccggggcactggagcaggatgctgacctgattatgtttatttaccgcgacgaggtctataaccccgattcactggcaaagggggaggctgaaattattgtcagcaagcagcgtcaggggcccacaggcacggtgcgggtcagattcgacggccgttacacactgtttacgccctctgaaaatgacgggcagggaggatatgcgtga

SEQ ID NO: 39999 - DNA, 1677 bp, Escherichia coli
atggcacacaaaccactgaatctcggggctgccattatgcagcccggtcgtcaggccagtgctgccggtaatgtggtggcactgggggagacccccatgattctgacgctggaccagttacgtccgaatccggataacccgcgcaccacgcgcaatccgcgttatgacgacatcaaaaactccattcacgcccgcgggctggatacggtgcccaaagtcacccgtattccggacagtgagccggatgtgtatatcttcagtgacgggggaaacacccgttaccagatactgacggaactctggaaagaaacgggggacccgcgtttttaccgtattcatgtgctgttcaaaccctggccgggacggcttcagtgtgtgattggtcatctggcggaaaatgaagttcgcggtgaactgacctttattgagaaggcgcagggcattcacaaggcgcgcctgatttatgaagagcagttaaacaaaagcgtgtccatgcgcgagctgtcgtcattactgacggaacagggactgccggttgatgcttccagtatcagcaggatggagaacgccctgaaatatctgtatccctggatccccgacctgatggagtcagggctggggcgaccacaggttacggcattgctggcacttcgtcaggacgcagagcgtgtctggggacagttcgcgctggcgtccggcacggacgcggaatttgacagagtgttcggggaaagctgccggaagtttaattcgccggaactgtggtcactggagatgttccgcgatgagctgattggagatttattgcaggcgctgccacatccctccctggactatgaccggtggctgctggagctggatccgaaagagcggaaccgtcgtcaccattttggtgagccggaaccggtggtggtaccgccgtcagtccgcgacagcggcacagggcagtccggtgcaccggtatcccgtatccggcctgaggtaccggaaatctctgcccctgatactgagcccgaacagcattgtgctgcccgaccggagaacgctgtttccgacacagaccacactgaaaaatgtgggcttccttcccccgaggagcgtgcagacaaggcgtcttcttctgctgagaaagtcctgcgtccggagatacagccggatatgtacggtggcgagccggttttcagtggtgatgcggtggaaacgggtattgccggatccgctgtgccatccgttatgaccggcgatacagcgccgtccggaacacctgatgcacttcccgcatcggtgacgcattttgctgaaggacgggatgatatcgagcatctgcagaatgaggccttccggctggcatgggaactggctgagtctgccggctgtgctgaagaaattgccatggacagagaaagtgacctgtcggctggtttcgggactgcagaggagaaatgttcgccggtgacggcatttctggtggggctgaccggtgatgcaccgctgacagtgtctcccgtcagtctgacagacctgctgacaggtggcagtgcgccggaggcatggccactgctggatgatgaacatgccgtgaagctgctgcgtcttctgagtgtgctgcgccgtctgcgcgccctgcagcgcagtgtgttacccgaagatgatgaggaggatgaaagtgatgagtga

SEQ ID NO: 40000 - DNA, 726 bp, Escherichia coli
atgagtgatatgccgcatcaggagcgtctggtcagacgggtcaggaaactgctggagctgagccgcaataacagcaatgcccatgaggccgggctggcgcttgcaagggcgcaacagctgatggcgaaacacggtatcacggagcaggatgcgggactttcttcggtgcagacgtcttcatcacagggggcaccttctgaggctgaaaaagttccggcgtggatgtttcgtctggtcatggtggtgtcacagacatttggctgcagtgcgtattacgactggcggttgatgcccggtggcaggtatcgccggtgtgtgacgttttacggtttcagtgaacgtcctcaggtggcggcttatgcgtttgatgttctgtgccgtcaactgagggacgcaacggatgcgtatctccgtacacagagccggcggctgaaactgagcacccgccgtgcccgggccgcccagttccgtgatggctgggttctgggcgttcgtcaggtggtgatgccattcagtgtgacagaagaggaaagccggctgatgcgtctctggctggagcagcaggagatggagacggtggacccccgggaggtgaaagcctgtcgcggcggtgacctggcccgctggcaggggtatgaagccgggaaaaatgcctcactgcatcatggtgtggggggaactgcccgccagatggtgccggggctgatgatacgggaggcgtcatga

SEQ ID NO: 40001 - DNA, 579 bp, Escherichia coli
atgaataacagcttatctcaggcaaccaacggtctgctgatgcaactggtgatggacctcaagagcggctatctgcgccgttgtgaatctctgggactggcccgggaggaaatgcagatgctgcagggactgaccattgaggaaatccattacctgtcgaactcggaagtgtcggttatccggctggacattaatcatgaaaatctgctgcgtatgctgcagcaggcccggacggagcagaaacgtctgcagcgcattgaccgtgcactggcgctgggtggctccattgagctgatggcgttttactttggactttccagtgtggatgttgcggcgcgccggcgcattgccggtattgatgttcggccgggacgtggtgtcacgctgagcgatgaggaaagtgcagagctgtggcgtttatggcagaaggcgggcatcacggatgtggagagtgcggatggactggatgtcatgatgctggctgcagagcagatgaatatcccgctgacggctatctggcatgcggtaaggggatggtgcgctgaccggcagacggagccggtaaggaatgcgtcatga

SEQ ID NO: 40002 - DNA, 249 bp, Escherichia coli
atgaaaatgacagaactggcaccgggcattctggccagcccgtgcgttccgccggcctgctgtcgtaaggcggttcagatggtcagtctgttccggcagggtgtgcgcaattaccggcaactgaatgaccgggggacccgttattacaagataaacgtcggacgcgcctggcgtctgctgagccgtaaccggggagagacctgggaactgctcagccatgagcgttacaacactgccagacgtaaatga

SEQ ID NO: 40003 - DNA, 1245 bp, Escherichia coli
atggcgttacctgcggaaagcctgattgcgtataccctggaaaaaatgaagcatcgtatggccaccggagcccggaaggaggagaggcgaatacgcagcggactgttgttcaccggcaatgtgcatgatgccattccgcgtcgtctgttgctggatacgcgtctttcaccgctggataagatggcatggatgatgatccggctgtatgcgcagaataatgaaggagctatttttcccacttacgatgaactgcaactgcagctggcatccccggggaagggaaaagcctccagagaaaccgtcagccgggtattgctgatgttgcggatcacgggctggctgagcctgtgtaaacgggtacgtgatgataaaggccgggttcggggaaacatttacgcccagcatgacgagcccctgacgttctgcgatgcagaggcgatggatccacgttatctggatatggtggcagaagcctgtatgagccggaaccggaccatcagtcagacggcacgggatattctgggtgaaataaaaaatgatccgggaatgcgccactatcacagccatatcagtcagctggaagcccggataggaagtgcccagacaccggagcagatggctgcccgtcagcgggtgacggagggcagaatgcagccgggttcggaaaccgaaccggtggtgaaaacactgagttcggcaccggaaaagcggagttcggaaaccgaaccgggtaaaaaaatggggcaagaaagacagagttcggattccgaaccatcaggaaaatcagcaggttatcacagagtacggataccgaaccattacgtacgtaatatcacacacagtgtgattaaaaacacgtacgtactgccggcgtcgctgacggggcaaatcagagaagaggatgccatcatgctgaccagtcagttgcaggcgttgccggaaacgctggcacagggtgtgctggaaagcctgtctggggtgctgggcagtcagtcactgcagaacccagtgggctggctgcttgcggtgctgaagcgtgcccgggagggaaatttttatccgccgaaacagaagcagcgcgtcgctgcatcagccatcacacaggcgggggcaggagcgcgctccacttcgcaacctgttgtcacccggaaacgtacagaacccatttcagcagagcgtctgagtggcattgtggcagggctgcgggcctccctgcgtaaccgttctgcgataagaatccggtaa

SEQ ID NO: 40004 - DNA, 747 bp, Escherichia coli
atgaccaaaattaaaattctggcactcagtatgctgaccgctatatcggtgaacacagcttatgctgaaagcactctgacactgggagccggtgtcggcgtgattgatcagccttataaaggttacgactctgaagcgtatcttatcccggcagtgtcttatgacggcgacagcttctggttccgtggtctgggcggtggatattacctctggaacgatgctgcagataccctgtcggtgatggcctactggtcgccgatgtatttcaaaccggatgacagcaacgatcatcagttacgccgccttgataaacgtaaaagcacgatgatggccggagtgtcctggtcccatcacacgccgtatggttttctgcgaacgagtctggcggcggatgttctggataacagcaatggcgttgttggtgatgtggcgtggttataccgctatgtgaatggcggattcaccctgacaccgggtattggtgtggagtggagcagccagaaacagaacgattattactatggcgtatcgcgtcgagagtctgctcgtagtggcctgaaacgatataaagccgatgatgactgggcgccttaccttgaagtcagcgcaaattacacctttgccagcaactggggaatctacggaactgcacgttacagccgcttatctgatgaggtcaaaaactctcccatggtggacaggtcatgggatgggctgttttccaccgggatcacttatcgtttctga

SEQ ID NO: 40005 - DNA, 693 bp, Escherichia coli
atgagtgaagataaactgaaccagaaagaagtgcgggtcggcgcattgcagtcctcgctgtccattctgttacatacccattatgccatccgcctgtgggaagggcgcaaagcggagaaggtttccggtgatggtaaaccccgtccgggtatcatcagcatgcctcaggtcattgcccgggccgggcaggcaacccgggatgcggagcgcgataatccctgggcggatatgctgctggtcaggctggaagaggcattatcgcaggcatcggaacagatccgtcagcaggtcgccggactggaggcggtgctgaacagtattcccggcaatatcgtgatctctgatattgcatcatcttcgcccgtgaacattggtgttttcagcagctctcctctggggtatcgctgcgtctggttgcttgtggggtatgacgaactggtcatgaaagcgtttcatgcctttcactacgggctgatttcgcgggcgcagcgggacaacatactggataccggggggcacgctgtccgtaaggtatatggcgtggcgcagtcctacaaaacggttcatgccacccggcaggatattttatccggcacggagaagggcagggtggctgtcagccgttttggaaaacctgatccggatatcatgagcggtaaaaaacgctctgttttttctccgcccctgaaataa

SEQ ID NO: 40006 - DNA, 2010 bp, Escherichia coli
atgcaactctatttgtgtgaaaaaccgtcacaggcgcgggatattgcccgggtgctggggctcagcgggcggggagagggctgtattgaaggcgatactgttacggtcacctgggccgtggggcatctgctggagctggctgccccggaagcttacggggagcagttcggggttccctggcgtatggagtcgcttcccgttctgcctgaaaagtggcagatgacggttaaaccgcagacgaaatcccagtttacggtgatcagccgcctgctgaagcgtgcgtctgaagtggtgatcgccacggatgcggacagggaaggagaagtcatcgcccgggaactgctgacgtactgccggtaccgggggccagtccgccgactgtggctgtctgccctggatgaggccagcgtccgggaggcgctggcaaatattctgcccggtgagcagacggcccgtctgtatgatgccggcctggcccgtggtcaggccgactggctaatcgggatgaacctgacgcgcctgtatacccttaaagcccgggcgtcagggatcccggatgtgttgtccgtcggaagggtacagacgccgacgcttgccatggtggtcagacgggatcaggagattgccggttttgtgccgcgcccctggtggcaggtgtttgccggactggagaaagacgggatccggttccgggccgtctgggtggcggcagagcagtactgtgatgaagagaaacggtgcgtgaacgttcaggcagcccgggccgttcttcagttgtgtcagcagacaccgtcagcggtggtgcatgaggtgacccggaagcgtgaaaaaacaccggctccgctctgtttttcgctgggtacactgcaggagagctgctcccggaaatttggtatgggggcgcagactgtgctgaatatcgcgcagtccctgtatgagacgcacaaagccacgacgtatccccggacggattgtggctatctgcctgaatccatgcaacaggaaagccgggaggtactggcggcgatggcgcgttcagacccggccctgacgccggttctggcacagctcgatcccggttttgtttcacgtatctggaatgacaaaaaaatcacggcacaccatgccatcattccgacccggcaggtctttgatatcagggcactgagtgaggatgaactgaaggtgtatcagctcatccgtcagcattatctggcccagttcctgcctctgcaggaatctgatattaccgatgcaacactgacactcggcgggcaactgttcagagcccgcgggaaagtgaatgtggtgacgggctggcgaggtctgttttccggggaggctgcagacgctgctgaaggcgaagatgaacagacgacggaaatggcgttgccggtgcttgaacggggtgaacactgccggattagcggctcagaactgaaggaccggatgacgtcacctccggccccttttacggaaggaaccctgattgccgccatgaaaaacgccgccagtcaggtctgcgacccgaagctgaaaaaagtgctgcgggagaatgccggtctggggacggaggccacgcgtgccggtgtgctggaggtgttatttgcccggcagtatctggagaagagcgggaagcatatccggtcaacgcaacggggcagggagctgacggccgccctgccggaagccctgaccagcccgggaatgacggcactgtgggaacaggctctggatgatattgcacagggcagaatgtcgctggatacctttatggacaggcagcagcagtgggtgcgtcatctggtctcatccggacgggaacagcccttcagtatgacgatgccggtgacgccgccgtgcccgatttgtcaggggccgacccggcagcgaaagggaaagcacgggctgttccggagctgtcagcggtatcctgagtgtaagggcgtggtgaacacgcagaaaaaggccgggcggcgaaaaaaaacgggaaaaactaaaacggagtaa

SEQ ID NO: 40007 - DNA, 456 bp, Escherichia coli
atgtctgtaaatactgccaaaactgaatactttaatctgaccctcaaaggtctggggtatctcagtaatgtacgtcaggtgaatcaccagaacggctcgtttctcagctgtgtggtgaatgcgctgagcggacccacggacagcccgtcctacgtccgttttgatgtcacggttgccggtaaggaggcaacctccctgattgcccgctgccagaaggcggtggatgaagatcgcaaggtgctgcttggcttcacgctgagcaacctgtccactgacatcttcaccctgaacaagggagagcatgccggtgaacaacgcgtcagcctgaaggcccgcctgatcaaggtggactggatcaagataggccaggagatggtttacaaggctgaaaaatcagactccctgccgccgcaaaacggcaccatgcaacagcaatacgcagaaaactctttctga

SEQ ID NO: 40008 - DNA, 537 bp, Escherichia coli
atggcgtcacgcggtattaataaggtgatactgatagggcatcttggacaggacccggaactccgttacttccccaatggcggcggagctgtggcgaacctgaccctggccaccagtgaatcctggcgtgataaacagagcggtgaaatgaaggagcagaccgagtggcaccgcgtggtgattttcggaaaactggcggagattgccggtgaatacctgcgtaagggttcacaggtgtacatcgagggccagttaaggacccggaaatggttcgatcagcagaatggtgttgatcgctattcgacggaggtggtggtgagtgtcaatggcaccctgcagatgctgggctctccgcgccagcagggcagcggtgccgcacctgcacacagcggtcagggaactgccggtgcgccggcgggtaactcaccgtcaccggcttccgggaacggcgggggaatgccgatggattttgacgacgacattcctttcagtggaccgggatatggcgctgaacggcggattatccatgccatgtaa

SEQ ID NO: 40009 - DNA, 897 bp, Escherichia coli
gtgagtgaaaaaaatcataccacccccacgccacacgatgcggcgttcagggcgatgatggaaaccccttcggttgcaagggattttctggaagctgcgttgccgccgtcacagttacagcggtgtgacatgaacaccctgaagctggagccggccacgtttgtggatccggatctgcgtcagtttgccagtgatgttctgtggagtatgaaaaccaccgatggccgtgatggctacatctatacgctgacggaacatcagagctctgcggatcgttttatggccctgcgcatgatgcattatgtgctggcgataatgtatcgccacctgaaaacgcataatcgggctcccattgtgatcccggtgcttttttatcacggtgaacccagtccgtatccgtacagtctgaactggctggactgtctggacgatccggcgcttggtcgtgagctttacggcgaaggaaagccgccccgcgttattgatgttggtcttcttgatgatgagggtatccgctgctatcagcagatggcggccctgatgcttctgatgaaggtccgtcagcggaagggcgatctgatgacgcagcttgactttctgtcgcagctgcttcagatacagggatcacacgaacaggtggtggttctgttaaactatatggtgaaggcatgcgattcggcttcaccggaatttatacgggcgatggcagaacatctgccccggtatgaggatgatattatgactatcgctgaacgacttcgtcaggaagagagagaaaaggcgcttgagaagatgcttgaggcagcccgtcggatgcagaagatggggatgtcgcctgagagtattcaggagatcctgcagctttctgatgaagagctgcagaaagcgctcggttaa

SEQ ID NO: 40010 - DNA, 603 bp, Escherichia coli
atgaagatgcaacccgggagcttatttcccctggttaccctggccctgctggccgggtgtaacagtccacaaaaacttcagcaacgtgcgccggccatgccggtaccttccgtcagcgtttcccgcaatgtacagccggtgtcaccggatatttatgcgcagccggcaccggaagtggtgcgttacgaccgttacctgctggtcagcactgcaccgcaggcagcgcagcgtgacccgctttcccagatgattgatatccgtattccggcgtcgttaaagcccactgtggccgatgccatgcgttatgccctgaaacagtccggttacacgctgtgtgccaccgggccggctaatggtgtgctgtaccgccagcccttgcccgccgtgcagtatcagcagggaccggtgcgactgcgtacggccctgcaggtgatggcgggaccggcctggcaactggaagtggacgatgttcagcgggtggtctgccacagtctgcgggaggggtatcagttaccggcaggccagctggcaccggtgccggcttctccggcaatcacggctccggtggcacaaccggctaagggaggcttcctgaaaaaatga

SEQ ID NO: 40011 - DNA, 774 bp, Escherichia coli
atgagcgaacaacaggagatgataacgcccgttccggcagataaacccacaacacgcaggtattcatttctgcggggcgtggcagtgagttccctgattctgctggttgtggtgacgggcgtggcgttgtatctgacgggacgcggcatgctggcgatggatacccgtctggcaatactggaacaacagcagggggagcgtctgacagcggcggcactggcaccgctgcagtcacgactgagtgaactggagacgaagctgcaggcggagagtgcgcgtctggcgcagctggcccggcagcccgttctgacggaggttcagcagacgcagcttaaggaactgccggcgtcccttgagcagattcaggctgcacagaaagccttttccctgcggctggacatactggctgcacaggcagagaagctacagcctcaggctgttcagtcagaatccccttctgcttccggcaccgggaaaaaggacgtatccggaacgaaagaaccctctccggtggtacagaaaatcgcccgccctctgactgctcgttcaggaatgtcgcgcacctcccgccgggcgccgtttgttctgaccggcaccgagcgccggggagcgcagtcatatgcggcggtggcaccccggggatataccagtctgtcgcaggtggcactgctcggggaaggtgagagtgtggccggctggacactgattcatgccggtcacgaacaggcgacgttccgggtgaacggacgtcaggtacaggtcagggtggagtga

SEQ ID NO: 40012 - DNA, 720 bp, Escherichia coli
atgagactgaaatccctgttactggtgatgctgatacctgcactggcgcaggctgcagaccagaatacgaccgtgacggacgcgtcccgtacggatacgtcacagcatacgcaaagcgccacgcagtcgctgcaacagcaggctgggcggtggggactgagtgaggaggactgggggcgttatcaggaactgatggcgggaccccgcgggatacagtcgccgggtctggacccgctgacagcactgggtattgaggcccggacaccggctgagcgcagggcgtatgccgaaaagtgggtgaaggaagagcatgcccgtacagagaaggagctggcttttcagcgggaggttgatgcggcatggcagcgtctttatcccggaaagctgccggtcagtatgggcaatgccggtgttctggccggggacaccggaggcagactggcgctgtttgtgaaggcgaaggactgtgcgtcctgtgatatccgcctgagtaaggtgctggcatccggtaagccggtggatatttacctggtggacagtcaggggaaagacgggctgcttcgtcagtgggcacgtgagcacaatatcccaccagagaaggtccgtagccggcatatcaccctgaaccatgatgcggggcgctggctgcgttttggtgagggacagataccggtggtactgcagcagggggcggacggatggcgcgtggctgcattctga

SEQ ID NO: 40013 - DNA, 660 bp, Escherichia coli
atggcgcgtggctgcattctgaccgttctgctgatgctggcaggcagcggtatgtgtcaggctgttgcgcagaccattcctgacgggtatgcgcaggtggcccgtgcacacggtattccggcagaagtgctgtatgccgtctccctgacagagaccgccatggctcccggtgatatggccggcgtcatgcagtattcccgccgcgacgggcgtcttccggatgtctcccgcccctggccctggacaattaatgtggccgggaaggggtaccgttatgccagccgtctggaggcctggcaggcactgcaggtttttctgaaacgttatccggccagacgcattgatgtcgggatagcgcaggtcaatctggggtggaatggtcatcgtttcccgtcaacatgggcggcctttgacccgtacaccagtcttgagacggcggcagtcattctgcaggagtgccatcagcgccatcccgacagctggctgaaggcagccggttgttatcaccatcctgccggtggaaagccggccgcccgttacaccgccctggtcagacgtcatctggaccggctgaatgcaaaaagtatgacgccacagcaaacagccatgctggcaccggctgcggattatatctggacagagccccggaggcgtgaatga

SEQ ID NO: 40014 - DNA, 525 bp, Escherichia coli
atgaacagactgagacggattactttttattttcctgtatggcttctgttttcagcgagcgtcagtgctgaactgatggtgattgctgacctggggggcagggatgcggctcctttttttgagggtatcaaccggcaggcaccggcttctgcaccggttgtttcaccacagcctcttctgcagggagaagccgcgatgctgccggtcagcacacctgaaatgtcccccggagaggtgacaccacgcccgcttcagctaccgggcatcggtgcacttttccttgtgggggatgatgcgtattcccgcgagtggctgcagaaaaatgttgctgcgctccgggcgcgccatgctgccggaatggtggtgaatgtggctgatgaaaacggcctgcgcacgctgcgtgaactggcccccggcgtggcgatggcaccggcatccggttctgcgctggcccgccggttacagctgaagtcttacccggtgctgataacggacaacgggctgtcacaggaggtggtgccatga

SEQ ID NO: 40015 - DNA, 753 bp, Escherichia coli
atggctgattcccgtcgtgatgtgaaccgtcctgacgccgcacaatctccacgccggcacgggctgctgtataacctgctgtgggggtggccgtgggcactggccgggatggtgctctcctccctgttgctgagcctgctgattgagtacgtgggtattgcatttttctggcctgaacagggagcgaagcacagtgaagcggtcatgaacaccgagctgggctggttatcctcggagtttacccgcagtctgctgctgtccacgccgtcagtgacggtgatgaagtgggtgtccacggcgtaccagtggctgtttgtggacagcggatttatggcctggatgaagcagggagcttcggctgataacagtgtgatacaggaagtggatactctgggccgctggctggcgcattacctgcatgattacctgatggccacggtatatgtgacggtggtgacgctggtccgggtgacgattctggtgctgtcagtgcccctgtttgtgatggtgtcactggtggctgtggtggagggtctgggaagacgtgacctgcgcaggtacggtgctgcgtatgaatccagttttgtttatcaccatgccagaaagtccattaaaccggcgatatacattccctgtattctttatatgtcctggcccacggcagtatacccgaacctgctgatatggccggcggccatgcttctgggagttgccatcaccgtgaccatggcatccttcaagaagtatttataa

SEQ ID NO: 40016 - DNA, 951 bp, Escherichia coli
atgctgatttctcgttgcttttttctgacagccttttttgtcagttttggtgtaaaagcaagcacaatttgtgttggtcattatgtcgggaataatgttgggtttacaagctcttttgtgggggaccagtttaacaaggtaaatattaaaacacatgggcgatggaatggtggtggtcaggattctctttataagtctttgcgagattttgccggtttctcttcctattccgttgctgtccctaaaaaaataccactgcctggttcttcagtacagctgacgctgacattatctggtaatgtcattacagttcccacagataacagatggcaggctgtttttgttcagcaaacaaatgaaggatgtgccgttaatacacagggagtctggcaacaagttcatgccggtattcgggccgggcaggtaaatatagccttatcaggcaatgggcttccttcggggcgatatcagctggatgtaccctatatattggcatggggctcctcaacggatggtaatgcaaacagggattttcaggatacatggaaagcgggaaatgtcgggacgagtaatgtgaccggatatttttctcttgaatttacgattaaaaataagtgtgaaataacatctgtgaataatgagctggtattaaaacatgggacaatgaccccggatgtggtttccggaagcaaggttatcagtaaagagttgtctttatcatgtgagacacccacaggggtgagatttcagttccagcctcaaaaggtggagctggggaatggtgtcagtagccgacttacgcttaaaatctcagacaaagaatattctgataaccctgtttctgcagtgatagataacagtaaattaagggtgatttcaactctgcaggggaaacccgatgctgccggcgaattatatggtgtttcagtccttacggcactttatgattaa

SEQ ID NO: 40017 - DNA, 1011 bp, Escherichia coli
atgaaaaaaataatttttctgttagcactgactggcatctcagtttcttcatctgttcatgctaactaccgatggtttctttttgagcctaagaatgatgtgttcagggatattgatgtcacttatgacgattataccgtttcggccaccacttccatgccatcttcactgagtgggatttcttcagggaaagtgattcgtactatctgttccggaggccccggaacattacccgcagaacaacaaaaaacaggatggatagccattcccacacgagaaattcaaagcggcggtttgaaattcagggctgaaccggttctgggtggaggatgggaaaggcctgtcttcccttatcccgcaacatactcaatggcagtgaatcagataaccaaaaacacacctttgggggagtgctggactctgggaagcagcactctggtcgactggtgggcacccgcagcatccataaaaatgaccattcccagacaatccgtgcctgcaggtgtatataatgtatccatcccctataaatacgcctatgaggaacacaaacacgcaggttcaacatatcctggcagcagcattatttcagatgttctttctgtcccggataaatatattaatgcacgtgttacagtagtttctaaatgcgatatcagtacgaaatccataaatctgtctcacggtgaaatggcaggcaggcttgccgacaaaaacaaaacccgaccctataacgtcaatcttacctgtcgtgagggaacttctgtctctgtaaagctgacagggagtcacacaatatcaggaaaaactgaaaattttacccgatgcggagatggaggtgtttgtgagctgctctttaacgacggaaacggagataaatataaagacacattccgcataagcggcaccaaaacgcttgccgtcacatccacttatcatctgaacgatatcagtcatccggttgctggctcctttacaggaagcgggattatgcagattctcgttaactga

SEQ ID NO: 40018 - DNA, 345 bp, Escherichia coli
atgcgttcttttccggcatcatcccgccgtgccggccgtctggtcggtgctgcggggatgctgtttctttccacctttgccatatccgttcaggcggctgaacaggatgaactggccactgccatgcgccagcttgaccaggtgcaggcggcgctggaacgggcccgggtggccgctgtgcagtccggctcgtctgagtcatcccgttacttctttgattatccccgggcgcgtgccgatctggagaccattcgtgatggcattgaccgctatctcacgccttcccgggcccagccccgcacaacgtcagccgtgaacgggcactaccggcgggagcgtccctga

SEQ ID NO: 40019 - DNA, 243 bp, Escherichia coli
atgggcatgtctgccgtgcagtcctccgcctttaaagcagcatccggggaaatggatatcagtaccctgcatctgctgtcactcgggctgctttttgctgtgctgtttctctgggcggcctgggcgctgctggatgtctgggcgggctggagtaatgagaaggtccgcagcgcaatgctggggcgcttttttatccggctgactctcctgctggttctcagtatctggatgtttgccagctga

SEQ ID NO: 40020 - DNA, 399 bp, Escherichia coli
atgaagtggtgttttcgttttctgaaacgtgttgtttctctgtcgcgcacaatgctgttacgcctgtggaaggctgtgttctcactgtgtctgctgctccggatgagtatgcagccggcgctggctgatctgcccaccatggagcccccgtcctccggcggtggcagcgggctgttcgggcagattaaaggctattctcaggacggtgtggtgctgggtggcctgattattgcggccattgctttcattgttgtggcgaatgcggcgatttccacctttcatgaagtgcaggacggtaaaaagggctggagccagtttggcgccattgtggtggtgggggtgatcctgctggttgcggtgatctggctgctgaccaaatcggcctccatcattctgtaa

SEQ ID NO: 40021 - DNA, 366 bp, Escherichia coli
atgcagaccattcattttttacccgatcgccttaacgtggagccggccgtgttccgcggttttaccacgccggagctgggactggccgcactgaccggtgccggtctcggcctgctctggccgttaccgctgcttccgctgaccggctgggtgattatcccgacaggaatgatggttacgccgctgctgctggtctggtttggcggaagctggatcacccggatgaagcgcggcaagccggataactggctctggcagcggctggaggagaaaaagtgtcgtgccggtatgggccgttcatcgctgattatggaggcgcagggctggtccctgcgccgttcccggccggtaaggagagtcttatga

SEQ ID NO: 40022 - DNA, 663 bp, Escherichia coli
atgagtcgttttcgtcacgcccttcaggacagggaccagcatatccgcagcctgcgcattatcagtgccgtactggcaggatttctgttgctggcctgtattggctggatgactgctcccagccgtctgaccattcataacccgccggatttgcgttccggcagtacccgaccgtggtgggaagttcccccgtcgacggtttactccttcgccttttatatcttccagcagttaaatgcctggccgaagaacggtgaagtggattacccggcgaaaattcatgccctgtcggcctatctgacgccgtcatgccgtgaattgatggagaacgatgcccgccgccgtaaggatgcgggggaactgcttgaccgtgtgcgcgtggtgtatgaaatccctgagcacgggtacggagggcgctacaacaaaaatccggtgaccgtacagggccgggataactggctggtacgtctggacctggtggcggatgagtattttcatgccgagccggtcaaacgtgcgctggtgcgttatcccctgaaagtggtgcgttgggaggggaacccggagcataaccccttcgggctggcacttgactgctacagcggtacaccacaacggctggaagccgcgccggtgtcttcaggctcgggaggtgcgcagtga

SEQ ID NO: 40023 - DNA, 948 bp, Escherichia coli
atggtagctaccgttcgtcatttcctccggaatagcctgacggcgcttccgttactgatatccccgtttgtgctgcatgctgacgaactgatgaagtgggagcgtattccgttatccgtacccctgaaggtggggcaggagcgggtgatttttgcggacaaaaatgtgcgggtgggattcccgccggcactgaacggtaagctgcgggtacagagtaccggtggtgccgtgtacctgaaggcggacagtgccttttcacagacacggctgcagttgcaggatgtggagaccggggaaattattctgctcgatgtcaccgccggtgaacaggggccttctgagccggtacgtattgtgtatgacggtgaggtcagcacggtcagtcaggcgactgacctgatgaaaccggcgtcctcatccggcaaaacctccgccggtcagtcgcgggcaccgggacaggatgacggtacgcaggcccgtcgtcagccggttcgttacagcgcgcccctgccggtgttactgacccgttacgccgcccagtccctgtatgccccgctcaggactctggaggcggtgccgggtgttcacccggtcagtcatcacctgcccggacgcatcaccaccctgtatccgtcagagcccctgaccgtcacgccactggcggcatggggcgctggcggacgcacggtggtggcgctgaagctcatcaacacggtcagtcgtaaggtggtgctggaccccagggcactgcagggaaactttgtgaccgctacgttccagcatcgctggctgggacctgccggtacaccggaggacaccacaacactgtatctggtgacagagggcagaccggacagggcgtttatcgcagagccagtccgacgtaaagtcaccacagcccgtaagacagggggcagcacccgcggggaggtgaatcgtgcagattaa

SEQ ID NO: 40024 - DNA, 1491 bp, Escherichia coli
gtgcagattaaatccaacacgctggtcaaatttgtggtgcccgttgtggttgtgggcggggtattcatcgggcttaaaagctgtggtgatcccgcgtcgtcatcagatccgtcagcacagcagacacaggtcctggggactctgtctcaggaggaactgaaggcgctgggtgttgagggtgacacgccggaagataccctgcgcacgcttatcgggcgtctcaatcaggttcgtgaacgtcagcagacgctggacgaacagaacagcaaactgctgaaggagaatgaacaactgcgcaaacgcggaacggatgtgtccggtcagctgaacgatgccgtggcaggactgcagaaaagttatgaggagaagcagcgccagttacagaacgagcagaacgccctgatggcaaaggtgcagtccctgacggagcagctggcgcagcagggtggcaccagtaaggcaaatactgacagcgatattcccctcgggctggggcttgacggactgagtggttctccgggaagcacggtgtcacagggggccgatggcctgatgtgggtgacaccggctgaccagtcacagccatccccacgggatgtggcagggggcaaaagtggtccccgtttccccacctcctttctggatgataacccgctgacccgtcagaaggcggcgtatgaacagcaggtgaagggatacagtaacgagaaacaacaggccaccacacaggccgtctacaccctgccggagaatgccaccctggtcgggagccgggcaatgacagccctgctggggcgggtgccggtcaacggcacggtgacagacccttatccgtttaaggtgcttatcggtaaggacaacctgactgccaacggcattgaactgccggatgtggaaggggccgtggtgtccggtaccgccagtggtgactggacgctctcctgtgtgcggggccaggtgaacagtatcacctttgtgttcgctgacgggcgggttcgcacgctgccggcaccggatgtgaacggcaccaccaacagcaaccggaatgcgaagaacgggaataacaccggcggcattggctggatttcggatgaggatggcattccgtgtatcagtggcacccgtaagtccaatgctgccacatacctgcccaccattttcagtctgtctgccgcaggggcggccggtgaggccctgagtcaggggcagtacaccacgcagaataacgtcaacggcctttcttctgcgctgaccggcagtgccggggaggcggcactgggtaaggcgatttccggcggaatgaatgagacagcggagtgggtgaagcagcgttacgggcagacgtttgatgccatttatgtgccaccgggaaaaaggctggccgttcacatcacccgccagctggcgattgattacgaagaccagggccgtaaggtgcgttatgacttcaccctgccgggagaggcggacgcacagggggggctggactga

SEQ ID NO: 40025 - DNA, 411 bp, Escherichia coli
atgaaattacttttgccgttactggtgctgacgggcgcggttctggccggcggctgttccacgtcgaaagaggaactgctgcccgccggggaccagacgatgctggaaatctggcaggggcagtctgacggcggaagcgcccgttctgctgcggcagcccgtgacacactgcggcgtccgctgacagaaacggaacagcaggacgcggcgcagacggaccgcagttacagccggacacaggagagtgaaatcagccagcagtttccgcgtctgcccaatccggacatggtgatgtatgtctttccgcaccttgcagaggggaattcaccggtaccgggctacagcacggtgttttcattttacagccagacgcagtatgcgatgcccggtgaacgcacggcagcgttctga

SEQ ID NO: 40026 - DNA, 2829 bp, Escherichia coli
atggtttttcctttgtttaaaaagaaagtaaagacggaagcgcctgtacaggcagtggcatcagccgcgtgtgcgcatgaaaccggcgccggtgacgccggtattcactgtaacctgacccgccccgggcgaatgacgcgccgggaagaggcgaagatttaccatgcggccccgtccattattgattttctgccctgggtggaatatctggatgaagagcagtgcctgctgctggatgacggggtgtctgtcggcgctgtgtatgaggtgacaccggcggccacggaagggcgcacggcagagcgccttgagcaaatccgtgacacggtggaggatgccctgcaggacagctttgatgaatacgacacccacccctgggtggtgcagttcttctgtcaggatgaaaatgatgtggatgcgtatcttgaccatctgagggggtatgtgaagccccatgcgcagcgcaccgcttttacagaggcctggctgggcgagatggaacggcatcttcggggaattgcccgtcctgaagggcttttcacggacacgctggtgaccggtcagccctggcgtggtcagcagcgacggacccggatggtggtgtaccgccgtatcgggaaaaacagccatgacccgatgccgccggtggcgatgctgaaccaggtgtgtgaacgcgtggtgggggcgctgggcggggcgggtgtgcgctgtacccgtatgaacggtctgcaggtacatggctggctgctcagactgttcaatccccgaccggcgtgggtggacagggacacactgtaccgtctggccacccgtgcagcaccgcaggagaccccggagggcatgatgccggtgatgaccgactttgcggaaagtctctggttcacgccgccggtgtcggatccggaaaacggtgtgtggtggctggacggacttccgcatgccgccgtggtggtggagaaactgcgtacgcctccggcaccggggacgctgaccggtgagaagacccggggcgaaaagacggtgaatgccctgatggatacgttccctgaaggcactctgttgtgcatgaccattgtggtacagccgcaggacacactcgaggagcgttttacccgtctgtcaaaaaatgcggtcggggaaaacacagagtccattcgtgcccgtcaggatgtggccaccgtgaaggaatatctggggaaccgccacaaactttaccgggcggggatcagttttctgttacgggctgaggatatggacagcctgaagcgtaagcgggtggccctgactacggcactgctgggcgccggcctgcagccggtacgccctgagtttgatgtggggccgctgaacagctggttgcgtgcgctgcccatgtgttttgacccggatacggacaggaagcagtggtacacgcgtctgatgtgggtgcagcatctggcggggctcctgccggtgaccgggcgggagacgggcaccggtcatcccggattcagtttctttaaccggggcggggatgtactgacctttgatccgctgaataaactggatcgcacccagaatgcgcacctgctgctgtttggtccgaccggcgccgggaaatccgccacgctgtgctcctcgctgtcgcagatcatggccgtacatcgcccccgtctttttattgctgaggctggtaactcgttcgggctgctggccgattattttgagagcctcggggtgagcgtcaacaaaatcagcgtgaaaccgggcactggtgtcagcctgccgccgtttgcggatgcgcatttcctggtggcacagggacagaccctgcaggatgtggatgaacagacactgccggatattgatgatgacacgcaggatgaggacgggaaccagcgcgatatcctgggagaaatggagatctctgcccgcatgatgatcaccgggggagatccgaaggaagaggcggcactcaaacgggcggacagggcgatgatccgcgaagccctgctgatggccacgcacaccacataccgggaggggcgccagatgctgccggcggatttgcagttggcactgtgggaaatatcccgggacagtcagcgaaatgaactccggcggacgaaagcggcagagatggctgaatcgctggggatgttcacccagccgggcagttttgaggcggagctgtttaaccgggagggggcgctgtggccggaggcggatgtgacgctgattgacctgggacatctggcccgtgaggggtatgaagcccagatggcgctgaccattgtgtcgatgaccaacatgattaacaacatcgcggagcgtgaccagtatctggggcgggatattctgtttgcggtggatgaggcacacattgtgacggtgaatccgttgctgtccccgtacatgaccaaggtggtgaaaatgtggcgcaagctgggggcctggctgtggctggccacgcagaacctgaaggattatccggatgtcgccgagaagatgctgaatatggccgagtggtgggtgtgtctgaccatgccgccggaggaagtgaataacattgcccgctttaaagccctgacagaggagcagaaagcggtgctgctgtcagccggcaaactgtcagggtgttacacggaagggggggtgctggcgaagaaagtggaggcactgttccgggttgtgcccccgagtatttacctggcactggggatgacggagaaggaggagaaggcggagcgccgggcgctaatgaaagtgcatcagtgcagcgagctggaagccgcatttcatgtggcccggaagctggacaggctgcgtgggctgactgacggggagtaa

SEQ ID NO: 40027 - DNA, 381 bp, Escherichia coli
atgctgtgcctgaaatatccggagccggaagaggtgtcacaggggcactctgccggaagtgtgtttgtgctgccgccacaggggcagcccggagccagtcgtgccaccctggataatcttgagcgtctgcgcgggcatctgcagaagcagctggggcaggtgacgcgtatctgttgccagccacagcgtgtgggagtgaacagcagtgtggcggtgacactggaagggcggtcgggccggcaggtaaatctcctgctgaccgtgagcggtcatgagagctggccgtcggaggaggagtatgtacatccccgttggtatattccggtgaccgatgccgctgatttgtgttatctgctgctgtggctggccgggttaaagtga

SEQ ID NO: 40028 - DNA, 873 bp, Escherichia coli
atgtctattaacacaacaatgtcaaatataagcagagtacaaaaggaagtcgcaaatttacagaaacaactcgcggatgaaagccgcaaagaaacacaattattaggaaaggtgaatcaagttcatcgtagtataaataatgccacatcattaaatgccttagcttcaaagatgtcgcaaataaccaactataataatgatatgtccaagtgcaatacaaagaaatctgacataaacaaaaacattgcaaaaaaaaataatgaattgaatcgtctacaaacacaattacagaaagaacaggagaatgaattaaaaaaaagaaatgtagctcaaaaaaaacttgagaaagaacaattagaataccagaacaaaatcagtcgtggattggatatacaaaagaacataatctccaacacatctcaccccatacctattaataatagtacaaactcggccatgatagaaaaatatgacgtatttatatctcacgcaacagaagataaagaagcttttgtcaggccattagctgaattacttaaaaatagaggaatcaaagtttggtacgatgaattttctttaggatggggtagcagtttgcgaaaaacgattgattatggattagtcaattcacgatttggagttgtcattttatcaagatcatttataaagaaacagtggactgaatatgaactaaatggactaacagcaagagaaatgaatggggagaataaagtaatcctcccaatatggcatgaagtatcaaaatcagatataattcaatttagcccttctctcgctgataaagtagctctaaattcatcaatgtatactatagaagaaattgctgaagaattaacagcacttcttgcatag

SEQ ID NO: 40029 - DNA, 387 bp, Escherichia coli; identical to SEQ ID NO: 12817

SEQ ID NO: 40030 - DNA, 204 bp, Escherichia coli
atggcggttcgttataaaattacggcaacgataatgaagcccggcaatccaccggtattctggacccgttattccggaagtaaaatgactcgtactgagtgcgagaagatgttctctgttcccaaagaaccggagcagacctgtatgcttaaaacccgaattgaaaatttctattgtgaaagtattgtggatgaaaaagtctga

SEQ ID NO: 40031 - DNA, 396 bp, Escherichia coli
atgtaccggaatctgttgtattcctttcttgctctgccggtgatatcagttgccggcaccactgtttataccgattcggagcatccgccggttaacctgcctcctgaagtgcaggtcgtgttactcgacgggccacagcaactgcaggacgcttttttcggcccgttgccggctgaccctgaagccgctgaggctgttgttcgtgagcacatgcagtcccctgaatggtcgtctgcacaggctgaccttgcagaacgttaccgcctggtgacccacgcctggtcgctgggacttaaaaaataccctgcggtggtgttcgacgaccgggaagtggtatacggcaccaccgatgtggcacaggctgagcggctcaggagtcagggaggtcagccatga

SEQ ID NO: 40032 - DNA, 975 bp, Escherichia coli
atgacggagctgcaaacacgacgttatgccggcgcatttttgttgtggacagcgactgtttccgtggccggcgcttccctgaatacgacacagatagtggccagcgctgtctctcagagctgcatcagctggcgggtcagtggtatctgttactggctgtactgtacgccctttggctgtaaggtccggacgtccgtgaaggtttcacattttattcctgaagcggtggtgtccacttataccgcaccgggcggtaatccctggcaggagatggctctggtcagtcaggcatccggcggtgtggagaacgccatcagcagcgggattgccggggtgtctgccggcgggggaaacccggcagatatgaaattaccgggacagcgtaaatccgccatccgtttcaaatacgcggatgcgctgggacatccggccacgttgcttatcgggggcagcattcccgggtattcgtgtgagtctgctgccactccactgaaaccttattttctcagcacactggacactcttgcctggcgcaccggcatgcctgaatccctgtatcccgaagccatgatacccggcagacgggagctggggagtcagcgtaatgcagacatgtggggaaatatctacccccgttccggttttgtcagccagaccgatgatgacaaagcggcagccctggttgcccagcgggtggcggacatcatcacacgcaccggagaacctcacgtctatcagtcgctgaaaggccgaaaaaaggatggctactggccaccggatgcggtggaagaaaataccggcaccagtaatcacaagtggcagcgcctgaccccttctgtttcttcatcctgcgccgtgtttccggatggcagccatgccgcgccggaggacggtaatgccgcttttgccctgtggcgtccctacagttgctgcaaaaagcggggccagaaatttctgggcagtacgaatttttag

SEQ ID NO: 40033 - DNA, 1455 bp, Escherichia coli
atgaagcataaaccacaactgataaatgtcgtggcactggcagtcatgctggcctgcagcacaatggccggcgcggcggagaatgaacgcggtacgttcggtctctccctgccacaggtgaatgacagcgccatcgggtacgggaaatccattgacggtgccatctcggacaaactgttttacaccctggggggcgggtcagtgatatcgcagccggcaacccgaagcaacatgaagaagctcggggtggatattggctggagcagcaatctgatgtgcggcaactttgacctgaaaaccacggtgagcaatcagctgaacggggtaacggacggttttaaaaacctgatgggggatgtgatacagggggcgacgggcgcggtggccagcctgccggcgatggttatccagcgggctaatccgggactttatgacgccctgactaacggggtattacaggcaaatgtagcattcgacaaggcacagctgaactgccagaacatggcgaagagcatgatggagttttcggacagcagtaagtggacacaggcagcaatgctggatgagtacaagaaaattgtgaactcaggggatggtgatgccgtccggggggatgatgccggccgtaaggttaccgggaaagaaggccggaaatggattggcggtcaggcccgtggtggtgccgggcagtcggctattcgccccacacatgatctggccgcagcgggctttaacatgatgaataacctgccggttaccagtacatcaacggtcggaacctccagctgcaccggaagtgtctgcagtaagttcagtaatgctgaagaggcggcaaaggcggtggtgaaagtgctgggtgatcgttccatgcggacctgcgggaacgcagcggagtgtaccagcggggatgaagaccaacagccgggagtggcggttgcaggaaccgggttcacgccgatgctggaagaagcggtgaaagtgaatacagaacaactggtgaagctggttaatggcacggaaaaaccgacggcagcgaatctggccaaactccggtccggcagtctgacggtaacggccggagtgattaaggcgttgcaacgggatccggataatgccgcactgaccggacgtctggccggcgaactggcaatggcggatacggtggagacggcactgctgatgcgcagaatgattatgacggggatgtctgaaccgtatgctgcagcgcaggatgtcgcgattgaagaaggaagtcgccgtattgaggcgctggaccgggagattgcagcactgaaaaacgagatggagctgaagcgtgagctggcccgcaacagcgtactgaccattattgagcgtgaaaatcagcgtgttggcgttaacccgcagacggaaagtgcggataacacagatacccgtattaaccagctggagcaggggagaaatgaggatgagtga

SEQ ID NO: 40034 - DNA, 354 bp, Escherichia coli
atgaggatgagtgagcgtctgaaaacagataacaaaaaacaaaaactaaaaaaaatcgtatatacgagcggtgcaatgttgatttttatggtgctggcgttgtttatcgcagatgttgccattcgttatccggggagcgtatctgcgttcagtgaatggatgagggctcaccgttctggctggctgatctggcgtcttttcatttatatcctgctgggctggggtatctggcgtattgtgcatgcaccgggattccgggcggaatacctccagccactgatacgtatctgttgcgccagtgtggcgtttattctggtctgtgaatacgcgttgctgaaggcgcagggaggctga

SEQ ID NO: 40035 - DNA, 1554 bp, Escherichia coli
atgacaacaaacagctatcttgaatattttctgaccctgctgggctggctgattaataacggcctgtggaatgtgctgctggggaccgggctgtttgcattgccgctggtatttaaggttattgggatctggctgcgggtcagggaagaaggggaagatgaggggaataagggactgctttcactgccccgtattgaacatgctctgtacatggggttctttgtgattatcagttgctgtgtgccgctggtcaatgtcagtctggggactattgagtatgacggcaaccgggcgaagcagtgtggaacatggacgccgaaggcaccggataagaccgggtatgcaggcgtgatttccagcatggacggtaaaacggcgcagatcccgctgtggtggctgatggtgcacaaactttcaaaaggggtgactcaggccgcagtggcatccattccctgtacgccggatatgcgacagatgcgttttgaggttcagcatacccgaatcaacaataaggcgctgattgaagaactgcaggattttaccaatgactgttattcactggcgctgtacagctggaagcaccaggatcagggaatgacaacggataaaaatacgctgcgggatattgagtggattggcagcaggacattccagtcgcgttattacaatgcgctgcagtcgaagatgccgagaagtgcattcccgtggaatgaggccagggacagcgggcgaccaaacacaggtcgtggtggttacccgacctgtaatgagtggtggaatgaggcggatgtcgggctgaaaagtcgggtgatgaaacaggccgatcccggtatgtggctgcgtctgtcggctacgatgaaaatgatcgggaatacgggcaaggagtatgaagaagcggtgatacgccgtctggtcagtccggtgaacatgacggtgtcgcatgggggcagggcctatgccggttatggcgggaatgcagattttacattttttaatgccatcaaccggacagtttccactgttggggctggcgtgggaagtgtgctggcctttcctgcactggattcaatgcgacaggcattacccatgatgcaggggatcctgttgatggctatttacgtgatgttgccgctgattctggcgtttgcggcgtacgagataaagacggtgattacgctgacatttgtgatttttgcgaccaatttcctgacgttctggtgggagctgacccggtgggttgattcaaacatgtttactgcgctgtatttttcggatactcacagtatggccaatcttgccggttttcagaacacatcagatgacacaattctgaccatggtggtaggaagcatgttcttactgttaccagcagtctggcttggtgcattatcgtgggctggggtgaatattggtagaggaattgaatcaacagtatcaggtggaggaaaacaggcttctgatgtgacagatacagggacgcaaatagctatgcaaggcaagggtaaaatcgtaagcgaggtggataatgtaatgaaaatgagcaaaaagtcataa

SEQ ID NO: 40036 - DNA, 369 bp, Escherichia coli
atgacgagcaacaacaatgctgcttacctcaggggaagacgaattgcaatgcgatggaagcgtatcaaaacctttctctatcaaattgatatgttttgtataaatgtagcccgcaaacatcacctacccggctggactggtcgcattcctgttatgttgctgttaacggccatcgcaatctgtggcattttcagcctgtttgcagcgttatgctgtttcctccttatcgcagcccctttctgccttatggcaatgatgaaaaatttgccggaaatagaaattgagaaaaaagatacggccgaaggttttactattggcccccaagggctaggttattatgtaaatggctacagagtcgacgacgactaa

SEQ ID NO: 40037 - DNA, 576 bp, Escherichia coli
atgttgggcaaaaaattgttatttgtttgtgtctcatgtctgacgttaaccgcctgttctgttgatgagattgctgcagttaacaagaaaatcagtgatggtgcctttgctttgactggtgcattacgcggtaataattcatcaactgctgataatggtatgccgtggctgtcacagaaagcgccgactaaaatggataaacgggaaaatgtaacggagatccccgttgatgttgatacagcagcaggaagattaaaacggtactataaattttattcgaatgaggaaattgacgctattcgtaataatggaactgcggatgggagatggcaggcttcggcaataaaagataatggacatatatgggatgcgatgcctggtagctattacaaaatggggagtgactgggatggcggtcagtttgatgatcatcttaccattgaagttgaaaaaaatggtaaagggagtcgtctttatataacgtacgcatcaccggttcctgggcatctgaaagaagcaacgcttgcgccgttatttaagcgagtaaaggatgtggcagaaggaagagtcagataa

SEQ ID NO: 40038 - DNA, 306 bp, Escherichia coli
atgaataatactttgcggcagtggcttgaatttgatgagatgattactccaaagataataaaagttatctattggatttttcttgttatcacaatcgttggcggcgtcataggaatgttcgccaatttctttgcaggatttattggtcttgtatttggtgttataggtttgagagttgggtgtgagatggttattctgatgtttaatatatataagcagcttaagaaaatagctgatgcagttcccgaaaaaataagagatgtatctgagactgaaataccttcttcttcagataatcatatctga

SEQ ID NO: 40039 - DNA, 903 bp, Escherichia coli
gtgtccagacgtgaaaaattactgaaacaggatttggttgctcatatccggaaagatcgggggagtttcaagaagctgagtgactattcccggatcatgcaccggtttgcggaaagactggctaaactgaatatacagatcagttctgctgcgcaggtaaaagtgcggcatattgaattatatatgaacagcaggagtgatatttcaaagcgaaccagagaaaatgaaatgtctgcaatacgggttatgttacgtcaggctggtaaacataaaatggcagatcctgaacatccccgtctcagcaataaggcattaggtatttcaggaggaagccgtaaagggacaaagaaattaattacggatgagcgtttccgggaaattcttcagcgcgtggaagcaaaagataaaggagtggcagctgttgttaaactgtcacgttatctcggtctgagaaatgaagaagctgtccagtcggttaaatcgttacggacgtggaaaaaagcgttacaacggggagatgaaaaaataagagtgatttttggtacgaaagggggacgggaaagaatgacgacggttgttgacagggataaagttcttgatgctgttaattacgcactcaaatatgccagtgagcataatgaacgtctgatagacagagataatcttaagtcggcaatggattattatcttaatacgttacgacgttatggagaactgaagggcggagatgagaccgcacacagttttcggtacagttacgccgcaagtgccatgaaatatcatattatgaatggttacagttatagggaatcacttgcactgacatcaattgatcttggtcatggcgatggcagaggacgatatattgaacaggtttattgtcagttattaggctatgagtaa

SEQ ID NO: 40040 - DNA, 324 bp, Escherichia coli
atggattgtactattttaatgaaaataatctctgtaaaggagatttcaaaagattcgcctttgtggtcacactacctggcgcgatatattgattctggatatcaggctgagtttgaatgtgaaggaacagcagataaatggagcatctatgatgaatgggacatctatgagtcgattgcggattattttgacgtggtgggagattttgactgtgatgtcagacggacgggaagaaaaatactgatgaaaggtacctgtgtttttcctctgggaaaaccggttaagggaacacataatattcctttttggatcgatgttgaatag

SEQ ID NO: 40041 - DNA, 438 bp, Escherichia coli
atgaacattctgttaacacttctttattctgtcgtatggcttgtctgcaccattcttgggaggggggcaccagagtcggttgcacgtgcgtggtgtgagtatcatctggaaggtatgtcgatccttcgttatacgtaccgctcactggcaaaggcggcagaaatgcgtgaaggaaaagtacctttttatcggctgtttagctatctcgaaggcctcgcacattatctggggtacagaagcggcgatgaaaagctggaatcaggatttctccggctgtttctgtggcatatatgtgcgaaaggccatgcgctgggcgctcttatggagatggaggcacgtgtgtgcaagtacaatccatgggagtacggctggcgcgatggctggactcagtgtgtctatattgacagaaatgaatatttcgaatgcgatttcgaatga

SEQ ID NO: 40042 - DNA, 375 bp, Escherichia coli
atgtcaacgtttattttgtgccctgaaccaggcatctcttcttttttccggcgaatgacggctcagttgcgggtgtttttttcacgcaataacctgtcatattacagtcgctggtacaccaatccggccggcaatctgagtgtgcgggtctgtatgtttcgtcgtggcggtgtctggacaccctgtctgtattaccggcagggaatgcaccgcaacgagtacactggctggtatcagccgttaccgcgtgaggtcatttgtctgaaccggtttaccgggcggatatcccttcgcaggacctggcatgctgcctgccgtatggcggaacaactgaccaccctgcgttaccggtttggtctgcaggctgatggatga

SEQ ID NO: 40043 - DNA, 219 bp, Escherichia coli
atgaatagtctgttaatactcccttgcgttgttgtatggcgtgtctgcaccattcttcgggtaatcgcaccagtgtcggctgttcgtgcgtggtgtgattatcaactggaaggtatggcgatacttcgtgatgtgtacagctcgctggcaaaggcggctggaaggatatctacaatccatgggggcgtggatggaacgatggctggactgaatgtctga

SEQ ID NO: 40044 - DNA, 378 bp, Escherichia coli
atgtactcacccttacttgttcattattcagcactgcagacgcagtctgctctgctggcgcatatcagccagctggaaggtgagttgatgcggttacgcgcctggcaacggctgggtattaccccggagccggatgatgagacggagcattcactggtctgcgtgcatctgtgggataccggcgaggcgcttggccggctgctgtatgacctggagcaggagaacatttctgctccgggagttcaggcccgtcaggcgtttgacagtctgatggcgccggggcgtgaaattaatcatgaaatccggactgacagtatcagtaccggaaagctgacggccggagcggatgcctgttttgcccggcacgacataatgtag

SEQ ID NO: 40045 - DNA, 630 bp, Escherichia coli
atgtctgaattatcttcacgtccggcccgtgagccggtggtatatacccttgagcaggtagccacaataccggaaaagcagtggcatgcttttgttctggctgtaacagaaaccttctggcagttgccggaggcgttacggccgcagaatgcgtatttcggctccctgatccgggcgtctgagttgtttccggtaacggacattctggcgttttacagccggtctgcagacgggctgtggtcggtgaatgtcaccattgaacgggagcatcgtcagaacattctggttcttaaggagctgaattttggccgccagccaggggatttctttgcccgtacggtgtttgtactgctgcacaatctgtgtccggattgtttccgcattcattccactgccggtggtgccagctggtcactgccgctgaaatggataaaacggtacctggggcatgagaatttttctgctccggagtctgtattaaccaccccggtaaggggagatgcgtttgaccgtttgctgctgcagtttctgtccggtcaggggcgacagttatccccggatgactggtcagtgctggaagaggctgaacatcagctttactggctgcgtgcacttgccggtggacactga

SEQ ID NO: 40046 - DNA, 474 bp, Escherichia coli
atgaaatcagcctcagtaaaagaaatgccatcagcagagcaggttaccgttataagacgccaggcgtttctggcatatctgtttggtgatgacgctcacatgggggagctgtactggtacatgctgattaacagaatgttgcctgattgtccctgtgaagcatggcattttgtggcgtttcctgatggcggtggctacatggtgcctttgcctccggaggaagatgtattccttacaattcgggggctccgtggaactgattacactgtcactgcagatgctgccggtataattcttaccaccgggattctgtctctgcggatgcatttgcattgcctgaagggtaacgatgagatgatgcggttctgcaggacgcgtcattcacaactgatggcatttgccggaacgcatccggagcgtggtgtgacgggtgtaattttgagtgagtataacttctgcagtcgttattcctga

SEQ ID NO: 40047 - DNA, 612 bp, Escherichia coli
  misc_feature (381)..(390): n is a, c, g, or t
atggaaatgttgaaaaatttaatggaaacaatcaccggaatgggggcgactgcaatactgccgctggtgatatttattttaggtctggtgttcagaatgaaaccaggtgccgcgatcaagtcgggcatcaccgtcggtattggttttattggtttagggttggttgttggtttattaaacagttcattacagccagctatcgagtattactcaaaagtaggcagtggttttacggttgcagatattggttggccagccgtcggtgctgctgcatgggtggcaccttttgccgcattagtgataccagttggcatcgtacttaacctgattctggtgcgcctgaaattaaccaaaacgttgaatgttgatatctggaactannnnnnnnnnctggaactatatgcattttttagttccgggtgctctggcatattttgtgttcgacagttttatcatcggtttctctgtcgcggtggctttgagtattgcggctctgtttattggcgatttgattgcgcccagatggcaaaaatattatggactcgagggaacgacctgtaccacgatgattcatatcggctggactctaccgttcgcctgggtagtaaataa

SEQ ID NO: 40048 - DNA, 156 bp, Escherichia coli
atggagtcccggatttatccggtgatgagcgatatcccggcactgtcagatttgatcaccagtatggtggccagtggctatgactaccgacgcgacgatgatgcgggcctgtggagttcagccgatctgacttatgtcattacctatgaaatgtga

SEQ ID NO: 40049 - DNA, 963 bp, Escherichia coli
atggcaggtgaaaatgctcaattgggcttttccgtcgatacatcggaagtggaaacagcatcaaaaaggcttaatgaattagctaaatcagcgcaaggggcggctgattcggctggcaaattatcagattcatttgaggaaagtatgaagggtgttaattcatcaattacttccaatcatcaggctatgcgcgaattaacggtaatgatgcacgaagcaatgtctggtaattggtcgcgcttgcgtggttctgcaatgattatgggcggcgcattgggatttggtggattaactagcggtgcggtagttggtggaattacgcttgtttcggaaggcattgaatcgctaattgaaggaatgcgagaagctcaaaaagcagaaactgaattaaataattctgctgtaattacagcagatgtaagccttttaaatagtgattatgttgattcacttactattggttatgagaaattaggctattcagcaacacaagcaaaaggcatgattgcagcgttaagtaatgcgggtatgtttggtgatgaatttagtgttgcaggtaaacaaattgccgcactatctaaagcgttaggcggtaattcagacgaacaaaaaaaattagctggtcaatttggtggcttgtattctgacccgctaggacacgttaacgaatttttccaagtaacaaacggatggattaccaaaaccgaacaaaaccgaattaatgcggctgaacaatcgcataattcagcacaagctgaaatggctatgcaagaagcgctattagatgtttataagcgtcaaaccgatatgctacagcttaaagcctatttggaaactaacgccgctacatattcagcctttcagacgcgcgaacaattcggcagcgcatggggtaagggcgaaaaagaaaaggcagacgcatttatcaagcaatatgacgagcgccagcaatcatttaattag

SEQ ID NO: 40050 - DNA, 567 bp, Escherichia coli
atgcagttgttacaggaaacagaacgtgcgctggcggatacatcctctccgaaggtcattttcctgcacatgatgggttctcatccgaatccgtgtgaccggcttaactcctggccgaataattaccaagagcagttcccacggaagattgcctgttacctcgccagcatcagtaaactggataactttctcgggcagcttgatggtatccttcgctggcattcccgtcattttgccatgctttacttttctgaccatggactgtcagtcagcgacagtactaatcctgttcatcatgatggccatgtgcaggctggctacagtgttcccctgattattaccgccagtgacatcacatctcaccagtccgtcagcagaaaaatcagtgcccgtcatttcgcaggcatttttcagtggctgactggtattcgtactgaaaatataccgccattcaacccgctgataaatgaagataatgaacctgttatggtttttaacggagagagaatagttcctgcggacggccttaagtcacagcctgtgattcttccgggcaagggaaaataa

SEQ ID NO: 40051 - DNA, 642 bp, Escherichia coli
atgaagttaaagaattggcttattccacttattgtctggatgtttatttatattggtataaggctcgtatttgatggtgggtataatgatgggtggagctcatcatcaattggtcggatggggacttgctcacatcatggtggtgtcaaccatacatccggctttatagcatttatttttgccaccattgtgtcaggttggatactttttaaaatgaatgaggttgagtcaaggaaaataagaaaatcctatatcggtgaatcaatttttttcgaaatggaatctattagcgctccatttaacccatcttattctttaaaaattagtcccagtgaaattaattttactcataggagcgggtgggatggtatgcctgatgaatccattaggattgaatcatcgtatgattttttaaaagatataattttcctttcagagaaaataaaaagtgatattgagatgtttagcagagaaaactccggttttgggtgtgatggcgaaatagttttaattaggttttttgacggtactaaagaagtaaaatttcagactccgataatatttattaattttgaaaatatatcagactcaaccctcaagctgatgactacccttaggcgaaaactgaaattcgacttctag

SEQ ID NO: 40052 - DNA, 2145 bp, Escherichia coli
atgattattgataagttaaattttaaagtgaaaagagcatttcctttttattttcagaatgaaaattcagactgtgctttgacatgtataagaatgcttgcttgttattacgggaaagagggattgttggagaatgtgcttgataaactaagtagcaaaaaaaacgagtgggctgtaagtgatatcgtatcagtattacgttctttggggattatgccaagagctgtcagtctgaacattgacgagcttaactgcttaagtttaccttgcatccttcactggaatatgaatcattttgttgttctggtaaaaagaaagagaaataagtatgttgttcatgatccggataaaggcattcaggttttgtcgctgcagaaaatcagtgagtcttttaccggagtaggaatagaagtatacaatgacggttcaatattttaccagcaaagaaaggacaagaaaagaaataaaacaatatataattacattcttagtgtgttttttttaggaaaaaaaatttttttctacctgtttattcttatttttctggctgaacttatcaatattacgataccgcaaataactcaactggttattgataatgtcattgttaatgatgactatcagttattggttaccgcagtgatattttatctttttcttaatgctgttagtattggtatactggcgacaagggactggcttattatttggttaaatgcaaacataagcgttcagtgggcaacaaatgcttataatcgtctaatatcattaagaatgaaatatttttcatccaggagtgttggcgatatcttatccagagttaattctctcgaatatatccgtaatgtagttatatctcagctaacaaaagttttgttggatttctttatggctataggggccttcattataatgtgttcttatagccctgtgttaacgtttgttgtgttcttttcattgttgctatattttttactgaaggttttttatttttcgtctctgaaatatctgaatctgggcgctataagagttaaggcccgacaacagagtgcactaattgagtcaatcaaatacaatcaaacaataaagctttactttcaggaatacacaacggcaggcatttatgaaaatagccttatcgaagggatcaatataaagacaaaaatggatttattaaatattgtgctctcatcatcaagtaatctcctttcggcggtaaaaaatatctcaatactttactttggcggactgtttgtgattaattcatcctttactattggtatgcttgtcgcttttattgcatattcagaacagttcagcagaagggtgactaacatgattgatttctttatccagcttggtgttattcgcatacatatttcaagagtttcagatatatctgatgcagattatgagaagatacctttcactttatccgggagagatactcatggagcagttggtattgagtgcgttaatttgagtatgaaatatcatggcagagaagttaatgttttaactgacgttaacctaaaaatataccctggggagacagttcttctcagaggcaaatctggagggggaaagacatctcttctttatgctattttggggttggtagaattgagtggtggtcatattatctttacagatggtgacaaaaacaataaaatagaagatatcagaagtgtgtccggcactgttttacagggtgatattcttttaaatggaacaataatctataatataacatttaatgactcgacaccctcccctgagttattggaactaacaaaaaaaattggcatccatgatataatagaaatgcttcctatggggtatttcactcctgtcaatgatgccggaaatattttatctgcagggcagaagcagaaaatcctgttagccagagctttattcaggaaaccaaagttactaatacttgatgaagcaaccagtaatcttgatgcagagtcagaatatgaaattaatcaggtaatattgtctcttgattgtactaagattattgtgagccataaagatgatgtgcttagtgcaactgacaagatcataaatattgagggagggagagttaaggagatttcattatctggcgataataaatacaaggggggcgttgattaa

SEQ ID NO: 40053 - DNA, 1227 bp, Escherichia coli
atggaaatttatagaaatataaaaaagaattttcttggggatgttttcattcctgataatattaagataaagcgagctgtatgtgtatatgcaatgatagttttactcttggcagtcttatttgtttttgcaaagtatactcagagaaaacgtgttacaggtgttattttcccagagcaagggacattcgccataagaagcgatagaaatggggtggttgaaaaccttgcggtaatggaggggggcaaagtaaaaaaaggtgatgttctttttaatataagctccagcaattcaaatagtaagtttgaaaatagtgagtatatatactcacttcttctgaaagagcgaattgcatctatcagcaaggaaaataaaaataaagttaataactataaaaaacagctttcatcaattgacctgcaaatacgaaaagaagaagatagcataaaaaaagcaaaaaatgataagaatatgatagagcgcgcaatagaaataaatagctcggcatatagaaaaataaatgaagcttacaagaataaggtggtcactatagttgataaaaataatgcagaatcacagcttttggaaaagttgctccagagaacgtctgtcgagagagaaattgacgagacaacaagaaaggttatggagttaaaattacagaaatctgatattgaaagcaaaattttatctacgaataataactacaacgaaaataaaattaatgatttaatacaatattataataatgcagaaaagtatgagtatatacaaaaatcccctgtacaaggtgttgtaacatcaattacaaaaaagaatggagctcaagccaaggatggagagtacataatgtctattattcctgataacgccgtctatcaggcgataatgttcatttctcctgatgttataggtagagtgaaacttaacagtaaggtgacactacatattgattcatatccttatcaacgctttggtgttatttatggaacaataagaagtatctcagatacgccattgagtccagatagtgtttattataactataacattaagacagatgtcccgtcatatgttgctattgcagagattgatagaaattacaggaatttaaagttgatttctaatatgacatttaaggcagatgtgccattagagactcgtcctctgatcaaatggctatattcatcattgtttgaaaatgatacaggtattacatttaaatga

SEQ ID NO: 40054 - DNA, 576 bp, Escherichia coli
atgagaaaattaacgtttaatgaatgtaattgtatttatggtggtggcgttggtttgggcgaggctcttgagaccatcatagagggcatggttgaagcaactcatgcttcagaaggtgctgtatctttagctgaggctctgggggcatttgaacataaagatggaaccgcagtctctaaatatacaacggatggagatatactccatatagacgctgatatcgctaatagctatatgcatgagttgcagacacacacagggagtgacaaagtatctgatagcgagcgagaggactgcattcatacattacagaatgatgggcgtgtttattacaatccgttagaacataagtttgagtctcttggcggaagccctgaatatggggcggtaacggcagatgatttaaaggatccggatactcataaattttatagctatataatggaacaggactctaagaatatttattcttcagacgcaacaacagctaagaatgcacttgagtcaattaaaaacagcactcgtgatggggcatatcactatagtgtaactgaagggaaatttattgtaggttga

SEQ ID NO: 40055 - DNA, 528 bp, Escherichia coli
atgaaaaaaaatctagtttctacactcattgcgacagcatgcttagtaagtgcaagctctgcttttgcagttactgaaacgtttgggacgactagtcaaactataacgactaccgtgacatctacatctgctgttaacatccaaagtgtgccatcttcagagtcagtaactgttagtgaggttgctcatccggggacaaaacttgcaagcctggatatcactgctactgggttaaatgcagcaggtggaacaaatggtcgcgcaaatattaaagtagcggttgatagctcctactataactcaggcactcaaacttggctctttaaaaatagcagcggtagtcctatttttgccctgccagatacgaataataattcttggagtttcaacggctcagatgctacatacagaactgatggccatactgaagcaactctgaagctggactttgtaactaaagaaggaaacaatcatgtttcccctggtgtttaccatctgccagtaactatatcttacaatactttctaa

SEQ ID NO: 40056 - DNA, 2172 bp, Escherichia coli
atgaaaaccaagactaaacctatagccctctctgtgtttgttgcgggcttgttatgcagtaaagcactatatgctagatcagatgagttttcgtttgacccgaaattagtcggcgggagtgatgttagccgctttaatgacgggcaacaacttccaggtgaatacttggtttcagtatatcttaatgattcgaaaaaaagcatcggagaattcaaggtcgattttgaatatagagaggatgctttgaccccgatactaaagaggagggacatgcccctttttaatatcgatccaagtaaattgtccatttttaactatggatataaagatagtattgattttgaaagaagtaacattaaatacaatttttcattttatggaatgagactcaggctgtatgtgccaaaaaatgctataataaataaccctacggagttagctcctgagtcgcaatgggatgaaggaataaacgcattacttctaaattacgatgcaaaagcatatcatcgagacactagatataaaacgtacaacaatgattactattatttatatctgaagccgggtgttaatataggaagttggagactacgaaactctggtatttggcaaagagactataaaggtgtcaatagttatcaaaactcatatacctttgctgaaagagatattagacaattaaaaagcaagatcttaattggtgaaggcaatacctcttctgatgtttttagtagcattccatttacgggggggcagtttgctacttcagatgaaatgattcctttttatgaaaggacctatgttcctttgattagggggattgccaatagcgtagcaaaagtagaagttcgtcaaaatggatatttaatctacagtacagaggtacctgcggggccgtatacattaactgatgtaccagccgctgaaggcgaagacttggaggttacggtaacagatagtagtggtacagttcagcattttaacgtaccgtataatattccagcgatctcacttaaggatgggcgggctaagtatgagtttactgttggtaaatatagaccatattctagcgtagctaaagatgatgagtttgggcagatatcattaatctatggtgtcaatagtattttgacaggatatacaggttttcaaattagtaataattatcgtgccagcgcttttggacttggttttaatctttataattttggtgccctttcactagatgggatatattcaattaatgaaactacagatcgccaagaaggaagtgtatttagagttagatataataaacttcttacaaagacacatacatcatttaatgtttcaagctatcaatatgcatcagaagaattttcatcattttcagacgcaatggaaagtgatagaggtgggagtaatggttataaaaagaaaaatgatactagccttagtataaggcaggatttatttgattatggttcattagacttatctttatcaagaacatcattctttaataaaaaacaacaaatgtatgcaagtgtttattataacacttcattgtttaacactatgggcttttctttgggatggaacagggttttaaactcatattctaataatgaagaagatgtattctctgcaaccatatcagtgcctttaggtagatttacacaagccacaccaacaacaaatgttagatatcaggtagtaaatgagagcgataacagtatcagtaatttgattagtttaaatggaactgcatatgagaacagactttcatggaatataaaccaaagcactaacagtaagaatcattataataaaacaacttctgttgttggttcctttagagattcgtttggaactcttagcggtatgtacaattacaatccgtctataacgcaatatggaggaggtatatcgggaagtgtcgttttgcatagccaggggatcacttttgggcaaccaataaatggttctgcggctctaatttacacccctgacacttatggtattcaagtatctaatcgaccatgggttgtaactgacaaaaaagggtttgcaattgtcacacctctaaacaattatagaaaaaatgaggtgcgaatacaacaagccaacttgcaaagtaataccgatgtaaaaaaactgttaattatgttgtgccaacaagcaatgcgatag

SEQ ID NO: 40057 - DNA, 246 bp, Escherichia coli
atgtactatctgatgtctccatatggccgtcgagctattcaaggtattgctgctggaactagcggaagtatgaagaaaataaataaagataactttttaaaaattcaaattcctattcctcccttcgatattcaagcatcaatcattaatacgtttaagtgttcgtatgagaatatttataggcacaatgaatccttggggaaaattattcaactgcgccaagctatgattgataaggaaatataa

SEQ ID NO: 40058 - DNA, 774 bp, Escherichia coli
atgagcgcgttagcagtcttttcctttcaggaagagcatcaggtacgtgtagtgatgattaacggcgatccgtggtttgtggcgaatgatatttgcaatgctttaagcatccagaatgtcacacaagctatcgctagattagatgaagatgagcgatctatgtttaacataggccgtcaaggtcaagccaatatcatcagcgaatcaggtctttacaccctcattctccgctgccgtgacgcggtgaagcaaggcacaacagcttggcggtttcgcaaatgggtaacgaacgaagtcttgccctctattcgcaaaaatggagagtacgtttacatcgagcctgagccaatgcgagcagcggagccgttgaacgggaggcagaaagcgtatctgcgagggctgattaacgatatagcacaaagttttcggtgccgaaatgcctggatcagtggaatatggttggctttgcgtcgggcgtgtcgtaatccatccccgaaccccataacggttgatgatttgccagcaattgcggcagaactgcgcaggattttgacggctgctgagtcggcattgaggaacatgcgcacgtatgaacgggagttgttgcgtgatgttgttcgtgggggtaggcggagtatgtcgtgtggtgatttgcccatcatcgatatcaactctgatctggaaaaggcgttacccgcacattttgaactggcagttcaaaaacttgagcagctatccgcgcagttaaagccagcagaaatcactaataaatag

SEQ ID NO: 40059 - DNA, 813 bp, Escherichia coli
atgcgtaacaaaaaaacaacagctttattactctctatcttgttattatctggatgcacttatcaatatgataataaggcatcaacggacgttgagtataaattcgaaaaagaaaaaagagtacctatcaactctgttggtgattttagcagcaaaatactcacaggtaaggaatttaatagaattattgcatcaaagatagatgatggttcatggcgtggatatgtcgttcactcattaacatacgcgccatacaacaacgttttaacatctcaaggtttgtctatccctagaagtatcacatactcaggaacatatcttaaccgtgattttgctgagaatagcggtagtgatagcgtgataacatctcgagatatgtctggatggtatggttttcatgtcgattcctctgaaataacaaagcatggaagctatgttggtgctaatgcttttggaatatctgctgatgtagaagtgttaaatactttaggtgccgaaattatctttggtagtacacaaataaatgaagggaaccctgaaacaatatgggcagatattgatataaaaggacaaatgccaaaagatgttaatgtaaaagaccttagaattgaatatttagcaaagataaatgggttaagcagcaatcatattgatataacatcacctactatttttaacccgtcagatatgagccataaaactcaggtttttatgggtgagttattagccgcgcgcctaataaatattaaaacgggagaaatttatccagtacagctagagtgggtgttccgttcgcgtgaggctttcttataa

SEQ ID NO: 40060 - DNA, 273 bp, Escherichia coli
gtgggaatgatgcaagagtgcctcgttttgattgaagggtatgatccgtatgttgttaacgtcagcagaatggatactggctatagcgattacaaaactggtcgagaactgccgttcaccatcatcaggatgaatggctttggcgatgatgatgctgtttattgctgtattgccagcgataaaaacatggaagaccggacagatgaagcccgtatgctattgaggaaatataaggtaaagccgttatcagagaataacgctgagaggggttaa

SEQ ID NO: 40061 - DNA, 3984 bp, Escherichia coli
atgacattaaacgatttctatgcggatcgctttggcagcgatccgttctcgctaattgaagcagcacgggatgaactaaccgagctggcacagatggctggtatcaactggcctgcctgttccgacaacatccaactcaaccctcgcgggggggttgagcgttactcttcatacaataaaacatctccagaagctctcgaaaagagcctgaaaggacgcgtagaaatttactccaggctggaacacagcaaagggattgattacccgttcattaacttcgtccataaaggcagcgatgctggctcatggagcggtttctccttcctgttttctgaatatcgccgtgagcaacaacggaataatgcgaccgtggtcgcacaaccggaagaagaacgggaaagaatagaacgtcaggccgaagcacgtcgtcgccgtgaagaacaaaaacgaattaatgacctgaaaaacaaccaaatggaccatgaacgtttgctgggatggctggcattccacagcgcgtgggaacatgctccggctgaagacggctcatggccatatgcgattaaaaaaggtattcgtgacgtttttagttcatgtgatgtgcgtcgcgtgaccagtcacgacagtgcgaaatggagccgggggtcaaccacatatatggctatccctctggctcacctggacggtcgttatgatggtcgtattgtgggttggcagcgaatcgacaaacaaggtgggaaataccagaccagcgcagtaaccagcggcgatttcgtcggtgcctgctttgttatcggtgagctgaaaggggcgcaaaacatcgctgttacagaaggttttgctactggtgcatccatctggcttgccacgaaaaaagataaacgctttgacgctgtggttgtcgctgtatccgctaacaacatggttcatgttgtggaacaactggtaaacatgtacccggcggcaaaaatcacctgcgcactggataatgaccggaaatctgccacagaaggaaaagggaataccggcctgcggactggctatgaaatcttatcgaaattcaacgatgtccgctgcgtctacccaacttttgaagacgatccgcaaatggagtgcagtgacttcaacgacctgcacaaactacgtggacttcgtgaaacagcacgtcaactatttgcaacagcaaaccgcctgaaaaccggcactgatttgctatctctaacgctcaaccgcctgaagacaattaagcgggataaccgtcgtacttttgccaaagagctgctgagagcggtggatattggcatgctaacctgtccggttcctaacagtccgtcagatttatttaacatgttctgcatcgttctgcgtgaaatgggactggaaaatatctatcgtgctacggtaaaagaccacattgcccgtcgcctgaataaaaagtgccgtattgcccaggctccgcgctctttcagcgaacgcataactgatcccaataaacgacctcaacatatcacctataagcgttttgaaacttcggtaatgaccgatgatgtcctgaagtacgtgcaatcactacaggggatagtcatcgtccgtgctggtatgggttccggcaaatctactggattgttacgaccgttaatgcatagctcagaacgtggtatctctgttgctcaccgtgtctcccttattggtggcctgtgggaaatgatgacagaaggaaaaggtgtaaaagccgatatcctgcactatcaggatcctggctatcaggaaatggctccatacgccagtaaactgaccatctgcataaactcgattgttaaaaactgctggcaaccgttgatgcgccagcacgactattttggctttgacgaggccacacaagggctacgtgccgttctttccggtcgggctatggaaaacccggtggctgtattcaatacgctaattgacgcgctggccagaacggaacaacacccaatcatggtggatgctgatgcgaacgatctgctggttgacctggctgaactggctatgaaacgccgtgaagaactaggtttaccggcatggctgcagatccacgtaattgaattacctgttgatgttcgcaaccgcgaaacaggtgagccaatccgggttttttatacagaaaaagatcgcatcatgaccgaggtggtgaaagctgtatcggatggcgaaaaaattatgttggccaccgacagctccacctttgcagaagatgtgaccgccaccctgagaatgcatttccctggcaagaaatttctgtgcgtaaaccagaaaagcaaacaggatgaagaagtcgatgcctttaccagccagccaaaagtaatggtgatgaaatacgatggactgatctacagcccgtcgatttcctccggggtgtcatttgagaaaaaacattttgaccgtcatttcggcatgttctgcggtgaagttgtgcccagcgacgcagtgcaaatgctacgccgcgaccgtacagcaaaagaatttattattggctttgataaagcccgtgcaaaacgcgagactgatccgcaaaaaatagaacgtgcattcgcccaggcattacttgctaccgcaggcatgaacggtgaactgacggatgtcattttcgatggcgaccgtatatcaatgggggtagccaataccgactttaccaggatgaaaattaaagcagccgcaattgaagcgtctgcgcgtaacgactacgccagcaacatgatctgcatcatgcacagcgacggttataaggtatcaccattagctaccgattatgccgcgaacgattttggtaaagagctgcgcaaagaagcgcgggatattgtgtgggaacagacgctggatctgcacctcaatacagagacaccagaagaatcagagcgtgaagaactactaaaaaaacgtgcgctaacgcttgaagaacaggcaaaactggtccgctgggatattgagaacgaactgaaattaccggttgaagaaggcacactgaaattctatttcgatggcgctcgagacaaaattcgccgttatgaaacgatgctgcttgatgaagtcacagcccgtcgttatgaccgtgaagaagcggctatcaattttacatacgcatatcgccagaccggacagtggcaatattttgtggtgaccgcgatgacacgcgagcaggctgatgatgtattcaaagcgaaatttccgggaataatcgactacaaggtaaaagccaccccagctgttgaggtcggcatgcgcggattctatgcgcttaaatcagcaactctccggcagtattttatcgactgcggtatcgaccctgaaactatgactggcgaagcgacgcaggaacgccttaagttcgctcgagataatctcatgacagcagaacgccgtgacctgttgaataacgttctgcgcattggtggttttatgacaccaaaagggaagcctaaagtgccggaagcactgtttaaaaacatctgcgactctctcggcctaaaaacaggaaaacgtcgcggcagagatggcgataagcgcccgacattgcgttttgttgagcctgagtctgtagcatttatgcttgatattcttgcgcaacgtcaggaggacggtatgacgttgaaagctcgcaaggcagaaaaatcaacgaccgaagtggatcgcgatttgtcattaaatatatatatgaatggtgaaacgcgatccacaaacacggaggaacaggatccccctcgttcagctatatcacaggctttggctgtattgccggtggctgttcctgagtcctgggcgatgagtgctctgccatcagccgaactggaatctatcagggggtggtcagttgacagcatcgcatacacgtttgcagccctttatatgactgagtttatggatttgctgtccggtcatgagattaagttgctgaaggcttttataggcccacgacatgccagcgatgagttttgtgtagtttag

SEQ ID NO: 40062 - DNA, 291 bp, Escherichia coli
gtgaatatcgacaccacgataacgatcgatacggccctaaataccggtctggcacttctcggttggctttacatcatgtcccgtacatggcgatggctgggttccattttcctaaaacagtggaaaaaacggcgcaaacaggaactacgccagaaggcattagaagcgttctatgacgcatttgagcttagccgcattgaaccaggtacaacagccaggatagcgacaaaaggcgacctgatgatagtgatgttccgacaggagagagcagagaaaggggaatcagcatga

SEQ ID NO: 40063 - DNA, 531 bp, Escherichia coli
atgatgcataaatcagtagccggtgagtttcagaaggaagtcgataatactaccgttctattggacgatattttaagcattctcgcgctgcttgaggctggcgattggtcagaacattgcactaaaacagagctaggcggtcggcttgaaagagagattacacgacttattggtgatgcgcaggaagccactgtcactggctatgagttaatctctgaagcttggcgtttgatggatggacaagaccctaaaaccagcgattggcatagcaaggcttcgaagtatttaaattccaatattgtagaaaaagttgatgatgaccgtattgaggccgttaaggctgtgttgcgtagactggctggcaactctccggtaactccggatggtcatattcagttttctgtttcacttcctgcagcgtttggtggagataaatattttattgatggtgtatttcaacctttgagatatgagcgtgactgtgaaagggcggttgtggccgctggcggtgtagttaattgggttaagtaa

SEQ ID NO: 40064 - DNA, 327 bp, Escherichia coli
atggcgctgacaccggcagaacggcaaaggagacgcagggaacggttgaagaaggaaggcacatcaagacgggactggattctagaacctgacgagttacgtatgttgggggaaatttgtgtattgcgtagaccagggcgagttccatattcggagaacgaagtcattggtttgctgatcaggaaaaactataaggagctgcagaagcagctatctactacttgcccgcgatgtggtcaaaaaatgcctgtttcagaatgcatttttgatggcgaagggtcatgccaccttacaactacgaggctgaaacttgcgctcaaagcgtga

SEQ ID NO: 40065 - DNA, 204 bp, Escherichia coli
atgtctgaagcagccgtatcaactcttgaacaactcgattcaaatttaagagatattgacgccgttctggatctggttagcgtcaccctggcttctccagaagccagcctacatattggtgaggtttcacgactcatcaacatgtcgcgagagattgcccagcattgtcagaaaactatcgctgttgagcgttcacatcattga

SEQ ID NO: 40066 - DNA, 234 bp, Escherichia coli
atgcgtgatgatcgttttaattccctgaaacgggaatttgatggcgcacaggaagatgcagcgggcgcattgttgagcgttgctgacatgatgaaagctgcatattttcttatcaataccagtggctacaagtcagagggtgaaatgattcttagtattgcgtcagactatgcggaatatgtggcagagacgcgttacagaagaaaattcacggaggatgtaagccatgcataa

SEQ ID NO: 40067 - DNA, 210 bp, Escherichia coli
atgaaaacagaacgttacatacctcagggtatgacttacatagagcgtgaagagctgaaaagttttgcgacatcatgtggactatgcggcgatattcaccgctttaccagaactctgatcatgattgcgcactggatgcgacagggacagagcgtaagttttacagaatatgccgggcggtggttgtggccacgaataatacgccgatga

SEQ ID NO: 40068 - DNA, 366 bp, Escherichia coli
gtgaggaagataaggaccccggaaaaagagcgggcgctgctgctgaggaaacggaacagcaaagaggcactggaggtaaagctgtacgccttctgtgaccacctgaagcggctagctgattgcgtgggaatgctggtggattatgccggtaaggttgctgcgccaaatactcagatggatgctttattctgcggcatggtcggcgaactgactaacctacgcgtcatggcgcagcgggcagaagtagaggcagaattgcttgacgttatccgcaacgatccggattttaacgaacaggcaaaaaaccgcagagcgggtggaatctggacacgcttaaatcctttactcgtggtgtgtctgccgtaa

SEQ ID NO: 40069 - DNA, 225 bp, Escherichia coli
atggctgaaatcaattacgaaaaaattctcttggaaacgggacttgtggcatcaaatacttcaggtatccagttcccacaacaatttggcgcaatgagccatgagttcggcggcttaagcggtgttgcaagtttttctcatcaacatgagatgactaagcttaagtgttctaccagaacaactggctactcaactttgcatgtaagcaccactacaaaagcttaa

SEQ ID NO: 40070 - DNA, 897 bp, Escherichia coli
atgcccaatctggcccaagtcttggaggaaatccaaagcctccaagacgattctcgctttgatattgtccgccgtaaatacataaaagctttgagcgacagtactgatagaaacgtaatatgttactacacagactttttacataacggtaatcatcagcatgtcagcatcaatgatgatgacaaaaatggtttcatggctgttgttaacggaatggatagaacgaaaggcttagaccttttcttgcatacccctggtggttctataactgcggctgagtctctggtttactaccttaaaaagctttttaatggtgatattcgggccattgttcctcaaatgagcatgtctgcaggaacaatgattgcgtgtgcctgcaaagaaattgtaatggggcatcattcaagtatcggaccttttgatcctcatatctttggtggtctttcagcttatggtattttggaagagttaaaaaatgctattgatagcattcaaaaagaaccttccagcctcccgatttggcaaacaatcatctcgcgctacccacctaccatttttgatacagctagcaaagctattcagcttgccgatgatttggttactgaatggttaaaaaatggaatgcttaaagatttacctgaacctcggcgtagcgaactcgccactgcgattgtcaaaagcttaaacaatcgtacggatacgaaggatcattctcggcatatccacgcagagagagccattgaattaggtttgcggatcactcagcttgaagaccatccccagtttcaggacgcagttcttacagtacatcactgttgtacacaaacccttttcaacactcctacagttaagcttattgaaggctctaataaccaatcctttattcggcatatctaa

SEQ ID NO: 40071 - DNA, 315 bp, Escherichia coli
gtgagtgatcaggaagcaactgtagaaagtgaaactgttgccctgcgggctcagggactgaaccctgatgtcctcaacgaactgatggcgcgctgtgagtcgctgagacatgagctgagaaggtatgacgggcttgacagtgcgatcgcagcctcagaagtacgatctaagcagttgctggatgagatgcgaatccacaggatgacactgacagataaccgtaaagcgtttctctcttccctctcgcttaacgctctggaaatcaaaatcctgcccctttgcgccccgcatgaagacattgtatcgggttactag

SEQ ID NO: 40072 - DNA, 681 bp, Escherichia coli
gtggaattcagcccgttttataatgccgttatcggctctaggggcagcggcaagtccacgctcattgaaagtattcgtcttgcgatgcgcaagactgagggactgactgcagatcagagccagaatctgaatcggttcagtgagtcggggatgacaacggatagcttcatcgaatgtgtgtttcgcaaagagggcacagattttaagctcagttggcgatctggtggtaatcatgaattatatatgcgaagtgacggcgaatgggttcatgacagccactggtcggccgatcgttttcccatttcaatctacagccagaaaatgctctatgagctggcgtcggacactggcgcattcctgcgcgtctgtgacgatagtccagtggtgaacaaacgggcgtggaaagataactgggatcaactggaaagagactatctgaatgaacaaatcacactgcggggacttcgggcccggcaggtaagtgcgggctcgctgcagggggagttatccgatgctgaatgtgccgtcggccagttgcagtcaagcgcctattacctggtctgcagcctgctggccctagccaaggcagaactgtctgcggcaaccttacccctggacattatgaacagcatgttgctgctattcaggctctggcggcagaaacacagccgccatttttaa

SEQ ID NO: 40073 - DNA, 4284 bp, Escherichia coli
atgaatcacatttataacgttgtttggaaccattctcttttggcatggactgtcgtatccgaactgggaagaggtagaacaaaaagctcaactccaaaagcaaactcaaaatctattagaaatgcgagtctggttgtttcagcactacttgttgtgagcggtaatgtgtatgcatatggcattaatggatatactgattttaattcttcgacatcgatttctgatggcttacagtggaatggtactgcaacagtccaggtagatcagggggctgatgttactgtttcaaatgtagcaggtagctcaacattgaatatgaaccctgccgctggtgggcatacatctctatggatgaatggtggtacgctaaccgctagtaataacggcactctattgatgggcactaacagcatgttgcaaatagggggagctcagataggtgggttgacctcagaacagtctggcggttctgcaggaacgttgtctgttggtgagcttaaaacggtatcaggggcaacgaatgcgacattatggatgttcggttctgcctcatcgacagcaaaattatatgccgacagcattgatctggaagctgacacgaatgatttgttcctttctaatcctagcagttcggagttgggggcagagatcaacgtagtcaacgatatgacagtaattaataaggttggaggaagcttccccttcctattagttggcaattcgcagctaaatgttggtggtaatctgtatcttgatacaaccaacggttcatttcttgtgactaataatagtaacagcagtgggatcaatgttggcggtgattttacattcacaaacaatactcagctatcttctgatataaattcggtaagtatagatgctgggatatattctactgttgtaaaagttgacggtgatatcaatgttataggaaaaaatgtcggcggtactggactgcagattattaatggtactggtacaggcataaccactcttggtgactttaatatatcgtcaacagtgagtggaaacacaaccgatgtgatttttggtcacgcggccaaagtgacaagttatcaggatattacgcttaacagcgtagctggtagcgcaacaaatctttacattggtgattctatgtacggagctccaaccgacatttcagcaaaaagcattgatatgacagggagtggtgataataaagttatatttaacaataaaataaatactccaactggtatcggctatttatttgatattgcaattaacggtaatggttctgttgagcaacaatctggccatacaaccctcagtgcggcttccaacttcaatggggggacggtcatcagcggcggtttgctttccattgccaacagccaggctctgggtagtgccggggtcgccattaacaccgcaaacaacgataatacaaaagggctcgatattgcttatacagacggcgcgtcgtttggaaatcaactatcaggttcgggatatacaacagtttctgagaaagcgcgcattgttggttctaaccagacttatgcaggtaactggaatatcaccggtactgcaatgactgatgagagcgtgtcttcaaccctcactaattttggtactggtgaaatccaaatagctgacagtggtacccttatagcgaaaaccgcaggtgcgtttgatttcgttaatcagttagtcggggatggcactctcattgctgacaataacaatgccgactttaattttaccgcgggtactggcaatcaatttgctggggatgttgttttaaaaaacaatactttcgatctggaaaatatcaataccacagcacttactaatgctactttgcatgtcggtactggaaactcaaccacggtaggtattgggacccagaatattggggggctggccttcaatgacggtaaactcatttttggtgatgttaatccaggcgacacgaccagcgatcgttatatcgaaaccagcaaggaacttgatttgactgattccggtcaagtccagattaatgatggtgcgccatttgaaaacctcctgcaaacgccaaacactagcttacctctgctccagcaagatagcgccggagtaatggtaaaattggcagggaccagtggtacagtaaccggtgatgtcggaaatatttctttcatcgatcaaaatggtgatgtcatttcccaacaggtgatttctgatattactcaaaatggcgaaatggtcgcgaaaggcacctatgattatcgcctcactagtggcgataatgccgatggtctatatgttaactatggattaacagaggttgaattgctggcgcagggtaacaatgctttgactctgaatgccgaaggtaatacaggaaatgcagccgatcttagtgccaaagtcactgggacaggggacttgcgcattgatactgataccgatgtgagcctatctaatagtgaaaatagctacagcggtcttacagatgtggtcgctggcacattgaaaatggggaacaacaatgtccttgggttgacccggttgctgaatctcaggagtggtagtgggttcaatatgaacggctacgttcagacattgcagaatattcagacagaagttggaagtttactggactttaaccagggtagcttgactgtaagcaacggaacaattgctggcgatatgaccggtgcaggtaatctgaccgttactggtggcactgtcacggttagtggcagcggcgccggaatgacagctaaaacaacgattgcttccaatggcacaatcaatatgttgtctaccgatgcacttggtagcggtgatgtagataaccagggattacttgtacttggggaaaacaccaaaggtaccacacctagcgattaccaaaccggctctttgagcaatagcggcacggttatgattggtcataacgatgctgcaggtaatgcagtcgcggggactacactgaccgtcaacggtaattatgctggagataatgggcacctgctatttaatactgtgttaggaaatgatagctcggtcaccgacaaactagtggtcacgggagatacgtctggcgagactttcgtcagcgtaacgaatgttggaggtactggtgacagcacgttgaacggtattgagcttatcagtgttggtggccaatctgacggtaccttcactcaggatggtcgaattgttgctggcgcatatgactattctttggttcgtggtacgggcgctaacagcagtaactggtatttaaccagcagtctgacatcggttgatccaccggatgagcatgtgcatcgcccggaggcaggtagttatattgccaacatggcagcagctaacaccttattcaacactcgcctacatgaccgcttgggtgaaacacagtatgttgatgccctgactggtgagaggaaagtcaccagcctatggctacgtcaggttggtaaccataatagttggcgtgatggtagtggccagttgaaaacacagagcaacagctatgtcgcgcaactggggggggatgtagctcagtggtccacagacggtctgaacagagggcacattggcctgatggcaggttacggtaataaccacaacacaacccgttcttcagttacggattacaactcaaagggctcacttaacggttacagtgttggtacttacggtacctggtttgcaaacgatgcggataaagcagggttgtatgtagacagttggttgcagtatagctggtttaacaaccaggttaatggacaacaacttgccagcgagagttacaaatcaaaaggtttaacggcttctgttgagactggttatacaattaagatgagcgaatttgctggtagtcaaggtacgctcaatgaatggtttatccaaccacaagctcaggcaatctggatgggcgtgaaggcagacgatcatcgtgaagagaatggtacacgtgtcagcagtgatggagacggtaacgttcagacccgtcttggcatgcgggcctatatgaaaagccaccatgccatggatgaaggcaaaggtcgtacttttgaaccgttcatagaggcgaactggttgcataacactcgtacttacagcacgactatggatggtgatcgcatttcccaagccggagcccgcaatattggtgaggttaaagtgggtgttgaagggcagattaactctcgcgtgaatctatggggaaatattggcactcaggtaggtgataaagggtacagtgattctaacgctatggtgggcatcaagtataacttctga

SEQ ID NO: 40074 - DNA, 174 bp, Escherichia coli
atgactattgctgaacggctacggcaggaaggacaccaaattggctggcaggaaggcatgcatgaacaagccattaaaattgctttgcgcatgctggaacagggcattgatcgtgacctggtgctcgcggccacccagctaagcgaagccgatctggcagcgaataaccactaa

SEQ ID NO: 40075 - DNA, 987 bp, Escherichia coli
atgaaacaacgctctcttctaaaaaatgctccggatattaatcgcattatgagtaataatcatcatgcacctgaacatcagccggtatcacctatggttggtgatttaaaacgtcaactgagttcattaaccggtaatagcataactttgccagtatgcggacgtaatgttaactttaagttagagacgatccccgcagataaagtagaaatggcaacaatggtatggctaggtaatgagcgcgatcaagatttattaaatgaatcttctctagctgatttaattccatcttttctaacttctgggcaacaaaatccagctttcgcaagaaaagtgtcaggtattgttgaagtagctgatggttctcgaagacgtaaagcagccattataactggatgcgattatcgtgttcttattggcgatttagatgatgaacaaatgcaatggttatcgcagataggcaacgactatagacctatcagcgcctatgaaagggggaaaagatacctgcgaaggctccatgaatttgacggtaacgtaaaatctttagctgaagccgaaggcgtggatagaaatatcatcagccgatgtattaatacagccggtttaccgaaagatatattggcaatatttaaccatcctggtgagttatcagccagagctggagacgctctttttaaagcatatcagggacaggaagcagccatgaaaaatgctgcatctcagttgctgatgatgaaaaaatcaggtgaaagtttagatgcgcaaagaataatacaggctcttcatgattttattattgttgagaaaaacaattcacatggagagaaaagggaaaagaaatatggagacggtgctgtggcgaaatatgggaaaaatttcacaacgttaaaattagataacagaaaaataccatcgcacctaatgagtaaaattgaatctattcttgaggaagcgtttggaaattcttccgatataaaaaaataa

SEQ ID NO: 40076 - DNA, 705 bp, Escherichia coli
atggctacatcgacagtaattccaggagatatcaccacgctaaagggagatgtcagtaaaactaaggaagatatttcctcaattaacggaaaagtatcaacgcttcagactgatatgaccagtgcaaagcaggatatcagcaccagatacacaaaaactgaagttgataataagctgaaaaacaaactggaagtgaacgatctggaaagcggtcgttatggtggagatttttacccgctgactggccgtgaagcgttttatttatgggaattgggcacgactacagcggctgcaaatctttatcttaatcctgaccctgcaatttcgtctgtactgcggtcaacatcgtctattcgctataaacattcagtagagacaatagattcagagcacgccgatctcattttcaggatgcgccctgtgtggtacaggtcgcaatgcgaaaatgacaggagtgactggggattctacggattgattgccgaggaagtgggagaaattgctcctcagtttgtacactggcgaccagctaacgaagatgatgctcctgaagctatttccagcaatggccttgttgccgaaggtgtaatgtacgaacgtcttgttgttccactgattcaccatatccagaaactgactgaaagagttgatgaacttgagtcagagttaaagttgttatccgtttcccgaagcgatatcgaataa

SEQ ID NO: 40077 - DNA, 492 bp, Escherichia coli
atgagcagtcttttaacgctggcgaaggacttagagcagcaatcgaaagcgcagcagcagagtaccggcgagatgctgaaagccgcattcagcgagcacgagcagtctgtcagagcggaactgagcgcaagcgcgaggagaatcagcgacgccatcctcgcccacgagcagagtatgagcgaggcgatggagaaaaaccggcggagcgtactgcggactgccgggcggacatggctcaccatcctgatggtgtcagcactgctgatcggcacgagcgggagcattctgtggtggctggggcagcagataaccgacaattacacgcatcttcgtcagcaggaagataccctggcgaaaatgaccgcccggacgtggggagtgcgctatcaggagagcagcgacggccggaggtttcttatcctgccgccggggatgcaaaccgaagccatcccttacgacgggacgacatggatccgcctgaaacaggagtag

SEQ ID NO: 40078 - DNA, 216 bp, Escherichia coli
atgacagagctggaaaagcagttgctgagcgcattagagcagctacagcaggactactcgcaaaggctggacgaatgggagatcgccttcgcggaatggcagagcatgtgtggtcttatgcaacgggagaacgcgatgctgaacgagcgcgtgtcggacttgagcacgcaggtgctgagtttaagcgagcagctgcgccgcttgtccgggagctga

SEQ ID NO: 40079 - DNA, 825 bp, Escherichia coli
atgacaacaactatatacagagaatttgaatttgctgcttgtgacggtaaatggtcagttgatgggcatcccagaagggatgttattgaaaaaaaagcaatacatatagattttaaagggaaagaagcaatatcacttatgtgcggtgatcatccgatgatcgtcctcatgcaagcgatgcagttaaaggtcataaccccagagcagtatgcaagcttgacgagcctctatatggatgtcgaggacttcactttcggtatggtcattctcgataaacactcaggtgctatattagtaggcatgtacacacctccaatgctcgcgataaagaacaaaccaatagtctacgacttaggttctacaggaggtgaatttgctgcacattgtctctattatgcagaacaaaagcttaggaaaaaaaagcgtcatcgaggatactctacatcgtctgtaggatgtaaagttaccagtgcagttacatatgcatacagacgggatcgttactctggtggtaaagtatacaaaatcctttggaaggacgatggtatcaagtacagcaacataccgttatctaataactcaataaaaaatcattaccgccggattttagaagaaacattaaagatcattcatagcaggtatgaagagaaaatgaacatgagacagaatgcccagttacatgcagcggcagcctcgatttctcagacgggtcagccgaaaccacaaagtaatcaacataaccaaacgcctagtgcgagtggtgataaaagccatcagatgactatgtctcgggcaattaattatgcccgacttttctctgattaa

SEQ ID NO: 40080 - DNA, 543 bp, Escherichia coli
atgaaaaattcgaatgttgttgctgtttttaccgggaaagacctaggcataatgagaacggaaggagggtcaggatattggctcgcgaaagcagaccgactaaaggatgcgaagtatctcatcgctgtaagaaaccgcagagagacatgggctgttaaagatcttgagcatggcacatgctttctcatagcaaaaatcacaggatgctttaaaaatcctgattatgacgatagaaacgtagtcacttttgatgaatatgcagaagtttccgtcaaaaatgcatggaaattgttaacgggcggtcagcgctatcctgtcgcttaccttaaagaaaaagaggcgttttcatgtataggtgtaaatccagagcaacttgagtggaagcatttccaagtatcgtcacaacctcagccaaaccgcactcacaatcgagaagtaaaggaaaatctaaccctcagtgaagcgttagaaagggcgaaaaaggatataagtaatgcgacgggtatcgacacatcttccatcacgataactatcaatatctaa

SEQ ID NO: 40081 - DNA, 441 bp, Escherichia coli
atgcgatacaggatatattccgcttcctcgctcactgactcgctgcgctcggtcgttcggctgcggcgagcggtaccggcttacgggcggggaggaaatttcctagaagatgccaggaagaaacttaacgggaaaacgagaaggccacggcgaagccgtttttccataggcttcgcccccctgacaagcatcacgaaatctgacgctcaaatcagtggtggcgaaacccgacaggactttaagataccaggcgtttccccctggtggctccctcgtgcgctctcctgttcctgcctttcggtttaccggtgtcactccgctgttatggccgcggtttctcattccacgcctgacactcggttccgggaaggcagttcgctccaagctggactgtatgcacgaaccccccgttcagtccgactgctgcgcctgttccggtaa

SEQ ID NO: 40082 - DNA, 498 bp, Escherichia coli
atgaggaacccgcaggtaaaaatgcgtgaggctgccagtatcaggaaaaaacttcagcgcgatacgttggttaaaaaatttggtaggttaatagaaatttatatccatgaagatatggaaaaatgtcttgaggaaattatcaagagtggaggctttcccgctttagatgttgatatgttgaaaacaactgaaggacgttgctttgttatagcagaattgattggtttcacttatttgcaacaatgttctaccgtcaaaaataagaatgcaaaaataattcgtgagattcatcaacaagtatgtgaggagagagctagaaaagataaatcagtctcggctgttgctttagatttgaataataagtgtgtttattcagtaggaaaaaaagatggtgatattataatagatgatggggagtggactgatgccaaggttaaaaaaatgagtgaattttcaacggtagctaagattattattaatctggataaaaatacatga

SEQ ID NO: 40083 - DNA, 324 bp, Escherichia coli
atgaaaaagggtatttttgctgcactactcatcgcgacggtaccgccttcagttttggcggcttatccggccagccagccagctcaggctacagaagtgatggtcaggatgtgttcacagcagcgaacaggcgttgataagaacaaggcaatccgcaaagtctacgatacaatgagcgactggcctatagcctcaacaacggcggttgctgctgcgatggatgaaggatggaagttcgctgtacagaatagcggggctcagtgcgagaaaatttatctcgtaatgattgatatgctggcggggaagacgcacctaaagggctga

SEQ ID NO: 40084 - DNA, 495 bp, Escherichia coli
atgaaaaaaacattgatgacattactaccatttgtcgccctgcttacattatcagcagaagccaaagtattaccaatccagtcatataatatcctgacgcagcaattcagtatgctgaacacatgcagagctgagggatatattgtcgatactgcggtacttaagcggcttgataaactcatcaaacgctttgaatatcaagatgcctccggaaccacaacccgcatcaccccggcaatggagcaggaatatcacaatcgagcggatatggacataatgaatgcacgaatgcttggtcagcaggatcaggcctccattgcatgcaataaagtgcttaaagatttcactgatcggttcgatgagcttgaggcaaaaatctcagccacgaacccgtcgcaaaccgaatcccctgctttagcacccgcccccaccgcgccggaagaccgcccgatgacatgggacaacagtccggtacagggcatccaagtgcactga

SEQ ID NO: 40085 - DNA, 489 bp, Escherichia coli
atgacttttaccgcctgcgaccagagcggtctttaccggaccaccgggccggtgtcccgcgaggatattatccgatttgcccatacgctgctctcccgccggtttcgcaatcgccgaaaaattacgtcctctgatgatgttcaccagtggctagtgctaaagctggcagaggacacccgggagagcttcggaatgatactgctctcgcagcagcaccatcttctgggctaccacaccctgttcaccgggacgctgaaccagaccatggtgtacccccgcgaaattgtcgctctggcactgacgcatcatgcagccgcagtgatactggtccataaccacccaagcggtgagcctgagccgagccacgccgataaactcattacccaaaaaattaccgatgcgctttcactccttgatatccgcgtcgtggaccaccttattgtgggtggtgatgatgcatactcttttgcagagcatggcctgctttga

SEQ ID NO: 40086 - DNA, 432 bp, Escherichia coli
atgaacatcaatgctgttattcagccggcaggctttgtgctgcctgtcagtctgcagctgttcgacatgctgatggcagaggcgggcgcaatacccgccagtaaacatcgcgtcaccgccgttacgctcaacttccgggacccggactacagcgcggagcggggcggttatcacccggtggaaatccggctggttcgccaagaagatgagtggtgcctagactacgccaccaattttggctatgtcggcaacgtttaccccgagcttgagaaaatcatcgatatcagctggtcgcagggctatgtctggcactgccgtacgggggatttgtccccgtctgacgcacgggcgctctacaccctgtgggagcgcaacttcctgagctatcacgcaggtggggtctacaccacctgcgtgctgtgggaaagctga

SEQ ID NO: 40087 - DNA, 1536 bp, Escherichia coli
atgaaacaagatacagtcattcaaaaaatttggagtttatgtaacatactgagaggtgacggcatcacctactatcagtatgtgtctgaactcagttatctactgtttctaaagattgctcaggaaaatggttcagaaaaactgatacctaaaggctatcgatgggctgatctagagtcccatgaagaggaaggattactagggttctatcaagaaatgttaacccatttgggagcaaacgttgaaaatgaagtgatcagggcgatttacgcattccctacaacagttttctcccattctgaaaatttaaaagctgttatcgacggtatttcaaaaatagagtggcatcaagtaggaaaagatgggtttggtgatctctatagcggtttaattgataaaagcgctcaagatactcgttcgggtgctggacaatactttacaccacgatctttagtaaacactattgtcagattaacacagccaaatcttggtgaattaattcaggatcctgcggcgggaagtgggggattcttagtttctgcggatagctatattcgaagtaaatatactcgagaaaaatacaaaaccaaccctccgaaataccaaggggtagagatagagaaaaatactcgtcgaatttgcttgatgaatacttttttgcataatttagatgcaaaaattatttatggtgatgcacttactgatgacgtggcggagttagatgatgccgacgtaattttagccaatcccccctttggcaataaagccgggggacagcgtcctttgcgaagggatataccattcccaaatacaaataaacagcttgcttttttacagcacatatatttggggcttaaagctggtggtcgggctgcagtagtattaccagataatgtactttttgaatctggctccggtactgatgtacgccgcgatttaatgaatagatgcaatctacatactatcttgcgcctgccaaccggcattttttatgctcaaggagtgaaaactaacgtcctattctttaccaaaggctccgccaaaaacaaatatcagcaagaaaactgcacagagaacgtttgggtatatgatttgcgcaccgatatgcctaattttggcaaacgcacacccttcggaaattcagacattggttttgcagctgaagacttcggcatggatccgcatctgggtgctttcgagaaagtgtttggagaaaaccccaatggaaccagcaagcgcaccgaagaagaatacagctttggtgcaaaaaatattgaactaaataaagatataatagagaaaacccaaggcattgatagacgactcgcacattctcgttggcgctgctttagccgggaatggatcgcaaagtttaaagaagactcactggatatatcttggttaaaagacaaaaatagtttagatactgcccatttgccggaaccagaaatacttatacgggaagcaaaagaggagctagaagcggcattgagtacgctagaagatttgctgtctgctctggaaggtggaaattaa

SEQ ID NO: 40088 - DNA, 1557 bp, Escherichia coli
atgaacagtgttaatatgccaaaggaatggtgtcttaccaaattaggaaacatagttgaactaaaatacggcaagtctttacctgcatcacaaagagatgatggtaaatttccggtatatggttcaaatggtatcgttggaggacattccaaaccattagtaaaagcagaagggataatagtgggtcgaaaaggctcgcatgggaaagtacaactatcagagaccccattttatccaatcgatacaacttattatgtggatgagttatttaaccaaccattaaaatactggttctatcagcttaagaatttaccactaacagaattgaatagatctacagctataccaggtttaaacagggaagatgcatataatctaactattgcgcttccacctttagctgaacagattatcatcgccgataaactcgatgccctgcttggacaggtcgaaactaccaaaacccgtctcggacgcacccacagcatcctacaaacttttcaccaatctgtactcaccgccgcagtgagtggaaaattgacggaaaattggcgacgagaaaatgatatttccatagaagactggttatctaccaatattggttctttagctgaagttgcaacaggaaaaaccccgaaaaggactaaacctgaatactgggtagggggtactgttccgtggttaactagtgcagcaactagctcaacatttataaatgaagctgagcagtatgttacagagttagccgttaaagaatgtagcttaaaaaagttccctatcggaactcttctattggcaatgtatggtgaaggtaaaaccaggggacaagtaactgaacttcaattagaagcaacctgcaatcaagcatgtgctgccattcttgttgacgaaacaaaaataagcaaagagtttcttaaaatttgcttactggaaagctatgaagaaacaagaaaggctgctgctggcggggcgcaaccaaacttaaacttaaataaagtaagagcaatacaaataaagttacctagcagggcagaacaaagcttaatcgtccgtcgtgttaaagaccttctcgaatttaccaatggaatcgagaaaataattgaagatgttatagagcgtatcaacaaccttacacaattcattttaaaaaaagcctttagtggtgagcttactactgagtggcgtactgctaactctgaattaattaacggagctaacagtgcggaagccttacttaataaaataaaggatgaacgtgaggcgattaacaaagaaccaacaccaacacgatccgaagtaaagaaaaaaacaggtaaccgtatgagtaatcaggtcatcaaagtggtggaagctttaaaacaggcaggagaaccacttagcggtcaggaattattagcggcggctggttatcctagtgacagctgcaccgctcaattggagcaattctttctggatattcgtaaagctctaactatagaaaaatctattgtaaggcttgaacgtgatgatgatggtcaagattggttcgccttggcagaaaccacctccaataaataa

SEQ ID NO: 40089 - DNA, 1611 bp, Escherichia coli
atgaaagtcgataaactgcatatccgctcacgctttaaaaatcttgaaaacgtgacagtagactttgacgaagaccaccttatgaccgttgttgtaggccgtaatggttctggaaaatctaacgtcctcgaagcgttggtagctatttttcgcaatctcgatcttggtgaagctccacctttttcttacaagctcgtttatcgtctgggtgaacgcaataaatcggatctacctagtgaacgatggttggaaataacaattgatgcagacccatttcgtggtactttggcgaaacaatacgatgtacaggtaaaagacttgttaatcgacgattctgaacatctgtcaattgggcagtcttcagccatatctgttccattttcaaaagttaaacgagataaagaaggtaaggcaccttacctacccaactatgtttttgcctactattcaggaccaagtgatcgactggaaaattacttcaagaaacaccgagccgatttttatcgtcatttgttaaacgacaaacctgataaaaaacttgatctcaagggggatatacgtccgcttttttatgccaaacccttccatagtcagtttgtgctcttggcattttttctgtcagataaaaatagccctcaacgaaaattcataaaagaacatttaggtattgaagatttagacagcgttcattttgtaatgcgccaaccaggctgggcaaaacaaaaaggcgagctattctggggcgctcgtggcgtagtccgtcgtttcttggatgagctaataaaacatacgttggcacctataaaagtgactcgtcaggaagatacttcattgactggaagtaatgtccgaaacgaattcttccatctttttttacccaatatcgaggttctgcacgcatttgctaaagggttaagtgacgacgaacttttcaaaatgctcgaaagcactctgctatcagaaattatctctgaagtcagcataagagtgaaagtatctagcagcgaagaacctcttactttccgggaactcagtgaaggtgaacagcaactgctaacagtattaggtctactaaaattcacaggcggtaaagattctttatttttgctcgacgaacccgatacccatcttaatccatcatgggccgtaaaatatcttcaattcttgcgtgaatttgttcctaatcaagagactagtcacttactaatggtaacacatcaccctctcgctattgcggagctgaagaaagagcaagtgcaagttatgaaacgagaccatgaaaatcaaatatcagcaaaaatgccagatgaaagtcctcgagggatggggatcaatttaattttgcgtagcgatatgtttggtttgcaaacaactctcgacgataacactaatcagaaacttataaacagaaacgcacttgctgcaaaagagatattatctaaagagaagatggttcgcgagccaggatataaacctgaagacgatgagcaatacctagctaggcttaatactgagcttgaacacttagggtttaacatcgcaacagatgacccagattaccttgaattccttcgtaacaagtatcataccaaacatgaggaaaaccaataa

SEQ ID NO: 40090 - DNA, 810 bp, Escherichia coli
atgcgttggatttgcaaggatgaaattgaagagtgcttgactcaagcatggagagagatggctgacaatgcaaaagctgagttaatcgccgctccagacgaagcgacaaggaaagcaatattaaaaagggttgcatcctcaaatgtttggcgtgaattttataatttgctacctgactctttaaagcgtaaatgttggtattgtgaagcagaggagatccggtcagatatgccagttgatcacttcagaccaaaaaacaaggttgaagatgataggctacatgacggctactggtggttagcattcgattggcaaaattatcgatgcgcttgcacattctgcaatagccgtagagtttttgatgagacagaaggtggcaaagcatgtcgttttccgcttgaaaacccagatgagcgagcctttacaccagaagatcaagcaaaactcagcaatgagcgcccgtatttccttgatcctttcaatccagatgatgaaaagctgctttggtttgataatgatgggctaccaatcgccaagccattagcaacacccgagcagcaaacaaaggtcggaaattctattgaaatatttcatcttcatgagagcagaattgtcagagccaggaacaaagtacgcttagaggtggaaaaacaaattaggaaaataaaggataacgatgatgcacaaacagctaaagccaagctgcgacgcatggtcaaagacactgaaaagttatctcgggctgcagttgtttacttaagagcacatagggagttgcctgaggtgaaagacatattgaacttggtttag

SEQ ID NO: 40091 - DNA, 312 bp, Escherichia coli
atgagcgatgaaatccatgacgtaagcatcaacatttatgacatggttattgacctgcaaagggccgtcaatgccgctatgacctttccaagtgaactgaccatcacacaggctgttataaatctggaatcggtgcgggaagcactgcaattgcttatcgaagcttgtgatcaatcagaaggtgcaatgattgaagccgatgacctttctaatctgatcattgtcatcaacgacaccactgaaatcatgcaacaagcggtagcagacttgcaaccactcatagcacaactcatagacaaggctaacaactaa

SEQ ID NO: 40092 - DNA, 216 bp, Escherichia coli
atgaagaatatcatcatttcaaaagacggcgaaacactaaccgtaacggaagagaatattatagcagttgcaaagctgttaggtattacacctaccgaactacgtaaaagcgtatcccaaatttttaagtctgctgatgcacagaagcctactatgcaggatctgattaaagcaaaagcagaacaaatcaaacaatccaaaaaaggaaacaattaa

SEQ ID NO: 40093 - DNA, 129 bp, Escherichia coli
atgcgatatgtgatttttttgtttttcctgtttcagatttccggatgtaccacaaggaatacccttccttctgatgtttccggcgaactggaacccattaaccacagccaggtaatcagttatgagtga

SEQ ID NO: 40094 - DNA, 258 bp, Escherichia coli
atgactattggtgacggaattaatacagtcagaactggaaatgaagttaaacacatcacagaacttgatgcgctaacactctgtaacgaatggtctaagctgaaaaaagaaaatagtgacctttatgaatatcacagggaaatcaattccggctggcgaggtgtcattttgcgtttgctgggtattcatttgccggataaaaaagacattttgctcaaaggtattaatgccaaaggtgagtctgtctatccagactga

SEQ ID NO: 40095 - DNA, 189 bp, Escherichia coli
atgccaaaggtgagtctgtctatccagactgaggccgcgcaagcggcctttcttctgcccgttctccgcaaaatctgtcctccagtccccttctctttttgtcagatttcacgtagcgcaccgccgatgctgtatccatcaaaaaaactgactacctgtttttatctcggctgtgttgtaacttactga

SEQ ID NO: 40096 - DNA, 288 bp, Escherichia coli
atggatagtatgtctagtcctgacttttgcatatcagaatataattcgcagacttcaaatatgcaaaaaaaatatgcaaccacatgtaagaactcaatattaacacatgagagaacgcgcatctccgaccccttccagattcgctgtgtccacatcggtattacaaacatatcggagatacgcaattatattttttacataacccgcgcattcccgcaagttcattttcagaaaaatacctgtcctctttacaaaaaaaacagcaacaacctgtacaaaaatcaataa

SEQ ID NO: 40097 - DNA, 549 bp, Escherichia coli
atgatttacggttatgcccgagtatcaacaaaccaccaggacactgaattgcaactaacggcgctcaagtcagcgggttgtgagaaaatttttgaagagcatgccagcgggaggaaatcgaatcggccggttctaaaacggctgatcgccactatgcagccgggggatgaactggtggtctggaagctggacaggataggccgcaacgttctgcatgcgctgttgatgttccagcagttacaggaaaagggtatcaacttccgcagtattaccgatggcgtggatctcaaaacagccagcggccgctataactttcgtaacatcctttccgcagcacaatatgaatctgatcttaatagcgaacgtaccttagcagggctggccgtagccagggcaaaagggcgagttggtggtcgcaggcctaagttcacggatgagcaatggcgggaaatgggggagcggatggcaaccggtgaatcacgacaaagcgtatcaaaaacgtatggagtagggctctcaactctgtataaaaagtttccagctagctga

SEQ ID NO: 40098 - DNA, 276 bp, Escherichia coli
atgtctatttctgtctcagccaatacaaacgatgacagaattactgtaattcatgtctataacccgccgagagattatgacgctttaatcagcggtgtaggtatggattcaatggctggttataataaggcatttgatatcagtagtttagcatccactctaccaactccagaattgacatcgcctttaggtatgactatcgccggacagttcgctgttggcggcgtgtcaagaccgcgcaacgtcgcatttaactacatcgtgagggccgcataa

SEQ ID NO: 40099 - DNA, 600 bp, Escherichia coli
atggcgcaagctaagctaaatagtaaatttatcgctaccgtggctggggatatcatcgtctataactacaacggtgagacccgtgaatatcagtcctcatccgttgagtatcttgccgtaggtgttggtattccagccttatcctgtattgatgcgccaggagagcaaaaggatggttttgccatttgccgtacatcagattttagcgcgtgggaatatgttcccgatcatcgtggtgaaactatctatagcaccaaaactggtgaagcttttgttgtctctttgccaggtaactacccaaaagaaaccacgacgctggcccctgctacgccatacgatacgtggaacggcagcgagtggataaccgacacaaaagagaaacatgctgcggatgtggtaaaggctgaacagcagaaaaccgcattactggcggaagcgtctgcaatcatcgcgccattggctgatgctcaggctggaggctacatcgacgatgcagacgtgtcacgcctggctgagtggcaacggtaccgctacaaactgactaaggttgataccagtaccgcgccagacattactcttccaccgaagccggaggtttag

SEQ ID NO: 40100 - DNA, 609 bp, Escherichia coli
atggcgaaggcaaaattaaacaatgagcatattgctacagtggccggtgatataacggtgtttaactacgatggtgagacccgtgaatatctttcttcatccgttgagtatttggcggcaggtgtaggaattccagccttatcatgtattgatgctcctggagaagttaaagaaggctttgccatttgtcgcacctttgacttaagcgcatgggagtatctcgccgatcatcgcggagaaaccgtatacagtacgaagacaggtgagcgagtcacgatttcccagccgggtgattatccgaaagatacgacgacacaagcccctttaacgccatacgatacgtggaacggcagcgagtgggttacgaatatcgacgagcaacacaccgcagacgtagaggctgcagaaaagcaaaaatcagctttcttagttgaagcacatgcaacgatcagtctgtggcagacggagctacagttagggattatcagtgatgaagataaggccagcctaatactctggctgacctacataaaagaattgcaggctgtcgtccctgacgctgcaccaaatatcaaatggcctaaacctccggcttcggtggaagagtaa

SEQ ID NO: 40101 - DNA, 411 bp, Escherichia coli
atgcatccctttgtgcaacggtggtctgatatggctaaaacaaccaaaactgtactgggcgatgatctgaatgcggaaggcgccaccgaagacgccctgaatatcgacgacctgaatgctggtagcagcgttcatgagacccaacagcatgacgataaacacggcgaaccatcagatgatgaggataccgctgaagaagatgaccaggaagatgccccggagcctgagtttgtggtgctgaaagggaattgcatccgccatgacggtgaggtctatcgggaaaactcccttattccggtctccggtaaggatgccgagcgtctgctggcagcaggtgtaattgccgatgtccatgctctgcgacagcgtgcattatctgctgtgcgtggtgtgaaaatcacaacggagtaa

SEQ ID NO: 40102 - DNA, 504 bp, Escherichia coli
atgggtaacaatataatcaaaataactttcgtagccgcagtgctggcatcaccaattgctcatgcccagtgggtaactaatactgaagatgaccttttctctggtggtaagaaagcaatgatgcttggcgaggtttcatccgacaatggcgccattgtgtttgactgcactaaagaaaagctatcggcggcatacgttgaaatggataaaagcaccgaatcactatcagaggtaccaatggacctgataatgaaggtcgacgggaataccgcagtgaagctcgatgctaccctttcaagacgtaatgttcagagcctccagattcaatcggatgacgcggaccaactaaaaacagtgcttaagcagcttcagggggcgaaatccaaagtgttagttggtgtgcaaacaaaggatggcggaaaccagcattccatgtcagccaatgtttctggatcgacaactgcagtaaacagcttcataaaagcttgcgaaattaacttataa

SEQ ID NO: 40103 - DNA, 639 bp, Escherichia coli
atggcaacgcttaaggacctttccagtcagttaagacagctgcagaagcaaataccgtttgcgactgcccaggctatgactaaagtggttcgccagatagaagcggcccaaaaaacagcatttgagcggaatctggataatccaacaccttttacagttaaatcggttgggtcagttggtgccaggaaaaacagccttcgtgcgaaggtgtttgttcgtgatactgctgctggttaccttgaacccttcgagttcggcggagagcacaagcttaatggtagtgctttgcttaacccgaaagacataaagcttaataaatacggcaacctgccgcgtaataagctctctcagctcaaagcaaaggaaaatgtattcgtaggtgaggtggatggcgttaacgctgtctggcagcgtaagaaaccgatgaaagctaagaagcgacgggccaagcgctccgctaatgggacgcgaagaccgaaacgtaaacagcgttctccaaagcttttgatccggtttggtgatgcgctacctgtgactccagtgctggggtatatggatagggcccgtaccatggcgaacgcactgctaccgtctgctttaaatcaggcgatagcagaagccatcaggacggcaaaataa

SEQ ID NO: 40104 - DNA, 405 bp, Escherichia coli
atgcaaatagatcaagaataccttaaaggtttgctcgaggctttcgaggcatcggattcacctgataccgatattattcgattaaatgatttagggttcaattgtgaaactgacacatttgtgtttcatatgcgtttgcttgaggatagagggctgattatcaggagtgatggggagcccggctttggtgctattcagtctttagacggaatgactcactgggctgtaatgcccttgcgattgaccgcgatggggcatgacttcttggatgctctccgtaacaaagaggtttgggcaacattaaaaaccggattcaaagatgccagtatgggcacgctgatgacagtttcgaaggagctgtttaaccgagctcttgctaagcaacttgataaaatgttcgactaa

SEQ ID NO: 40105 - DNA, 417 bp, Escherichia coli
atggtttccatggcttgggctattaaccactaccgcggcaacgccatcacctacaaagaccagcgcgataaagccattaagaatcttaaccaggcgaacgccaccatcaaagacatgcagatccgccagcgtgatgcagcggtgctggatgccaaatacacgaaggacttagctgatgctaaaaagcagcttgatgatttgcagcgttgtgttcgcactggcaagtgtgggctgcacgtcaacgccagatgtcccgcgaacggagcgaccagcaccggcggcctgggcgatgttaccggcccccgacttactgactccgctgaacgggattatttcaccctcagagagcgaatcgtcacagtgacgaaacaggttggatatttgcaggaatacatcaaagagcagtgcttaaattga

SEQ ID NO: 40106 - DNA, 405 bp, Escherichia coli
atgagcgtatcggggaaagattttattgtttttgctggtaaatgcatttctcacaacgatgaaatcggttacagaaacgccattggtcgagcgtattatggagtttatcatgaaacgcttgataagcttgagaaatgcccaaacaagtcgtcacaccaagctgttcgcgactatcttacaaatgatgcatggttaaaaggaaatgagccgtttgaaaaaatgaaactcatttctatgggaacaatgctgagacatttgcatacccgacgtaaatgggcagattacgagcttgatagaactttaagtaaggctgatgcggaagctatattgataatggctaacaaagctattgacacccttcagcagatgtatgagcaggtttatccatccgaacctgctgcttga

SEQ ID NO: 40107 - DNA, 756 bp, Escherichia coli
atgtcaggacagcctgagtcaaaagaacaagaactgcttgcaacaatcctcgattacttccagaagggagaagtcccggatacagacactattgcggaaattgagcacgacattgctaaacttccaataagtgagcgcgcacatgcgtatgcatggcttaatggaactctcgggcgtcactctgatgcagtacgtttattcaaagacgcgatgagctctgggagtccaacgatcgcacaaaactacttggcgtatctttctcgttcggctcataactatgagcatcgcgttgagttgtttagaatagttgagcttttcccttcacatgaactgaggcttgtagcaagaaacgctgcattttgtatcggcaacgacaagttggttaaaaagttctccctcaaaatggctgctctttatgatggccaagagcgagaggatataatcaatcagggaaattatatggctgaacagattgttaatttcaaaaacgctacccgtctttcttctcgagaactagaagccctttgcgatcaagctgaagagattgcgaacaagcgcggtattaactgttcaagtgttagctattatcttggtggagatgatgacaatgcattcatcgttagagcccaaactgctgatccacaggttttagctgaaatgaacatggaactgttggttttgctctcagatgatagttatcggaacagcccttttacatcctggttccaaagcgatgaaaaaagagggatttactga

SEQ ID NO: 40108 - DNA, 810 bp, Escherichia coli
atgaacctcgaatcaatcgctaaatatttcgcgccaaaatcaccgatgttcagtgactcctcgagggcgactgccaccgacaacctgaccggaactgatgttatggccgcgcttggactggttaacgccaagtgtgggtttggatttgatttgtaccttgcaaaaattggcatcagcagcccggatcgggcaatggaggcgctttatgaatcatccgttgaactttgccgacgcttcaaatcagtttcagaactcaatgaagaaatccgtcggcgagttctcgaaattttgtgtgcttttgcatatcaggattatgcccgcagcgcggcaagtgtcagacgctgtgattgctgcgctggtagcggcctcatcgaagctgatgtcttcacaaacaaggtccaatacccggacggtaagcctccggtatgggcgaaggctacaaaaggagtgtttccgtcgtattgggaagaatggaagtctgtacgggagactgcgcgggttatgtgcaatacctgtaacggcaagggtgttatcagcaatgcgtgtcgctgtcatgggaaagggaaggtactggataagaaggcaactgaattacagggcgttccggtgatgaaagtttgtgagcggtgtacgggcagaggttatgccaggttaaaattctccaatgtgttagaaggtatccgcaccacatgggatgtgaagaaaacgacggcatatgagcaagtgcaaccgttgtttgaactgctggtggaggaatgccatcgtcaggagagttatgcagacagcgccttaaagtcagttacccgttag

SEQ ID NO: 40109 - DNA, 138 bp, Escherichia coli
atgaagccagaaacgctcgaggaactccgcgcacgctggcagcgccttcgcatttaccgctaccgtggatcggtgctggtggattaccgcattcttcgtaattttgttcgcatctatcattcagcaggagccgcataa

SEQ ID NO: 40110 - DNA, 357 bp, Escherichia coli
atgaaaatttacgaaataacgccgattggcaagccccgaatgactcagcgtgaccgatggcataaacggccagcaacagcagcgtactgggcatacaaagaacgggtcaggttgctgggcattcgcctgccagagtccggatatcacgtcacgttcgtcatccccatgccaaagagctggagtaagacgaagcgggagaaatacgccgggcagccacatcagcagaagccagacaaagacaatctggaaaaggcgctgctggatgcagtgtttgacgaggatagccatgtctgggacgggcgtgttaccaaaatctggggagaaaccgggcaaattatcatcggggaggccagatga

SEQ ID NO: 40111 - DNA, 288 bp, Escherichia coli
gtgagcgtggctatctatcgcagcaaaaaatggctcgccgccgtcgggcagatcgagcgttgtgttctttgtggagcatggggaacgcaggtggcacaccggaacgaagggaaaggcatgggattaaaaaccgatgactgtgcgacagctgcgctctgcatttgctgtcatgacagcattgataacgggaataagctgaacagggaggagcgtcggcagcttatggaccgcgcgattgttctgacagtgattgaagttgcccgccgtgggctggtggtgcccgtatga

SEQ ID NO: 40112 - DNA, 600 bp, Escherichia coli
atggcgcacgaactacaactcatcaagcattcctcaggaatcctgatccccgctacgccggagaccagtgatttactgcaatcaaaaatcaaactcggctccgtgctggtagccgaatttcgccaggtgaggaatcccgcattccatcgccgtttttttgcgctcctgaatctcgggtttgaatactgggaacctactggaggggcgatatccagcaatgagcgtaagctcgtaaatggttatgctaaattcctcgcggcatttggtggaaacgaaggcgcactgctggatgctgccgagcaatatctggaccgcatcgccgataagcgcgccggtagcatcagcatctgcaaatcctatgatgcttatcgcgcctgggtgatcgtcgagtctggtcactatgacgctattcagcttcctgacggaacacttcgcaaacatccccgcagtattgccttcgctaacatggacgaaaccgaattccaggatctgtataaatctgctctggatgtgctctggcgctggatattgtcccgcactttcaacagcagggaagaggccgagaatgccgccgcccagcttatgagctttgcggggtaa

SEQ ID NO: 40113 - DNA, 249 bp, Escherichia coli
gtgagtgattcagctttgcaaacgtcagaagacaactggtatgacattgtaagaaggtctgacggctgcgtggtgtttagctttccttcatcgggcaggcatctaatttatcgcgtcaatggcatggtttctatgcggcctttgctggatgatgaagaggtctttactcctaatggttttatgcagtttattcaccgtctcggctaccgggtaaccccaccttctgataatatgaaatcaacggtctga

SEQ ID NO: 40114 - DNA, 234 bp, Escherichia coli
atgaaagttgaattaaccattgatcgcatgaaagaacttcctaaaggcgcagtaccagcactggagaaagaactgcttaagcgcctgaatgatcactatgacaattgcaggctcacaatccgccgtgccggggccgatgggttaagtgtttttggtggtgacaaggacgataaaaagaaaattgaatcaatcctccaggatacctgggaaagcgctgacgactggttttattag

SEQ ID NO: 40115 - DNA, 132 bp, Escherichia coli
atgaaaactaacaaccacccggcgcacggccctgtatcactcgatcgcctgcaccagataagcgaaatactcagcaaagcagcagcgcaaagcgacggcggtaatctcggctacgcaatggcaggtgattga

SEQ ID NO: 40116 - DNA, 309 bp, Escherichia coli
atggctagcctactcaacttcctcggcatagattcccggcgtagcagcgtgactctcgttgaatacaaatatgacccagaggcgcgagagaaggtctcaaagtatctcgtcaggcatacgtccagctttcgcggaacaacgctggagcaatacgtcaccgtagagcgcgaccgttatggcgcattcaaacctgtagtcgcgctggacgatttccccagcggtatgagtgacagggagtcaatgctgaaactggccgattggctgcatcgccttggcgtagcgattgaagatgaatggagtacaccatga

SEQ ID NO: 40117 - DNA, 279 bp, Escherichia coli
atgaccactattaccagagagcttatcgccgcatatcttaacggtgaagttaaaacgctcactaacagcgaacagaaagagctggcgcgtatcgcgctggcatcgcttgaggatgaaataaaactactccctgtaggggttatgagcgagtcagccttttataggcttgaacgcagcgagtcacgttttattgcgctgtggcctcgtcctggtatctttttgccgcgcccgcgtccagatgatggcgttatcgtttatgcaaaggttgagggggcgtga

SEQ ID NO: 40118 - DNA, 246 bp, Escherichia coli
atgggtaaggtaacttttgtcgtcgatttcaaggatggtgaagagccagcggtatcagcggcaaccgagattctgggtggtcgtctttcttctgttttatgggccgactatcgcgatgattttttcaccgaagaagaggtcgatatggttcgttctgcgttcgatgatgtggcgctgactacttctgaagatgaggaagaatcacaagctgaaatcatcaagaaaatggagcttatgacgctatga

SEQ ID NO: 40119 - DNA, 345 bp, Escherichia coli
atgaacataacaatccgtgagcaggtgctggcagccctgcgcaacaacccagggttgaacaacgccaaactggcagggcttatcggcatggacaccaaaaagatatccggaacggtgagcacgctgctggcagacggcctgatccgctgcgaaggaaaatacggccagcgcctttacagcctgaccagctacggaatgcgcttcgcccctgacacgatacctggcatgaagcagggtaagtcgaagttaattcagcggacggacacaaacgtgatctgccaggagtgccgcaacagcgcggctatgaagcgtgtattgatggtttgggggagggtaggggtatga

SEQ ID NO: 40120 - DNA, 690 bp, Escherichia coli
atgaaatctcttgcagagcagatgcgtaaccacgaccgcgagcagatgagccgcatggcccataacctgccagagcagtaccaggagtgcgcgccggtcgagcaggtggcgcaggtattcaacaagctgttcaacgagctgcgcgccgcgttcccggccagcatggcgaacttccgcacccaggaagacctgaacgaattccgccgtcagtggctgctggcgtttcaggagaacgggatccacaccatggctcaggtcgatgccggcatgcgcattgcccgccgccaggagcgcccattcctgccgtcgccgggccagttcgtcgcctggtgcaagcagagcggcggcgcgctgggcgtcaacgttgaccaggtgatcgccgaatactgggactggcgtaaccgctcgttcgaattcatctccagcgagcaatttccatggtcgcagccggtcatgtaccacatttgcgtagaattgcgccaccgcagcaccgagcgccagttaacgcatggtgaactggcacgcgaggcaggcgatctgctggacatgtgggaaaggcgcgtcaccgagggtaagccagtgccgccggtacgccgggctattgccgcaccagctgccgagcaagggccgacgccgatccagctgctgctggccaagtacaaccgcaacaagtcgaacgggatggtgtga

SEQ ID NO: 40121 - DNA, 909 bp, Escherichia coli
atgtcaaacaccgctgaaataatcaatttcccaaataaaaccgaacaaccgggaggtcgtatggccgacctgtcgaacgggtataccaaggtcgctaacgagatccaacagcttaagcctcgcctgagactgtcaggccgggaatggcaatgttttgaggcggtgatctggcttacctacggctggaacaagaaacaggaccgcgtgacaaatacggttattgccgagcttacgggcctgagcgatacgcatgtatcggacgcgcttaagtctctcgcagaacgcaaaatcatcttttcacagaagcagggcatgatgaaaatcgtcggtgtaaacactgacctttcagcatggattttagacaaaccggaaacgggaagaaaattcccgaaaacgggaaaatccttcccgaaatcaggaataaccttcccgaaaacggtagacacccaatacaagaacaagaacagtattaaaagatcttcgtccgagaattctgacgaatcctctgacgcacgtctgaagaaatttttatcaactcatcctgaagctgcggtctacacaccatccggtgcgaagtggggctctgctgaagacctcgagacagctaagtggatttcctccagggtgaagctgattaacccaacctgcaaagccccggacatgacctcctggtctaacactgttcgcctgatgcgccagatagacaaccggtcgcaccaggacatctgcgcgctgtatgactgggctagcaaacaccacttctggcagaccaacatcctgagtcccgaaagcctgcgtaagcagtgggacaagctgacaatgcagcgtaacgccggaggtgagcagcgcgctgtcaagccagatctggacttcaacaacactgactgggcctatggggtgatccgatga

SEQ ID NO: 40122 - DNA, 558 bp, Escherichia coli
atgcaaacactttcttttcaacagaataacagagcgccatcagagcacctgaaattccagtatcaacacagtgaggctgaaggccagccggtcgatcaccgggctatctgttctgccgtccgcgcctgggcggcggcagagggccgcgtggcggtcgctctggcgattaaagaggctgccgaacaggccgagcttgacagcattgacatgaccggcagcgccgatgtgtggaacgtgaagctgtttcgctggctggacaaccacgagaaatcaccggcctaccgggcgaacgtcgagcagctggcgccggtaataatttcggttctgccgctggcgtaccgggatcgcgtgattaagcacgactgctttgcggttcgtgtcgccaggtcggtgaaagaagacgctgaggcgatacaggctgtcgtcctcaaagcccccagacacgaacggatgaaggaaatcagcgagagcatcgtagccaagctctacctggacggacctgattctgtggcgcccattatggcgatggttacaacgatgctgggtggtgcgctatga

SEQ ID NO: 40123 - DNA, 420 bp, Escherichia coli
gtgcataaaccaaatatttacaatgaccatatgagaaaagaagaacccaacctcgttctggtggagcgccttactgagatcactgatcgcggcgttaccaaagcagacatggcaagaatagctggagtcacccctcaggccgtaaacggctggttcaaaaaaggcgtgattagtaagaaatcggcactggccatagccgacgctgttggtatttctgtcgcctggctactcggtgaagacgttggggagaaagacggtctcaaaccggacgaacagcgtttgctcgagctctaccgccagttaccggaagaagagcagcagaacatgctccgcatttttgcgcttcgcctgaaagagttagatgagctgtacgagaagtacatgaagggtcggattcgatcgcaaggtgagcaaacctaa

SEQ ID NO: 40124 - DNA, 282 bp, Escherichia coli
gtgtctaaagaaacaaccgtcgaacttatgcatcttaatgatgtaatcgaagcgaaaaatttcatcgagaccaatgctgacggtgtcgtaacaatcggcacacaaaatgccggttacgaagtttacaattttgtgttcctgaatagcagcccgatcatcggtacggataatgcggatatagtcgtcaagggcatgcagcgaaccaaagttgtgtctgtgactttaagcaaacaaaaggcttatgatttttatcaatccttaaaaagtatgtttgaggaataa

SEQ ID NO: 40125 - DNA, 522 bp, Escherichia coli
atggatgcggctcaatcatctcttggtgaagggaagttattgattgcatattcagaccatagcggagctacagtaggcttagagttttcatcagtagcttcgagccaagcaaccttccttatgggtgcttgtagttttgccgcttcggataaacaaaaacggattgtcacatcagttgctatggatgatactgaaatcattcatacgtcaactgaagatggaggtgacgacatggaaaagagattggctattcttgaggttgaagttgcccacatcaagaaagatgttgccgagataaaaaacacagtttcaaaagttgatacgacagtgaattcactggacaaaaatatggctgtagttttggagaggctgtctagtatcaaagagtctgtagacaaaaagccctcatcagacacagtggacaagaaaatctctgatgctaaattggcgattctcttaggtgtccctgcgattatcgccattggtacagggctgtacaaagcttttatgcacttcttttag

SEQ ID NO: 40126 - DNA, 207 bp, Escherichia coli
atggttcatcagcactacggtacacagacagtaaaccgcggcgcagttcagccggggatgctcgtcaaacacaaagactcaacctggacggcatcagctaacgctcgcggacgtttgtatctgcatcgcggcgtagaaatgacttacaccaaggatttgctggttgaagtttatctgaacggtctggggcatggactcagccactag

SEQ ID NO: 40127 - DNA, 162 bp, Escherichia coli
atgttagacaagaaatgcggatattgcggcaagccggttaaaacggaggaagtaatcaagagcacccttctctatcgcaacggctcacagctggcgcgcaaagaaaaagagtattgctccaaacgttgcgcttcgcacgaccagatggctcacgaaggctaa

SEQ ID NO: 40128 - DNA, 2664 bp, Escherichia coli
atggaatttttccatctgataaaagccagtcagaagtctggcaagaaagatgcagtgatttggttcactgcgaaaagtgtagcgcgcgccaatctccaactcgatgtggcactggaagaagccggaattgaagaaactggccgcggtaaagattatgccaaaccaatccgcaccgatttcccggtatatgacgacctgccggaagaaggcgcagtggattacacctggtgcaaacgctacgaactgcagaacgatgaccgcacctggctgccaaaagtcacagctgaaaactctgacgagaaaacggctcagaccgttgatagtcacataactactgagtcaacgctgccagaaaccgctggcatcacgctggacgaacacgacgacgactcaaccctctacccggtagtgcagatgccgtttcgtaagcaactgctttcccagttcaccgccgacgaactgcgccaccacgtaacccgcgaagagtacgaagctatcggcgcgctggagatggacactgataacagttacgtccagaacttgctgttagctgctgagaactgcccggaagtgaagggttacgacaccaaagacctgtggcgctacaccgatgccattcgcaaagtgttcagccaggacaagcgtcacgaactcgcgctggtactccgtttcaccagaatgtgggcggcgactgattacattgaccgtggcatcctggcgcgtgaatgggctgccggtaatcacatcagtagtgttcagcgtactgattccggaaccaatgccaacggcggttatgtcactgaccgtggacctgatgcataccatacccttgacactctcgatttagagattgcatgtgcccttctgcctatggacttcaaccatctggaaatcccgggcagcatccaccgccgcgccaaggagattgtcgcgaacaaagaagaaccatggaaatcatggagcaaaatcctgcgcaaccagcccggcgttctggctgttaaccgcgcggccatcttcaacctggtgcgcatcgcgcctgagaatatccacctaacgccggttgctcatctggagttcgtaaaccagacgatgacggctgaatttaatgctgcgactgagttgctgcctatttatggcaatagcgagcataagcaggaagtagttacccaggaaatggtagatgcggcatggcagaaggttgatgaagtgttggaagagtttcatggcgagttgaacgccggtgaacaaaaacgacctgaacctgcgctttctgttgtggatctgatgcgccagcgcgctgctgatgaaaggcttcacccagcaaacattgaagcaacctccactgatagccagcctcaggtcgctaacctcggcggcggcatgttctccattgatggcctgatgagcgaaaaacaaccacaaacagatgaccgttcaccggttacagaggagaccaccagcgatgtgcagatggaagagactgacccggcggaaggagaaactggtaacacggttccaccaggcgaaagctctgatgcagctgatccgcaaacagcttccctgaccccggctgaggttctggctgccgtggcgccggagctggcgaacgactcacagccggaaatgaccaccgaagcaccggaggaaatcgccagcacgccggaataccctgcctatttcgaaccgggccgctatgaaggcctgccgaacaacatttaccacgcagcgaacgggatcagcagcacccagttgaaagatgcgcgcgttagcctgatgttctatcacggtcgccacgtgaccaagacaatccgtcgcgagagcagcgaggcgctgacgttcggtagcctgtctcacacgatggcactggaaccggaaaagcttcacgaagagttcgcggtgttcccgggcgttccggagggagcatttaccactaccgactccatgaaggcgttcatccgcgaatttaatgcggataagccaaaggccgagcaactgaagctcacaggcaagaaagaggaactgcaggcggcgatccgcgcggtgaatccggatgccattttcgctgatgagttcgagcaggaatggcgagatagcgttgccgggaaaaccatcctgtccagtgagcagttggcgctggccacggcaattcagcaggccctgcttaaccatgaatcggccggaaaactactgcgccacccttcccgttcagtcgaaaccagttacttcggtatggacgacgaaactggccttgaagtccgtgtacgcccggaccttgaggttgaaataaacggcgttcgtatcggcgttgacctgaaaacgatcagcatgggccgcgttaagcaggaaggcctgcgcgccaagctgcaccgggaaatcatcgaccgcgattaccacctcagcgcgggcatgtactgcagcgtcgctgactttgatcagttcttctggatcttcgttaacaaagacgagggttaccactgggttgcggtcattgaggcttcggaggaactgctggcgcttggccgagaggaatatcagaaaaccatgcgcgccctggctaaggcttatgacaccaactgctggcctgcgccgatcaccgaagactacaccgacgaactgaacgacttcgacctgcgccgccttgaagcgctgcgtactcaggcataa

SEQ ID NO: 40129 - DNA, 1122 bp, Escherichia coli
atgacgatggaaaacatgaatatcgtaaatgcggagcagcaggctccaaacactatctctgccagcaacgccatcttcaatgtgcaggcgttaacccagctgcaggcagttgccggtttgatggcgcaggccgccgtaacggtccctgaacatcttcgcggcaacccagctgactgcatggccatcatcatgcaggctatgcagtggggcatgaacccgtacgcggtggcgcagaaaacgcacctggtcaacggcgtgctggggtacgaagcgcaactggtgaacgcggtgatctccagctctaacgccattgtgggccgcttccattatgagtacgagggtgactggtcgaaatgcgccagcagccgcgaagagatagtgaagaagccagcaaaaggcggcgggacgtacgacaagaaagaaatggtacgcggctggaccagcgccgacgagcaaggcctgtcggttcgtgtgggtgccgtcattcgcggcgaaagcgaaatcacctggggcgaaccggtgttcctctccagtgtgattacgcgtaactctccgctgtggatttcgaatccgaagcagcagatcgcgtatctggccctcaaatactgggcgcgcctgtactgcccagcagttgttctgggcgtgtacacacctgatgaagtggagcagcgcaccgagaaggagattaacccggcccccgcccagcgcgtaagcctgtctgatatcaaaagtgacagcgtaacaacaacgcacagcgcgcaggaatcggcggcaaacattgacgctatggccgatgagttccgggatcgtattgaagcgacgcaggacgtggataacgccaaagcagttcgggccgacatcgaaagcgccaagaacaccttgggctctgcactgtataccgagctgaaaaataaggccgtgaagcgttaccacttggtggatgcgtataaccgggtcgaggcagcaatcaactccctgccgcagcccggcgaaccggatggtgccgagcgcttcgaggaagtcgagcgcgtgctggcgtcagccaaacgtcacttgggcgatgagctgcacgataagttcagcatcaccctggcggatatgaaaccggaatacgtggcctga

SEQ ID NO: 40130 - DNA, 243 bp, Escherichia coli
atgcgactgatcaatcgaggaagtaagcaatcacctttagctcgccaagcatgcgacatcgcgctggcagctcacttgcaaacatatggcgactatgggcgaagcaagatgaaagagacttatacggtgaaggttgaaggcgtgaaagtctgggtggaggtggtgaaccgaaaggcgagctacgtggccacagcgatgaccggcatgcgccgtctccgctccctgcccgggcaggttggttga

SEQ ID NO: 40131 - DNA, 1194 bp, Escherichia coli
atgatcaccgacacaaagctcaggaaggcgctcggcaagaaaagagatgatatcgagattatttctgattcgcacgggctcaacgccagaatcagccaggccggaaaaatatcatttttctatcggtatcgctgggccggtaaagcggtaaaactcaatgttggtgattatcctgcaatgagtatcacccaggcaagagagcgtcgccaacaattcagaaactggttaactgagggactggatccgcgagagcaggtgaagctggataagcagacccgacaggaagcgatgtccgttgccgaagcgttcaattactggattgaaaggcactgtatcgctaacgggctagttaaagtcgattactatcgccaggtgtttgagaaacatatcgccgaaccgatgaagaatgtcaaagtcgataacacagcgaaaatgcactggatcaacgtcttcgattctatagaaagcagggtgatggctcattacatgctttcgctgtgcaaacgggcgtttaggttctgcgttaacagaagtgtgatcgcctcaaacccactcgagggattactgccatctgatgtcgggcaaaagcctaaaaagagaactcgcaggatggacgatgacgatctgcgcaaaatctatcagtggttgaaaagccatatgtcgatagagtccgttttcctggtgaaatttattatgcttaccggatgccgtacggctgagattcgacttagtgagagatcatggtttcgattggatgataatgagtgggtcgtgcctgcgggcagttataaaactcgggtacatattagaaggggactctcagacgccgccgttaacctggtcagaaatcacctcaagaaaataaacaccaatcacctggtgacttcacaacgtaaaattgatggcgggatcaaagattcgcccgttcattcacctgtggcatccaattacgcccgttctatttggaatggaacaggtatggcagagtggtcgcttcatgatatgaggcggacgatagccacaaatctctctgagttaggttgcccgccgcacgtaattgaaaagctgctcgggcatcagatggtgggggttatggcgcattacaaccttcatgactatatcgatgatcagaaacactggctccgcgtttggcagagccatcttgaagagatcatcggagagcccttcagttaa

SEQ ID NO: 40132 - DNA, 150 bp, Escherichia coli
atgagtgtattgcgcattcacttgtcccggccaaagggtttaatacataaaaatgacattcattcgctcgcgctggcgtctacagagagcatggtagagagcatcacaaatatccacgccgaagataaaattttctccatcttcatctaa

SEQ ID NO: 40133 - DNA, 549 bp, Escherichia coli
atgctgaagcatattgatttttcgacggccagcccgactgtccggcaggcgcttcagaaggggaccggtgcaggaaatatcagtgccctgaacaaagtgatgaagggtacgctggtgacatctctggcactggtagctgtcacaaccggccctgacatgatcaaaatgttgcggggacggatctccggtgcgcagttcatcaggaatcttgccgtggcatcttccggtgtggcaggtggtgctgtcgggtcagtggcgggcgggatactgttcagtccactgggaccatttggtgcactgacagggcgtgtggttggcggtgttctggggggaatgattgcctccgctgtatcaggaaaaattgccggagcgctggttgaagaagatcgcgtcaaaattctggcaatgattcaggagcaggtgacatggcttgccggcagtttcctgctgaccggacatgagattgaaaatctgaacgcgaatctggcccgtgttatcgatcagaatgctctggagatcattttcgccgccggtatacaaatatgttaa

SEQ ID NO: 40134 - DNA, 324 bp, Escherichia coli
atggccgttactttcttcagttgctttaatgatttcggttgtggcgacattttccacgcactccgtttccagaaatgcgtctgtggttcgcgtggcattactgtcaccaaaagcttccgtttccatttttctggtcaccagcgtctgaccatatttgtctttgagttgcagagtgatggtgagggggccaaatccttcatcgtttccgccattatccagccggaactggtaagcacaaatatttcccgggagccatatcgtatctgtattgcgtatactgatgtaacgttgatcctgtgcccggagtggggcagaccacgttaa

SEQ ID NO: 40135 - DNA, 471 bp, Escherichia coli
atgctggagccacggctgcagtacacctggcaggggctttcgctggatgacggtaaggacaacgccggttatgtgaagttcgggcatggcagtgcacaacatgtgcgtgccggtttccgtctgggcagccacaacgatatgacctttggtgaaggcacctcatcccgtgcccccctgcgtgacagtgcaaaacacagtgtgcgtgaactgccggtgaactggtgggtacagccttccgttatccgcaccttcagctcccggggtgatatgcgtgtggggacctccaccgcaggcagcgggatgacgttctcaccctcacagaatggcacttcactggttctgcaggcaggactggaagcccgtgtccgggaaaatatcaccctgggcgttcaggccggttatgcccacagcatcaacggcagcagcgctgaaagttataacagtcaggccacgctgaatgtgaccttctga

SEQ ID NO: 40136 - DNA, 384 bp, Escherichia coli; identical to SEQ ID NO: 15198

SEQ ID NO: 40137 - DNA, 324 bp, Escherichia coli; identical to SEQ ID NO: 23190

SEQ ID NO: 40138 - DNA, 435 bp, Escherichia coli; identical to SEQ ID NO: 14667

SEQ ID NO: 40139 - DNA, 135 bp, Escherichia coli
atgagtaaggagtatatgaacgatggttcattaagtgaaaaatggaaataccgatttaacttttatgatcaacatggctttcctggattctggggggggcaacaccagaatataaagcagcatttaaaacattaa

SEQ ID NO: 40140 - DNA, 669 bp, Escherichia coli
atgctcaaatcaatgccatctattcgctatcacaaaatagaatcatttaattatcgccatatatgggccgttggtgatattcatggcgattatcaattattacaatcccgcttacaccaactctctttttgccccgaaactgacttacttatttccgtaggcgataatattgatcgtgggccggatagtcttaacgtgctacgcctgttaaaccagccctggtttacatcggttaaaggcaaccacgaggcaatggcgcttgatgccttcgcgactggcgatggcaatatgtggcttgccagtggcggtgactggttctttgagttaaatgattcagaacaaaaagaagcaatagacctgttgcttcgctttcatcatcttccgcatattatagaaatcaccaacgatattataaaatatgttatcgcacatgcagattatccgggtgatgaatatcagtttggcaaggaagtagcggaaagagaggtactctggcctgttgatcgcgtgcagaaatcactcaaaggcgagttaaaagaaataaacggtgccgactgttttatcttcgggcatatgatgtttacaaatatccagacatttgccaatcaggtttatattgataccggctcgccggaaagcgggcggttatcgttttataaaataaaatga

SEQ ID NO: 40141 - DNA, 732 bp, Escherichia coli
atgcaaaaaagcggtgcgcaggcggtaaccgttgaggattcaatgtcgatgattcatgcctcgcgtggcgtgttaaaacccgccggtgtaatgctgaaatcagagtgtgcagtggtcgcgggtatcgcgcaggcggcactaccccagagcgtggtagcctgggagtatctggtggaagattatgatcgcattcgcaatgacattgaagctgtgctgccagagttcgccgactataaccagcgcatccgacatcctggaggttttcacctgataaacgcagctgctgaaaggcgctggatgacgccgtcaggtaaggctaatttcattaccagtaaagggctgttagaagatccctcttcagcgtttaacagtaagctagtcatggcgacagtacgcagtcacgatcagtacaacacgacgatttatggtatggatgatcgctatcgaggggtattcggtcaacgagatgtggtctttatgagtgctaaacaagctaaaatttgccgtgtaaaaaacggcgaaagagttaatcttattgcgcttacgccagacggtaagcgaagctcacgccgcatggatagattaaaagtggtcatttaccctatggctgaccgctcactggtgacctattttccagaatcgaatcacatgctaacacttgataaccacgatccattaagtggcattcctggctataaaagtattccggttgaattagaaccatcaaattaa

SEQ ID NO: 40142 - DNA, 540 bp, Escherichia coli
atgggtcacggtatgggtatcccgtcctgctccatctacaccaaagaactgatcaccgatttcggcgtgaagaaaattatccgcgtaggctcctgtggcgctgttctgccacacgtaaaactgcgcgacgtcgttatcggtatgggtgcctgcaccgattccaaagttaaccgcatccgttttaaagaccatgactttgccgctatcgctgactttgacatggtgcgtaacgcagtagatgcagctaaagcactgggcattgatgctcgcgttggtaacctgttctccgctgacctgttctactctccggacggcgaaatgttcgacgtgatggaaaaatacggcatcctcggcgtggaaatggaagcggctggtatctacggcgtcgctgcagaatttggcgcgaaagccctgaccatctgcaccgtgtctgaccacatccgtactcacgagcagaccactgccgctgagcgtcagaccaccttcaacgacatgatcaaaatcgcactggaatccgttctgctgggcgataaagagtaa

SEQ ID NO: 40143 - DNA, 609 bp, Escherichia coli
atggcgctgattgctgagctgaaacctgaaatgagcggcccggcgctggcagtgattgagaatctggagaaggcatcgactcaggagctggaagatatggccagcgcactgtttgcctctgatttctcgtccgtcagcagcgataaagcgccgtttatctgggctgcactgtcgctctactgggcgcagatggctaatctgatccccggcaaagcccgcgctgaatatggcgaacaacgtcaatattgcccggtttgtggctctatgccggtgtccagcatggtgcaaattggcaccactcagggtctgcgttacctgcactgcaacctgtgcgaaaccgaatggcacgtggtgcgcgtaaaatgcagcaactgtgaacagagcggcaaactgcattactggtcgctggatgacgaacaggccgcgattaaagccgaaagctgcgatgactgtggcacttacctgaagattctttatcaggaaaaagaaccgaaagttgaagccgtggcagatgacctcgcctctctggtactggacgcgcgaatggagcaagaaggctacgcccgcagttccatcaacccgttcctgttcccgggtgaaggggagtaa

SEQ ID NO: 40144 - DNA, 309 bp, Escherichia coli
atgagtattcgcataatcccgcaagatgagctgggttcgagcgagaaacgtacggcggatatgattccgccgttattgttccctcggctcaagaatttatacaaccgccgcgccgagcgtctgcgcgagctggcagaaaataatccgctgggtgattacctgcgctttgctgcgcttatcgcccacgcccaggaagtggtgctgtacgaccatccgctggagatggatctgaccacgcgcattaaagaagccagcgcacaaggcaagcccccgctggatattcacgttctgccgcgtgataagcactag

SEQ ID NO: 40145 - DNA, 186 bp, Escherichia coli
atgctcgttacgcccgtaaaataccgccttactgctttaactgttccgcgtgcgcttagccgcattcaccgcatcacaaaattcactttaaaaacggcggcagagcagtcacggagtaaaactgataccgccaaacgtcaccagaaaattgataacagagggcgttgcagcggggttgtcgcttaa

SEQ ID NO: 40146 - DNA, 471 bp, Escherichia coli
gtgggtgcaacctatgctaaatcagatcgcactgacggtcaggtcgcctatggtaagagcaaattcaatgcctccggcaaaaatgcggaagtatgggctgcaggcctgaaatatgatgcgaacaatatctatctggctaccacatattctgaaactcagaatatgaccgtttttggtaataaccatattgcaaacaaagcacaaaactttgaagcagtagcacaatatcagtttgacttcggtctgcgcccatctgttgcttaccttcagtcaaaaggtaaagaccttggtgttcatggtgaccgagacttagtcaagtatgtcgatgtcggtgctacttactactttaataaaaacatgtccacttttgttgattacaaaatcaacttaattgacgatagtaagtttaccaaaacagctggtattgatactgatgacatcgttgctgtaggtctggtttaccagttctaa

SEQ ID NO: 40147 - DNA, 528 bp, Escherichia coli
atgcagcatttaaaaaacattaagtcaggtaatccaaaaacaaaagaacaatatcagctaacaaagaattttgatgttatctggttatggtccgaagacggaaaaaactggtatgaggaagtaagtaattttcaggaagacacgataaagattgtttacgatgaaaataatattattgtcggcatcaccagagatgcttcaacgctcaaccctgaaggtttcagcgttgtcgaggttcctgatattaccgccaaccgacgtgctgatgactcagggaaatggatgtttaaggatggtgccgtgattaagcggatttatacggcagacgaacagcaacaacaggcagaatcacaaaaggccgcgttactttccgaagcggaaagcgttattcagccactggagcgcgctgtcaggctgaacatggcaacagatgaggagcgtagccgactggaagcatgggaacgctacagtgttctggtcagccgtgtggatcctgcaaatcctgaatggccggaaatgccgcaataa

SEQ ID NO: 40148 - DNA, 573 bp, Escherichia coli
atgacgccagtatcacggcaacggttcagggtgtcccgggtggctttgaccggggcaatcaggtttttaaaccactgccacgcggcctgtaacttttcgcccagccagtcaaacaccggtttcagtggcgagaacagctcccccaccggcgcaaatgctgctttcagcccttcaaccacaccaccaaagaatgcgctgacaggctcccagtatttacggataagcaacgccccggcgacaatggcggccaccacggccacaaccggccagctaatcgccccgatggccgtcataacagcactgccaaccgtcgtgaagattgcccccattgcgcctgctgccgcgatgatggcattgatgccggtgataaccggccaggctacaagaccaattgcaccgatgacagcagtcagcgccagtgcaccaccggcaatgaggccgatggttgacgccagtgatttgtttttctgtatccagccgtcgagttttaacacatactttgtggccgtctgcgtgagcttacgcagtgcgccttcctgctggtcaaacaggtcagtccccaccgcctcataa

SEQ ID NO: 40149 - DNA, 138 bp, Escherichia coli
atggcggcgcggagaggtctggtatcaaatattgggcttacgccttttgcatccacacaccattcagttaactggtctaagatagaaatcctgtatttctcaataatcggccatgaagcgctcggatcattgcagtag

SEQ ID NO: 40150 - DNA, 219 bp, Escherichia coli
atgcaaaaccttttagatattcatgattttcgaacgcataaatgcacagaaatttataataaatttctgcgtccgttatattacctttttcatggtagtcgaatgcatatgcatatattctatcaaggatatcaggagtcaatccatgtagtaatgccagattttctccttgtgataatgcgtgttttagttgacttgcccattcatcactgttattga

SEQ ID NO: 40151 - DNA, 246 bp, Escherichia coli
atggaaaatggtgatttgtctcttattcaactttgtcttgataaagaaaaacgcgacataactgaatctgttatcgcgatttatcagaatgaattaaacctcctgtctgatgtggtcaatttacttgttaaacgtgctgtattccacaagcaaatttcctcagtggatgaactgacaaaattaacgacagaactcgccagttattgcgctgatgtatccaggaaacttaacgataaaaggagctga

SEQ ID NO: 40152 - DNA, 1767 bp, Escherichia coli
atgatttacacaacaggcacgatagccgttagcggaaaaacagttaccggaacggggaccgaatttaacgctgaactatctctgatcagggtaggttgcactcttattgctattagcgatccggtgcagatcttccaaatcacagaagtaaaaagcgccacaagtttgtcggtaacacctgcggcaagtccagctatttcggctggaactaaatttagtatcctgctttcagattcgatatctgtagatggtcttgctcaggatgtcgctgaaacactacgttactatcagggcaaggaatcagaaatagccgacgctgtggagtttttcagcgacaacaaagatgttatttcagcctcgaaattagcatcacaatcagctaccactgcaaccaacgcggcaacaacagcgacaagcgccgccgattcagccaagacatacagggatgaggcccacgaatacgccaatcagacagcgcagccttacgcgtatgttttgcagccgctgcctgacgtatggataccgtttagcgattctctcgacatgattactggctacggccctggcactaaaaaagtaaccattgatggggaagcaaaaacaatatcatcagataaggttgtttctttctctcgcgccagcactgcaacctatatcaataaatccggtgtactcaccactgctgatattgatgagccgcgtttcgaacgagatggattattaatcgaaggcgcacgcacaaattacttattaaattccaatacgccggagtcatggaatagaacatcatctgtgggtatcgaggcgctaaatgatggtagatttaactatggtcgcgtcactgtaactaatacagcgccaagtgctggtgggtatcaagtattatcaatggtagttggtgacgccatcagcgggactactggcgattatgtcacatcgtcttgtcgcgtcaaggctggcgctaactctcgtctacgcttacgagttgcaaccgtgacagacggtattgctgttttttattgtgactcagttttagatcttaatactggtgaaataatatcaggtaaacaatttacttctaatgtcacaaaagatggtgactggtggttttttgaggctactttctgttttgacgccgatctgtcaattattgccagatatgaaattatgtgcttatccggggaatctgttataacgtctggcgcatactttgatttggcgacaccacaaatcgagttaggttcttgcgcatcatcgtttattatttccggttccactcctacaacgcgagcaagcgacatggtgactttgacggcaaaaaataacctgctaggatcaccattcagttttttatttgaattgcacagagaatgggatttagcgccaaacacgtatcctagaatgtttgatgcagttgataccatctcaggaagatcaatgatttcagctattgatgcaaatactggtaaagcgtattttggtatctcaaaagtatcaggaagcagcacaaacgcttacacttcattagctataaacaaaaaaaccactgtaggagctgtagtaacaacaaataatacaggacattcaattgcgaatggtcaatctggagttgaagttacttatgattatctcggacttgcttcttcgacacctattcgaattgggggaggtaatactacaggttatcgtcacctattcgggcatatcagaaattttcgtatctggcacaaagcattaactgattctcaattaagcgagattgtttaa

SEQ ID NO: 40153 - DNA, 378 bp, Escherichia coli
atgttaattaacctggtaattttaccattttgtgatctgcgttacatttctggcttatacaaaatgtatttattgatttatgtcaatattgtgaaaacgctgtttatggatactacaaccgacggaacaatggaggataagacaatgaaaggctttaaaaatatcgctatcgctgcaatggttgctggtctggttggttgtgctgatatgccgaaacgtgaatgcacggcaatttatcaagctggcggtaatgaatatgcggttgcagtcttcggtgtcgcggatgttggcggtcacaaaatggttaaggccgggtatccgtttaacttccaatgggtaagcgttgaccacttcaaaaaaacggattgccggaactga

SEQ ID NO: 40154 - DNA, 600 bp, Escherichia coli
atggctacttttggcgcttatttacgcctagataatggcaatatttttgtaacgccggattctaccccgatgtgcttatattcgcgggtggcattaaattccagccaacaacaaacgatcgctgtacccaacggtaagcctgtaatggtattcatcaaaaacaccgacgacaccgctactgggcttgcctatcgcgcatcatcatctacggtagtgatcccgcctggcaacgggtatgcgtatatattcagcatcttcccgccatcgctgccgaaatgggggatggctatctggaacgcttccggggaactggtactgaccaacgaatcaaaaatattaaccgaccttgttacagtaggcaaggcgggatcgagcggggggatttatatcgatcaaacattatcaggatcttatgcggtagtgcctcagatattaggggccgttgtaggtatgggttctgcaacaatatatacagaggcatactacaacggcagcactacacgaattcgcgggaagcaggttggtagcttgcagcaggcttacggctacattaaccacgggaacgctatcaccgccattaagaccgacgcctatgattaa

SEQ ID NO: 40155 - DNA, 312 bp, Escherichia coli
atggctactttcggcgtagcgacttgggacgccaatggcaatcctaataactacggtatcaaaccttccgtcgtagttggctatatttccttgtcttccgggcaagtatccggaacatattcttttaccgttccaaccgggtgcaaattatcttatggcgtggcgcttgattatggtacaacatcgtcaacgcgcagaaagatcagcatttccggcggcactgtttccatttcctccgcaggggatacggtaggggctgatatatggcctgcgtcacaatgtgacctgattatttttacggagattgcataa

SEQ ID NO: 40156 - DNA, 381 bp, Escherichia coli
atgtttcgttttcgtcgtgtaaatattgatggtaaatccattaccgaaacccgcctcgctggtgctgaattaaaacccggcgaactggtgaaactggaaggcagcaagtttgtgaaggcggtagatggtgatgctggggttgctcgcttgtatatcgttaaccctgcattccatgaaggcaaaaccattgccgatgcaatcgcagaaggtgaaaccgttgttgctgactacgtggaagaaggtcgcgagtttgcttatcgcgcggcggcggctacctacactaaagaccaggccatcaaactgggtgaggcaattgtcgcgtactgccaggaagatgtaaccctggacgcagaagatttcatccgcgttcgcgtcgcttaa

SEQ ID NO: 40157 - DNA, 324 bp, Escherichia coli
atgactaaatttatcagcgttaaagtttttcgtggcactattccagaaggtgagaaatacggtaaattaggtggaatgcctggcgcatgtttccgtgtagcaacggaagacgacgatcatgttaaatgcttccacgtatcggagcctccttttaatccagaacatcttgaaaaccaggataaaattaaagcgttcgttttcgcttcgctgatgcttaatccttaccctgatcttgatgtcgaattggttggcgcggaagtgttcgcggaatacaaaataaccccggcagaaaacggagattctaaaattgagcgcatcaaataa

SEQ ID NO: 40158 - DNA, 255 bp, Escherichia coli
atggaaataatcaaaatatggcgcggcaatagtaaggctgatggtgagttttgccgcgttattcagtttgtgaattacgggcagttttatgaattgccttacatcgagtggatggagcaattatatctggatgaatcaatcccaatgcaccgaaaaataaaacaacttcaaggtttattgcgaagcgggttttacgtttgccctaacccgttagatgatgctgaactggtgactgtactttacgaaggagaataa

SEQ ID NO: 40159 - DNA, 255 bp, Escherichia coli
atggttgtgatcagactatggcgcggagttagtagacttgatggtaaatacagccgcgtaattgaggatgttaataatggtcggttttttgaactggcatacagtgagaaaagggaaaacgaatatttgaacgaatctacccctatgtggtgtaaagtagctggccttaattcacttctacgtaacggattttgcacagatcgtaatacgttagacgatgccgaactggtggtaactctttacgaggcagaatga

SEQ ID NO: 40160 - DNA, 285 bp, Escherichia coli
atgaaaagtgctaaattcattgcttgctgttttgttgaagtgcctaacgatgatgttttctgcaattatgaatttaaagacagtgccggaactgttcataccgtagtcggcaaacgtggtgactggttatatatcactgatagagacagaatattgacggttaaccaacttatttacattaaacgtggttacggtgattattatcttttaaacaaaatagcaaatgatgttcttaatagcagttgtgtagaaacggcaagatccctacctggtgcggagttttaa

SEQ ID NO: 40161 - DNA, 141 bp, Escherichia coli
atgaaagttagagacatcgctccattagggattcgtatcccgccagagattaaagaaaaattgaaggaaaaggctaaggaggagggcaggtctttaaattcagaaatagtgcagcgtcttattcgcagcctaaaaagttga

SEQ ID NO: 40162 - DNA, 228 bp, Escherichia coli
atggttattttcatctctggcgtaaatatcaataatcatactcttgtttatgatattgctggtttagctggatatgctctaagttctgaagtggttgatgaaacaacgtttaaaataaacatcaatgacgtagaacatagagcgcgcgcaggaatcaatgaagcagatgttactttaatgcttcaagaatttttaaacgctggttttaatattcgcttagaaaaataa

SEQ ID NO: 40163 - DNA, 1359 bp, Escherichia coli
atgccaaataactaccatcaatacatcgaagacgttagtgatgatataaagacatgtcttgaaggaatgggatgccaacccatactttttgttggatcgggattaaccaagagatatctttctggcccaaactgggaagaacttcttcagcaacttgctaatgaatgtcctaacatcgataaaagatttgcctattataaacagaaataccccgagttgattgatatcggcagtgtattttctgattcttataacgagtgggcatggggtgatggagagaaagaatttccagcagagttatttgatgcaggcaatgagccaagtatttattttaaatacaaagtatctagtattttcaactcattgttacaagaaaaagaaatcgtaaacaacggtgaaattgaacttctgagaaagattcaccctcattcaatcatcacaacaaattacgacaaattacttgaatcgatatatcctgagtttacccccattataggccaaaaaatcctttacgctaatcacggtagcattggtgaaatacttaaaatacatggttgctgctccactcctgaaagcataataataaaccgcgatgactacgatgacttcataaagaagaagaaatatttaagcgcaaaactgcttactttctttgctgaacaccctcttctatttataggttacagcgcagaagactcgaacataaaaaacatactatctgatattgatgaactactttcagaaaatggagatgtcattccaaatatatacattttagaatggacgagcaaacaaaatgaaagtgaatacccacgccgtgaacggctgattcaagtatctgcaaacaaaagcattagaataaaaagtatagtagcaaatgacttctcttgggtattttcagcgtttggcgcgaacagagcacttgataacataaatcccaaattattgagggcacttttagctcgcacttacgatctcgtcagaactgatatacctcgcaatcctgtccaagttgattaccgagttttatcaagcattagcgagtcagaaggtgaattagcgaaattatatggtatcgccacatcgtcagatggtatggcatttaatgccagttatccttttactttaaccacgctagggcaatcacttggtttcaaaggctggcatgatgcgaacaaactattagaagtagttaaaaacatcacgaacgtagacatcaagacattcgataacaaataccactatgcaataatgaacggtgatgagattcagtcccatagatattcaaactatcttcgagaactcctcgaaaaggttagggatggagaggagtttgagttaggaataaaggctccataa

SEQ ID NO: 40164 - DNA, 2148 bp, Escherichia coli
atgaaacactttatctatcaggacgaaaaatcacataaattctgggcggtggagcagcagggaaacgagttgcatatctgttggggaaaagttggcaccaaagggcaaaaccaggtaaaaagttttgcggatgctgcggcggcggaaaaagcggagctgaagctgattgcggagaaaacgaaaaaggggtatgtggaaggcaattcggcaaacgtatatctccctccagtcaccaaagccactcctgaagttaaaactccccctgtgagtcaaaataaacacccatggctggctgatgatgcagtcattcctgtcactgacgatattaatcgatttgcttttccacatcgctctcgccccagagagatcaattatctgcacaaagatggtcaaatatggcagcgcattgcgaataacaccagggcatatgaccccgacaataattaccgctcttatcctgaaaactggcagcaagcgtttgccgagttacaaagtcgaattctggacaatcaacaaacagggagtgcgcaatctgatgcggcattgctctggagtttttggaactcttactctgcagatgaactggtcgatgacttagtcattcgctgtggtctggaaagtgccgttgaaatcgccctttttgctcttcaactcaaatataaaccagtaaaaggcgcagtcaccaccatcattccacctggtcacaaagcagaatcgctaccgagttggcatcaacgtctatgtcatcatctttcactcgcttcagaagatgagtggcaacgctgtgtgaataaagtgcttactgctattccgacgctatccccagcacggcaaccttttgcggcgttactgctccctgaacgcccggatattgccaatgctatggctctacgttacgcagaccaaaacgttccggcgatgacctggttaagactggtagtaaccgatgatgccgctctgactgcagcagaaaaatacgacttcccaccgttatatcgtgattttcgcgcttatctggcaatgttgctggcaaataatggggtgagcggtgtaagccggatacttactgagtttgtggaagagcattctgacaatcccacttatctcttcgagcgcatcagcgagactgaagatcttgtcaaatggttatggaaaacgaatcacccggatgcgattcaaattctgatcctcggtgtaattggcaagaaaaagcacctggaatacttaagcaaagcctgtcaaaaacatcccgctgcggctattgccgcttatgcaactttgctggcaatacatgaagataaagagtggcataaagcgcttgtcaaattgattaccatcacgccagagttagtatgcgacgtcattccctgggttaatgctaaggcggcaggcatcttatctgaatgtcgtcctcagtcagtcgctgaagaatatgaatacgctactgcggatatgctaccgcagctatttgtcgctccaccgtgggtaataaataagaagaaaaatgtaatacccgtatttgatttacctgtgcttcctgttccagccgtgacggatatcacacctggaattacagagttaatcagtcatactgacatatccagattcagtgaaatcgcgcaatatcaggcatcacagcaaaccttatttaccgatctgccactaattgaaaaagaaagttgggagacatctttcattccttttacaccagaacaacaaatcctttggcaattaggttttaatgaatggcggcattgcgaggatgacttgcatgaaaaaaaatatataccgcaaagcgctgttgatgccttgttgcgctttgattttccaacactaaaagctgagtttgcgaaatatcacaacaatgccaacaagagctggaatctatctgcactttgttacttaccgggacaacaggcgatttcatttctcaaccaaataatcattgaggagcaatattcaggtgagaaagagattctggggatttttggcagtacggccattccttcgtttatgacctgcttgcaacgagatcatcaacgactgtggatattcaccctctttattggggccagtgaactagccttaccaatggcgcagcggttacagaaaaaaatggcttacaaggatgtaatgccgatcagttaa

SEQ ID NO: 40165 - DNA, 270 bp, Escherichia coli; identical to SEQ ID NO: 21893

SEQ ID NO: 40166 - DNA, 312 bp, Escherichia coli; identical to SEQ ID NO: 21896

SEQ ID NO: 40167 - DNA, 3516 bp, Escherichia coli
gtgctcagtaaaccggaagtgatcgccgctatccacaacgcctactttgaagcgggcgcggatatcatcgaaaccaacaccttcaactccacgaccattgcgatggcggattaccagatggaatccctgtcggcggaaatcaactttgcagcggcgaaactggcgcgcgcctgtgccgacgagtggactgcccgcacgccggagaaaccgcgctacgttgccggtgttctcggcccgaccaaccgcacggcgtctatttctccggacgtcaacgatccggcattccgcaacatcacttttgaccagctggtggcggcttatcgagaatccaccaaagcgctggtggaaggtggcgcggacctgatcctgattgaaaccgttttcgacacccttaacgccaaagcggcggtctttgcggtgaaaacggagtttgaagcgctgggcgttgaactgccgattatgatctccggcaccatcaccgacgcctccgggcgcacgctctccgggcagaccactgaagcgttttacaactccctgcgccacgccgaagcgctgacctttggcctgaactgtgcgctggggccagacgaactgcgccagtacgtacaggaactgtcgcgtattgcggaatgctatgtcaccgcccacccgaacgccgggctgcccaacgcctttggtgaatacgatctcgacgccgacacgatggcaaaacagatacgtgaatgggcagaagcgggctttctcaatatcgtcggcggctgctgcggcaccacgccacaacatattgcagcgatgagtcgtgcagtagaaggattagcgccgcgcaaactaccggaaattcccgtagcctgccgtttgtccggcctggagccgctgaacattggcgaagatagcctgtttgtgaacgtgggtgaacgcaccaacgtcaccggttccgctaagttcaagcgactgatcaaagaagagaaatacagcgaggcgctggatgtggcgcgtcagcaggtggaaaacggtgcgcagattatcgatatcaacatggatgaagggatgctcgacgccgaagcggcgatggtgcgttttctcaatctgattgccggtgaaccggatatcgctcgcgtgccgattatgatcgactcctcaaaatgggacgttattgaaaaaggtctgaagtgtatccagggcaaaggcattgttaactctatctcgatgaaagagggtgtcgacgcctttatccatcacgcgaaactgttgcgtcgctacggtgcggcagtcgtggtaatggcttttgacgaacagggccaggccgatacccgcgcacggaaaatcgagatttgccgtcgggcgtacaaaatcctcaccgaagaggttggcttcccggctgaagatatcatcttcgacccgaacatcttcgcggtcgcaactggcattgaagagcacaacaattacgcgcaggactttatcggcgcgtgtgaagacatcaaacgtgaactgccgcacgcactgatttccggcggcgtttctaacgtttctttctcattccgtggcaacgatccggtgcgcgaagccattcacgcggtgttcctctactacgctattcgcaatggcatggatatggggatcgtcaacgccgggcaactggcgatttacgacgacctgcctaccgagctacgcgacgcggtggaggatgtgatcctcaaccgtcgcgacgatggcaccgagcgtttactcgagcttgccgagaaatatcgcggcagcaaaaccgacgacaccgctaacacccagcaggcggagtggcgctcgtgggaagtgaataaacgtctggaatactcgctggtcaaaggcattaccgagtttatcgagcaggataccgaagaagcccgccagcaggctacgcgtccgattgaagtgattgaaggcccgttgatggacggcatgaacgtggtcggcgacctgtttggcgagggcaaaatgttcctgccgcaggtggtgaaatcggcgcgcgtaatgaagcaggcggtggcgtatctcgaaccgtttattgaagccagcaaagagcagggtaaaaccaacggcaagatggtgatcgccaccgtgaaaggcgatgtccacgacatcggtaaaaatatcgttggtgtggtgctgcaatgtaacaactacgaaattgtcgatctcggcgtgatggtgcctgcggaaaaaattctccgtaccgctaaagaagtgaatgctgatttgattggcctttcggggctgatcacgccgtcgctggacgagatggttaacgtggcgaaagagatggagcgtcagggcttcaccattccgctattgattggcggcgcgaccacctcaaaagcgcacacggcggtgaaaattgagcagaactacagcggcccgacggtgtatgtgcagaacgcttcacgcaccgttggtgtggtggcggcgttgctttccgacactcagcgtgatgatttcgttgctcgtacccgcaaggagtacgaaaccgtgcgtattcagcacggacgaaagaaaccacgcacaccaccggtcacgctggaagcggcgcgtgataacgacttcgcttttgactggcaggcttacacgccgccggtggtgcaccgtctcggtgtgcaggaagtcgaagccagcatcgaaacgctgcgtaattacatcgactggacgccgttctttatgacctggtcgctggccgggaagtatccgcgcattctggaagatgaagtggtaggtgttgaggcgcagcggctgtttaaagacgccaacgacatgctggataaattaagcgccgaaaaaatgctgaacccgcgtggtgtggtgggcctgttcccggcaaaccgtgtgggcgatgacattgaaatctaccgtgacgaaacgcgtacccatgtgattaatgtcagccaccatctacgccaacagaccgaaaaaaccggcttcgctaactactgtctcgctgacttcgttgcgccgaaggtttccggcaaagcggattacatcggcgcatttgccgtgactggcgggctggaagaggacgcactggctgatgcctttgaagcacagcatgatgattacaacaaaatcatggtgaaagcgcttgccgaccgtctggcggaagcctttgcggagtatctccatgagcgtgtgcgtaaagtctactggggctatgcgccgaacgagaacctcagcaacgaagagctgatccgcgaaaactaccagggcatccgtccggcaccgggctaccctgcctgcccggaacatacggaaaaagccacaatctgggagctgctggaagtggaaaaacataccggtatgaaactcacggaatccttcgccatgtggccgggtgcatcggtttcgggttggtacttcagtcatccagacagcaagtattacgcggtggcgcaaattcagcgcgatcaggttgaagactatgcccgccgtaaaggaatgagcgttaccgaagttgagcgttggttggcaccgaatctggggtatgatgccgagtaa

SEQ ID NO: 40168 - DNA, 1590 bp, Escherichia coli
  misc_feature (1560)..(1569): n is a, c, g, or t
atgacaaaaatgaaaaaacaaaacttgttaggttgtgcttttattgttgttacatattcctcttatgccgcatcaagtgataacgcaacctttgatcctaattttttaaagatgtctgacggtgaagaagcaagacatttagatttaaagtattttatgcgtccgggcggaatgagccctggtacatacactgtggcaatatttcttaatggggtaaaagttagtactgaggaatctgttgagtttatttcagataaaaaacaggagggggttacatttccattctttaatcagttcattttagctagttggggagtcgatgttgataaatataatatcgaaaaggaacctattgataaaaatatacctggcagcactgcatcgttttctgctaaagataacgcaatttatataaaaatccctcaggcgtcgatgagaaatgaagtttggtttcgggaaccatcagcaacatgggatgatggaataacttcttttcttgttaactataacttttcagggacatcacaaagttacgatgggaataaaacaggaaatacttatggtagctttgagagccaaataaactatggcgcatggcggttaaagaattttagtaattatgtgagaagtagttatcaaaaaaaatttaaatctgttagctcttatttagaaagaggttttgatttctttcagggaggtcggttgacgataggtcaaacgacaacagacggtaccatactggatagcattcctcttgaggggataacaatatcctcagatgatgggatgttaaaaccaatgcttgcgcagtacagtccgactattcgtggaatagcaaattcaccagcaagagtaatagtgaaacagaatggcaatataatatatgaaaaaaatgtgcctgcaggtgaatttgaatttaatgatgttactcaggtctataatggtgatttaaaaattgaaattgttgagtcaaacggaacagttagagaatttactcagtcagctgcagaattaccagtcttacaaagaaaaggaaggtttcgttataatatagcattgggtgaatataggagtgattataaggaattcacgaaagaacctagattcatacaatcatcttttgcttatgggttaggatataattatacattatacggaggggggattttctccgaggattacaagcaatcaaccttaggtttgggaaaatattttgaaaactttggtgcattctcctttgattcatctttttcttctgctgaattggataacaatacagtaaaagatggtcaagcttatcgggttatgtactccaaaattttctctcctacagatacggcatttaatcttgcaggatataagtatcaaagtagtggatattatgattttaatgattttcaatatgtgaataatgggcttgatttttataaccagaaatcaagattaagtgtttcattatctcagccgctcggagatgaattaggggctttttatttgtcggcttctgatgataagtattggaataatggttcaggatataatgtaaacatatcttattcnnnnnnnnnnctaattacattggttttgtaa

SEQ ID NO: 40169 - DNA, 279 bp, Escherichia coli
gtgagagatttcacgttgcgtttcagtgataaagcagatttcagggcatttctcaggaaacttaactgggaagaggacgaagagctgcagaatgccgttctggttgatgagattggttttacgttcagggagacagatgtttctgatgacggagaaccagaatacacgcgaaacgaagggtactttgttaatatccgtcttcttgacgatggctttgatgaatccgtgttccgtgagtgggtggttacaccagagcgcccgctcagggagtggttttaa

SEQ ID NO: 40170 - DNA, 1341 bp, Escherichia coli; identical to SEQ ID NO: 2084

SEQ ID NO: 40171 - DNA, 1116 bp, Escherichia coli; identical to SEQ ID NO: 2083

SEQ ID NO: 40172 - DNA, 1191 bp, Escherichia coli; identical to SEQ ID NO: 2082

SEQ ID NO: 40173 - DNA, 1545 bp, Escherichia coli; identical to SEQ ID NO: 2081

SEQ ID NO: 40174 - DNA, 891 bp, Escherichia coli; identical to SEQ ID NO: 2080

SEQ ID NO: 40175 - DNA, 411 bp, Escherichia coli; identical to SEQ ID NO: 2079

SEQ ID NO: 40176 - DNA, 159 bp, Escherichia coli; identical to SEQ ID NO: 20912

SEQ ID NO: 40177 - DNA, 2097 bp, Escherichia coli; identical to SEQ ID NO: 2078

SEQ ID NO: 40178 - DNA, 738 bp, Escherichia coli; identical to SEQ ID NO: 2077

SEQ ID NO: 40179 - DNA, 639 bp, Escherichia coli; identical to SEQ ID NO: 2076

SEQ ID NO: 40180 - DNA, 243 bp, Escherichia coli; identical to SEQ ID NO: 2075

SEQ ID NO: 40181 - DNA, 1650 bp, Escherichia coli; identical to SEQ ID NO: 20917

SEQ ID NO: 40182 - DNA, 1350 bp, Escherichia coli; identical to SEQ ID NO: 2073

SEQ ID NO: 40183 - DNA, 273 bp, Escherichia coli; identical to SEQ ID NO: 2072

SEQ ID NO: 40184 - DNA, 873 bp, Escherichia coli; identical to SEQ ID NO: 2071

SEQ ID NO: 40185 - DNA, 948 bp, Escherichia coli; identical to SEQ ID NO: 2070

SEQ ID NO: 40186 - DNA, 807 bp, Escherichia coli; identical to SEQ ID NO: 20922

SEQ ID NO: 40187 - DNA, 408 bp, Escherichia coli; identical to SEQ ID NO: 2068

SEQ ID NO: 40188 - DNA, 495 bp, Escherichia coli; identical to SEQ ID NO: 2067

SEQ ID NO: 40189 - DNA, 798 bp, Escherichia coli; identical to SEQ ID NO: 2066

SEQ ID NO: 40190 - DNA, 825 bp, Escherichia coli; identical to SEQ ID NO: 2065

SEQ ID NO: 40191 - DNA, 1230 bp, Escherichia coli; identical to SEQ ID NO: 20927

SEQ ID NO: 40192 - DNA, 690 bp, Escherichia coli; identical to SEQ ID NO: 2063

SEQ ID NO: 40193 - DNA, 1632 bp, Escherichia coli; identical to SEQ ID NO: 20929

SEQ ID NO: 40194 - DNA, 450 bp, Escherichia coli; identical to SEQ ID NO: 20930

SEQ ID NO: 40195 - DNA, 321 bp, Escherichia coli; identical to SEQ ID NO: 2060

SEQ ID NO: 40196 - DNA, 3516 bp, Escherichia coli; identical to SEQ ID NO: 40167

SEQ ID NO: 40197 - DNA, 825 bp, Escherichia coli; identical to SEQ ID NO: 2058

SEQ ID NO: 40198 - DNA, 1554 bp, Escherichia coli
atgatagttaagtttcatgcccggggaaaaggtggtggcagtggtccggttgattacctgctgggaagggagcgtaaccgggaaggggcaacggtgcttcagggtaatccggaagaagtacgggaactcatcgatgccacgccatttgcgaagaaatacacgtccggtgtgctgtcgttcgcggagaaggagctgccaccgggaggacgtgaaaaggtgatggcgagctttgagcgtgtactgatgcccggtctcgaaaaaaatcagtacagcatcctgtgggtggagcaccaggacaagggacggcttgagctgaattttgtcattccgaacatggagctacagaccggaaaacgcctccagccgtactacgaccgggcagacaggccgagaattgatgcctggcagacgctggtgaatcaccattacgggctgcatgaccccaacgccccggagaaccgccggatactgactctctctgataacctgccggaaacgaaacaggcgcttgcagagagcgtcacacgcgggatagacgctctttatcatgtcggggagataaaaggccgtcaggatgtgattcaggcgctcacagaggcagggcttgaagtggtcagggtgacgcgaagcagtatcagcattgcagacccgaacggtgggaagaatatcaggctgaaaggagcattttatgagcaatcttttacagacgggcgcggagttcgagaaaaagctgaaagagagagccgaatctacagagacaatactgaacgacgagttcaggaagctcgaaaaatctgtaagcaaggctgtgacatcaaacgagacgaaaatcaaagacgctatagccctgttcacagcttcgacagaggaatcactgaaaaagcaccgggaaggggtgaaagaggcgatgatgcagcacaggaaggacgtgttaaagctggcagggaatacgggcatgatgttactggggatggtcattttcctgtttaccgtgagttgcgggacgctctggtatcttggcgggatgatacaggcgaacctggaagatatcaggaagcaggaagagacattgcagaaactgaacgcgaagacatggggcgtggagttcgtacaggacgggaacaggaaatttctggtccttccgtacgggaaatcagcagaggtgattccccatcaggggaaggactgggtacaactgatggagtgacacagagtgacggagctggaaagacatttgctgaacgcattagagcaactgcaacaggactatatgcagcggctgaacgaatgggagagcgccttcgtggaattgcagaaaatgttttcgcttacgcaacgggacaacgcgatgctgaacgagcgggtcatgaagttgagtcagcaggtgcagcacttgagcgagcggacagaacgcttgagccagttatacagcgagaacaggagataagggacgaacggctgatacaggaacgcgaacatgagttatccctggagcgtgagcgccagctggaaatacaggaacggacactggatggcccttcgctgggatggtaa

SEQ ID NO: 40199 - DNA, 1491 bp, Escherichia coli; identical to SEQ ID NO: 8027

SEQ ID NO: 40200 - DNA, 576 bp, Escherichia coli
  misc_feature (532)..(540): n is a, c, g, or t
atggagtatattcataaagattttaacttagctcatgtattaaaatatggtatagcatttcaccatggttcactacctctatttataagaaaaagaatagaggacttatattccaaaaagaaaataaattttatcttttgcacatcaactttacttgaaggggtaaacttacccacaaagaatgtttttatttatccattccctaaaaagactgttaacgatgaaaaaaaatgccgattagatttttggaatctggcggggcgagctggaagatacagaagtgaattgactggtaacatagtatgcctgaataccgctgataataactggagcaatgcagatgctaaaattagcctaggtaataatgttattatagaggatgaaataaactcaacattactacgccatcaaaaaatattaaattattttgatggtaaagttaaatctccaactaatgacattattcaactcagctcacttattctatcagaaatattaacttatttagataaaggttatatagggcgaattnnnnnnnnncctatcctcttcgtcggcagcgtcagatgtgtataa

SEQ ID NO: 40201 - DNA, 252 bp, Escherichia coli
atgaatagcgaagagtgtttattctggttcactataaaccaaaataacatcgctgaaaagtatagagaaaattggaacatggatgaaatattccatttcctgcctaaagaagaaagagtttacaccttaatggacatggaaaatagtggtgcatgcgagatagataaaagatgccgaactaaatttaacaataaaaggcctaaacaaaaataccattatcaaagcaataatatagaattattttataattag

SEQ ID NO: 40202 - DNA, 522 bp, Escherichia coli
gtgaacagtaaaaacgatcaacttttttgtaatgtcagagaaatgaaaattaaaaccgctaaacctaccttgaatgaagctgttatcaaggaatggttttatcatcaacgagagaggacatccatatattacaagaaagagatacttaaccttccgccatattggacagacgacaaaatattgagaaactataaatttgtaaatactaaaagaacatgggacaaagaaaccaaatggttattgaaaaatataacaaacaacaataaattaacttatgaaaataaaatactcaattcatttttgtttagagtaataaataaaagcgatacattaaatgaacttgatgcgccctttgatttcacaaaaatgactattcgcgacatcaatgaaaagatcagagaaaagacaataaacatatcattaaaaaaaccaggctacgtattttttagtgcagcctatattttaggaggtccgaagtttaacttcggaaaatacttaaaaaatatatcgttaatggtgtaa

SEQ ID NO: 40203 - DNA, 501 bp, Escherichia coli
atggtttccatcattgcattatcggttattttcacacataaggagatgaccgcaaatctaacgtataaacttcaacaaactaatagttcttatcgctatgcaaatggtactcaaggcagcgcactcgatctaatattagaaaatcctgttattggttacggttacggttacgttgcatataaagatgtctataataaacgtgtcgttgattatccagaatggacctttagacaatcgatagggccacataattttgcgctattcatctggtttggcactggtttattagggctgataagtcttatgatgctatactgcgcaatattgaaagagtgtataaaaaatggcgtccagaataaaaaccgctcaccatataatgcatattatataatcttactatcttttataggttattttgttatccgtggaaacgtagaacaaattgaaccaaatttattaggcgtttacgccggcttattattagcaatgaaaaacaagtaa

SEQ ID NO: 40204 - DNA, 618 bp, Escherichia coli; identical to SEQ ID NO: 13315

SEQ ID NO: 40205 - DNA, 261 bp, Escherichia coli
atgctggcagtcagccaccggctgtaccgggcggaagacagagcggaacgtctggcgctggtcgcctgcctgctggctgttattccggcgcttaaccttgccaccagtgatgcagcggcggtggccggtcttgtgatgacggtgctgaccgttggtctggtgtcgtgtgcaggaaaatcattaccccgtttctggcccggggattttttcccggtattctacgcctgtcatctggctgtgctgggcgttctggcgctgtga

SEQ ID NO: 40206 - DNA, 207 bp, Escherichia coli; identical to SEQ ID NO: 31544

SEQ ID NO: 40207 - DNA, 333 bp, Escherichia coli
atggcgacaaaagaagagtttaaccattaccagccgctgggtaacagtgatccggctcatacagcaattgcgcctggcggattgagtgcgaaaacgcctgcaatgaccccactgatgctggatggcactacccgtaagctggttgtgtgggatggcaccaccgacggtgcagccgttggcattctggcggttgctgctgaccagaccagcaccacactgacgttctacaagtccggctcgttccgttatgaggatgtgctctggccggaggctgccagcgacgagacgaaaaaacggaccgcgtttgccggaacggcaatcagcatcgtttaa

SEQ ID NO: 40208 - DNA, 333 bp, Escherichia coli
atgacgagcaaagaaacctttacccattaccagccgctgggcaacagtgacccggcacatacggcaaccgcgcccggcggattgagtgcgaaagcgcctgcaatgaccccgctgatgctggacacctccacccgtaagctggttgtgtgggatggcaccaccgacggtgctgccgttggcattctggcggttgctgctgaccagaccagcaccacgctgacgttctacaagtccggcacgttccgttatgaggatgtgctctggccggaggctgccagcgacgagacgaaaaaacggaccgcgtttgccggaacggcaatcagcatcgtttaa

SEQ ID NO: 40209 - DNA, 324 bp, Escherichia coli
atgaacaattacccaatgcaaattatggttgatagcgacaccgctcttatgattcaggctttcagtgattccggtgtatcaattgactttgacaggctgttaaaactaatggccgataatgcagaaaacatctctgactttattcagtcggtggagtttaacgagcctcgaatgatgctaccaattacagacagcaacatcaaaagattggttatcgagcaaacgaacaaatacagtatttccccagagcaatttttgaaaggtgctgtgacaatcctgtacagcgataatattctggttacggattctatgaggattcactaa

SEQ ID NO: 40210 - DNA, 381 bp, Escherichia coli
atggattattcacagttaagtgattttgaaattaacgtggcggtattcgaagccattcataacggatcaccggattacaaagaaggtgagaatggcgatatggtgtttgtctcatttgagggagacattgtaaacggagacgcagttgaagtagaagttgagcgcggttcctttaacccatgcgcaaacccatcagacgcagagccgattatcgtagagaacagaattggcattattccagcgccagaaaatggattatggaaggcagcgcatagaaaagttggcagtgatagtaccccatatcatatgactcaagatgaaaaccctctccgcgccgccatgattgtctttctcatgatgcaggacgccaataatgcttag

SEQ ID NO: 40211 - DNA, 195 bp, Escherichia coli
atgccggaattaacctccgaagctgctctcaacattctgattggctggctgcaggacaacatcgattgtgggagcctgattatcttcgacaacgacgaagacaacaccgattcaacaatgctgttgccctggattgaacgtgcgcgtaaggacgttcgcgatcttcagcgtctgcaacagaccagtacagattag

SEQ ID NO: 40212 - DNA, 492 bp, Escherichia coli
atgaagctgtccctcactgtggaagctgatgccatcaacgtactggccctgaatgcgggccggatcgctgtcgatatcgatggtattgaactggccgacctgattaacgtggtctgtgacaacggttattcccttcgcgttgctgactcccccggaaagctggttgttgaagatccgcttccgcccgtcgcccgcgtcaactgtatccagtgcagtaccgcgcatatcacggagcaagacaatgctctgctgtttaccctttcacaccagtatgaagactttggcgaccaggaatggatttcttacactggctcgggttatctgctctacctgggggcgtggtcatttccggtcttacacctcaaacgcctcggtctgtcgaaagcctgccgtcggttagtggtgacgcttatccgtcgctacgccgctggtatagttcatctggacgcctttggcgaagtgctaccgggctttgacgttttcgactggtaa

SEQ ID NO: 40213 - DNA, 375 bp, Escherichia coli
atgagaatttatcctgtatccgcaaaacgggccgctgagattgagcggttatcgcctgtgtcaccggttgccgtctggcagcgcctcctgacgtacctgctggaccgtcactacggtctgacgcttaacgatactcagtttggcgatgacggcaccattcaggaatgcattgacgtcggtgatcccctgcttgacgccctgaacgaagtggttgaagacgacgagctggagcgtactgataaccggggaaaatcacttctgttcagatcgtcgctgctcacacccgcagatatccggaacgcccagaaagccgtgggtctggcaggcaacagcgcctccctcattatcagcggtcagtcgtcagccagaagctaa

SEQ ID NO: 40214 - DNA, 357 bp, Escherichia coli
atgccagatatccctgccacaaatgacaatatggacgcgccgcgctggggtcttcagcgcaatatcacgccctgttttggcgctcgcctggtgcaggagggcaaccggctgcattacctggctgaccgcgccagtatcaacggaaccttcagcgatgcggatttacgccatctcgaccagtcgtttccgctgctgttgaaacaactggaactgatgctggtttccggtgaactcaatccccgtcatcaacacagcgttacgctttacgcaaaagggctgacctgcgaggccgacagcctcgcttcgcacgggtacgtctatatcgcaatttatccgacaccagccacaaccgcataa

SEQ ID NO: 40215 - DNA, 645 bp, Escherichia coli
gtgagcagaattatctccaccactgtttatacgctggatgaactctccgacgcggcccgcgagaacgcccgcaactggtatcgcgaacatgcgctgaatgatgactggtatcagaacgtgtttgacgagttcaccggcatctgcaatatcctgggcgtggatattaagctgtacaggatccctctgctgtctggcggcagccgtcagcaccactgcatctggtccagcggtttttgccatcagggcagcagcgcggctttcgagggtgattatgcttaccaaccgcaggccgtataccggatcagggaacattatcctgaagacgctgaccttcaccatatcgccgatttactgcagaccatccagttgcacaacagcggcgagcttcgcgccacgatccgtcatcacggcctgcatatccatgaatcctgtatgaccgtcacggtcgaacgccacagcctctccgggcaggacatgaccacagacagtgaggaggcgataaccgaagccatccgggcgctggcccgctggttatacgactggctggaaagcgaatacggctggcagacatcccccgccattgttgacaacgacatcatcgacggtgaacacaccttcactgcatccggccagcgcttcggctga

SEQ ID NO: 40216 - DNA, 471 bp, Escherichia coli
atgaccaacaatacattgccactgttcacaccatcagaatctgttcccattgcggctcagctgcagattaccactacacaggtcaccgatgagaaccgcgtcagcttctggccgcagcacttcggcaacataccgcagtggataatccttgagccgactgtcttcgcctggatggaccgcttctgcgccgactacagcggaggtatctggaatttttatacgctcagcaacggcggcgcgtttatggctcctgaatcggagaacaatgaaccgtggtcgctgttcaacacgatgaacggcaacggcggtgaactcagtgccgaagcagccggaattgccgtctgtctgatggcatacagtcaccacgcctgccgtaccgaatgcgacgccatgacggaacactactaccgtctgagagactacgcgctcaatcaccccgaatgcagcaccattatgtacatcattgactga

SEQ ID NO: 40217 - DNA, 822 bp, Escherichia coli
atgcgactcgccagccgttttgggcggacaaaccagatccgccgcgaccgaccattaacccgcgaagaactgatgcagcatgttcccagcgttttcagcgaagacaaacacgactcccgctctgagcgctattgctacataccgacgataaccctgctggataacctgctgcgcgaagggtttcaccccttttttgcctgccagtcacgcgttcgtgaccctgaacgtcgggaacacactaaacatctgcttcgcttacgtcgggcgggccagataaatggtcagcatgtacctgaaatcattattttaaacagccacgatggggcatcgagttttcagttacttccaggaatattccgcagcgtatgtacaaacagcctcgtctgcggacagtcgtttggcgaaatcagtgttccgcatcgcggcgatattgtcgggaaagtgattgaaggtgcttacgaagtgctcagcgtctttgaccgggtggaagagaagcgagatgccatgcagtcgctgctgctacctccaccagcacaacacgcgctggcaaacgccgcactgacgtatcgctttggcgaagaacaccagccggtgactgccacacagatcctgacgccgcgacgcaatgaagatcgccaggacgacctgtggacgacctaccagaggctgcaggagaacctgctgaaaggcggcctgcccggacgtaccgcacagggtaaacgtacccatacccgcgccattaacggcatcgacggtgacgtaaagttaaaccgcgcgttatgggtgatggcggagaacatgatggatttattaagccagtag

SEQ ID NO: 40218 - DNA, 234 bp, Escherichia coli
atgccagatactggcaatccactgctgcccgatggttcgtttacccgcaggcaggctgaagctatcgtggcggcgtaccagaacgtcaccatcgaagacgaccagtccacccattttcggctggtccttcgtgaccgcgaaggacagttactctggcgggcgtggaattttgaacccgacaccggattctggtttaaccgctatctgctcagccacggcattcccaaaagataa

SEQ ID NO: 40219 - DNA, 948 bp, Escherichia coli
atgatgaaaagggtaaaactttccacctgtgcgaaatggctggcgctcggcctgcttgttgtggttaacagcagttatgctgcctcccgggtgaaaacagcggctcaggcgattcagtgtcagcctgatactcaggaaaacggctacaacgggacctgtccgtatcctgccgacctttaccgcgccgaccccgtctggaaaaaagatatggaatcggccttacagcaggcgggtatccgtaacgtactgggaccggatggcagtctgaacgggccggaagagacgctggagcccgtcaccgtcggtggcaggcaatggcttcagggctcgctgtgtgagcaggggaactgtggcgaccattatctgcgttttttatattcgccgggtacgcatcaggttctgggtttctacgttgacggtcagacacgctgggtcgggaaaccaccggcagaagaagcgaaactgctgcgcggcaatgccgacgccatcgcggagaaaacaccgttaccgtctgccctgcccgcagcacctgcagcgcctgcggacggggcaccggcagacactatctggacctttaagggcgatggcggcaaatcgttatggcaggtctgtggtggtcagaacagcagctgtaccattatcgctaacacgaagtattacgttgctgtgctgaaccgtaaatccgcaacgggttgtgctttcggtgatttttatgtcgctgcccgggataccgcatcatggcaacagtatgataccggcacctgcagcccggatgcgtatatccgcaagggcagcatcaacaacggtcagtatctgtccgtcgatatcggtatcaacggggtgctggtgaagcagttcccgattggttactggtcaatgcgcaaggaattttccggtagccgacgcccgtcgtggtcaaaggttaaggaaaaaaatcagcagcactga

SEQ ID NO: 40220 - DNA, 216 bp, Escherichia coli
atgggattctggaaggctgccggaaaactcgcggctgaagtggcaaaagacgcactcagcagcgcacgtgaagtaaaggcgatacatgaccgcctggaagacaaaagcagcgctgaactgagaaagataaccactgacgatggttttttcagcagcactaccatcacggaaaagcgcctggctcgcagcattctgcgtaaccgggacgaccgttaa

SEQ ID NO: 40221 - DNA, 147 bp, Escherichia coli
atgaaaataagacgtatcacacccggcaacccgacttccggcaaacgctgcccggactgtggctctcacgacaccatcccctgggctgatggctggatgtgccgggactgcgggtgtgaatggggcaaagacaacggctatctgtag

SEQ ID NO: 40222 - DNA, 714 bp, Escherichia coli
atgtctcaagctgagcgtcgttatgaccgcctgtctgtccggctgtcgctgattatcagccgtctgctcgcgggtgaaacgctgaatatgcgcaaactggcggcggagtttggcgtctcggaacgtaccctgcatcgtgatttccgcgagcgtctgatttatctcgatctcgaatatcaggatggctgctgccgtctgctgaccgggggccgtcaggagatccgggaggatgcagcattgcagtttgcctttcagtcaggcactggcgcgttgtttcctgatatggaccaccatctggtcagttcattgctgagtggtcagcgcgcctcaccatgccttatctggcatcagggggcatccgtaccgtcttcccgcccgggcatcttcacgcgactggtcagggctgtgtcagaacagcggagggtaaccctgctggctgacgggtgccgttgcgacagccttgctccctaccggctgattttcagcactggcgagtggtttctggtgggagaacacctcggccggatgaccgtttttgcgctgcacaccgttcactccgtgacgtttcacgcggaaaccttcacaccagacgggcatttcacccgcattctgtcacgccctgattttttacaggcgttacctcatttccggttcattggtgaagtgctgtccggcttcgtccctgaaccacatcaacccgcaacagaaggataa

SEQ ID NO: 40223 - DNA, 2787 bp, Escherichia coli
atgccaatggagaactgtaagcaaatgaacgccgtagaaattgaacaagccatcacggatcttgcagagcaaccctttgatcccatagagtttccttatgctttccttgaagcctttggtaacaaggaaacgactatcaaacgcttgcgagccggagcatcgaataagtctgatttgggcggcgttcttcagaccaataacattcacattttggctagtgaagaagggcaagtaacacaaatgcttgcttcactcaaggccagcccggcaacaggcaaggccaaggccaaattcatcctcgccacagatggaaaagacttcgaagctgaagacctcatcagcggccagactgtcgcttgtgcctttaaagactttcccgatcacttcggtttctttttgccactggcaggtatcagcactgttcggcagatcagcgaagacgcctttgacatccgggctacaagccgcctgaaccgcctttacgttgaactgctgaaagacaaccctgaatggggtactgcggagcgtcgtcatgacatgaataagttcatggcgcgtctaatattctgtttttttgctgaagatactgacatattcataggcaaggggcgctttactgacaccattgcacagatgagtgagcgcgatgcttctaatatgcacgaggtcatcggcacgctctttcgtgctatgaacactccagactatgagcgtgccgcagtaggtattccgcgctgggctgcagaatttccatatgttaacggcgctttgttctcaggtacggaagaggtgccgcgcttcagccgtatcgcgcgctcctacctgcttcacgttggcaatctggactggaccagaataaatccggacatattcggctcgatgattcaagcaattgccgaagatgaagagcgcggtgaattagggatgcactacactagtgttcccaacatcctgaaggtactgaacccactattcctcgacgaactgcgttcaaagctggaagatgcgggcgaaaatccacgcgctttgctcaatttgcgcaagcgtatcgcccgtatacgcatttttgatccagcctgtggttcgggcaactttttggtcattgcttataaagaaatgcgtgccattgaagctgagattaactggaggcgaggcgaacctgatcgcccatctgatattccggtcacaaattttcgtggcattgagctgcgcgacttcccggcagagctcgcccgccttgcgttgattatcgcagaataccagtgtgatgtactctatcgtgggcagaagttggccttggccgaattcttgccactacgcagcgagaattggatcacttgtggaaatgcgctgcggatcgattggtatagcttaatggatgtgagtggctcaggagttaaggtggtttcagacgatatcctgcaaactccacttgatcaagctgaaatcgagtttgaacatgaaggcagcgaaacatatatctgtggaaaccctccttataaaggaaccaaaaatcaatccgctgaacagaaggcagatctattgtttgtcttttctaaatatcctggaactttcaaagtgctcgactacgtgagcgcatggttcgtgaaaactgcggagtacctctcccatgtaaatggagcagccgctttcgtcagtacaaactcaatttgtcaagggaaccaagttcctgtgctgtggccactgataatgggactaggtgtcaggatctcgttcgcgtacacatctttcaaatggtctaaccttgcaacccacaatgctggtgtaacagtcgttgtaattgggttgacgcgtagttttggaacgaagtgtagattatttgagcatcaaggtgagggaatagtcgagagagaggtagataatatcaatgcctacttggttccaaatgcagacatctttataaacaagaaatctgatcctcctcctggctgcgccccgatggtacttggtaatcagccatacgaaggcggtcatctaattttcgatagtaaggggattgaagccctttgtatcccaaaggatgttcgagagacgatcacgcgcaaaatcttaggttcgagcgaggtaattaacggtagcgagagatactgtctctggattgagaatgagaattttgcgctggccacatcgtttccagcagtctcagcgcagatcaataaagtcaaagaatggcgcttaaagagcgagcggcaggcaacgcgttctatggccactcgaccgcatcagttttgtgagatgaagtgtggaaatcagtcggtaataattgttccaatccggagttctgagaatcgggaataccttcccgtggctctattcgatgagcggactacagtaaataaccttgcttattcgatctatgatggatctttgtttaatttggcactaatagcatcaagattgcatctaatctggattagcaccgtctgtggaaagctagaaacacgatttagttactcaaacaaaatgggttggaacacttttccggtgccaatgcttacagataagaataaggaagacttaacacgctgtgccgaggacattttgctggcgcgagaacatcatttcccagcaacaattgcagagctgtatgaccccgaaaatatgcccgctgatctacgtgccgcgcatgctcgcaacgacgaagtgcttgaacgcatctacatcggccgtcgctttaagaatgataccgagaggcttgagaagctgttcgacctctatatcaagacggccacctcggctgtaccggctaagggaaaaaagagttaa

SEQ ID NO: 40224 - DNA, 2046 bp, Escherichia coli
atgagcgtcaagatcaattcagtaccatccgtttccgttacttatgcacgcaacggagcatcgaccaaggctaatgcccttgggatgcgccctatgcaagaacgggcctatgagaagcgcggagaacaatatcttctcataaagtcgccgcccgcctctggcaagagtcgtgcgctgatgttcgtcgcactcgataaactcgcaaaccaggggatcaaacaggcaatcattgtcgtgccggaaaaatctattggcgcgagcttcaacgatgaaccactatcgcagtttggattctgggctgattggcatgtcgaacctaagtggaacctatgcaacgcgcccggtaacgacaacggtggcaaggtaagagctttcggctcttttcttgaaagtagcgacaaggtgcttgtttgcacacacgcaacctttcgcttcgcggtcgatgcctacggcgtagaagcgtttgacgatcgcctgatcgccgtcgatgaattccaccatgtgtcagctaacccggataacaagcttggtcagcatctggggcagttcatcgcgcgtgacaagacacacatcgttgccatgaccggctcctacttccggggtgatgcggaggccgttttggctcctcaggatgagtccaggttcgataccgtcacctatacctactacgaacaactcaacggttacgaatacctcaagcaacttgacatcggctacttcttctacagtggctcctacgtcgatgacatccttaatgtcctcgatcctgacaagaagaccattatccatatacccaacgtcaattcgcgcgagagcacgaaggataaaattaaggaagtggaacatattcttggcgcgcttggcgattggcaaggtgcggatcctgcgacaggtttccagttagtcaaatgccgcgatggccgaatgttgcgtatcgctgatctggtggacccaactagccaaggcaagattcaagaaagccttcgagctgtagaaatgaagacagaccgtgattatgtggacatcattattgcacttggtatggcgaaggaaggtttcgactggatctggtgcgaacatgcgctgactgtgggctaccgtgctagcctgactgagatcgtgcagattatcggtcgcgccactcgtgacgctccgggtaaaacccgcgcgagatttactaacttgatcgccgagccggacgctgtagagggcgcagttactgaggcagtcaacgataccttgaaagctatcgcggcgagcttgttgatggagcaggtactggctccgcgcttcgagtttaagcccaagaatccagaaagcggcccgactccaggctttgattatggtgatggaggatatgacccggatagctgcaattttggtgttaatgagcagacagggacgtatcaaatcgagattaagggacttgccgagcccaagagcaaagaagcggcacgcatctgccaggaagatttaaacgaagtgatcgcggcctttgtgcaggataagcccgccatcgaacgaggtctgttcgatgaagagctgatccctgaagagttaacacaggttcgtatgggtaagatcatcaaagaaaagtatcctgaacttgatgctgaagatcaggaggctgtacgtcagcatgctatcgccgcccttaacctcacgcagcaggccaagcgtattgtcaacggcgagaacgatgggacgctcaatactgcccttattgacggagtgcgtcgctttgcgatggacgtacgcgatttagacatagaccttatcgaccgcatcaatccctttggtgaagcctacgccatacttgctaagacaatgagcgaagatagcttgaagcaggtcgcggcggccatctcggccaagcgtacctcgatcacgcctgaagatgccaaagtgatcgccaagcgtgctgctgaatttaaacgtgaacgtgggcgactcccatcgttaacttcggcggatgcctgggaaaagcaccttgcagaaggtgcagccgcgtttatgcgttttagggcggagggacgttatgagtaa

SEQ ID NO: 40225 - DNA, 1179 bp, Escherichia coli
atgagtaattctgatttagacgatttggcggcagaacttgctgaatttgcaccaccggagaagaaaaaaggacgtccagccagcgaggaacgcatcatcgcaggttttgaggaaatccagcgcttcgctgaccaacatggacgtgcgccgcaacacggcgaagagcgtgagatctttgagcgcctctatgcagtgcggctcgaccggctacgcagtctcccagactgccgtgccttgctagagccgctggatcatcagggcttgttggccggagggggggatggagcggagtcagcggacgaatttatcgatatcgataatttggctgccgaactggcggatgttaccagcgaggacgatatcacagtcttgcgtcatgttcgtgctagcgccgaaaagcgtgctgtacaagggatcgcggatcgcaagccgtgcgaggattttgatacattcaaaccgctatttgaacaggtgcgcagtgatctaagttcagggttaagagtgacccgaccttttggacagtatgcaacgattgaagtgggccattggttcatcctggatggtcaaacggcttatgtggctgaggaaggtgaagagttcgattcgccacaggggaagaaagatgctcggctgcgtgtcatttactcgaatggtacggaaagcaacctacttcggctgtcactggttcgtgctttgtataaagacgaaacagcacgccgaattaccgatccagacatggggcctttattcagcgatgctctagaagagagcgatctagaaagtggcaccatttatgtgttgcgttcgctatctgataacccttatgtagctgaacatcgtgatgtcattcacaagattggagttactggcggcaaagttgaggcgcgtattgccaatgcggaacacgattccacctatctgttagcgaaggtcgaggtggtagcttcatacaagcttgcaggcatcaaccgcacccggatggaaaacctgtttcacaggttgtttgcacccgcaaggcttaacattaccattaacgaccgtttcggccatccagtacagcccgaggaatggtttctcgttccgttattcgttatcgatgaggctgttgcacgtattaaggatggtagcatcattgggtatgtttatgaccccatgtctgcgaaactggtgaaggcatag

SEQ ID NO: 40226 - DNA, 393 bp, Escherichia coli
atgcgcaacgtgctgagccgcgtcagccgggcgaaccagtcggtggtccacgccgcgctgcagcaggtgttcgtgcagaccgacgtgaaaagcgcccatgccacctggcgcgaggttgccagccagctggaaaagagcaacctggcggtcacggagatgatggacgaagcggaagaggacgtgctggcgtacttcggcttcccgaaagcgcaccgggtgaaaatccactcgaccaacacgctggagcgtctgaataaagaagtgaagcgccgtgccgacgtggtgggtatcttccccaacgaagagagcatcatgcggcttctgggtgcggtactgacggagcagaacgaagaatggctgctgcagagccgcagcacagcacgtcggagatag

SEQ ID NO: 40227 - DNA, 579 bp, Escherichia coli
atgacattcagcaacaccctgatgcaacttggcggtgaggattttctgcacgagctcaccgagtttatgctcaaccgcatcatggaagctgacatcactcagcgcatcaacgcagagcctcacgagcgcagcgatgaacgcgagacctaccgcaacggctaccgtgaccgtcagtacaacacccggctcggcaccctggacctgcgaatcccgaagctgcgtgaaggcaccgacttcccgcccttcctcgaggcccgcaggctgtctgagaaggcgctcaacgcggctatccaggaggcgtggataaacggagtctccacccgcaaggttgacgcgctggtccagtcgatggggatgaccggcatctcccgcagccaggtgtcgtccatctgccgcggtatcgatgagcgcgtacaggcgttcctgcagaggccgctggaaggggaatggtcctatctgtggctggatgcgacctatgtgaaggtgcgcaagaactgccgggtggtcagcgtggcggtaataatcgcctgcgcggtcagctcggaaatgtaccgtcggcaactcggcatcgcgcaataa

SEQ ID NO: 40228 - DNA, 441 bp, Escherichia coli
atgcccctctttaacgcctgccagcataatttaagaatggataccgtgggtggaattaacaatacctgctcaggccaatgccatgtaaccgcctcactgaaaaagccagatcatctaaccaggtacagaccaacatcgcaaaaattaccatgtagcacgaactgctgtcatatttctgttcaggtatgtcgctatttcgcgggttttcttcacgccataatgcgtttcaaggtagcgaacatcttcgattgtccatggtgtgcgcgctcttccgggggtattttccatttccatgttttatctcagccattatggctgcctctcctgattgcctgtgtgttccatctgataacggttaatcaactgattcagcgccatttcagcctgtttttgctgctgttcactgtcgttttgttgacgagcctcaccataacgccgtaa

SEQ ID NO: 40229 - DNA, 204 bp, Escherichia coli
atgctgccatcaggcagtgtgattgccggcagggattttttcttcccggggttcgggtttgaattttcccaggaagttgtacatcggccgcatgcagggatgcggatagccgtcccgcataaataccacccgggtttcctcaacactggtcacggtgacaagcgcaccatgatcatctctgtatcgctgattgattttcggtaa

SEQ ID NO: 40230 - DNA, 177 bp, Escherichia coli
atgctggtgatatcgataatgttctgtcatggggagcgcagcccgtccccgtacagcatgaactggcaggcgtgttttaataatccggaacttgcggataaaacctgcaccgagctgtttcatctggtggatatgacggtgacggatggcgatgaaatcatgcagtatcgccgttaa

SEQ ID NO: 40231 - DNA, 456 bp, Escherichia coli; identical to SEQ ID NO: 20158

SEQ ID NO: 40232 - DNA, 474 bp, Escherichia coli
gtgcgtacagaactggagttttacgcccgtggaaaagctgacacaacatacaacctctataaggaccacgcgggacatagtgacctgaagaatgaggtgtcagtcaacagcctgatgctgaatgcgtactatgatttcagaaacgacagtgcatttacgccatgggtgtctgccggaattggttacgccagaattcatcaggaatcaacaggtagcggtagttgggattatggctacggtgagcgagtgcgttattctatatcacgctcaggctctgctgacaacttcgcatggagcattggggccggtgttcgctatgacgtaaccccggatatcgctcttgacctcagctatcgctatctggatgctggtaaatcctccctgtattacaaggatacagaaggggataaatataaatcagaggttgatgttaaaagtcatgacatcctgcttggtgtgacttataacttctga

SEQ ID NO: 40233 - DNA, 336 bp, Escherichia coli
atgaatataaaaaaattatttgcgttacctgatgaatctgaactgcagcagaaggacgccgaggagctgttcgactggctcattgaggagtgccgcggagaatgcccgccccgtgtcaggaaaaattatattctccagtgtggcccgggccggttcagaaacaggaaaaaactgaacgcattgctgaacattcttgaatctcagttcaggctttctgtcgtgccggaaggaaaaaccatgtatgttctgcttccccagatagccagtttaaagttgtctgatgtctctggtatttttacctcgggttatcactacaataagctgagagcgaagtaa

SEQ ID NO: 40234 - DNA, 417 bp, Escherichia coli; identical to SEQ ID NO: 35644

SEQ ID NO: 40235 - DNA, 783 bp, Escherichia coli; identical to SEQ ID NO: 35658

SEQ ID NO: 40236 - DNA, 240 bp, Escherichia coli; identical to SEQ ID NO: 35659

SEQ ID NO: 40237 - DNA, 465 bp, Escherichia coli; identical to SEQ ID NO: 35660

SEQ ID NO: 40238 - DNA, 612 bp, Escherichia coli
atgaaatggcagcttttgtgcgatgtgcatggttttagccgggaacactacaatcagctgaagaagtttagcccgggggtattacgtgaaattattgctgaaatagcctgttgccatccatcaaccagtgtattgctcagaaataaatggctgacaccgccggaggatattctgggacaggttatccgtgaatatgaacgaagaatacgggactgtccgtccttaaggaacgagaatgaagcggagtcctggttaaacgaacttgtttttgctgtgatttcccccctgtcccttgttactcgtggagaatctgaacaggctgaatcttttcttttacagcttattactgaacaggagcgtatttgggaacttatctcaacgaatgatggttattcatggacgtgcgctctttatgatatgttattgcaccttgttttgcgaaattcggaaggtcaggctgaatatctgagacaacacataaccaaaatacttaatgagtctgattcaggagtgataacagaagagattaagtatcggatccgatatattcaggatgataaacaaaaggaagttctgattgagctggtaaatgattttacatcaaaaagataa

SEQ ID NO: 40239 - DNA, 744 bp, Escherichia coli
atgcgggatctaatcagagcccgtgcagcagctaaacgagacagcagagttgcccgacagcgaattctgagcatgctattgcgaacagacaaacattatgctggaaagcactggacaggaaaacaccgaacctggttagctaatcaatcatttagtcagccatctcagcagattgcttttcaacactattgtcaaagtctggagcagattgaagatcgcatacttcaactcgaccaggaaatatctcgcctgttacctgagtggtctctgtgcaatctggtctgccagttgcaggctcttaaaggtgttggtcagctaatcgcaataaccctggttgctgaactgggtgatttttcgcgattttccaatcccaaacagctcatggcttttttgggactggtgcctggtgaatattccagtggaaacagtattcgtcccagaggaataacaaaagttggaaacagcgaactgagacgtctgctttacgaagccgcctggtcttatcgtacacctgcaaaagttggtgcatggcttatatattaccgaccggattctgtaacacaatattccaaagatattgcatggaaagctcaacaacgattgtgttctcgttaccgaagtctgacagcaaaagggaaaaaatcacaagtagccattacggcggtggctcgtgagttgactggatttatgtgggatattgcacttgctgcccaatcatcattcagtcagcagaagcaaaattaa

SEQ ID NO: 40240 - DNA, 300 bp, Escherichia coli
atggctctgctctggaaccaggccgcaggaagcatcaatctggagtttatcagctactggaattccggtgtattggcagcccctgataatcacctgacccacgaagagcgctctgctttgcagaaactctggggcggtttggagacaggagatgtaacgattataggacgttctgatgaagtccatgattttacctccgccttaattaactgttttctttctgaagaagaaattgtctggtggcaatcaggtggcattttcccggatccttggcccgctaatatatcccggctgaactga

SEQ ID NO: 40241 - DNA, 255 bp, Escherichia coli
atgctggtgccattccgtagcgagggcatggaacgtattggtggcagagattttctgagtgagtttttcctttcgcttcttttcgcccgggtcaccaccttcggagataatttttcgggcatcgtcgcgtttgattctggcttcagcaagggagacgtcgggatagacgccgagggccagttttttctcttttcctgctatccggtatttgagccgccagtagcgggcacccgtggtttttaccagcagatataa

SEQ ID NO: 40242 - DNA, 300 bp, Escherichia coli
atggctctgctctggaaccaggccgcaggaagcatcaatctggagtttatcagctactggaattccggtgtattggcagcccctgataatcacctgacccacgaagagcgctctgctttgcagaaactctggggcggtttggagacaggagatgtaacgattataggacgttctgatgaagtccatgattttacctccgccttaattaactgttttctttctgaagaagaaattgtctggtggcaatcaggtggcgttttcccggatccctggcccgctaatatatcccggctgaactga

SEQ ID NO: 40243 - DNA, 408 bp, Escherichia coli
atggcaactcttaaatcaataatggcaataaccaccttaataatttcactcaatgcatacgcaaacacgaatgacattaaaactcttcaaaaacaactgaaaccatggcaaccactggaaatcacaacaaaagatagctctcttaccgttgttctccctgctaaaaaaatcacatcagaagcctataatcatttaattatgtccggtgtatgcaccccactctggacacatgacgctccttcttcatttttaaaaaatgtaagtgaaatcaatatagttaaccaatataagtctattggatatacctttgaagacccattgaccacatgcaatgaaatcgctccgttaatggaaaaacctgcacaaacagtggtgttatccaaaactcatacctacacaggtaagtaa

SEQ ID NO: 40244 - DNA, 177 bp, Escherichia coli; identical to SEQ ID NO: 26476

SEQ ID NO: 40245 - DNA, 1005 bp, Escherichia coli
  misc_feature (970)..(979): n is a, c, g, or t
atgtggttaagaggtcctggtaaagaagcaaaagctatccaacaatattataaggataagtttagttgcccggcatctaatacagaattagttatccagaaacaagagcaaagtaatctgaaagggacgatatcagattcattaatgaactgggagtttatacgcactacacagattatcaatagaattgtctctgttgataaccctgattttggtctggctgtaaaatattatttggatctaggatatttagatgcagcgttctcgttgttagatgattttgagagaaaacacggatgttgtataaaaaattatcctgggaatcatattgaaaactggagctcagtaatatattgctcacgtcttaaagacagagttagaataaattctaaattaaacagcacaacacctttttttactcaaatgctcgtgtgttgtgtgagtaatgagttggatgaggtatttgtatcattaaaaaaactctggaatcatattataagcaaagatatcgatgccgaatcgaatatgattcttagctatgccgttctgaaacttattgaccactgtaaacttgatgatgaacttggtataaaaatatctttacatttacactcggcaaaaaacatcaatatttatagacgtcgacatttgcttaaagaactaattgtttatttttcatccattaataatacaagctttttttcattacctaaagcatttactaaccatttgcataaaatatcaaatacacttcaatcttatagtaaccgagaagttggtgcaaaatatcttaataaaatatttatagagaatattagaaccaacaacgacttctcaataaaaagatatgcaagatgtccaaagcgtacagcaatttgtgtctctggtatgatgaaaattgatgattcagccatgcgctcattatatcaaaaaatcgcagaaccattaaatgctgatatatttttgcatnnnnnnnnnntatatatttttgcatacatgggataa

SEQ ID NO: 40246 - DNA, 858 bp, Escherichia coli
  misc_feature (21)..(30): n is a, c, g, or t
atgctgatatatttttgcatnnnnnnnnnntatatatttttgcatacatgggataagatccaagtttggagcggagaggctcgtaagtctggattttggcaacggcaattcaagcttcctgataataaaatacctcatccattaagagacattgataaatttaaagagaaattccctcgtacaggtaatttgcttctaagtacaattactgatgatattaatgttcacttttccgctacacaccctttaataaaaatgagtgtcattgaaaatgaagatgtcgctcttcataattggttaaataataaatcatttatgagcagggggaactataatcagtttaaaatgtattatggcattaaacgagtatttgaactattaaaagaatatgaagaaaataatggctttaaatatgatgtcattataagaactcgcccagatatgtttattacgaaagagttcgatatagaacgacttaaccaagctaaagaaaatagcattgtcgttaattgtggaagtgtgggacccaatgatggtattttttatgcgctcaggcaggattatgaaaagatagtatcaatatgggatgagatgctacagtcagaaagtttgagtcctttcttaaattttgaaaagtatgattcgcatgttcttttgtatgcatggctatgccataaaaatatagagatgataaatatagatgatatattttatgacttggcaatcatatcaacttcggctaaaatccctgggctcagacaagcccttgaagaggatcttattaattttgataaaaacttaaaggagcagaagcaatatactgatttattcaattttttattgagtcgctctaagtga

SEQ ID NO: 40247 - DNA, 723 bp, Escherichia coli
atggacgatattaatatcagcctcgacgaacttaacactattgatttatcccccttaatccagagtaagctgccagttacctgctttgatatcacaaagtatctttctagcctaggtgatggaagagcggagataagactgctaacccatatttgcggttttcactttcgtcccgaaaatccacaggtaccatttggtccgtgctttcaaagcagccaaggtagatctgcaattccggatgacattaacgggttgtcgctggaggtactttctcaattttgcccgacgatagagctacccgaacttcaagctcgtattgctgatacactttgggttcgtaaaattggtggaatccgttttcctttgctggcagtccgtgcttattatgcgtccagtatagctattatgacatcgcaagggacgtgggttagtgctttagaacgcctagagcgtgcgcttaggctgtgttgtttttttcgaaagaatactgatttcagggatgaatttgatcagctttcggcacatctactagcagagtatgaacgtaccagagaacaaggcgattcaccttatccgctgcgactcctgcaactcgatatcgactgtaaagtgagtgagccatcttttattgcccaggaactcctgtttctgacaaaaaactatctggctcaaaaattattttcatttgccgtcgatgcctgtaaaactagactggccccctga

SEQ ID NO: 40248 - DNA, 534 bp, Escherichia coli; identical to SEQ ID NO: 6128

SEQ ID NO: 40249 - DNA, 369 bp, Escherichia coli; identical to SEQ ID NO: 15741

SEQ ID NO: 40250 - DNA, 324 bp, Escherichia coli; identical to SEQ ID NO: 23068

SEQ ID NO: 40251 - DNA, 312 bp, Escherichia coli
atgctggggcgtcgtccggacagcatactcaaagccggtcagcatcgttatcagcgggcatttatccagcgattaaataatgggcgctggcatgttatgcaacgtcttcctcaggccagatatgaggagggcaatgacgacaagggaaggaaaaagcgtaatcgccttcccattcaggtggtgaaaatcccgatggcggccccactgaaacaggcatttgatgagaatgttgaccgtatccggcgtgaacgcctgcctaaagaactggcatacgcgctgaaacaacaactgaggattgcgataaaacgatga

SEQ ID NO: 40252 - DNA, 279 bp, Escherichia coli; identical to SEQ ID NO: 20986

SEQ ID NO: 40253 - DNA, 1092 bp, Escherichia coli
ttggccaacgatattattacccagcttcaggcgcgtaatgagacgttgacgcaggcaatagcccgttacggctcactcaacgccagaacattgttaactctctctactcagcaggcgacagttatcaaactaacgcagcagcttgccgattccgctctccgcctggaggaaaatagccgcagccgcgctaatctgatggagaaaacccaaacatttgccgggcaatttagcaaagtattcaatgttgaagcccccgactggaagttgccgtatgagtttcaggacaacatggtcaatatggcgaccaaaggtgggatgaatgctacaacccgcgagacgctcagccttaatctgcgcgactggagcatggattttaaccagcagcagaccaccttacagaacgcagcccaaacgctgatcgaaggcaatttgtcgtcgatgcaggatctcaaccgttatatgccggagatcgccaaagctgccaccgccacgcgcgaaagtgctgaaacgtgggcgaatgccgcgctcgcgactcatgatcgactgaatattgccccggaaaatttccacgccgcgcaaaacatgatgtacggcattagcaaaagcggtgggcctgccattgctgaacaaacgcagtggatagagaaatttgcaggtaaaaccggcgctcagggtctggaaggtatggctgaactgactgccgccatgcagatcgcaatgaaaaatggggccagcgccagtgcggcggcggagaattttgaccactttctgcaaaccaccttttcgaaaaaaaccgatagctggttcgccagccagggcgtcgatctgcaaggctctctgcttgaacatcagcaaaacggtatgggtgttagcgaagccatgactcatatcgtacaaatgcagcttgagaagatgaacccggcgatcctcgacaccttcaaacgtactagcagattgaagatttatctgctcgcagcaatgcgctgcaatcgatggtgtcgcaatttaatctgggcgaaatgttcggcgatgtgcaaacggtggaattcctggcacctatgctggcgaatatggaggaatatcgccagttaa

SEQ ID NO: 40254 - DNA, 402 bp, Escherichia coli
  misc_feature (354)..(363): n is a, c, g, or t
atgaaactgacaacacatcatctacgggcgggggccgcattattgctggcaggaattctgctggcaggttgcgaccagagtagcagcgatgcaaaacacattaaagttggcgttataaatggcgcagaacaagatgtcgcggaagtcgctaaaaaggtggcaaaagagaaatatggcctcgatgttgaactggtaggatttagcggttcgttgctaccgaacgatgcgacaaatcatggcgagcttgatgcgaatgtcttccagcatcggccctttcttgaacaagataatcaggcgcatggttataaactggtagcggtgggaaatacgtttgtcttccctatggcgggttannnnnnnnnncgggttattccaaaaaaatcaaaaccgtggcgcaaataa

SEQ ID NO: 40255 - DNA, 231 bp, Escherichia coli
atgactagtctaaaaactagtattaagactatcacttatttaagtgatattggttgtctggagattcagggggccagtctaaaaggacagagaatgaataacaccaaaaaatcactaaaagtgctctttattggggaatcctggcatattcatatgattcattcaaaaggatatgacagttttacctcaagtaaatatgaagaaggtgcacctggttactccagtgtctga

SEQ ID NO: 40256 - DNA, 351 bp, Escherichia coli
gtgacaacccgctacacaggaatgaatccggacgggacgggaaacctgaacgatacggagcacctgaaacagtcagtcagggacatcctgaccaccccgctggccagccgggttatgcgacgggaatatggcagccttgtacctgatttgattgacgaacccatgaataacaccacgcgtctgcaatgcatgagtgctgccgtgattgcgctgacacgatgggaaccccgcattgccctggacgccatcgacgttgtctggaaggcaggaggccgcgccggggtgacgctgtcgggcactgtcatgcagaccatgcagaatgttgagttaaccatcacgctgagggagtaa

SEQ ID NO: 40257 - DNA, 582 bp, Escherichia coli
gtgagcgcagaactcatgcgactgctgagcaatatcatccgcaccgggatcatctctgaagttgatgagaagtcctggcgcgtgcgcgttcgcagcggcgaactggaaacaggctggctgcgctggaacaccacgcgcgcgggagccttcaatgtgtggctgccgccatcaccaggcgaacaggtagtaattgcctgcattggcggcaacccggaaaccgccatgataattggcagcctgtggagtgatgccagtccggcccccggcaaaagcctgaaagaaatcgtgatcagcgcgccggacggcgcggtgttccgctacgacgcggacgcaggcgcactgagcgccagcggcatgaaaacggccactttacaggcatccgtcagcgtgaaactggacacgcccgtcgtggaatgcacaaaccttctgagaacggagacgcttgacgtcacaaaagggggaaagatgagcggcaatatcacgcacagcggcggcaatttcacctcaaacggtatcacagtgcatacgcataaacacggtggcgttaaaggtggcagcgattcgacaggaggcccgcagtga

SEQ ID NO: 40258 - DNA, 645 bp, Escherichia coli
gtgaaagcgatggataaggcattcacccgcgtggatgaaacctttgaggccatccgcgacagcctgaatcagcaggccatcaataacatcgccagaaagctggcacaggatttacgccgcgcccagcaggcgcgtatccggtcacagaaagcgccggacgggaccgcgtggacaccacgcagacgccgcgtaacccggatacaggaacgcattcgctttatctggaataacgaagcacgcacgctgaaaaactggcatcacgacacggggaaatacgggcgaaccatcaccgggtgggatgaggataaaaacaatatccgcacgttttaccgggatgacatcgaccgttttctggaaatacgcacccggcgcatcaaccaggacagcacaaagcgcgtccccatgttcgtaaaactgcgcaccgcccgctacctgaaagcccgtgcagatgcctccggtgtgacggtaggttacagcggcgtggccgcacgtattgcacgcgttcatcagttcggtgagcgcgatcaggttgcgccgggcattttcaccgattacccggtacgtgagctgttgggtatcagccaggcagatgagcgcctgatttataacacggtgctgggccggattgcggaggctgtacggtga

SEQ ID NO: 40259 - DNA, 468 bp, Escherichia coli
atgtttaagacaaacagtctgcgagagtccatgcttcatgggtgtcggtggtgccaggctaatcccgagaaattcaccattttcgtggagagcggcaacattgaaacgaccggggaaacgccctcgtttgtttaccgctatcagatggtgatgtttgtcatggattacgccggagagctggacgacctcacgctgccgctgctggcgtggttatccgaaaatcagccacagttgttgctcaaccctgagcgtaatcaggacatcaaattctccgccgttatcaatgacgatgacagcgccgatctcctgtttacgctccccctgcgggaacgcgttcgcatcacgcgcaacagtcagggcacaccgcaggcagaacacctgccggagccaaaaccccgcctgccatcttccgaaggcgactggtcgcatgtattccaggatgtgacgtggggtgaaagcgatggataa

SEQ ID NO: 40260 - DNA, 189 bp, Escherichia coli
gtgttcaccgccggcagtgccacggttactccgaaactgaatggactggttggcccggcattccaggtcataaaagacagtctgacactggggctgaatgcactgacgctgacggatattaccaaaaatgcaacgtatggcgtcgatatcggcagcctggtgctggaaatcaataatcccgcagcataa

SEQ ID NO: 40261 - DNA, 279 bp, Escherichia coli; identical to SEQ ID NO: 31935

SEQ ID NO: 40262 - DNA, 375 bp, Escherichia coli
atggttttacagcgtgctgctggcactcaccacattgcggatgcagtcgcacagtctgctggtggggtgtttgtatcgcttcctgaaattgaggaagtagagaacgccgatatcaaccaacgcctgctggaggtcattgaacagatcggcagttattcaaaacagattcgttcagcaattgaagacggggtggtggaaccacacgagcaggcagcaattaacgacgaactgtacctgtcaatttcgaagctgcaggagcatgcagcactggtctacaaaatcttttgcatttcagaaagtaatgacgcccgcgagtgtgcagctccgggcgtcgtggcgtcgattgcttctggttgtggagaaactaacgcatga

SEQ ID NO: 40263 - DNA, 1167 bp, Escherichia coli
atggcaaacaatgtcagtcatatgtccgcgattttatatatagacaatcatactttgtcagtaaggctacgaataaagcagtcagtgtatggacaattaaattatgttgtgtccgtttacgacccgaacgataccaacgttgccgtcagagacacccacaggacagcacggggctttctttcgcttgataagttcatcagttcaggtcccgatgctcagacctgggctgatagatatgttcgcaactgtgcaattgctattctgcccctattacctgtgggagttccaggggctattttcgcgggtattgcatcacgaatgccatttgcccctatacatccatcggcaatgttgttaataatggctacaggccagactcaacagcttattacattattcaaacagttgcccatactccctgaaaaagaaatcattgaaataataactgcgcagaatagcgttggtacacctgctttatttttggctatgatgaacggacatactgacaacgtgaaaatatttatgcaagaaattcagtcactggtagataatcacatcattcatgaagataatctggttaaattactgcaaactaaaagtgctaacgaaacacctggactttatatctccatgttgtatggattcgatgaaataatcgatatctttctgaatgcattaaccactccaatagcacaagagcttttaaacaaaaaactggtgatgagtattttagccatgaaaatacatgatggtgagccaggattatacgccgcaatggaaaataatcaccctttgtgtgtcacacggttcctctctaaaattaatggcatcgcctttaaatacaagttgagcaaagctaacatcatggatttattaaaaggagctacagcacagggaacccctgcattatacatcgccatgagcaagggtaatgaagacgtcgtgttatcttatatatcgacgctgggtgcttttgcaaaaaaacattcttttagtcaacatcagttatttacactattggccgctaaaaatcatgacaacatgtcagctgttcatatagccattcatcataagcattataaaactgtagaaacatattatgctgctattaatgcaatcagccaaagcctgagttttagtgctgatgaaataaagacgtatttataa

SEQ ID NO: 40264 - DNA, 1107 bp, Escherichia coli
atgaataacgaacccttacgtcccgaccccgatcgtctgctggaacaaactgccgcgccgcatcgggggaagctgaaagttttcttcggtgcctgtgcaggcgtcgggaagacctgggcgatgctggcagaagcccagcgactgcgggcgcaagggctggatattgtggttggcgtggtagaaacccacgggcgaaaagataccgccgccatgctggaagggctggctgttctgccgttaaaacgccaggcgtaccgtgggcggcatatcagcgagtttgatctcgatgccgccctcgcccgccgcccggcgctgatcttaatggacgaactggcgcacagtaatgcgccaggttcccgtcatcccaaacgctggcaggatatcgaagaactgctggaagctggcattgatgttttcactaccgtcaacgttcagcatctggaaagtctgaatgatgtggtcagcggcgtcaccggaattcaggtacgggaaaccgtgcccgatccttttttcgatgccgccgacgacgtggtgctggtggacttgcccccggacgatctgcgccagcggctgaaagaaggcaaagtctatattgccgggcaggcggagcgcgccattgaacattttttccgcaaaggtaatctgatcgccctgcgcgaactggcactgcgccgtactgccgatcgcgttgatgagcaaatgcgcgcctggcgggggcatcctggcgaagagaaagtgtggcacacgcgcgacgcgatccttttatgcatcggccataacaccggcagcgaaaaactggtccgcgcagcggcgcggctggcgtcacggctgggtagcgtctggcacgcggtgtatgttgaaacccctgccctgcaccgcttaccggaaaaaaaacgtcgggcaattctcagcgccttacgtctggcgcaggaactgggcgcggagacggcaacactttctgatccagcggaagagaaagcggtagtgcgttatgcccgtgaacataatctcggcaagattattctcggtcgcccggcctcgcgccgctggtggcgtcgggaaacgtttgctgaccgactggcgcgcatcgcccccgatctcgattag

SEQ ID NO: 40265 - DNA, 669 bp, Escherichia coli
gtgccgacttgtgcaacaccggtttatctggaaacggcacgtaacccgtatggctttatcggtggcattgatgcgcactgttttgaagaaagttacctgcgtgagctgatcgcggaagtcgcaccgcagcgggcaaaagaggctcgtcctttccgcctcgctgtgattcagttaggcacctacgacggtacgatttataacgcccgccaagtggtggataaaattggtcatctgtgtgactacatcctgtttgactcagcatgggtcggctatgaacagtttattccgatgatggcggactgttcgccgctgttgctggatcttaatgagaacgatccgggtattctggttacgcaatctgtgcataaacaacaggctggtttttctcagacttcacaaattcataaaaaagacagccacatcaaagggcaacagcgttatgtaccgcacaaacgcatgaacaacgcctttatgatgcacgcctccaccagcccgttctatccgctgtttgccgcactggatatcaacgccaaaatgcatgaaggtgtcagcggtcgtaatatgtggatggattgtgtggtaaatggcattaatgcccgcaaactgatcctcgataactgtcagcatattcgtccgttcgtacctgaactggtggatggtaaaccctag

SEQ ID NO: 40266 - DNA, 324 bp, Escherichia coli
atgccagttagccgtaatctctgcattttcttaaacgttggatttggagaacggttactggaggctgatgggtactttgaattaccgggaggattgctgctgcaatgggggcacggctcggttcaggcgaccaatgctacggtaagctttaaaaaaccgtttaatgtcaccccatttatcgttcttccgcataaaatcacagctgaccatcggtatgtaacatctgttaattacacgcagaccgggtttagtctctatggctggagtggaaacggtacggcaaacaatattgacagctacacctatcttgcgctggggatataa

SEQ ID NO: 40267 - DNA, 1122 bp, Escherichia coli
atgattgctgattcagaaatactttatgttccgctagatgatttggaacttgacacagaaaacccaagacttcctgaaggcgtgtctcgtgaccaattgggaatgattaactacatagcaacctcaacatctatcgaagacctaatgagtgctattgcggaaaatggttttttccctggagaaccattgattgtcattcctgatagtggagcgccggggaagtacattgtagttgaaggaaaccgtcgcctatccgcggtcaaattattacgcgatccgacactatgtgaaaatccaagtgctcgactacgagaaattgcatcaaatgcaaaacatacggtcgatcgtgttcctgtcattgagcgccaaacaagagaagagattcttccgtaccttggtttcagacatattactggtgtcaaacaatgggaacccttatcaaaagctcgatatattaaacagctttttgattataccaatgcaaatctggatccaatgctacgctactatgaggttgccagagctattggcagtcgtagggatcatatcaagcgtaacctagacgctttagcggtgtatgaaatcattaaaaaaaatgatttttatggtattgaaaagctagatgaagaaacgattaaattttcagtattatcaacagcacttgctgatgagcggttaggccagtttgtcggagtttcaatcgaagacgatggagacacaataccaagtcatcctatcatcaattctaagagtttaaagaacaaagaaataaaagaactaactgaatggttatataaaaaaggcgaggataaaaaaactcgtgtaggagaatcacgtaatttaagagaactagctgctgttgtaagtagccctaaggcattggagcaattccgaatgggggctccactcgcagttgcctatcaattgacatctgatattactaaggactttctccagttactttatcaagttgaagcagctttgatagatgcagcaggcatggttgccacggtagagtatgatagacaggcccatgaagtagcacgaagaatcaataaacatattaagcttataggttctgaaatagcagagaaaaatagcagaggtgatgatgacttttga

SEQ ID NO: 40268 - DNA, 990 bp, Escherichia coli
atgacttttgaagtaggagttatgcatcccaactctcctcatttgtttgcagatttagccgagttactcacggtaattaattataccggacgtaactcactacataaaaatgatttagattcagtaagaaaattcggcataacaagcgttgaagaaattgatgaagaatgtaattctgaagaagaaattaatggagacgctgagagaaatgatcgttttgaagagcaactcgaagatgtttggacacaactcgaatatagagaaagtgctcttggcaaaatatatccatttataatttcaggtgatgagataattattaaagaaaatctaaaccaacaacaacgaatatatgtttttcttctttgctgctctagacttagatcctttaagtcgattaaaggagcagcacaacgttgggcaaagagctttgccagagtatgtaaagtagcaatgatttctctcttacctgcacatggcaccgtaagaatttttgatgctaactccgatgataggcaaaattattatggaacaaatcttcggacagctctacaaactttaggaaaagatcttggagtttgtagtttaaacacaagggaaataaatagagctcccacatctggtgatgccgggtttgacctaattgctacagtggaatttcctgatggtcaaactagcaactatggaattcttggtcaatgtggtgcacaagaaacagggtggccaagcaaaacattagaggctaacgtgttaaaactgaccacctatttccaaattgcgttccagcatccatcaacaatgttcacgcctgttttctatcgggaagcaaatggcgaatgggtaagcacacacgcaaccgctggagtattattattagataggttgagaatcatatatctacttgataaggcaaaccaatgggaagcgataactacctctgattggtttcgcgaatttgaggaagagctttatacattaaatccagagccttaa

SEQ ID NO: 40269 - DNA, 945 bp, Escherichia coli
atgccaacagtagtttcacttttttctggatgcggtggttccgatgcgggggttttgagagccggctttgatgtgcttatggccaacgatatcttgccgtatgcgcgcgatgtttatattgccaatcatccagaaactgattacatattaggcaatattgctgatgtaactacttttcctaaatctgatttgctggtaggttgttatccatgtcagggattcagccagggtggtgcgcgtaaagccgatcgaaaaattaatactctttatttagagtttgctagagctttaaacaatataaagcctaaagcttttatagtagaaaacgtgtctggtatggttagaaaaaattttgagcatttgttatctgaccagatcagggtttttactgaagcaggttatactgtttccgcaaaagttttaaatgcggctgaatatggagtagcgcaggaaagaaaaagaatatttatcgtaggaatccgtaatgatttcaaagttaagtacgagttccctcagccaactcatgggccagcaactggcgtcaactatgttactattaaagatgctatagggcatttacctgaatggccagaaggtgaattttatgatatgggattccattggtattatatgtctcgcaatcgtcgccaggattgggatcaaatttcaaagacaatagttgctaatgcaaggcatatgccgttgcatcctgtcagtcctccgatggagaaagtaagaactgatgaatggagatttgttgaggatcggagagctcgcagattcagttttcgagaggctgcactattacaagggtttgaggatctagtgtttccagaaacaaatgctgcaagtcttggcatgaaatacacggtggttggtaatgcagtgcctccgccgctttttgaagctgtaacgaaggcattgccaatagaattatgggattga

SEQ ID NO: 40270 - DNA, 3324 bp, Escherichia coli
atggcagtaaagatttcaggtgtactgaaagacggcacaggaaaaccggtacagaactgcacaatccagctgaaagcaaaacgtaacagtaccacggtggtggtgaacacgctggcctcagaaaatccggatgaagccgggcgttacagcatggacgttgagtacggtcagtacagcgttattctgttggtggaaggattcccgccgtcacatgccgggaccatcaccgtgtatgaagattcccgacccggtacgctgaatgattttctcggtgccatgacggaggatgatgcccgtcctgaggcactgcgccgttttgaactgatggtggaagaggtggcgcgtaacgcgtccgcggtggcacagaacacggcagccgcgaagaagtcagccagcgatgccagcacatcagcccgtgaggcggcaacccgtgcgactgatgctgcaggctcagcacgtgcagccagcacgtcagccggacaggccgcgtcgtcggctcagtcagcgtcttccagcgcaggaacggcatcaacaaaggccactgaagcatcaaaaagtgctgccgccgcagagtcttcaaaaagcgcggcagccaccagtgccggtgcagcgaaaacgtcggaaatgaatgccgcagcatcacaaaaatctgcggccacatctgcatccaccgcgaccacgaaagcgtcagaagctgccacctcagcccgggatgcgtcggcttcaaaagtggcggcaaaatcatcagaaacgagcgctgcctcgagcgccggcagtgcagcttcctcggcaacggcagcaggaaattccgcgaaggccgcaaaaacgtctgagacgaatgcggataacagcgcacaggcggcagcagactcacaaactgcatcggcaaactccgcgacagcagccaaaaaatcagaaaccaacgcgaaaaatagtgaggcagcagcaaaggtcagcgaaaccaacgctaaagcgtcagagaacaaggcgaaagaatatctcgacaaggtcgggggactcgtcagcccgatgacgcaatacgattggcccgttgttactggtaatgagtctttttacataaagatcgcgaaactttccgatcccggaagcggcaattgccatgtaacgctaatggttactaatgccggtaactacggctccccttacggaaacattgactttatcgagatctcggcgcgcggtctgccttctttgcttagtgcggataatgtttctcgtcatctgagtatacgccgcttagggtcaaccgggctgaccgataacaaccagatgcgttacggcctggttaaaggtgacggctttattgaggtttgggccttccagcgcgcatttatcaacggcgcaaaggttgcggtgctggcgcagacggcacgcccggaattatacattccagacggatttgttaagcaaaccgccgcgccttctggatatgttgaaagccccgttgtaaggatttacgaccagttaaacaagccgactaaagcagatttgggtctttctaatgctatgcttacaggcgctttcggtcttggcggtagcgggatatcaacaaacggcaagatgagcgatgtagagatcttaaaagctctgcgtgacaaaggtggtcatttctggcgcggtgataagccgaccggaagcacggcgaccatttatagccacggttctggtatattctcgcggtgcggcgatacgtggtcagcgatcaatatcgactactcaaccgcgaagattaagatctatgccggcaacgatgcccggcttaacaacgggacttttagcatcaatgagctatacggctcggcaaacaagccgtcgaaatcggatgttggacttggcaacgtaactaacgatgcgcaggtgaaaaaatccggcgatgttatgtctggtgatcttgatatattgaaagaaacgccatctatcaggctaaaatcagcaaaaggaaccgctcatctgtggttcatgaacaacgacggaagcgagcgcggcgttgtttggtcgcctgaaaacaacgaatcacttggcgaaatccacatcagggcgaaaaacacaaaaggtgaatcaagtggtgattttattgttcgccacgacgggagggttgaggcccgcaatctaaaaataacttacaaaatcagcgcagccaccgcagaatttgcaaacacaagcaccagttccgataacactacggtaagcatcaaaggatctcagcatacgcctttggttttaacgagcaacaacacaattaaaaacttgtccattgggtttaaggttgatgatgttgatcaaaaatacctgggtatagctggtgacggtgatttgtattttggtagttattctgaccacacaaaaaacagcaaagtaatcacacaagcaaaactcgatagcggggtgacggtaggcggtaaaacaaccttttctgactttgccacatttaacgcaggtatggcgggatctatcgagccggaaaccattgacaacaagactattgatttaaacgacttgatcattgctaatacagtggctggatctgttaaatactatcaatgcaaaactgttgcaggtggtgcatatattaccaataagcctgacggcgtaagcggtaactttttgctacgtgtagaatctactcgtaaaactacgggttcagattatgcgatcatgcaaacgctgattggcagcgacacaaaacgcatatacgttcgctttgttgtcaatggaaactggacggagtggagtcaggtagttgtttcaggatggaatcaggatgtaaccgtcaggtcgttaacctcgacgactccatcaaaattaggcggcgggcgtgttgatgtgctggggagtacgtcagattacagtagtatgaattgtgctgtgcgcggtgttgatagcactggaaccaattcggcgtggtcggtaggcacatcagaaagcacaggcaaaatgttgttcctgaaaaaccacagaagcagcgctcaagtgctgttaaatggcgatgatggagcggttcaactactaagtggcactgttaacggtgctacagcgcaggcgctaaccatcaacaaagatgaggttaactcaactgccgatttagtaattagaaaacaaacagggactggcaatcgttttgctttacttaattcaggtaattcagaactaccagttagtatcagggtgtggggttccagtactcgacaaaacgtttttgaggttggaacgtctgctgcgtatctgttttatgcgcaaaaaacaacagacgggcaaaaccttactgaaccgccccgggtttcctggagagtgttttatctgtga

SEQ ID NO: 40271 - DNA, 186 bp, Escherichia coli
atgtgtaacaaaacccgttacaatatgttgtgtaacacaaacggtgtacaaaacaggcataaggtaaaaggccatctaacgtttacctatgtaatcccgtctgtaataagccaagaagataatccggcaaagcggaaatttctggttaagacatatgaaataaaagttctggagtctcaagaataa

SEQ ID NO: 40272 - DNA, 435 bp, Escherichia coli
gtgttctggctgtccactcttggattaacggccatcgcctggctaacggctccctttgccggggttatggcatcgttttacacccaggatccacaggttaaacacgtcgttgtgattctgatttggctaaatgctttatttatgcctatttggtccgcctcatgggtgctacccgctggatttaagggggctcgtgatgcccgttacgccatgtgggtttctatgttgagcatgtggggttgccgggttgtagtcggttatgtgctgggaatcatgcttggctggggtgtggttggtgtctggatgggaatgtttgccgactgggctgtgcgggccgtgctgttttactggcgaatggttactggacgttggctgtggaaataccctcgatccgagccgcaaaagtgtgaaaaaaagccagttgtgtcggaataa

SEQ ID NO: 40273 - DNA, 1095 bp, Escherichia coli
atggctaatgatattggctttaacaaaaactctagaatccaaacactgcgcggcatagctgcgctttcagttgttgtggatcatacattaactcaatttaatatatattaccatcttgaaggaataaccgggggaatattacgtaatttgcaagggattggtactattggtgtttatgtgttctttattgttagtggatatataatgtccttaacgacttttaataaaacatgggataaaaaagcttcttctgtttttttaaagaaaagaattattcgtatctatcctatttattggttctggctgacattacttctcgtggcttggtttgcaggtttagctttgaaacaacatcattattcctttgaaaaaatagtttcatcttatttgcttttaccatattccgatgaagaacccagcaaaataaatccagtccttggccaagggtggactcttatatatgaaatgtttttttacattttcttttctatattgattctaacaaatatacctaagcgtaaggtattaattgtttcctttttgtttttttctttaataatagtactaggtaaaggttcgataacaggaattccatatatcgatttttttatatcttcaaagttattttatttttttgttttcggtatttttatttataattattgcgataagattatcaatctgttttcttctgttatttccatgtatttaagtatatcaatttgttttgtattgttttttgttatcgctttgggtattgtccccgaagagtttagtaaagtagcaatggtcttttttgctattattttctttcttgtatggttttccaaaggttcatgcaataagtacttagttatcttaggagactcctcttactctctatatctatgccatacttttattgttatgggattcggtgtcgtttgtaagaaatttgacctttcaatgatgatgctttctataataggaatgttaactataatattatcggtcattgcagggttgtgtagttacttcttgcttgaaaagaaattacatgcaatttttatacaaaaaaaaacacatcaaataatgccttctaaaggcttattttaa

SEQ ID NO: 40274 - DNA, 1398 bp, Escherichia coli
atgataacattttcccatcgtgttcgtgcgaatgctaatgcgtcaataatctctttagtgcaaaggttttctgatattgctattatttttttaggtttgtatacaacttgcttgttttataatttcaatatttcttataaagcaaatttaatcggtctaacggctcttgttgtatttcaaatgattggcggaattactgatttctatcgctcatggagaggtgtgaagatctctgccgaacttattatgataatcaaaaactggacactgagtataatacttacatctggattaatttcacttttcccagatttcgatattagtgtgaaagtgtttatattttggtatttctttgttgtgttgggtttcattttttgccgtacttttatacgtcttggtgctggagtgttacgcaagttaggttacaatacacggcgagttgctgtcgtcggctcttcccctgctgctattagtttacttcagagttttttagaggaaccgtggttggggttcgttgttaaaggtatttatgatgataagccacagatcgaatatggtaatgtgccttatggtggttcattgtctacattaatagcccaagctagggcaggtgaaattgatcgtatatatattgcactgagtatgaaagatgagaaaattataaaagatcttgtgtcaaaacttacagatactacctgttcagtgttacttataccggatgtgttcacgtttaatattttgcagtctcgaactgaagaaatcaatggcgtacccgtagtacctctttttgatacgccattgagcggtatcaatatgttgttcaagaggttagaagacattgttgtctctagtattattctagtactaatttctcctgtgcttattggcattgctttagcagtaaaattttcttcacctggtccaattatttttcgtcaaatacgatatggtatggatggtaaacctattaaggtttggaaattccgttcgatgactgttatggaaaatgacgataaagtaatacaagctacaaaaaatgatgtacgagtgacaaaggttggacgtttccttagaagtacctcactagatgagttacctcagttttttaatgtattatttggtcagatgtctgttgttggcccacgcccgcatgctgtctctcataacgaacagtatagatctcttattcaaggttacatgcttcgacataaggttaaaccgggtattactggcttggctcaaatcaacggttggcgtggagagacagatacattagagaaaatggagaagcgaattgaatacgatttgctatacattcgtggttggagtatatggttagatttgaaaattattttccttactatcttcaaaggctttatcaataagtcagcttattaa

SEQ ID NO: 40275 - DNA, 495 bp, Escherichia coli
atgaaaaaaagaaaaacattaatctcattaatttattgtttcgcttttttttatacaaatgcttttgcaagtgaacaaacaattggtattggaattcatgcaaataaatatgacttagaaaatgacaaccttcttcagcttatagaaaaaagtggttttaactcatttagacaggatttaacgtgggattctgtagaaagaactaaaggtgtatatgccataccgccaaagcttaaactagttgatgaaataattcgtggggcgaaaaaatataatatatcccctttggttattcttgactatggaaataaaaattacaataacggtgggtatcctactaatgaacaagacattgtagcttttgctaaatatgcaaaatgggttgcctcaaattataaggggcaggtcaaatattatgggaatgaaagggaaggggcagatacctccaccgcaaatatatttagagttggtaaagaaaacaagtcaggcgattaa

SEQ ID NO: 40276 - DNA, 1212 bp, Escherichia coli
atgataaaattcaaaattaaaatagatgagttagtctggtttacctttcatttatttatatttgttaaagcttttacggggccattgacactttatcttgcatatatccgattcgcacctatagctttgatgatattattagtaggctataaattatgtataataattcctaagaaattaagttatatattactaatggtttttctatcaatctatgttctaattggtatgaataacaattcattagttagctctgttttcggtatttatatttttattccatttttattcgcgtttttgtattcaaccgaattgtatcaaaggatatttgtaaataatttcaagttcaatttgttttatttccttagttgtgcggtaggtattttttatgtaaatcaatttggggcagaatggataggtgctgaacaggagatagctggggttacgaaagttgtttcgcgttattggatctccgatggaatgatgcgaaaccctgggtttacggggacatcggttagttccgctacgttagtaattatcacttgtacatttttgggatatacgcttcttgaaaagagaaagtttatcagtctgttagtcatttttgcagtttctgcatatttgatatacctaacaacaactaagacaacaatggtaacgttaggttttgtgtttattttgatattttgttcatcttttataacaaaatatattgtgaaaacaatctttttattcctgacgttgttctcatattattgcatgttcaatattagtaacgtgtcaacggggatgttgacaaatacaatgctaataaggatgtatcaaacatggccaaatgcaatgttgttacttgaaacacctctgcaatattttttcgggaaaggctttggttcaataggagttccaacatattacttcacaccagcattggcaaattcagccgataatatgtatgtatatttgtatgtcatatttggtgtttttagtattttcttctcgttcttttttatgatgaagttcttaagctttggattaaccctgtcaaaatcgacaaaacaattcttaataatatcgttagttattttaacaggtggtataacttctaatctctttgaagcatctttttattcagtatatggtggtgttattataggcatgatagtttctgaaaaaaaagaacgagatatcaagttaaatcctaactatcaataa

SEQ ID NO: 40277 - DNA, 474 bp, Escherichia coli
atgcgtaaagggtacgtgcataaggtattcggcatgtcaattaataatggcctttctgattatttatctgggaaaagtacaaaagaagatgttgtaaagaaaattgatgaagctgattttgactttatatctagaggccagattccacctaatcctgcagaattattgatgcatccacggatgcaagaattgttgacatgggccgatcgcttttatgatctaataatcattgatacaccaccggtgttagcagtaacggacccggtaatcgtcggttcatatgcgggtactacgttattagtcgcacgatttgaagagaataccgctaaagaaattgaagtaagtatacgtcggcttgaacaaagtaatgtaaaagttaaaggatgtgtactaaatggagttgtaagaagagcaagtagtcaatatgggtatggttataaccactatggttattcatatactgaaaaaaattaa

SEQ ID NO: 40278 - DNA, 1221 bp, Escherichia coli
atggacgaaaagtccctctacgctcatattctcaacctgtccgatccgtggcaggtaaagtccctttctctcgatgaaaatgccggttctgttactgtcactattgagatcgctgaaaacacccggctagcctgtccgacctgcggtaaatcctgttctgttcacgatcaccgtcatcgtaaatggcgccatcttgatacctgccagttcaccactattgttgaagccgatgttccacgaattatgtgtccggagcatggctgcctgacgttgcctgttccgtgggctggccccggaagccggtatacgttgctattcgaatcgttcgttctctcatggctgaaaatcagcaccgttgatgctgtcaggaagcaacttaagctcagttggaatgcggttgacggcattatgacccgggcagttaagcgaggtcttgcccggataaaaaagccattatccgcccgtcatatgaatgtggatgaggtcgcctttaaaaaaggacatcgttacataacggtgatctccgatcgcgatggtcgggcgctggccttaacggatgatcgcggcacagagagtcttgccggctatcttcgcacgctcactgatgggcagttgctggctatcaaaacgctctcaatggacatgaacgcgggctatataagagcagcgcgtatccacttacccagtgcggttgagaaaatcgcctttgaccgcttccatgtggcgaagcaactgggcgaggtagttgataaaacccgtcagaatgaacatccgcacctccctgttgaaagccgacaccaggcaaaaggaacccgcttcctgtggcagtacagcgataagtggatgaccgaatcccggcaggaaaagctgatgtggctgcgtgcacagatgaagctgacgagccagtgctgggcgctgaaagagctggcaaaggatatctggaacaggccatggagcgaggaaagacggagtgactggcagagatggttggcgctggcggctaacagtgacgttcccatgatgaaaaatgccgcgaaaacgataggaaaaaggctgtacgggatcctgaatgcgatgcgacacagtgtctcaaacggaaatgcggaggcacttaacagcaagatcaggctgctgaggataaaagccaggggataccgaaaccgggagcgctttaaactgggggtgatgttccactacggaaagctgaatatggcgttctga

SEQ ID NO: 40279 - DNA, 321 bp, Escherichia coli
atgaaaaaccaagagcataactttggtttctatgattctaatttcaatccaaaaccagcagcgaaggcatttataaatttacaaaaatttttaaacaacaaaagaattgacaaaatatcgacaactaacactaacaacgctcagcaatttaacattgaagtaaaagattcactaacacaaaaagattatacaatttattggaatgaaaaacagcttgagcaaaatggacgaataccatatttcggaataaaaaaacttagtgcacaaaattcagaaaattttgatcaaaagaatttaagtcgagacgtttctgtaaaataa

SEQ ID NO: 40280 - DNA, 372 bp, Escherichia coli
atgaagcgtcaggtgattcagttaaccccgcaagaagatgaatctaccctgaaagtagaactgttaatcggtcagacgctggaagtcgattgcaatttgcatcgtctcggcgggaagctggaaaacaaaacgctggaaggctggggctatgattattatgtctttgataaagtcagttccccggtttcaacgatgatggcctgcccggatggcaagaaagagaagaaatttgtcaccgcgtatctgggcgatgctggaatgctgcgttacaacagcaagctgccgatcgtggtgtatacgccagacaatgtagatgtgaagtaccgcgtctggaaggcggaagagaaaattgacaacgcggtagttcgctaa

SEQ ID NO: 40281 - DNA, 372 bp, Escherichia coli; identical to SEQ ID NO: 40280

SEQ ID NO: 40282 - DNA, 372 bp, Escherichia coli; identical to SEQ ID NO: 40280

SEQ ID NO: 40283 - DNA, 414 bp, Escherichia coli
gtgcgccagggatatctggttattgcctgcggcggcggcggtattccggtggtgcgagacgggcaacaactgaaaggtgtagaagccgtgatcgataaagatctggcctccgcgctgctcgccagtcagttaggcgcagatctgctggtgatccccaccggtgtagaaaaaatggcgattaactttggtacaccacaacaacagtggctcgacgctatcagcgttgccgaagcgcaaacgctgttgcgggaaggtcagtttggtgtcggcagtatgcaacccaaagtggaagccattgttgatttcatcaatgccagccagcaacaaggcaaacaggccagcggcctgattacttcaccgcaaaccataaaagcagccctggcgcatcagagcggtacatggataaccctttaa

SEQ ID NO: 40284 - DNA, 543 bp, Escherichia coli
  misc_feature (359)..(368): n is a, c, g, or t
atgaacgtcggcgcggcgcaatctccggattctgcactcgccagcataatctccgccattctggttatcgttggtcagcaaagcatcgccaccggaatcgccatcgcgttgcctgtggctgctgcaggccaggtgctgacggtgtttgcccgtaccatcaccgtagtgttccagcacgcggcggataaagcagcggaagaagcacggtttcgcactctcgatattctgcatgtctccgcgcttggcgtgcaggcactgcgcgttgctattccggcactgattgtctcgctgttcgtcagcgctgatatggtgagcaatatgctgagcgccattcccgaatttgtgacccgtggactgcnnnnnnnnnntcgtggtggtcggttacgccatggtgcttcgcatgatgggcgtgaaatatttgatgcctttctttttcctcggtttcctcgcaggtggctacctcgatctcagtctgctggcgttcggtggcgtcggcgtgatcatggccctgctctacatccagttaaatccacagtggcgtaa

SEQ ID NO: 40285 - DNA, 417 bp, Escherichia coli
atgcgcatagttgatcaccccttcacaggtgtcgatcgctgctttgtagtagtaaatgcgatcgatatcttccgggttttccatgctcagttcggcaagatgcgcctcggcatcggctttgatgccattcatccctttggtaaacagcagcacatcgtagcccggacaggtatcacccccaccgttaacctgatgataggagaggtcgctgacgaatgtttcgccactgaacgaccaaacgccagcttcgcggtattgtgcttcacaaatttcatccagcgagcgcccctcccagaacggtacaatctcttcgcgaatggtttttttatcttcttcgctgatttcaaacggatcctgcgggcgagtactcatggtatcgagttcgtcacgcacccagcgccaggcaatatcaggtga

SEQ ID NO: 40286 - DNA, 315 bp, Escherichia coli; identical to SEQ ID NO: 1771

SEQ ID NO: 40287 - DNA, 255 bp, Escherichia coli
gtgtgcatgggcgtaccaagtgggccgcgtgaaataccattaccgatgatgcaacgtttcgagcgtgacttgctcaactctggcatgtacatccctgaagatttcgatgctgttatcgaatggctggcggatgggcggtttgataccagtgaactggttaccgatttatttgccattgaggatgcagcggcggcattcgaacgcgcgcagcaaaatgactccataaaggtcatgctgcaatttgcgccggaatga

SEQ ID NO: 40288 - DNA, 330 bp, Escherichia coli
ttgttcgataccgaactgaaagcggcacaggattacgacatcttcctgcggatggtggtggagtacggcgaaccgtggaaagtggaagaggcgacgcagatcctgcatatcaatcacggcgaaatgcagatcacctcgtcaccgaaaaaattctccggatacttccacttttaccgcaagcacaaagacaaattcgaccgcgccagcaaaaaatatcagctgtttaccctctaccagatccgcaataaacgcatgacctggcgcactttgctgacgctgctgtcggtgcgtaacggcaaacgtctggctgatggtattcgggggcgctaa

SEQ ID NO: 40289 - DNA, 195 bp, Escherichia coli
atgagtgcagtagggacgcaggaatctggaacggcgtctgcgttgatggggatgagcatgtttgtcttcggcggtatagccgcgccattgtcgggaattggcggagaaacactgttaaaaatgagtctggcaattacggtgtgttatacgctggcattgctggttgctctcaccagaatcgacaatcaaaagtaa

SEQ ID NO: 40290 - DNA, 261 bp, Escherichia coli
atgggcaaggtcaacgttaacgcaaactgcacctgcatccagcgcgccgagcagtgcatcgcgtttcggatcgaggatcttggtcagatcccatacatcgacaacgcgaccagatttatcgacttcgaggatatggtcacgaatggtggtgacgtgtacgccgtcatcgcgacgatagttactcttacctacgcgcaacagtaccgtgccatttggcgtctcaatggactcatgagtggcgtcagcaaatccgcgcggtag

SEQ ID NO: 40291 - DNA, 219 bp, Escherichia coli
gtggtttgtgataacgattgctggattgatgatgaaggaacatacaacattcacaccattcatgcgtcttatcagttcgctaatgtgatggatatggagaactttaatatttacctcggcacgtattactccattctggatagcgacggcgataagatacacggcgacgatagtgatgaccgttacggcgcacgcgttcgctttaaatacttcttctga

SEQ ID NO: 40292 - DNA, 183 bp, Escherichia coli
atgctgtttggtaatgaagtaataaataccgaacgtctgaccgtaccgcactacgatatgaaaaatcgtggctttatgctgtggccactgtttgaaattgcgccggaattggtatttcctgatggcttatcattagttgaagctctacaggcaaaaggctttaatgaattagataagtggtaa

SEQ ID NO: 40293 - DNA, 135 bp, Escherichia coli
atgctgctggtatgtaatatcacgcaagtttcggtgggaaatttctttaaacaatccctgcccctactggcggctctactgttaatgctaatgctggtgacatatatcccggcgatttcactgttcctggtttaa

SEQ ID NO: 40294 - DNA, 222 bp, Escherichia coli; identical to SEQ ID NO: 15236

SEQ ID NO: 40295 - DNA, 675 bp, Escherichia coli
atggtggtgctggagctggggggactggaagaccgtccgtccctgcttgttgcggtgatgttctccctgattatctacattgagaacaggatgtaccgcacgccgcgtaacctcaaaaaactgaacgtcattgatgaggggtggcgtctgctggacttcaaaaatcacaaggtcggtgagtttattgagaaaggttaccgtacggcccgccgtcataccggtgcctatatcaccatcacacagaacatcgtcgactttgactctgacaaggcctccagtgcggcccgtgcggcatggggtaactcctcctacaaaattatcctcaaacagagtgcgaaggagttcgcgaaatacaaccagctgtatccggaccagttccagccactgcagcgcgacatgattggtaagtttggtgcggccagagaccagtggttcagttccttcctgctgcaggtggaaaaccattcctcctggcaccgcctgtttgtggacccgttaagccgcgccatgtacagctctgacggcccggattttgagtttgtgcagcagaaacgtaaagaggggctgagtattcatgaggcggtgtggcagctggcgtggaagaagtcagggccggagatggcttcgctggaagcctggctggaagaacatgagaaatacaggagtgttacatga

SEQ ID NO: 40296 - DNA, 474 bp, Escherichia coli; identical to SEQ ID NO: 25935

SEQ ID NO: 40297 - DNA, 246 bp, Escherichia coli; identical to SEQ ID NO: 19247

SEQ ID NO: 40298 - DNA, 426 bp, Escherichia coli; identical to SEQ ID NO: 6184

SEQ ID NO: 40299 - DNA, 204 bp, Escherichia coli
atgcagatgctggggagtgcaccacagcagaacgctcaggtgcaaccgcagcctcagcagaacggccagccacagagtgctgacgcaacgaaaaaagggagcgcgaaaacgaaaggccgtggacgtaaggctgcgcagccggagcctcagccgcaaccgccggagggtgaggattactggttttcagacgatatcccgttctga

SEQ ID NO: 40300 - DNA, 207 bp, Escherichia coli; identical to SEQ ID NO: 28945

SEQ ID NO: 40301 - DNA, 213 bp, Escherichia coli
atgcgtttttcctacacccgaaggtcccagcaggatcacgtattcgctgcgctccacgaacgccagacctgccagttcccggacgaccttacgatcgatgcctggctggaaggtaaagtcgaactgctccagcgttttgacccgcggcagacgagcctgcttcagccgggacttcataccgcgctgatgcctgccgttccattcctgctgtag

SEQ ID NO: 40302 - DNA, 255 bp, Escherichia coli
atgtatagcccatatttgtatgcgagaagtacagagttattatgccttagggacctcgttgcgaagggagttagcctaaatggtctgctaccaattttagaaccaattaacgtcaatacgagaaatttattaacatgtttaaatgtttggaattctgacataattgttatccttaatccttatcaggaagaaatatcatctctggatatcttattcagcccaatacaacgattaatgatattaataattggttga

SEQ ID NO: 40303 - DNA, 1293 bp, Escherichia coli
atgctcccggtaccagccttcggttggcatcacctgctgaacccggccggagccgtagcgctgcatggcgtattcagccagataggcaccattaccacgggcatcaaacgctgcacccagcagaccgggcaggccatccatcagataccaggtgatttgctcctgctgtctgaacggcacgttacgcagctccagtacgaatggcacgcgtcgtaccaggttcttctcctgcagcaggggatagtccaccgacaaatcaccgctacggccaaagtcgcgccccaggaaagagcgggcatcagtggggagtgcctccagcaatggtttcagatactcatcaagccagtcctgcgtctcgcggaagcgaacctcatcagacagcagttcataaccttccttgcaggtcagacgcaataccggcgtatcagcggacatgcgggactctatcagggcacgggacagccaggcaccgccaccgttggccggaatacagtcaagctcttcggatgcgccggcaccgtagaatttgtacaccgatgccatccaggcctgctcggatgcctccgaccattccttcccggtgcgcagacagacgcgccggaacagcccctcagatacggcttcccggaaagtgatgcgatgtatgctgcctccctgacgtccggcacggatatccccgataagcgtattgaacggattgtcgtcaccgtcatgggtggagataacgcgtacctttcccccccagataagcatcgccagcgccgctttcagcagttcgtccagttgctcatggaacgccgcttcgtcgataacaataataccctgacggccacgcaggttagacgggcggctggagagcgcaacaatacgaaagccggagtcaggaaatttgatggtgtaagtcttgatgtgtttgtcgtcgtcgtcctcttcccagaatccttcttcaatttcactggccgcatagttgaatgcccgtgcccacatcgcacacgcctgaatgtattcgacggtcatgtcctggttataagcgatgtaatacacattcatcccgcctgctggcgcagaagaggcggcggtcagtacgttatcggatgcctcagcccatgtaataccggtacgacggctcttttctatcaccttaagcggagaggtgtctgccacccagcgctgctggtaaggcaacagaacgggaggggcatccagcgccgaggtatcaggcaaaacgggagcaaggttattcctcccgtccatgggactcatcccttcggggccgccgccagcggcgtttaa

SEQ ID NO: 40304 - DNA, 456 bp, Escherichia coli
ttgggagaaggttcggcattacccgttggtgtgcctgttccgtggccttccgccactccgccaacaggctggctgaaatgcaacggtgcggctttttctgctgaagaatacccggaactggcaaaggcttacccgacaaataaattacctgatttacgcggtgagtttattcgtggctgggatgacggtcgttcagtagatactggccgcagcgttatgtctgcacagagcgcgcgtgttggttatattaaatttgatatgggaatttatggtattcctgcaggtacgggctcacttattttgtccaatgatatcttaattacgggtcatgacagtaatggctcaagcctattgctgaacaactctaatgagcgggcaattggtgaaatgtatgtcgttcctgccgatactcgcccacggaatattgcatttaactatatcgtgagggcagcctga

SEQ ID NO: 40305 - DNA, 762 bp, Escherichia coli; identical to SEQ ID NO: 20601

SEQ ID NO: 40306 - DNA, 471 bp, Escherichia coli
gtggaacagcccttgggacacagcctcctgaaaagtaatgcgatgtacgctgcccccctgacgcccggcccggatatcaccgataagcgtattgaacgggttatcgtcaccgtcatgggtggagataacgcgcactttaccgccccagataagcatcgccagcgccgccttcagcagttcgtccagttgctcatggaacgccgcttcgtcgataacgatgatgccctgacggccacgcaggttagacggacggctggagagcgcgacaacgcggaagccggagtcagggaatttgatggtgtaggtcttgatatgcttgtcgtcttcgtcctcttcccagaaaccctcttcgatttcactggcggcatagttgaatgcccgcgcccacatcgcacacgcctgaatatattcgacggtcatgtcctggttataggcgatgtaatacacgttcatcccacccgcaggggctga

SEQ ID NO: 40307 - DNA, 273 bp, Escherichia coli
atgattactgcaaaagaagccgaaaaacggacccgtgaaattgtcgcggaatatatcagtgaatgtggttgtgaaaatcccaaccatatccggcaggtattaatcaaattaatcagcatggcttcacacgccatcgtagcaacaaatggcctagatcaggccatttacgttcttcacgccaccagtgaccacctgagaaaaatgccgccgctgtacgagctggaaattactgaggacggccacgtgaaagttatcagcgtatcacgccattga

SEQ ID NO: 40308 - DNA, 2016 bp, Escherichia coli; identical to SEQ ID NO: 18661

SEQ ID NO: 40309 - DNA, 1497 bp, Escherichia coli
atggcccgtggactctgggtttcacccagtgagttcgtcaaatttgccgaacctaataaaacactgacggagcagatcgcctcgcgcagccgctccatcgacttcttcgggctggggatgtacctgcctaaccctgaccccattctgaaatctcagggccgggatatccgcatctatcgcgagctgcgtaccgacccgctggtcggtggctgcatccgcaggcgtaaggcggcggtcaaatcgctggagcgcggtcttgaacgtggccatgccccggcgcgggtattcagcttcatccgggatatgctcgacgatctggatctgtcccgcatcatcggcgagatgaccgacgccgttctctacgggtatcagccctgtgagatcatgtggggacgctctgttaaatcctgggccattgccgatatcgtaggtaaaccccctgagtggttccagttcgacaacgacaacctgctgcgctttcgcgccaaggacgccgggctggaaggcgagccggtaccgctgaacaagtttgtggtaccgcgtcaggacgcgacctacgataacccgtatggcttccctgacctgtcgatgtgcttctggcccgtgaccttcaaaaaaggcggcatgaagttctgggtgcgctttgccgagaaatatggctcaccgtgggttatcggcaagcatccgcgcggtaccgctcagggtgagattgacctgctgctggattccatggaggcaatggtggaagacgcggtggccgctatccccgacgattcctccattgaaattaaggaggccgcaggcaaggccgacagcagcgatatttatcagaacctgataacgcttgcccgcagtgaaatctccatcgccctgctggggcagaaccagaccaccgaggccaacagtaaccgcgcctccgcgcaggccggactggaggttactgatgatatccgtgacgctgacgctgatatcgtggaaagcgcggtgaatcaggccatcaggatggcggtatcaatgaactttggcgacgtggccagccccgtctggaagatgtgggaacagggaacggtcgacgatacccaggcaacccgcgacgagaaactcagccgctccggtgtggtcttcaccccgcaatacttcaagcgtgagtaccagctgcaggacggtgatattgacgagacaccaccgtcagaacgccagaagaacatgctgccgctgtcatttgccgaagctattgatgccgatattcaggcacagcaggccctggacgacgcgctggatattatgatgaacggaggcgcgttaaatggcacgctggaacccgtactggctcctttgtttaagcgggttgaagatggcgtcaatccgtctgagctgctgggcgaactggccgagctgtacccgcagatgaacgctgaagacctgcaggaacggctggcacggattatgtttgttgcaactgtctgggggcgtctgcatgagcgtgacaacggctga

SEQ ID NO: 40310 - DNA, 192 bp, Escherichia coli
atgggccaggaactgaaactggtctcagagaaaaccggcgaaatgcggaacgtggccacctttaataccggcaccacgaaggtgaccaccgacgtcggctggtcttatgctccgggggcagcataccgtcccgacctggcccgctatcagggtacgcttcagccactggcacaacaggaactgagaggataa

SEQ ID NO: 40311 - DNA, 459 bp, Escherichia coli
atggcttccgataacctggtcaatgtcaccattaacgatgaatccctgcgccggagcctccgtgcgctggatcttgctgccacagacctggaacccgcgatgcgcaaaatcgccggaaccctgctggcggaaacgcagtttaactttctcgatgaggggcgtccggggtggactccctcgctggcagcgcaggagcgcgacgggcaaacgctgcaggataccgggcgtctgatggggtcggtatcaaccgaccatgacgaccggcaggcagcggttggcactaatgtcgtttatgggccgattcaccagtttgggggtaaaacggggcgtaatgagtccgttgaacttcctgcccgtccgttcctgccgctgacgggggacggtgagctgcagcctgaagtggttgtccctatcctcgatacgattgtccgccatcttgaagcagcggcccgtcgctga

SEQ ID NO: 40312 - DNA, 282 bp, Escherichia coli
atgaataacgaacccttacgtcccgaccccgatcgtctgctggaacaaactgccgcgccgcatcgggggaagctgaaagttttcttcggtgcctgcgcaggcgtcgggaagacctgggcgatgctggcagaagcccagcgactgcgggcgcaagggctggatattgtggttggcgtggtagaaacccacgggcggaaagataccgccgcaatgctggaagggctggctgttctgccgttaaaacgccaggcgtaccgtgggcggcacatcagcgatgtttga

SEQ ID NO: 40313 - DNA, 756 bp, Escherichia coli; identical to SEQ ID NO: 22899

SEQ ID NO: 40314 - DNA, 3222 bp, Escherichia coli
gtgaccgatgcgttcggtaatgcgcttgccggacagacggtcagcgtgacggcagacaacggtgcaacgttgtctccgacggtcatcacagggccggacggcacggtggagatcagtgtcaccagccagacggcgggagccagtacagtcactgccagcatcaacagcagcagccagagccggaacgtcacgtttatcgccgatgtcaggacggcgcagatcgcgagtctggaggtgaggcaggataactcagtggcagacggcgcaatggcgaacacgctgcgggtgaaggtcaccgatgcgttcggcaatgcgcttgccggacagacggtcagcgtgatggcaggcaacggtgcaacggttgctccgacggtgattacagagccggacggcacggtggagatcagtgtcaccagccagacggcggggatcagtacagtcaccgcaaccatcaacagcagcagtcagagccgggatgtgacatttatcgccgatgtcaggacggcgcagatcgcggatctggtggtcattaaggatggttcagaggcggacggttcgacggcgaacacgctgcgggcgagggtgaccgatgcgttcggtaatacgcttgccgggcagacggtgagcgtgttgggaggcaacggcgcaacgactgccccgacggtcatcacagggccagacgggacggtggagatcagtgtcaccagccagacggcaggaatcagtgtggtcaccgccagcatcaacagcagcagccagagccgggatgtgacgtttatcgccgatgtcagaacggcgcagatcgcggatctggtggtcattaaggacggctcagtggctgacggcgcgacggcgaatacgctgcaggtgaaggtcactgatgctaacggtaatgcgcttgccgggcagacggtcagcgtgatggcaggcaacggcgcaacgactgccccgacggtgaccactcagccggatggcacggtggaaatctctgtcaccagccagaccgccggaaccagtgtggtcaccgccagcatcaacaacagcagccagagccagaacgtcacctttgtaccgggtgatgcatcgcagctcacttcaaccgttgaaacaaataagtcgaactatacggttggagagacaatcaccatcacggtaacgctccgggatgcgttcgataatctggtaaccggtgcagcttcacagttagccgctaatggtgtgctgacggtggctggcaccgacccgtcagaaacgggaagctgggttgaatcaggtggcgtgtataccacaacccgaatggcgacgattgccagtaccaatcagcacgccaacctgcaattgcagtcgtggagtgatggcgtaacgtcagatcgctatgacatacagtccggttctccggcgcaagccacatcaactatcgccacggataaaaacgcatacaccgctggcgagaccataaccgtcgccgtgacgctgaaagacgcgcacggtaacctggttgaagggggcgagtccttactgtctggtgataacgtaatagtggaaggagccgtacgttcaggaggatggtctgaaaacgccggtgtttatactgctacatggtcggcgcaaatggcgggagactctcaccacgcgacgctgaagttgtctgagtggggcagcagtaaacaatcagagagttattccatccacagcggtgctccggtgcaggcaaattctgctatcaggacagataaatcggcatatatcgccggggagccattaaccgtcacagtaacgttacgggatgagtttggtaaccctgctttcgggctgacatcagaagtcatcgagtcttatattgatagtttcgcggtaggcggcgcaactcccgattctatgcagtgggtcgagcagaataatggtgaatataccattgtctggacagcatggggtgccgaggaaaatctggttgccagtctgaaattaaaaacatgggcagcggagattaagtcctcattatatggaatacaaccaggtgcagcggcaaaaactcaatcaacgattgtcgcggacaaaacgatatatatcgctggggatagcataacggtgaccgttgttcttaaagatgcccagggtaactttattactgatggtgttgttcagcttaatgaggaaaacgtacaagtcaggaatgcggatcctatccagggcaataattgggtttacaacggcaatgggcaatatcaaagacagtatatggcacattttgcggaagcgaatttgaatgcgcaactgaagatggctggttggagcgatgccaattattcaaacaattatactatcaaaccaggtgaagtgagtccgcttggttcacagcttcgtatacgagaagttttagtagtggaaggggcggatttacctgtcagtgctttattagttgatgattttggaaatccggtggataacggtctggatttgctggatgatgcagtgtacttacaaaatgtagaaaagaaagaaggggaaaaatggagatatgtgggtgatggcatatatgaacgtacatatatggcctaccaagaaggagaaaatttaacttcatttatggagattaaaggttggcgtatatacgggcaaccatcctataacatccttccttttgtggaagtcgagtcgctgagtgttaatggtgtaaaattcagggcgacagatggttttccagaaacagggtttgatggtgcaaaattcacgctgttactaacccataatatgaaaaatacggattataattggacggctgggatttatggaattaatgttgatagtaatggagaagtaacattatctgtgctgataagaagtgaagttactattactgggaaacccaagaatggtaaagggaatgatgttgtatttaaattcaagattaaaaaatggtttactagtttaggtgctagcagtagtaatacctgggatatcataaatacttcatgtagctatggtcaaatgccgtcatctttagaattagcgcagcggccaagcggtggggtagtaccgcgaaaagtaggtacgttgtggggcgaatatggtaatttaaaaacgtatgggaacgcttttagcagtacggattattggacaagtactcagctcatgggagtacacgagaaatttaatcctgaaactggtatatcagagcttgggacaggaaagtcttctggcttgtgcgtagagtattattaa

SEQ ID NO: 40315 - DNA, 774 bp, Escherichia coli
atggccgccctgaatgctgagacgggcgctgttattttcaccgtttacaccggtctgatggctgcgggagcctgccagaatccggtcatagtccattgcctgtgtcagcatggaggcatacagggggacttctgcacgataagcattttcactgcgcagataccagctctcatcactgtcccggttgagggagtagttaaaggcaccggcctgcagcttattcccctggataaaggccccttcctccgtggtggcaccgttaatggcttccaccacctgaatacccttaccgctggtcgccagccccgacgcactgttgccggcgttcaccaggttcaggatggtttttccggttgccctgccaccgtcaatgaccagtctgtcagcattgttctgtgccatatccgggcgtacacgcaggctgatggtgccattctgtccgttcaggtttttcactttcagggttgccggtacgaacttccctgtgcgggtggaggtgaaatgaatctgtccggcatggctgaggtcatccaccaccgacagcaccgtggcgttatcggggatattccaggtggcaccggaggcgagagtgacattcgtggggtcaatggcaccgttcagcacagtgctgccggtcagcttcagggctgtaccgcgctgagcaatgacatccgtggtgacggtactgtcgttcagcgtcagcgtgccttcattcaggttgacggctttctgggtgagtgtggtgttgctgacagtgagtgtgccacttcctga

SEQ ID NO: 40316 - DNA, 2226 bp, Escherichia coli
atgaccggcggacgtgtcctgtccatcgatgccgccagccgtaccctgacgctggaccgggaggtgacactgccggagaccggcacggccactgttaatctgattaacggcagcggtaagccggcgagcgtggccatcaccgcacaccccgcgcctgaccggatacaggtcagcaccctgccggatggtgtggagacatacggtgtgtggggactctccctgccgtcactgcgtcgtcgcctgttccgctgtgtctccatccgggaaaacacggacggcacctttgccatcacggcggtgcagcacgtacctgaaaaagaagccatcgtggataacggggcccgctttgagccgcagtcagacaccctgaacagcgttatcccaccggcagtgcagcacctgacggtggaggtgagcgcagctgacggccagtatctggcgcaggctaaatgggacacgccgcgggtggtgaagggcgtgcgcttcagtctgcgcctgaccagtggtaagggaacggatgccagactggtgaccaccgccatcaccgcagacacggagcaccgtttcagcggcctgccactgggggaatacaccctgacggtgcgggccattaacagctacggccagcagggcgaacctgcgaccaccaccttccggattgccgcaccggcagcaccgtcgcggattgagctgacgccggggtattttcagataacggcggtcccgcgtcttgcggtgtatgacccgacggtacagtttgaattctggttctcagaaaaacgcatcacgaacacggcacaggtggaaaaatctgcccgttatctggggaccggcagtcagtggactgtccaggggagccggattaagccggggacggatttctggttttacgtgcgaagcgtcaacctggtgggaaaatctgcttttgtggaagccagcgggcagcccagcaatgatggtgaagggtatctggaaattttccgggggctgatagatgagacgcttctgggccaggcactgaaagagcgcattgatgcttcagcgctgcgtacggaggtcacgcaactggaagaagacatccgtcagcggatggacacggatatcgcagaagtgacccggaaaatcgggaaggcggaaaacagcctcacgcagctggttgcgaaaaagaatgaggaccagacactggccatcgcgcaggtgagccagaaagtggaccgggtgagcagtgaaatctcacagactgtcagccaggggcagtcagaaaacgcccgacagatagcacaggtccgccagtacgtggataaaaaagggagtgaaattacctcgaccacggataaaaagctgggtgaccaggccgtgaccatacagcaaatccagcgggttcagtcagacacgcgcaatgagctgaatgccatgtatatgctgaaggtgcagaaaacaaaaaacggtattccctatgtggccgggattggtgcggggattgaggatgttgatggtcagacgctgagcagtattctgctgcaggcggaccgtatcgcgatgattaccccggagaatggcaacaccacgccgctgtttgtggcgcaggggaatcagctgttcatgaacgacgtgttcctgaagcgactgtttgcggtgagcatcacgtcatccggcaatcctcctacgttttccctgacgccggatggcaggctgacagcccgcaatgcggatatcagtggagccatcacggcgaataccggcacgctcaataatgtcaccattaacgagaactgtgtcatcagagggaaactgtctgcaaaccagattgaaggcgatctcgttaaaacagtgggtaaggctttcccccgtgactcccgtgcaccggagcgttggccatcaggaaccattaccgtcagggtttatgacgatcagccgtttaaccggcagattgttattccggcggtggctttcagcggtgccagacatgagcgggagaacagcgatacttattcgtcatgccgcctgatagtacggaaaaacggtgctgaaatttataaccgtaccgcgctggataatacgctgatttacagtggtgttattgatatgcctgctggtcgcggccacatgacgctggagttttctgtatcagcatggtgggtaaatggctggtatcccacagcaagtatcagcgatttgctggttgttgtgatgaagaaagccactgcaggcatcacgattagctga

SEQ ID NO: 40317 - DNA, 1059 bp, Escherichia coli
atgtctaaaatttatgctattgaccttttttgtggtgcaggtggattaacccatggtttgatacaagcagggattggtgtcattgctggtattgatttagatccagattgcagatgggcgtatgagcacaacaacaaagctaaatatataaattcagatatttgtgatgtaacaggtcaagaccttatgcgcttgtggccagaacagggaataagacttcttgctggttgcgccccatgtcagcctttttcaagttatcgaaaaggcaagattgaatctgctgacggcaaatggaaactcttaggtgaatttggacggctagtcaaagaatcttcaccagacttgataaccatggaaaacgtaccaaggttacaaaagcataaaattttcttggattttgttaaagaccttaagaaaggtgggtataaggtctggtatggcgtcgttgactgtcaacaatatggtgtgcctcagaaaaggcagcgattagttttactggcatccaagatcagtgatgttgtgttgattcctccaacacattcagaagataactacgtaacagtgaaagatgctatttctcatttgccagagatagattcagggcaagctgatgagaaagatccattacacgttgctcagggaatgagccaattaaatctcgaaaggattcgtcaatcaaaaccaggtggaacatggaaggattgggatcctgagttggttgctgcgtgccataagaaaagtagtggcaaaacttacacaagtgtatatggacggatgagatgggatgaaccagctcctacaatgacaaccctatgttttggttttggtaatggacgttttgggcatcctcaacaggatagggccatttctttacgtgaggcagctatctttcaaagttttccggagaactatgttttttctgaaccaggtgcaaagatcacatttgcaacagttggtcgcttgattggtaatgccgttccggtaaaactaggtgaagttgtaggaaaatcatttattaatagtctatctgggggtagtaggagaaatggcggagcatag

SEQ ID NO: 40318 - DNA, 1998 bp, Escherichia coli
atggcggagcatagcgaagttttatcgcatgttgatgaaaaaacacatacttatgagatgctggttagcttgagtgttctggggcatctggggatcaatctatatagcaatgttgcggcagtgattacggaaacagtagctaatgcatgggatgcagatgctacagaagtgcatataaaactttctcctgacagaatcactatttcggataatggttttggaatgaccattcatgatatgaattcgaaatatctaacagttggctatcaaaaaagaaatgataaaagccagctattaactcccaagggacgactacccatgggcagaaaaggtattggtaagttatctttattttctattgcaaaaactgtaacggttgaatcaatcaaggatggagaacgacatggtttagttatggaagttccaaaaatagagcatgcaatcaaaagtggggctggtagatattatccagaacctttggattctgctcaactttctgtgagtcaaggaacattagtaacattgcgtgatctaaatcgatctcgcatacctgccactgcaaccgctttgcgtaaaaagttagcaaggcgtttttctgttattggtagtaatgattttagggtcttcgttgatggtgtagaagtaacagcaaaggaacgtgaggacctaaaacatgttcagttcgtatgggatattaactcgggggtagattttaaaaaagaatgtccggggttaataactgtaactgacatttcatcatttttgacagaaagtcaattatttaatcctgaatggagcattaaagggtggattggtagtataaaacagcctagtcagttgaatacacctgaaggaaatctaaatagcattgttgttttatctagaggtcgattgtttcaagagaacattttagatgatataaacgatggtgggatatacacaaagtatcttacagggcaacttgaggcagacttccttgatacagatgaagatgaagatattgcaacaagtgatagacaacgagttgttgaagatgaccctcgttatcaatatttgaaatcattggttaagattgccctgagaaaggttgctggtcaatggagctcactacgagaaaagcaaggagcaaaggaagctaaagaatcgaatccggtacttgcggagtggatcggttcattaaaacctgcttcccgaggctatgcagaaaaaatgatcgctcaaattgaatcgttgcctttggaggataaaccacaagagaagaaggaactctttaagcatgcaatttttgcatttgagcgcttgcgtattaaggaaatgtcgcaggagctagctgatgctgtattttttaatgcagaaaaattattgccattgcttgagaaacaagacgatttagaggcaacattatattatgagatagctaagagtcgtgtagatgttattcaaagcttcaaaggcctagtcgataacgatgaaaaagaaaaagtattgcaacgttatctttttgaacacctttggttattagacccatcatgggaaagaattgatggttctccaataatggagtcgcgtgttaaccaagagtgggacaagattgatgctggcctgagtgaagaagagaagaaaggtcgtatggatataaaatatcgctcatctgcaggtaagcatattatcattgaacttaagagagctagcgtattgacttctgttgcaaatctagtcagtcaggggaataagtacaggcaggcagtaattaagtgtgcaaaagctgttgacccggcctcaacaccatcaattgatgtgatttttgtccttggtcgagagccatcagattatgcgttagacccatcttatactaaccttcagctacagtcagtgaatggtcggattgtttattatgatgggctaattaatagcgcacagagctcgtatagagaatatacagagaggcaggctactgttgcaaggattgctgaaatcgttaaaaaactagatgactag

SEQ ID NO: 40319 - DNA, 279 bp, Escherichia coli
atgcacacttcagggaaatttaataaatcactcaaaaaacgcagagacagaacagaaccgaaatatcgcgcgttagacatgacagagcacgctttaaaggtggcaatcagaacgatagaccgccacgcgggggaaggatacgcgaaagcacatcccgaactgataagcgcattcatgaccacgacggcggcaaactttgccacgctgacagaacgggagattgccgaagcggaacaggtaacaaccatcaacgttaaaaccggagaggtggaatcatga

SEQ ID NO: 40320 - DNA, 138 bp, Escherichia coli
atgtctgcaattattgataccgaaggacagttcccctgcagaatcaaagcaaataaaaatgcatataccttgacttttaattcaaataaaccgtttgcgctgacaaaatattgcatcaaatgcttgcgccgcttctga

SEQ ID NO: 40321 - DNA, 480 bp, Escherichia coli
  misc_feature (231)..(231): n is a, c, g, or t
atgagtgcaaaaaggtgggggaaaaattatccacggttcaggcctgtgggcatgataagacgcgtcagcgtcgcatcaggcatctgcgcacggtgtcggatgcggcgcgagcgccttatccgacctacggttcagacctgtaggcatgataagacgcaccagcgtcgcatcaggcatctgcgcacggtgtcggatgcggcgcgagcgccttatccgacctacggttcaggntctgcgcacggtgtcggatgcggcgcgagcgccttatccgacctacggttcaggcctgtaggcatgataagacgcgccagcgtcgtatcaggcatctgcgcacggtgtcggatgcggcgcgagcgccttatccgacctacggttcaggcctgtaggcatgataagacgcgccagcgtcgcatcaggcatcggcgcacggtgtcggatgcggcgcgagcgccttatccgacctacggttcaggcctgtag

SEQ ID NO: 40322 - DNA, 294 bp, Escherichia coli
atgatggtgttaactccggtcatcactggcactaccattgctggttcagagttaaaaaaaactattatttttttcataatgttaccgtattatgtgagtatccatcgactagacactaagaaaaaaagctcccgaaggagccttcattttcactttcttaaatctaacgatagacggctaacatttaagtattgtgaaatattatcaaatgtaatcatcattgatttacaaaagatacattttgccccgaaaggattcctgtcagaaacatcaaaagatgatgttctatactga

SEQ ID NO: 40323 - DNA, 288 bp, Escherichia coli; identical to SEQ ID NO: 30151

SEQ ID NO: 40324 - DNA, 768 bp, Escherichia coli
atgagattacgtactgaaaatctgaccgtcagctatggcgcacaaaccgtgctggatggactttctctcgccctgcctgccggaaaaatcacggccctgctcggccctaacggttgcgggaaatcgacgctgttgaactgtttttctcgcctgttaacaccagactctggcgagatattgcttgatgaaaaacccatagccggtttttccgcccgccagctggctcgccgcctggctttactgccgcaacaccatttatcccccgaggggatcactgtacgggaactggtttcctacggccgcagcccgtggctgtcgttgtgggggcgactctccgcggaagacaacgagcgggtcaacgtggcaatgagtcagacccggacgcgcaatctggctgaccgcaggttaacccagctttccggcggccagcgccagcgtgcgtttctggcgatggtgctggcacaggataccccactcattcttcttgatgagcctacgacctacctcgatatcaatcatcaggttgaactgatgcgcctgatggttgaactcaaaaggcaggggaaaaccgtagtgacggtactccacgatctgaatcaggccagccgctattgcgatcatctggtggtactggcaagcggtcgcgtgatggcgcaaggtgctccggaagcagtgatgaaaccagagcttctaaagacggtgttcagcgtagaagcggaaatccatcccgaaccggtatctggcagacccatgtgtgtggtgaagtag

SEQ ID NO: 40325 - DNA, 360 bp, Escherichia coli
atgctcatagatttggttttaccttacccgccgacggtgaacacttactggcgacgccgtggcagcacatattttatctcggaggagggaaagcgttatcgccgggctgtggcgcttattgttcgccagcagcggctgaaattaagcctgtccggaaggctggcgataaaggtgattgcagagctaccggataagcgccgtcgtgacctggacaatattctgaaagcaccactggatgcactgacacatgcggggttgcttatcgacgacgagcagtttgatgaaatcaatattgtgcgcggactgcctgttcctggtggtcggttggggataaaaatcacagagctggagtgcgcatga

SEQ ID NO: 40326 - DNA, 501 bp, Escherichia coli
atgaacagggaaattcagcagcggctacagtgggtaaaactctatgaaacgtccggtgatgcgggatttgtatgccgtcgctgtggcatttctcggcccacattgcgtaaaatggtggcgcagatatctggctcagggcatcgctggtctggaaagccacagccgtcgccccaagcgttcaccatcaacgaaaaccggcacttgcgaagtcgctctgattctggagttacgttctcagcgaaatctgggggcaagacgtattcaaagcgagttaaaacgacttcattcaatctcactggcaatagcaacaatccacaaagtccttttccagaatcaggtttgaaccgccccgggtttcctggagagtgttttatctgtgaactcaggctgccagatcatcgtttccgatggaagcataataagctttttctgcttctgccggaggagtatggcccagcctttccagcaatcgtcgattgttataccagtccacccacgtga

SEQ ID NO: 40327 - DNA, 306 bp, Escherichia coli
atggttggcacctaccgcattggcaaccgtggcggaagagggcgcatccgttttggcgaaaaagagcaaaacggcgaggatgagtgcacagccaaaacccagccagaaaacaaactgattattgatggtgaacatgatgccgacaatcgaggcacacagcgcccagccaacacagccaaacatccgcgcgcgaccaaattcgaaattactgcgacggctgactttctcgataaatgcctctactgctggcgcaccggcgttaaaacaaaagccaagataaataccaccaacaatcgatcctactaa

SEQ ID NO: 40328 - DNA, 2766 bp, Escherichia coli
gtgacctatcccattacggtcaatccgccgtttgttcccgtggagaatccgacaggttgttactcgctcacatttaatgttgatgaaagctggctacaggaaggccagacgcgaattatttttgatggcgttaattcggcgtttcatttgtggtgcaacgggcgctgggtcggttacggacaggacagtcgtttgccgtctgaatttgacctgagcgcatttttacacgccggagaaaaccgcctcgcggtgatggtgctgcgctggagtgacggcagttatctggaagatcaggatatgtggcggatgagcggcattttccgtgacgtctcgttgctgcacaaaccgaccacacaaatcagcgatttccatgttgccactcgctttaatgatgatttcagccgcgcggtactggaggcagaagttcagatgtgcggcgaactgcgcgatgagctgcgggtgacggtttctttgtggcagggtgaaacgcaggtcgccagcggcaccacgcctttcggcggtgaaattatcgatgagcgtggtggttatgccgatcgcgtcacgctacgtctgaacgtcgaaaacccggcgctgtggagcgccgaaatcccgaatctctatcgtgcggtggttgaactgcacaccgccgacggcacgctgattgaagcagaagcctgcgatgtcggtttccgcgaggtgcggattgaaaatggtctgctgctgctgaacggcaagccggtgctgattcgcggcgttaaccgtcacgagcaccatcctctgcatggtcaggtcatggatgagcagacgatggtgcaggatatcctgctgatgaagcagaacaactttaacgccgtgcgctgttcgcattatccgaaccatccgctgtggtacacgctgtgcgaccgctacggcctgtatgtggtggatgaagccaacattgaaacccacggcatggtgccaatgaatcgtctgaccgatgatccgcgctggctacccgcgatgagcgaacgcgtaacgcgaatggtgcagcgcgatcgtaatcacccgagtgtgatcatctggtcgctggggaatgaatcaggccacggcgctaatcacgacgcactctatcgctggatcaaatctgtcgatccttcccgcccggtacagtatgaaggcggcggagccgacaccttcgcaaccgatattatttgcccgatgtacgcgcgcgtggatgaagaccagcccttcccggctgtgccgaaatggtccatcaaaaaatggctttcgttgcctggagagacgcgcccgctgatcctttgcgaatacgcccacgcgatgggtaacagtcttggcggcttcgctaaatactggcaggcgtttcgtcagtacccccgtttacagggcggcttcgtctgggactgggtggatcagtcgctgattaaatatgatgaaaatggcaatccgtggtcggcttacggcggtgattttggcgatacgccgaatgatcgccagttctgcatgaacggtctggtctttgcagaccgcacgccgcatccggcgctgacggaagcaaaacaccagcagcagtttttccagttcagtttatccgggcgaaccatcgaagtgaccagcgaatacctgttccgtcatagcgataacgagctcctgcactggtcggtggcgttggatggcaagccgctggcaagcggtgaagtgcctctggatgtcgctccacaaggtaaacagttgattgaactgcctgaactaccgcagccggaaagcaccggacaactctggcttacggtacacgtagtgcaaccgaacgcgaccgcatggtcagaagccggacacattagcgcctggcagcagtggcgtctggcggaaaacctcagcgtgacactcccctccgcgccccacgccatcccgcatctgaccaccagcgaaatggatttttgcatcgagctgggtaataagcgttggcaatttaaccgccagtcaggctttctttcacagatgtggattggcgataaaaaacaactgctgacgccgctgcgcgatcagttcacccgcgcaccgctggataacgacattggcgtaagtgaagcgacccgcattgaccctaacgcctgggtcgaacgctggaaggcggcgggccattaccaggccgaagcagcgttgttgcagtgcacggcagatacgcttgccgacgcggtgctgattaccacggtccacgcgtggcagcatcaggggaaaaccttatttatcagccggaaaacctaccggattgatggaagtggtcaaatggcgattaccgttgatgttgaagtggcgagcaatacgccacatccggcgcggattggcctgacctgccagctggcgcaggtcgcagagcgggtaaactggctcggattagggccgcaagaaaactatcccgaccgccttactgcggcctgttttgaccgctgggatctgccattgtcagacatgtataccccgtacgtcttcccgagcgaaaacggtctgcgctgcgggacgcgcgaattgaattatggcccacaccagtggcgcggcgacttccagttcaatatcagtcgctacagccaacaacaactgatggaaaccagccatcgccatctgctgcacgcggaagaaggcacatggctgaatatcgacggtttccatatggggattggtggcgacgactcctggagcccgtcagtgtcggcggaattccaccttagcgccggtagctaccattaccagttgctctggtgtcaaaaataa

SEQ ID NO: 40329 - DNA, 501 bp, Escherichia coli
atgaaaaagataagtatcattgcgagtctggtattcagcttgtacagtgggttatctatagcagcggatccagttattacaggtaactggggagatatagctagtgctactgcaaaattaaagtttgtaaacaaatgtagattaaatctttcaataagtagtataaaagatgaatatcaggctcagccaggacgaggagcattaagtgtaacgttcaccccaacgtttgacaacaattgcaagaatataaatgctaagtatcatatttggggggaagggtttagtaataaatttcaattaattaatgagcggggagataaatatactcttagcgagtataggactgggggtagcttggaccgcgtgggaacaaatactggacatttttcgggcacagtgacaagaagcggtaattacaaccttgaagttgttattccagaccaatatattaaacctggagtttactctataacagcccgtggtgttatggttttaccataa

SEQ ID NO: 40330 - DNA, 783 bp, Escherichia coli
  misc_feature (769)..(778): n is a, c, g, or t
atgtttaacaaagttttgataggtttaaggagtcatccagaattaataattcttggattaatggtgatgattatcgccatgctcataattccattgcccacctacttaatcgattttttgattgggctgaacttaacattggcaatacttgtgtttttaggatcattctatgttgataggatcttaagtttttcttcattcccatcaattcttctcatcacaacgttatttcgtttggcgctggcgatcagtaccagtcgacttatacttcttgaggcggacgccggagaaattataacgagttttggtgaattcgttattggagatagcctggtagttggttttgttattttctccattgttactattgttcagtttatcgtgattactaaaggttcggaacgtgtggctgaagttgctgcccgcttttcgcttgacggtatgccaggtaaacaaatgagtattgacgccgatctacgcgccgggatcattgatgcagatttagcaaaagaacgtcgtagcgtattagaacgagagagtcagctgtatggttcctttgatggtgcgatgaaatttatcaaaggtgatgctattgcaaacattattattatctttgttaatattatcggtgggctatcagtaggagtaggccaaaatggaatggatttctcgacagcgttgaccgtctacacaattcttaccgtcggtgatggtcttgtttctcaaattccagctttattaattgctattagcgcagggtttatcgtannnnnnnnnncgtga

SEQ ID NO: 40331 - DNA, 417 bp, Escherichia coli
atgactgatttcagtagtgccactattactaccggtagcctgcctccgggaaaccatactctttactcccctcagtatgtggttaccgccaaacatgtcagcggctctgacacgatgagcttcggatacgccaaaaacacctatactacggttggtacaaataataatagcggtcttgatattaaaacccgccgcctgagtaaactagtgacagaggtggcgccggcagaagtgtctgacgtcggggctgtgagcggtgcctatcaggccggcggacgctttactgcattctatcgccttgggggggggatgcagtacgtcaaagacaaaaatggtaattgcacccatgtgtataccaatggcggatttcttgttgggggaaccgtcagcgcgctgaactcctataataacggatag

SEQ ID NO: 40332 - DNA, 468 bp, Escherichia coli
atgaaccgcgtactgtgcgtggtcatcattgccctgctggtggcctgcggtgcgcttagtctggggctgaatcattaccgtgataacgccataacctacaaagagcagcgcgataaaaaagtcagtgagctggagcaggcaaatgcaaccattactgatatgcagcagcgccagcgtgatgttgctgcacttgatgccagatactcgagggaattagccgatgcgagagctgaaaatgaaactctgcgcgctgacgttgccgctggtcgtaagcgcctgcggatcaacgccacctgccccggtaccgtgcgtgaagcccccaccacctccggcgtggataatgcaaccggcccccgactggcagacaccgctgaacgggattatttcactctcagagagcggttgatgctgatgcagaagcagctggaagtggcgcaggaatatatccgcactcagtgcctgaaataa

SEQ ID NO: 40333 - DNA, 381 bp, Escherichia coli
atgattcgcacgatgctgcagggcaaactccaccgcgtgaaagtgactcatgcggacctgcactatgaaggttcttgcgccattgaccaggattttcttgacgcagccggtattctcgaaaacgaggccattgatatctggaatgtaaccaacggcaagcgtttctccacctatgcaatcgcagcagaacgtggttcgagaattatttctgttaacggtgcggcggcccactgcgccagcgtcggcgatattgtcatcatcgccagcttcgttaccataccagatgaagaagctcgcacctggcgacccaacgtcgcctattttgaaggcgacaacgaaatgaaacgtatcgcgaaagcgattccggtacaggttgcctga

SEQ ID NO: 40334 - DNA, 261 bp, Escherichia coli
gtggggaatctttaccggctgatgcgcggctatgccaccggcggttatgtcggtacaccgggcagcatggcagacagccggtcgcaggcgtccgggacgtttgagcagaataaccatgtggtgattaacaacgacggcacgaacgggcagataggtccggctgctctgaaggcggtgtatgacatggcccgcaagggtgcccgtgatgaaattcagacacagatgcgtgatggtggactgttctccggaggtggacgatga

SEQ ID NO: 40335 - DNA, 372 bp, Escherichia coli
atgaacgaccagcaaatcgaaaaagaaatcgttgagaaaggcaaaacggcaccgcgaatcaccccgcagcacatcgaagacgtgattaaaagcgagcattgcttcaccgcatacgatggtattggcggagagggcgctatggcgacatacaaatccgcgcttgatttaaccgaaagtcaggaagcattaaagcttcttacattctgcgtcctggtgctgcgcaacggcttcaccgtcaccggcgaaagtgcctgcgccagcccggaaaacttcgacccggagatcggtcgcaagatcgcccgcgaaaatgcggtgaataaaatctggatgctggaaggtgacttgctgaagcagaagttaagcgaacagtag

SEQ ID NO: 40336 - DNA, 5286 bp, Escherichia coli; identical to SEQ ID NO: 30979

SEQ ID NO: 40337 - DNA, 228 bp, Escherichia coli
atggaagaaagggttttgctgtcattaatatggcatcggttcggaagtgaaaaaggttactcgcctgcttgctggcttgatagtaaaagcggaaaggagtatcaaaacgagtgcgaatttagaagggagtggcgaggcggtaaggaagtgcaaggatattttgcacctaaacacgtcgccgccaaatacaaagaatggcttgttcgtttgcttggcccttatcgttaa

SEQ ID NO: 40338 - DNA, 312 bp, Escherichia coli
atgactgagtatctgttaagtcttgatattaatatgcgactgttttttgcaatggcaatcattgtctatggttacggctatataattatttgtatttttataaaggatacactcatccatactttaatgttgcttggaattacaagtctcagttctttatgttctttcatggcgtttaaagataacaatatgtgggtcgattctcctgatttgacgttatcagtaataacaggttcttttgcggctacagttatcttttatatgttttattttgttggttattacttctatcggatgggggggaatgaatag

SEQ ID NO: 40339 - DNA, 714 bp, Escherichia coli
atgagcacaaaaaagaaaccattaacacaagagcagcttgaggacgcacgtcgccttaaagcaatttatgaaaaaaagaaaaatgaacttggcttatcccaggaatctgtcgcagacaagatggggatgggacagtcaggcgttggtgctttatttaatggcatcaatgcattaaatgcttataacgccgcattgcttgcaaaaattctcaaagttagcgttgaagaatttagcccttcaatcgccagagaaatctacgagatgtatgaagcggttagtatgcagccgtcacttagaagtgagtatgagtaccctgttttttctcatgttcaggcagggatgttctcacctgagcttagaacctttaccaaaggtgatgcggagagatgggtaagcacaaccaaaaaagccagtgattctgcattctggcttgaggttgaaggtaattccatgaccgcaccaacaggctccaagccaagctttcctgacggaatgttaattctcgttgaccctgagcaggctgttgagccaggtgatttctgcatagccagacttgggggtgatgagtttaccttcaagaaactgatcagggatagcggtcaggtgtttttacaaccactaaacccacagtacccaatgatcccatgcaatgagagttgttccgttgtggggaaagttatcgctagtcagtggcctgaagagacgtttggctga

SEQ ID NO: 40340 - DNA, 684 bp, Escherichia coli
gtgagaataataacagcattactgatgtcattttttattttacctgttcatgccggtgtggtcatctatggtacgcgcattatttatccggaaaaaaacagagaagttctcgtacagttaatgaatcaaagtaaaaatgcctctttgattcaggcatggatcgatgatgggaacaccactatcgcgccagaaaaaattcaggtcccatttattctcacaccgccagtaagtcgtgtagcaggtggttctggccaacaacttaaaataagaaaaatgccaaacaatttgcctcacaataaagaaagtttattttatctaaatgttctggatatccctccaaacaacccacaaaatgcaggaaaaaacaaaattaaacttgcattgcaaaaccgtataaagttactttggcgtccaagcggaatagctccggtagataaaaaaagcctttctcaattaaatatcaaaaagaaaaataacgccatctcaataaacaacgaaacagccaactggataacggttacaactatcaaagcacaaaacgtgaaagttaataatgaaagtatcttactgcctccattttcgaataacgacattacattaaaaaataaccacgcatcagaatatgaactaacggtagttgatgattacgggaataacatccatagtaaaatcgccgcacgataa

SEQ ID NO: 40341 - DNA, 507 bp, Escherichia coli
gtgactgaacttttaccgtcaaaatctgatatatgctcgaatgcagaagactcctctactgatatgctgctcgttggattcgaatcttacatggttaatgaacagggactgtcacaggagacgattcgaggtcgaatgtttatgattcatcgttacctgaaagcctgtgccgagaacgctatcattgatgtgttttctagttatgcagctgaagagtttctgaagtttttgcgtcttaaaaaaagatactcgagacgttctcttcaatatgtgacttactgcttacgcgcattttttaggtacggagccagttgtggtcgatgtaataaattgctagtagattgtttacgcagtacccgagtttattctttggcttcggttcctacaggaccaaactggagtgatgtaaggcgactcatcagtgaatcttgtggggataaaccttctgatattcgtgcatgtgctgtcttaatgttgctgacagtctatggaggctttgttgaataa

SEQ ID NO: 40342 - DNA, 615 bp, Escherichia coli
atgaataaaccaactgtgattttgcagtatgaaggcaatggcatacatcatgggccacttcgcataacggcacaaacagggcagatcgtacagatctggggagcgtcaggctcaggaaaatcgactttgctctcacgaatttggggaagtcgaagcttaggaacggcacacttgtgcatacgaacccacgatcagcagttcacaccaagcacaatgacacccgcccactttgcatttctacgctcacgattaatgtcgtacgtagggcaacatcctaccgtactacctcgcgaaaaacttgtggattggtttgctctagtccccacaaagacagtactcgacggactaagactgctggacctctctcctagcttactctctcgctatgcctgtgatgtctctggtggtgaactacagcgttttatgttgcttcacgcttatttttcttctcctccaatcttacttttagatgagccctgtacaggattggatccagagcgtagtcatcaggtgagcacgcttttattacaggctaaagccgctcagaaactggttatttacaccagtcatacgagtgccagttgggtggatcagtcaatctctttagacggttaa

SEQ ID NO: 40343 - DNA, 765 bp, Escherichia coli
atgtttagcttgccagatcccgtgctgacagcacaggctatctcacttgaaatagctgggcaccgtattttgtcggattgtcacctcaagctttatccttccgaggttctcgctttagtcggcccctcaggtgctggaaaatcaagtcttctgaatatacttgctggacgacagctatctaacaactgtcaggctctttcccttttaggccaggatttactacgtaccagtctttatcaaactaaccttttacgtcggcgggcgtgtggctatgtggctcaggatgccagcacaaccctaaacctgagacaaagtgccgccactaatatcgtacgtcgtctgtttgatttaggtgacaaccgtgcggttgatgcactcaaacaagcacaaaaatggggccagcgacttggtttatgtccagaacgattacatgagccagtgaagaacttttcgggagggatgcgccaacgcgtacaaatcgctgcggccatgatccatcagccgagcattttatttttagatgaacccactgctggtctcgactcagtcgctcaagcagattttttagatgtgctctctaatttgagaaaccaaacacagactgccatggtgtttgtgactcatgacttacgtctagctcgactcattgctgatcgggccatcgtgatggatcaaggccgcatcgtcagcgaatccattatggatcgtttgcttactgagcctgagcatctcatcgcccaagctcttgttaaggcaatgatttaa

SEQ ID NO: 40344 - DNA, 813 bp, Escherichia coli
atgaattatgcctaccttgatctaccgtccaaacaagaaatacgtcgtaaaaccctaaaagcactctgtctacctggacgtcaaatacctttctcagctcctgagctacccattgcctatggttggggggtaggaggcatggctattaccgctgccttattagaaccgaatgacacgttaaaggtagtcgatcatggttcggatgataccgttaatgccctgaatatcgcggatttttttactaaaacggcaaacatatcaattacgacaataagctcaaaggctactctcattcaaacgcgtcagcgagtccctgaaagcccgttgcgggaagagcaaattgtggtgtaccaagttcctcgacctgaccctctacgtggatttattaatgatgcggccgaagcactgacacggcacgcacatcatgattacggtgtcgtgttaagcgctctatttgaaacatggttgcaacaagatgatgcgtgcttaggatacgaccaccctgtgattgttaatgatggggtcttaatgtcaccgtcgcctattcctgctatggataacccccgcatggcgatgatgcctgctattcagatttttggcgccgcacgcgagcgacgaatttatgcattgcctgcctatacacccttagcaaacttagcttttgttgacctgcctgctagcctgaaaaaagtcgatacagcatgttgtatctgcggctcatctattcattatttggataatattggtacgtcaaacaccccccattgggtatgttccgactccgaagcatgcaaggagcgcgctcatgtttag

SEQ ID NO: 40345 - DNA, 1014 bp, Escherichia coli
atgtacgtaccagtaaagggtggtgaacaagcaattgctgcttcccgtatagccgtagaacggagtcgccgaggcgacgacacaatccccgagattgaaattaatcaaatcatggcacaaatgtcgttagctcttgatcggatcatgagtgaggggggcttatacgatcgacgttttgctgctattgcctttaagcaagctcagggagacattgccgaagcggtatttctcgtacgtgctcatcgcgcgcaattagccaattttggctcaagccaaaacatagatctaaaaacaatgcattacagtcgccacatttccgccacgcaaaaagagttggctggagggcaaattttaggcgccacttacgactacacccaccgcttactgaatatggatttagaacactctcgccctcagtgcgagttacctaaatcagtgataacagctccctcatcgccctctagctctgagccactgtacgcagatcttatccgcaccgaaatatctaaagctccgatagacattacgcgaactgttttgccttctttacctgatccttgcgagcgtctcgctcatctcgctcgtggcgaagaaggctacttaactggattagcttacgagagtttgcgtaaagcctcaacgagtcatccctatgtagcgcaattaatgagagggagcgttgaaatattcgtagagctggaagacctcaatttaaccgtatccattggtgaggttgagttaactgcctgcactactgtggctccaaattttagctcatctccacatttagaagcgggttttggtattgcttttggagctaacgagcgtaaagccgtcgccatggcaatcgtagatcagcactttaaaattgagggtgctaccagtgatgcactcatgcataccgacggagtcgctgcatccggctatgtcagccatttgaaattacctcattactctgactttgatgctgatttagcgcgtttacgccgagttcaggctaaggaggaaatatga

SEQ ID NO: 40346 - DNA, 558 bp, Escherichia coli
atgaaaatacctttacgatctgagcacagacatgacgatgagttacatcggcagacgcgtacttatcggcgactactgcatgcctttggttacccaatgcgcatacagcaactagaagagcgtgctattcattgcatcgttgactgccttctagacagccaaacgacggtagctattgaggtggaaaataaggaattaacaagccgtattttgaatacaggcgcaaccttgagccaaactcccgaatgggtttttgcaggttctcaacggcatcacttacaacatattccagcaggaagccgtgagtcgcctgaaagtggggcaacccttgtcatggaaatagccgccatatcacctacaaacggggggcttgctatacgagccaccggtgcaggactcaacaaaccacacactttatatttttcagggttacatcaaaatgtagtcattgatcatattgcttttcgtgccgattacccgcgtggagtggacctactactatgcgctgacacgcagctggttgtattaccacgtcacttaactttggagatcatttaa

SEQ ID NO: 40347 - DNA, 426 bp, Escherichia coli
atgaatcaagaacgtcaaacttggctcgggctacttgcccgagctaaccgagattatctggaaaatatctgggctacttacaatccgggtgtgcctatacaaaaactcgctggccctgaaacggggttggtgcagctcaatacacaagcttgtaaggcctcagtgtcatttcagtttggtgaggcttcttgtactcgctgcgtaatcgctattgggaaaattcaaggttacgcagtacatttgggctccgatctacgcaaagcggagttagcggcctatctagacgcctttctacaaacggccccctcccaccaacgtgagctggtgctgcaccctatacgccaacagttagagctaaaaaaggctgagagggatcagctgacggctgctacttctgtacgtttctacaccacacaaaaaacttag

SEQ ID NO: 40348 - DNA, 516 bp, Escherichia coli
atgagtaacgatacaatctcctatctggaaaatggacatgaatttacagtccactttgatgagttattaaaataccacggtgccggttatccgggtggtgtagtccacgggctaaaagttatgcagcgagcctggcccttgctagataatggtcgtttgcctgaacgacgtgaaattcgctgtgtcacagcctttggaggcccagggggtagagatgcgattgagtttgttacccgcggtcttactgagggtcgctacattgttgataactcagtagggctcgaagaagaagagtcccccggtggtcgttattacttccgtttcgagtaccgtggcaccgctgttgaaatcaccatccgtcccggacacgtacgccccgagttcattcagttagcacgcaagaaagaccgctcaccagaagaagagatcattttggctgaaatgaagctcgaaatgggagaacgcttgttagtccagcccgcagaagatatttacaacgctaccgtattatcgtaa

SEQ ID NO: 40349 - DNA, 825 bp, Escherichia coli
atgcaaaccgtctttacctctcatctcagtttaactggagcgtgcgtacgttttagtgaacgtgtgatttttcaggatttaagttttaacgtacaaaagggcgaaacgttggccattttgggcccaaacggacgcggtaagactacgttgctaaaagctctattaggctcacaacgtttagatcaaggacaacggcaggtaccccacctcatcggctatgtacctcaataccaatacggtagtgaaaaccattgttgcctcgatgtggtactcatggcacgagccgccttgcttcccatgttcagccttccttcacagcgggatcgtaagctagctcttgaagcattggaaaaagtaggcggagggcattttgcttatcgtttatatggctctctatccggcggcgagcgccaattagtgttgcttgctcgtgctttagctactggtgctgaggtactcatacttgatgagccggcttcagctttagatttagctaatcaggacttattgcttaacgtcttattcgagttacgccgagtacgtagccattcggtcgtttttaccactcaccatccgcaacacgctctgcatctcgcagacaaagtactgctgatgcacaccaacgatcagattaaatttggtccagctgatgagctgttaaccgagtctgagttatcccgtttatacaacgtcagactacgccgtctaatggtgcaaacgggagaacattttcaaagcacaatctgcccggtttttggaatacgtgaaccggatcaagatatgcccatttcttatcctctaaacaaaggtaaatacaatgagtaa

SEQ ID NO: 40350 - DNA, 1059 bp, Escherichia coli
atgaacaaatatacgcgatcgattcactcgtcctcagaaatggttgagccagttaccctgagcacttggcgtgctagtcattggcctcttttgtccctactgcttatagcgactgtgctaatcgggctatcagtaggtcgatacagcgtagcgctagatgagattgtagccatcctatatgcagccttacgaggtgataactcacagcatatggatgcgttggtgatcttgaatgtacgcttgccgcgcatattattggcaggagtatgtggggctgggcttgccatctgcggggtagccttacaaaccttatttcgtaaccctctcgtttcacctaaagtgctaggtttatcctcaggttcagcattaggaggatcactggcaattttggctggagtaggggggccgctactgatgggggctacgtttgtatcagcatttgctgctctgtttttagtagtgctgatttcaaatatggcgggtcgtactttgatgactattgtgcttgctggaattgttattgatgctttatttgcagcaggtatttcgttagttcaatatgccgcggatccagaaacgagtttacctgccatcgtcttttggctgatgggaagctttgcaacggcgagttgggaaaaatttgcacaaactgctcctatactcattgccagcatttacctactgaatagaatgcgctatcgcattgctgtactcgctatgggtgacgacgaagctaagtcgtttggcatccatgttgcacgctcccggatggtcgtcttcgcgttgatttctatcattatcggcgcctgcgtaaccgcatcgggcgtagtggggtgggtaggactcgtaatcccacactttgctcgtatgttagtaggcgaagatcaccgccggctctatttcacgagtcttatgctgggtgccactttcatgattttgactgatacgttggctcgtagtttaactgctgcagagattcctttaggcgtactcacagctctagttggcgcccccgtctttgtgtacttactatgcactcgtcgacgtgaaagggcttaa

SEQ ID NO: 40351 - DNA, 1095 bp, Escherichia coli
atgacctcaataccccgttgctttgccgtgctagtagcgacaactttgttatcaggtaacttgtcagcgcaagaatttaactttactgatgtaaccggacaggaaattaagttagaagcccctcctagacgtatcattactctgcccaatccagctgcagctaccttcatcgcaatagatggttctaccgagctgttagtgggtatgaatgagggctctaaacgagcctttgagagcggtatgatgagcgttatgtttcctgaagctgttgatatctccagtgacattttgtcggaaaacggtggttggatgcccaacgtagaggccatcgcagaacttaaaccggatttagtcatccagtggggtgagcgcggcgatgatatcgtagctccacttcgcaatgcaggtttgcccgttgctctaatggtaggcggtggcaatgcgggtacagaagagctggcccgagccaatatgaaaatggtggctgatatcacgggtaatactgaaaaactgtcaaagcttattgattggcgtgaccgtgtacaaagtgaaattactactggtttaaaacaagtaggctttcatgcaacaccaagcattttgcatttgcgctctgccaaatccaagttgattgctactggtgagaaaagttatcaacaaaccttcatcgagctggttggcgctaaaaatgtagctcaaggagctggcgtacaaagcactgttagcgtggaacagattcttgaatggaacccagatattatcttactttccgcagcagagacggatgctggattagaagcgatatacgacgacccattactttctcgcttaaatgccgccgtacaaaaacgcgtttataagatacctcaaggtggatatatctgggatagtgcttcccatgaaagcccctacacatggatgtggctggccaatcttactcatcccgatattttctcttttgacctacgtcacgaattaaaagaaggcttcaaattactttataactttgacctatcggatgagcagatagatcgaattctgcgtattgctatgaacggcgacagtcacggttatcaagtgtttcgtaaacaatga

SEQ ID NO: 40352 - DNA, 912 bp, Escherichia coli
atgtttatgacggtgcgtgaagtaatttcgaacaagctagcagcagtgtctgtgcgtgacttgcttttagttgaggccgtcgcaatgaaacgtagttttcgttatgcggccatagacatgggtatttcgacctcgggcttgtcttatcaagtaaaaaaagtagaggaaattctcggacagcccatttttgaaagggggagtaaaataacacccactgcctttggaaaggaagttttagacttaatcgccgtaattttagaaggcgtgactcggcttgaggggttacgtgatgatggcttagctcttccctttgggcaaaccttacgtattggagtgatttcctcactggcaccggataacttgttacggattatccagatttgtgctcaccgttcaggtaaaactaaagtcgagttggttagtggcaagcatcaaggtctgttacggcgtttacagaaccgtgaaattgatttgctaattagtgcagcacagtcggttcctgaggggatggcatatacaagcttattcaaggaacactttgtcttactagtgcgagccgataaacttcagcctgaactccatcctcttatgctctgtgagcctggattactaccacttagcgaggatgattttgttccatcgctaattactgaaggcttaagtaaattattaagctccggcttgactcgtacatatggccttggtgttgagcatcgaatggctttagttgccgcaggttatggtcatgcattattgccgtatggctgggtaagagatgtacatttaccggatcatttagcagtgatggagcttcctcccgctttatcggcagagcgtgaattaggttgcttttggcgtcactcatacatgatggggagtcaaatttctcaggcttttagtgaagcatggtaa

SEQ ID NO: 40353 - DNA, 252 bp, Escherichia coli; identical to SEQ ID NO: 5211

SEQ ID NO: 40354 - DNA, 2370 bp, Escherichia coli; identical to SEQ ID NO: 34725

SEQ ID NO: 40355 - DNA, 576 bp, Escherichia coli
atgaacgagaatttttccaaagaaaaactttttcagggaatgatatttaccctcttgattacttttgctactggtcttggtaacgttctgtccgagttctttatgctggatgtaaaaaaacaagaggctgaagacaatctacatgcggatgccagacgacaagcgactgaactacactgtacaaaactccaggaaagtgcatctttggcaactgagattatgtttcgggcggaccgcgggtatcccaatgtagttactctggaagatcttatatacggtgaacaaatgccagaaaagagggttcctgatgaaaaaattaaagaagaacagaaaaatctggaacatcaggtgtttaagttgcttccatatcttctgcctgatgaagcacaaataatggagaaagtcatgctacaacactccatattaacgagcatgcgcaccagtaaggtccctgctgaacatcggagtgccccatcagaaggtggatttaatttcaataatgaaatgcatgaactccgcagggcaggaacacagatgagccagatattcagagaaagatgcatgcgtgttgattga

SEQ ID NO: 40356 - DNA, 1014 bp, Escherichia coli
atgagtaataatcagttgttaagtacatgggttcggcgttttctgctggaatatttgattagcgaacgaaatttttcccataacacacagaaaagctaccgagatatgctccgtttgttacttcccttcatatcgtctacagtgggaaaagaaatagataaactaactgtcgaagatctttcagaaagctgcgtacgtggttttctatgtaatcttggcgatcataggcattgcagtgcgacaacacgaaatcaacgccttgcgggaatacgttctttggcccgttatatagctataaaggcaccggaatacacagaatggtatggtagcttaaaaagtatcccacagcggaaaagtagtgcacctataatgaactatctggaaaaggatgaaatggatgctttgttggcggcacctgatatcacgaccattcaggggagaagagatcataccattttattgttcctttataacactggggctcgtgcagatgaagttgcacatgtcaaaatcggtgatttaactctaaaccgatttgacagacgtgaaagctcatcagttgtgttacacggaaagggtaataagcgtcggcattgccctatctggccggagactgcacgacttctacgattattaatcggagatcgccaaccagatgaagcggtttttattaatcgagaacataatccgctgacacgctttggtatccatgacattgttgtacgtaacgcagctcttgctgcacgttcacttccatcattaatcagtaagcgagtgagtccgcatactatacgccacacaacagccactcatctgcttcgagcaggtgtggacattaatactatcagagcatggttgggacacgtttcattgtctacaacactaatatacgcagaagttgatattgaaatgaaagcacaggcactcaagatgtgtgaaccggagcagaaggagaaagtattgaaaccatggaaaaaacagaatgatataatggcttttctcaaatcaatataa

SEQ ID NO: 40357 - DNA, 306 bp, Escherichia coli
gtggatcactattgcaccgttcgtgacatcagggaacggcttacgggtgcgggtctgacgcaacggacgctgtactgccgggtcatacaccctaccagtcagcgtatcgctctctttctgaagccggttcagatcggcttccatttgtgcgatacggcgggagactttttcggaacgactgccgaagttcatccggcggagtttatccagctgcgcctgcagatggtctatttcgcgctcccggttgctcagcttttcctgcagggcgtggatcagcgcttcctgttcggccaggcgctgttttag

SEQ ID NO: 40358 - DNA, 333 bp, Escherichia coli; identical to SEQ ID NO: 40207

SEQ ID NO: 40359 - DNA, 333 bp, Escherichia coli; identical to SEQ ID NO: 40208

SEQ ID NO: 40360 - DNA, 270 bp, Escherichia coli
gtgccgtccggctctgtaatcaccgtcggggcaaccgttgcaccgttgcctgccgtcacgctgaccgtctgcccggcaagcgtattaccgaacgcatcggtcaccctcaccagcagcgtgttcgccgtcgaaccgtctgccactgagttatcctgcgtcacttccagcaccgcaatctgcgccgtgctgacatcggcaataaacttcacgctctggctctggctgctgctgttgatgctggcggtgactgtactggtacccgccgtctga

SEQ ID NO: 40361 - DNA, 1290 bp, Escherichia coli
gtggtgtatgcgccaagccgttatttttccagcgaacccaaagctgatgtcagcctgattttgcgtaatccgaaagccatggacagcgcccgcaatcaggtgatgtttgcgctcaatgattatctcgcagggctggcgcttgatcagttaagcaaccaggcgtcggttggtggcataagtttttccaccaacgctaacaacggccttatggttaatgccaatggttacacccagcgcctgccgcagctgttccaggcattgctcgaggggtactttagctataccgctacggaagatcagcttgagcaggcgaagtcctggtataaccagatgatggattccgcagaaaagggcaaagcgttcgagcaggcgattatgcccgcgcagatgctctcgcaagtgccgtacttctcgcgagatgaacggcgcaaaattttgccttcaatcactttgaaagaggtgctggcctatcgcgacgccttaaaatcaggggctcgaccagagtttatggttattggcaacatgaccgaagcccaggcaacaacgctggcacgcgatgtgcaaaaacagttgggcgctgatggttcggagtggtgtcgtaacaaagatgtcgtggtcgataaaaaacaatctgtcatctttgaaaaagccggtaacagcaccgactccgcactggcagcggtatttgtaccgactggctacgatgaatacaccagctcagcctatagctctctgttggggcagatcgtacagccgtggttctacaatcagttgcgtaccgaagaacagttgggctatgccgtgtttgcgtttccaatgagcgtggggcgtcagtggggcatgggcttcctgttgcaaagcaatgataaacagccttcattcttgtgggagcgttacaaggcgtttttcccaaccgcagaggcaaaattgcggacgatgaagccagaagagtttgcgcaaatccagcaggcggtaataacccagatgctgcaggcaccgcaaacgctcggcgaagaagcatcgaagttaagtaaagatttcgatcgcggcaatatgcgcttcgattcgcgtgataaaatcgtggcccagataaaactgctgacgccgcaaaaacttgctgatttcttccatcaggcggtggtcgagccgcaaggcatggctattctgtcgcagatttccggcagccagaacgggaaagccgaatatgtgcatcctgaaggctggaaagtgtgggagaacgtcagcgcgttgcagcaaacaatgcccttgatgagtgaaaagaatgagtga

SEQ ID NO: 40362 - DNA, 1548 bp, Escherichia coli
atgcccagcagcacctggttcaaagcattattgttgtttgttgccctttgggcacccttaagtcaggcagaaacgggatggcagccgattcaggaaaccatccgtaaaagtgataaagataaccgccagtatcaggctatacgtctggataacggtatggtggtcttgctggtttctgatccgcaggcggttaaatcgctctcggcgctggtagtgcccgttgggtcgctggaagatcccgaggcgtaccaggggctggcacattaccttgaacatatgagtctgatggggtcgaaaaagtacccgcaggctgacagtctggccgaatatctcaaaatgcacggcggcagtcacaatgccagcacggcaccgtatcgcacggctttctatctggaagttgagaacgacgccttgcccggtgcggtggaccgcctggcggacgctattgcagaacccttgctcgacaagaaatacgccgaacgtgaacgtaatgcagtgaatgccgaattaaccatggcgcgtacgcgtgacgggatgcgcatggcacaggtcagcgcagaaaccattaacccggcacaccccggttcaaagttttctggtggtaacctcgaaactttaagcgacaaacccggaaatccggtacagcaggcgctgaaagatttccaggagaagtactattccgccaatctgatgaaggcggttatttacagcaataaaccgctgccggagttggcaaaaatggcggcggacacctttggtcgcgtgccgaacaaagagagcaaaaaaccggaaatcaccgtgccggtagtcaccgacgcgcaaaagggcattatcattcattacgtcccggcgctgccgcgtaaagttctgcgcgttgagtttcgcatcgataacaattcagcgaagttccgtagtaaaacggatgaattgattacctatctgatcggtaatcgcagcccaggtacactttctgactggctgcaaaagcagggattagttgagggcattagcgccaattccgatcctatcgtcaacggcaacagcggcgtattagcgatctctgcgtctttaaccgataaaggtctggcgaatcgcgatcaggttgtggcggccatttttagctacctcaatctgttacgcgaaaaagggattgataaacaatacttcgatgaactggcgaatgtgctggatatcgactttcgttatccgtcaatcacccgtgatatggattacgtcgaatggctggcagataccatgattcgcgttcctgttgagcatacgctggatgcagtcaatattgccgatcggtacgacgctaaagcagtaaaagaacgcctggcgatgatgacgccgcagaatgcgcgtatctggtatatcagcccgaaagagccgcacaacaaaacggcttactttgtcgatgcgccgtatcaggtcgataaaatcagcgcacaaactttcgccgactggcagaaaaaatccgccgacattgcgctctctttgccagagcttaacccttatattcctgacgatttctcgctgattaagtga

SEQ ID NO: 40363 - DNA, 1011 bp, Escherichia coli
atgccgatgtaccagttaggtattgatgtcagtaaaaacactcttgatctatgcctcttacgggagggcatcaaagggaggatcaaaactcgtaagctaaaaaatactgctgatgcggctaaagtcgtggcagagtggcttaaaaagcaatcctgtgaactgggcgaagttcatatcatcatggaagccactggggtatatcatgaacctctggcttatggccttcactttgctggcgccagaatttctttagccaatcctcaccgcacaagggaatttgccagaggtatgaatatcctgaccaagaatgacaaagttgatgcctggatgctggcttgttatggctcccttaaagagcctgaggcatggactccaccaccagaatctgtgcggtatcttagagctcttttacgccgcagagacgctcttgttgcagacagcaccagagaaaaaaacagacttgaaaaatctgtttttacagacagccctgatgccgtcagggcgtcaattgaaaacatgcttcaggagctgagcaatgagatcgaacatcttgatgtcctgatccaggaacatattaaaactcaccctgagctcaaccaggatttcagactgttaacatcaataaaatctgttggttacctgctgggattaaatatgctggcaatactcaaaagccattcattcgaatcagcagagcaggcagcagcattccttggtgtagttccggtagaaaggagatctggcacatctgtaaagggaaaacctaaattatctaaaattggaccaccggagataagaacaaaactttatcttgccgctttatgtgggctgagattcaaccctgtaatgaaacagatgtatacgaagttatgccagaggggaaagtcaaagatgtgtgctattggagcattaatgcgaaaacttgtgcactggtgctatggtgtgctgaaaacgcagttaccattcgacgctgaatacaaccaacaaagttattataaaacaatattttaa

SEQ ID NO: 40364 - DNA, 2814 bp, Escherichia coli
gtggcagacggtgcaatggcgaatacgttgcgggtgagggtgaccgatgcgttcggtaatgcgcttgccggacagacggtcagcgtgatggcaggcaacggcgcaacggttgccccgacggtgatcaccgagccggacggcacggtggaaatcagtgtcaccagtcagacggcgggaatcagtgcagtcacagccagcatcaacagcagcagtcagagccgggacgtgacatttatcgccgatgtcaggacggcgaagatcgctgaactggaggtcatccgggataacgcggtggcagacggttcgacggcgaatacgctgcaggtgaaggtcaccgatgctaacgataatacgcttgccggacaggcggtcagcgtgttggcaggcaacagcgcaacggttgcttcgacggtgaccacaaagccggatggcacggtggagatcagtgtcaccagtcagacggcaggcaccagtacagtcactgccagcatcaacagcagcagcctgagccggaacgtgacgtttgtcgccgatgtcagcacggcaaaaatagcggatctggtcgttatccaggataactcagtggctgacggcgcaatggcgaacacgctgcggatgagggtcacggatgcattcggtaatacgcttggcggacagacggtcagcgtgacggcagacaacagtgcaatggtcgcttcgactgtcatcacagggccggacggtacggtggagatcagtgtcaccagccagacggcggggatcagtattgtcactgcatccatcaacaacagcagcctgagccgggacgtgacgtttgttgccgatgtcaggacggcgcagatcgctgatctggtggtcattaaggatggttcagaggcggacggtttgacggcgaacacgctgcaggtgagggtcaccgatgcgttcggtaatgcgcttgccgggcagacggtcagcgtgttggcggacaacggcgcaacggtcgccccgacggtcaccacgcagccggacggtacggtggagatctctgttaccagccagacggcgggagtcagtgcagtcactgcaaccatcaacagcagtagtcagagtcagaacgtgacatttatcgccgatgtcaggacggcgaagatcgcggatctggtggtcattaaggatggttcagaggcggacggttcgacggcgaacacgctgcgggcgagggtgaccgatgcgttcggcaatgcacttgccgggcaggcggtcagcgtgatggcaggcaacagcgcaacggtcactccgacggtcaccacgcagtcggacggtacggtggagttcagtgtcaccagccagacggcaggaaccagtacagtcaccgccagtatcaacagcagcagcctgagccgggacgtgacgtttattgcggatgtcaggacggcgcagatcgcggtgctggaagtgacgcaggattacgccgtggcagatggttcgacggcgaacacgctgcgggcgagggtgaccgatgcgttcggtaatgcgcttgccgggcagacggtcagcgtgttgggaggcaacggcgcaacggtgtctccgacggtcatcacagggccggacggcacggtggagatcagtgtcaccagtcagacggcgggagccagtactgtcactgccagcatcaacagcagcagcctgagccggaacgtgacgtttgtcgcggatgtcaggacggcgcagatcgcggtgctggaagtgacgcaggattacgccgtggcagatggttcgacggcgaacacgctgcgggcgagggtgaccgatgcgttcgggaatgcacttgccgggcagacggtcagcgtgacggcaggcaacggcgcaacggtgtctccgacggtcatcacagggccggacggcacggtggaaatcagtgtcaccagccagacggcgggagtcagtgcagtcactgcaaccatcaacaacagcaccgcgagccagaacgtgatgtttatcgccgatgtcaggacggcgaagatcgcggatctggtggtcattaaggacgactcagtggcagacggtgcaatggcgaatatgctgcgggcgagggtcaccgatgcgttcggtaatgcgcttgccggacagacggtcagcgtgatggcaggcaacggtgccacgactgctccgacggtcaccacgcagccggacggcacggtggagatctctgccaccagccagacggcggggatcagtacagtcactgcaaccatcaacaacagcagcctgagccggaacgtgatgtttgtcgcggatgtcaggacggcgcagatcgctgatctggtggtcattaaggacggctcagtggcagacggttcgacggcgaacatgctgcgggtgagggtgacggatgcgttcggtaatgcgcttggcggccagacggtcagcgtgttggcggacaacggcgtaacgactgccccaacggtgatcaccgagccggacggcacggtggaaatcagtgtcaccagccagacggcgggagtcagtgcagtcactgcaaccatcaacagcagtagtcagagtcagaacgtgacatttatcgccgatgtcagcacggcgaagatcgctgatctggtggtcattaaggatggttcagaggcggacggttcgacggcgaacacgctgcgggtgagggtgaccgatgcgttcgggaacacgctagccgggcagacggtcagcgtgttggcggacaacggcgcaacgactgccccgacggtcatcacagagccggaacgtgacgtttgtcgccgatgtcaggacggcgcagatcgcggatctggtggttattaa

SEQ ID NO: 40365 - DNA, 1140 bp, Escherichia coli
gtggtgaagttacaaggttcttggtttatacgtaaagttcatttttttcattttattaattctttgctgtttataaagataaaaaaaacgcatgataatgtagggatagtacctttttacttattcaataaagtaaaatcacgttacattcattactcaattgctgattggttactaagacatcgtaactatagcgatattacagaaaaacattttatttcagcgcattacagaaataaagaaataactattaatcttaggtattctgattttatttcacaaaaatatggctataaatcagacaggcttaaaagaataatatcacgactttgctctgatgtatcattgagaaatttaaataaaagtcaaaaattacgcttggcaataatgttatatcaaaatgataaggatgctaaagctaatgaaattattaagcaaatagggaaaaagtttctgttgaaatatacaagcagtccttatgtttttaacaagattaaaaagaataagatttttaatgatccatatatacaaagaggaagtgaacaatattctcacatcttaaaatcacgaaatgagtttataaaatcaattagaaattccgctggtagtttttgtattgttgggaatgcaccaacagaaataaataccggtcatggagcgttgattgattctaaaaaaacagtgattagaataaacaattataccctggactatccggatgattatggtacaaagcaggatatatgggttagagtggcaaataaagaagtaagcaataataatctcaaaaacaatagacttgttatttttgcggcgaataatttcacaataaaaagaagagatgcaaacaaatattttcttgctccacaattaatggaaatggaatatacggttataccaaatcatgtgtacaaatcacttataaaaaaactagatggtctaccaagtacaggactagcagttgcctattgggtttactctatagttggtaaaatacccaaagaatgtttgttcggttttactcatttccataacaataaagattttcatactcattattttgttgatgagaatgaagtgggaacccacctgcatgaatgggataaagaaagaataatttttgaacaaattacaaagtga

SEQ ID NO: 40366 - DNA, 690 bp, Escherichia coli
atgcctacttggggggagttgggttcatattttgaacttctggatacaatatctcggttacaatcaaaatataatcttatattaaagatgcatcacaataatgatgcaaaaatacctgaatgggtagattctgcaaataaagcaaacttaaaacatgtttacgatggttctgcggaccaattaaaattgctttgtgcggcagatttgattataagtgatttttctggggctatatttgacggtatgtatgcagaaaaacctattcttctatatcaagctggattgaaaaacaaaataggtattcaaaaatttgatcttacatctttagagtttaaacatagagacgagataggttatgtttgcactagtctttctgattttgaaccatccataattcactgtctcaataactgtcaagatattgtattaagagcatcaaatcttcgtgaaagtcttttttacgtagataaagaggtaaatgcttcacagctatgtattaactatataaaaaaactatataatgggttaattccgccactaacacaaacgcagctctatgttagagagactgtgcaagagcttcgaacatgtaagccaaagctgaataaacttgaaaaatccattaagaataaaaaactaccattttacagaaaagcgaaaaatttattttctagaaagttaaaagtgtaa

SEQ ID NO: 40367 - DNA, 432 bp, Escherichia coli
atgaaacaaatgtcactaattgagatggatggatttctgaaaggtaaatgcatcccaagtgatttaaaggttaacgaaacaaacgctgaatatctggtgcgtaagttcggtgagcttgaatcaaaactggaaacggcgttgcgggagtgtcgttctgctggaatcacgattgataaccttgaggctaaatgcgcgaagatggctgcagaaaatacctcgcttaagcaatctgagaaggaatttaatgacttttgtcgtgaggagtttggcgaatgggaagatgatgttactgaaaccccagccaccgatgctttcctggctgaagtacgggcgcagggggtagagatgtttgctgaccatctgttgtgcccagaccttgatgacactatccgtgactttgctgcccagcttcgcaaaggaggcaaccagtga

SEQ ID NO: 40368 - DNA, 588 bp, Escherichia coli; identical to SEQ ID NO: 17157

SEQ ID NO: 40369 - DNA, 546 bp, Escherichia coli; identical to SEQ ID NO: 20603

SEQ ID NO: 40370 - DNA, 900 bp, Escherichia coli
  misc_feature (823)..(832): n is a, c, g, or t
atgattatcgccatgctcataattccattgcccacctacttaatcgattttttgattgggctgaacttaacattggcaatacttgtgtttttaggatcattctatgttgataggattttaagtttttcttcattcccatcaattcttctcatcacaacgttatttcgtttggcgctggcgatcagtaccagccgacttatacttcttgaggcggacgccggagaaattataacgagttttggtgaattcgttattggagatagcctggtagttggttttgttattttctccattgttactattgttcagtttatcgtgattactaaaggttcggaacgtgtggctgaagttgctgcccgcttttcgcttgacggtatgccaggtaaacaaatgagtattgacgccgatctacgcgccgggatcattgatgcagatttagcaaaagaacgtcgtagcgtattagaacgagagagtcagctgtatggttcctttgatggtgcgatgaaatttatcaaaggtgatgctattgcaaacattattattatctttgttaatattatcggtgggctatcagtaggagtaggccaaaatggaatggatttctcgacagcgttgaccgtctacacaattcttaccgtcggtgatggtcttgtttcacaaattccagctttattaattgctattagtgcagggtttatcgtaacgcgcgtgaatggcgatagtgataatatggggcaaaatataatgtcccagttattaagtaattcttttgtcattattgtgacatgtgtcctcgcgctaagtattgggttgcttccaggtnnnnnnnnnncttccaggttttccccttcttgtgtttttatgtttggcagtaatcttaggaatttatttttactttaa

SEQ ID NO: 40371 - DNA, 1926 bp, Escherichia coli
gtgaatatatcgaacagtcaggttaacaggctgcggcattttgtccgcgccgggcttcgctcactgttcaggccggagccacagaccgccgttgaatgggcggatgctaattactatctcccgaaagaatccgcataccaggaagggcgctgggaaacactgccctttcagcgggccatcatgaatgcgatgggcagcgactacatccgtgaggtgaatgtggtgaagtctgcccgtgtcggttattccaaaatgctgctgggtgtttatgcctactttatagagcataagcagcgcaacacacttatctggttgccgacggatggtgatgccgagaactttatgaaaacccacgttgagccgactattcgtgatattccgtcgctgctggcgctggccccgtggtatggcaaaaagcaccgggataacacgctcaccatgaagcgtttcactaatgggcgtggcttctggtgcctgggcggtaaagcggcaaaaaactaccgtgaaaagtcggtggatgtggcgggttatgatgaacttgctgcctttgatgatgatattgaacaggaaggctctccgacgttcctgggtgacaagcgtattgaaggctcggtctggccaaagtccatccgtggctccacgccaaaagtgagaggcacctgtcagattgagcgtgcagccagtgaatccccgcattttatgcgttttcatgttgcctgcccgcattgcggggaggagcagtatcttaaatttggcgacaaagagacgccgtttggcctcaaatggacgccggatgacccctccagcgtgttttatctctgcgagcataatgcctgcgtcatccgccagcaggagctggactttactgatgcccgttatatctgcgaaaagaccgggatctggacccgtgatggcattctctggttttcgtcatccggtgaagagattgagccacctgacagtgtgacctttcacatctggacagcgtacagcccgttcaccacctgggtgcagattgtcaaagactggatgaagacgaaaggggatacgggaaaacgtaaaaccttcgtgaacaccacgctcggtgagacatgggaagcgaaaatcggcgaacgtccggatgctgaagtgatggcagagcggaaagagcattattcagcgcccgttcctgaccgtgtggcttacctgaccgccggtatcgactcccagctggaccgctacgaaatgcgcgtatggggatgggggccgggtgaggaaagctggctgattgaccggcagattattatgggccgccacgacgatgaacagacgctgctgcgtgtggatgaggccatcaataaaacctatacccgccggaatggtgcagaaatgtcgatatcccgtatctgctgggatactggcgggattgacccgaccattgtgtatgaacgctcgaaaaaacatgggctgttccgggtgatccccattaaaggggcatccgtctacggaaagccggtggccagcatgccacgtaagcgaaacaaaaacggggtttaccttaccgaaatcggtacggataccgcgaaagagcagatttataaccgcttcacactgacgccggaaggggatgaaccgcttcccggtgccgttcacttcccgaataacccggatatttttgatctgaccgaagcgcagcagctgactgctgaagagcaggtcgaaaaatgggtggatggcaggaaaaaaatactgtgggacagcaaaaagcgacgcaatgaggcgctcgactgcttcgtttatgcgctggcggcgctgcgcatcagtatttcccgctggcagctggatctcagtgcactgctggcgagcctgcaggaagaggatggtgcagcaaccaacaagaaaacactggcagattacgcccgtgccttatccggagaggatgaatga

SEQ ID NO: 40372 - DNA, 276 bp, Escherichia coli
atgctgcatgcagtgaatacgcagcatggtctccagcggatagggccgtcggccattgcccgccttgggataaaacggctcgatgacagcggtcatattctgccatggcaaaatctgctccatgcgggagaggaaaatctcttttcgggtctgacggcgcttagtgctgaattcactatcggcgaaggtgagttgatggctcatgatgtccctctgggatgcgctccggatgaatatgatgatctcatatcaggaacttgttcgcaccttccttag

SEQ ID NO: 40373 - DNA, 276 bp, Escherichia coli
atgcaggtttcagcgattcgcttccttgaagcagctcctgtgccaaaggccgtactggaagaattcgcttatcgcgtaacaccgacatcttggtggggaagtcgagttaacgtaatgcaacccagagcaaatactattagtagattaatagagcatgagcgtacagatattgctgcggcagctagaattgtttccgagaaattaaacgattggatagaacatgaaaagttgcaagagcagcaggaggatgagatgcgcgaacaacgcttcgaataa

SEQ ID NO: 40374 - DNA, 543 bp, Escherichia coli
atgaaattgcacctgatgaacaaaaaaaacatggcaaaaagttgccgtgtaagcgccactgcgtttgataagtggggagtgattcccgtcgagcgtaagggccgtgaggcattctatgatgttgccagtgtaatagataatcgggttaacaatgcaattagccagattacaaacgaaacgggcgatattgatgacgatgaacttttacgcgtcaggatcagattactgacagcacaggcagaggcgcaggagcttaaaaacgagcgcgaacgcggcgacgttattgatacagagttttgtatgtatgttctttccaaactggcgagtcagatttcatctatcatggacagcctgccgcttaccatgcaaaggcgcttcccacagatgactccggctatgctggatggacttaaaaaggaagtggctaaagcctgtaatgccagtgccggagttgacgacaacctcccgcagatactggctgattacctgatggaaactaccggaaatgtgccggataagttgcagccgaataaagacaagtaa

SEQ ID NO: 40375 - DNA, 285 bp, Escherichia coli
atgacagaatctgaattgctgggattaatccgccgcgttaccggaatcaaacaaccatcaagcaaacaggaggccacgcagccggacagcgtgatagccgaaaattacgcgcgtgtggtggctgagatgatgcgccgtgacggtatcgagcttaacggcgtggatatgcgcgacatacggatcagagtccttgagttgctggcataccgtcgccgttctcaacaacggagggagagcgcgaaaaatacttaccagtggaagaaaccggaacggttgcggcggtag

SEQ ID NO: 40376 - DNA, 468 bp, Escherichia coli
atgtcaattcttcgtatggctaatccagccaaactacgcgcgcgaattatttcactgggtcgagagtacccagtagatcaattgattaatcatgtttaccttcctgttcgccagcgtctcgtgcttgatcacaacacctcccgcattatgagcagtatgtttgacggcgcattaattgaatacgcagcggccttacttttcgaaatgcgccgtaagcccggtaaagaggccattctgatggcgtggaatgttgaagagagagcacgattgtggctggaagcatggcgtttatcattgtcaggatggcacatttctgttcttgctgatcccattgaatcgccgcgcccggaactgttcccaacgcaaacattgattgtctggacaggcatggcaccaacgagaaggcaaaacgaacttttacaacactggggtgagcaaggttataaagtcatctttcatgccccctaa

SEQ ID NO: 40377 - DNA, 291 bp, Escherichia coli
atggtaatgaaacctcagcaggctttccaggcagaacttcgtggtgaaacggaggaatgtttcattgaagacttggtagggaaaattaatgctaatatgattcttccgtatccaccaggagtacctttagttcttcccggagaaatgattacagagagcaatcgtccggttctggagtttttgttaatgctttgtgaaattggtaaccactatcctggttttgaaaccgatattcatggtctgtatcgaaaggcggataacaggtatactgcaaaagtcattaaaaaataa

SEQ ID NO: 40378 - DNA, 324 bp, Escherichia coli; identical to SEQ ID NO: 10084

SEQ ID NO: 40379 - DNA, 324 bp, Escherichia coli; identical to SEQ ID NO: 9185

SEQ ID NO: 40380 - DNA, 249 bp, Escherichia coli
atgtcagaactagtcatgaagatgtttgggctgaatgatttggtcaaaggcggacaagccatggccgatcgtttgaacaaatctggtgttaaaaacatcaaggtcgtagggcgtggtgcagttattgtagacccatctactgacccagaaaaaatcactcagcttaggaaagcagctagaaaattcgtcgagcaggatgcaaaagctgttgcagccgctaaagctaactcaatggacaatgacgactaa

SEQ ID NO: 40381 - DNA, 819 bp, Escherichia coli
atgtttgcattgctgatcattccacttttagtaagtggatccttactggttacatcgccccataacatcaaattattctatcgactccaccgttacgacggccagcttctctatatgaaggtggccacgtacggtgtgtactcgttcattgttgcagtcgtgctggcgtatgcaaccaagtactttataccaagccttacactggtcacatgggtatcacatcttattgatggtagtgcagaccctaaagaaaacaggataacatcatggctcatcctgctatcagtggcgacttgtggagttgcttttatttggttgcagatatgcaaatttcgtatgtttgtggcagcaaaaactattagttctgcatccaataatgcaatttctatcaatttcgcaaagcaactaatcaggcttaatgagttggaaaaactgttgtctgatggctcacttggtcagctattctttgattcagcgactacaaacagaccggtactgataagcctgaaatgccgcaaagtatatgtcggaacagttaacatgattagtgagccaaacgaaaaacaaggccctaaccttgaaatttctattagcccaatcatatctggttacagggacaaggacacactaagggtcctgttttcaaatgattacaacgatcttgatggagttgataccagtatcatatttccattaagtgaggtttcgcatgcttcttggttcaatatggatatacatgaaaaagtagacaataaccgagagaagaaaccagaaacaaaccgcaagaaaaaacgtaaatatggcaggactacgaattga

SEQ ID NO: 40382 - DNA, 879 bp, Escherichia coli
atgacctttacaaggactaatagtggtttgtcatccattcatcatttccatgatgtagatctaatcatttacattgaggggaaagtgagtgatttaactgaagcggccactccagataatgatctctacgacataaagttctatagaacgctgtttaatattttttctagcaaaaaagtaaaaattaacattgcaggaagcaaaagagatgctcttaattaccatgacaaaatagtcgctgaaaacataggtaatcaatttgttattgtcgacagggactatgtagatatacttgggaatagaattaattctagaaatatttttttcactaaaggatacagttgggaaaatgatttctggagcaaaaaattatgtgtgcacttgatttcattacttacaatgaataatgcttccgcgaatgatgatttgataaaaacacttcgcaaaagtgtaagaagattatcactactttataagcttaacatattgatgttaaaaaaaggaagttttttatttaagatatcggacaaaggaggaaaacttggaatcaatgttgatacatcactcccacactgcatttccaaaatagaatttgaacgtttagtgcaaaaagctaatggaatagtgaccaaggaggaagcaattgattatatcaaaaataacaagttcgaaagtttctctataatccagggccattttttggagtatttagtgcttaaattaacactcacaatgagcaaaaaacactctaatgccaagagcaatattgattttaatgcattaaaaaatattgccatgacttgcttcatgactaacccaaatttatttatgtcttctaaggtgcttaggcactatcaacgttttatatctacactctag

SEQ ID NO: 40383 - DNA, 1284 bp, Escherichia coli
gtgaacatagtcagcagcattgctatccaggggctttggggaaaaaaggatgttaatattaaagtaaatgaaaacttcaatttcatcataggtgtcaatggtacaggcaaaacaactattattgacctcatatccgctattttaatgtgtgatatagagaaaatagatagaattgatttcatttcagctagaattgtaatgaaagaagttgggaagaataaaaaacctataattgaagtatacaaacaaggagtggacattagtaataatgtcataaagtacattataaaaaaaagcactacagatcaaagcccagcagaatatttttttcacgactcgttcaataaatctcctcgtagatattacgacgatgaaaaaaaactgtatataaaaaatcatatattgcattctagagaattgaatgtaatattttcagaaatgtttaaactatcgtggctatcagtccacagagcagataatttctcaaatgataacgcaggcaactacaaaaacaactcgcttatcgatgttaagctttttgaattaaacaacaagatggttcgctatttttctttactagaccaaaggtttgcagagcaaacaattgattttcaaaaaaacgtttttttatcggtcattgataataaaggcatttcgccgaccaattcaatagcaataaatgttgatgaagataagtcaactttaagtgatgtatttagaactttaggcttagaaaagcgtagatatgacagaaaaataaacgaactctatcaaagagttgagcacatactcaaaaaaagagattccagtgaagaactttcctttgatgaattcatggtcttatttaattctattagagctcatgagttggtaagtgcatatggttcattacagaacagcaaattagtaatattcagtccgagagataactttattgaattgctaaacacattatttgatggaaggaaaaccttttttgtttctgaagagaatgaactatcaataagaaatcgtgatgggagatctgttgttttaaaagacctttcatccggcgagaaacaaatgataataatacttggcgaggctttattacaagagatgcatcatacaatctacatagcagatgaaccagagttatctcttcatgtaaactggcaagaggggctaatagaatcaatatcaaaaataaacccaaatgcccaaataatatttgcaacacactctcctgatattgtaggaaaaagacaagaataccttataaaaatagaggaatttctcaaatga

SEQ ID NO: 40384 - DNA, 258 bp, Escherichia coli
atgcactcacaccatcatcaaatatctatgagccaacttaccatgagttcacccattaaaggtttttcactgtatgtagaaagcgaagacgtggctgtcgcgatagctgaacttgaaaaggccttatcacagctcaggaacggagataaggcattcaaagaaagtggtacgctggttggtaacgtcagagcaagttattgctatccttaccgcccccattgtgtcgcgaaaggtctttattgggatgaaggggattaa

SEQ ID NO: 40385 - DNA, 513 bp, Escherichia coli
atggaactatttttggttgatcgccgaggaatatactcaactggcgatattgttacaccaaagcgattctccgatataagtcctgtcgaaatgtcatctctggtagacaaactttttccgtgcgggcttgcaccacatggcgagggataccttattaacaatgcggcaaaaatttataataaaaacgaattcatcgactgggggttagagttttaccgaagaggagtttacccgcaaaaaccttctcgctatacgtcactcttcgcatggggtaacctggaggaggctaaacattttcgacttacagacgggaaaccatcagataaaatcttcataatacaaacagatagttatcatcgcggagatatgtcattattaagaaatgatacatcagtactggaattcacctacagaatggaactttactgggcaggtaaaacctttaaccctgatccagtctgggaatacatttgtccgctaccagtaactatcggtgaacaagtccttgcttaa

SEQ ID NO: 40386 - DNA, 699 bp, Escherichia coli
atgcaggacatacaacaggaaacgctgaatgaatgcattcgtgcggagcagtcggccagcgtggtgctctgggaaatcgacctgaccgaggtaggcggggatcgctactttttctgcaatgagcagaacgagaaaggagagtctgtcacctggcagagtcggcagtatcaggcctatcccattcaggggagtggatttgagatgaacggcaaaggtgccagtgcaaggccaacgctgaaagtctctaatctgcacggcatggtcaccgggatggcggaagacctgcagagtctggtcggcggaacggtggtcaggcgtaaggtttacgcccgttttctggatgcggtgaacttcgtcaacggaaacagtgacgccgatccggagcaggaggtgatcagccgctggcgtattgagcagtgcagcgaactgagcgcggtcagtgcctcctttgtactgtccacgccgacggaaacggacggtgccgtttttccggggcgcatcatgctggctaatacctgcacctggacctatcgcggtgatgagtgcggttatcacggtccggcggtcgcggatgaatatgaccagccgacatccgaaatcacgaaggataaatgcagcaaatgcctgagtggctgtaagtttcgcaataatgtcggcaactttggcggcttcctttccattaacaaactttcgcagtaa

SEQ ID NO: 40387 - DNA, 942 bp, Escherichia coli
atgtgtaggaacattatggccgctaacagcggggcttgtgaagccctaagcaacctaaatttattcagagagcgtcttcctcgtaagccgtatcacaccgaacaccttcagcacgggcttcgcatccgcgatgcgctacaggcgattaacgcccgatatatccagccgaacggacccactcaccgatactggctggtgtacgacattgaccacagcctggcagcgattgactggagcgacaggaacgcgccaccgccaacaatcgtcgcgaaaaatcccgccaacggtcatgcacacctgatttacgggctgcaggtaccggtcagaaccgcgcctgatgccaaaacagcgccgttacgttatgccgccgccatagactgcgcgttacgcgacctcctcggcgcagacgaggggtattctggcctgatctgtaaaaatcccctgcatccacactggcaggtgtttgagtgggagccgcgtctctacgagctgggcgatctcgatagctggttagacctgacgccgtacagcgaccgccgcaggaagctaccggactacggcttaggccgtaactgcaatctgtttgaagacgtgcgcaaatgggcttacagagccatccggcagggttggcctgattacgaccagtggcttgaggcgtgcattgcacgcgctcaggggtacaacgttcagcactttgccggcacgccagccggcagactgccagaggccgaaatcctgcataccgccaggagtatcgcgaagtggacgcacaaacacctttcccctgccggatttagcgcatatcaggccgcacagggccgtaagggtggcaaagcatccaagcggccgcctgtggctggctcagagcgcacagagaagccttgggagtcgttgggcatctctcgccgcacgtactaccgccggaaaaatggcaccggataa

SEQ ID NO: 40388 - DNA, 333 bp, Escherichia coli
atgtcagctgttaagcgagagaaaatcatcaagattcgggttaccgaagacgaacaccaggcgttaaagcaacgttgtccaaaggcgcagttagccgaatggatgcgcgagcactgtcttggcgttgaaacctcgcgctcccgtaaaccgcagagctatgaagcggttgatcctgcgttgctccggcaactggcaggcatcggcaataatctgaatcagatagcgcgacggattaaccgtggtgactggaaagcgctggacaaggctgcggttatctccgtgcttatccagatagaacgcgagttatccgacgttaaggcgttatatccgtga

SEQ ID NO: 40389 - DNA, 291 bp, Escherichia coli
atgttacgcccaaaacgtcgtcgctgggttaatgaaaagtacacgcgctgggttaagacgcagccgtgtgcatgttgtggtaagccagccgacgatcctcatcacctgattggtcatggtcagggtggaatgggtacaaaagcgcatgacctttttgtgttgcctttgtgcagaaaacaccatgacgaactgcatgcggataccgtggcatttgaagagaagtatggttcccaactggagctgatatttcgttttatcgatcgcgcgctggcgattggtgtgctgtcctga

SEQ ID NO: 40390 - DNA, 291 bp, Escherichia coli
atgttacgcccaaaacgtcgccgctgggttaatgaaaagtacacgcgctgggttaagacacagcagtgtgcatgttgtggaaagcccgcagatgatccccaccacctgacaggtcacggtcagggtggaatgggaacaaaagcgcatgacctttttgtgttgcctttgtgcagaaagcatcacgacgagctgcatgcggataccgtggcatttgaagagaagtatggctcccagctggagctgatatttcgttttatcgatcgtgcgctggcaattggcgtgctggcctga

SEQ ID NO: 40391 - DNA, 297 bp, Escherichia coli
atgaacggtatagatccattcaaaccaatcagtaagcaacttgatgtggtattaccacaactgataaaacacgacgatcttctggataaagtgttgcctttttatattgctgttaccgcaaaattatcaggtaaaactcgagaagaggttctcaaatataacatgctggctttagaaacaatttttggctcagaaaaagcgggaaaatcacccaaagagctggcagaatctcaatttgcttatatgacaaatataagagtatccgaaatctttgataagctaccagacattgaataa

SEQ ID NO: 40392 - DNA, 219 bp, Escherichia coli
atgactaaaaactatgaactgattgtgaaagggacccgcaattttgagaataaagttacggtaatcttaacgttacaggacaaagaacgttttgccggtgaaatttttgatctgaacatcaaccttgagcgacttgaaggagctggcttggattattatgaagttactgcggtaaaacatgccaaacagttcttgagagatttggctgaaaaaatataa

SEQ ID NO: 40393 - DNA, 780 bp, Escherichia coli
  misc_feature (762)..(771): n is a, c, g, or t
atgaaaatgggaaaaattgcagttactcctaataatgataaagcagccagccactctaaagatgaaaatttagccacaaatacaattaagaaaaacgtaaaacctaaatatggcgatgcggcatttttagagtacactcgactaatagttaaccacccgaattattttggaatgccagatccctttggggaaaaaggtgagattcaatgggaagctccatcaaatagggcatcggggaaatttaaacacactcatcaacggcgctatgaatggtggaaaaataaagccagaagtattgggatagaccctgacactgaaaaagcatggattagtaaaacagctaaactaattcatccacttggagttaaaccatgcaagaaatgcggtaaagaaatggaattatcttactcctacccaaatgagcatttcttttctcgggttaggaaacttaattatatagatgagacttttgagctatctcaaaatgaacacatagttgatttgttgactcgtttagatgatagatttggtgaaagaatatatttagatttaccacatttattttctacaaaatccatcacgattccagatatttcaagcaatctcgaagcatggattgagtatctaaaagaacaatacatacctcaagaatcacgtatgcttagccctggagccatggcaaatcctccagatcgttttgatggatttcattcatttaaccgctgttgtcgctctattgctgataaaggaaggaccaaagannnnnnnnnnaaatcttaa

SEQ ID NO: 40394 - DNA, 825 bp, Escherichia coli; identical to SEQ ID NO: 8349

SEQ ID NO: 40395 - DNA, 240 bp, Escherichia coli
atgatggatctattgatttgggcaaaatttaaaaaagtaaaaatctcaaatatggtgttgtctcgtgtcttgtatcccgactttacaaatgagatcagaggagaagatcacattaaagatacagacaggcctgttgcagagaagtcattgaatggagaaacaacccgtagtctggaatactttattagaaaaaacagccatctcctcaacataccgatttctgaactcggctctttctag

SEQ ID NO: 40396 - DNA, 672 bp, Escherichia coli; identical to SEQ ID NO: 33817

SEQ ID NO: 40397 - DNA, 333 bp, Escherichia coli
atgttttctataaaaccagaacccagaaatttacctatcgacaaccccacattgttatcatggaacattactgacggggatctaaattccaaattaaatacattagaatatctaaactgtataacaaatattattaattcttgtggagtttaccctcaaggatttaaagacagagaaattatatcaacttttcacgcagaaaaagttattaatgatctgttaaaaaacgattataaaatttccctttctccagatacaacttaccgagagttgaataaagcagcacagcgtagcattacagcgccagacaggataggagaaagaaaaacatag

SEQ ID NO: 40398 - DNA, 294 bp, Escherichia coli
gtggtcgcggaagaaacgctgcatatagccgggatactggccacgcgcctgaacatcaccaaagaacatccagcgccggttctcttccatggcctgcaacatatcctgtggctggcaggtgagggggtaaaccagcccaccgagaagcatattgccgattttcgcttcggggagcaggctatgacaggctttaactgcccgcgcactggcaaccagttgatggtggatagcctgataaacttccgcctcgccactctcttctgccagccccacgcccgtgaatggcgcgtgtaa

SEQ ID NO: 40399 - DNA, 246 bp, Escherichia coli; identical to SEQ ID NO: 21664

SEQ ID NO: 40400 - DNA, 747 bp, Escherichia coli
atgagccaatatctaatttttcagcttcatgggccgatggcgtcctggggtgtcgatgctccaggtgaagttcgtcatacccatgaacttccttcgcgctcagcattgctggggctactggctgccggggtagggattcggcgtgatgataccgaacgcttaaacgcgtttaatcgccactattcactggtggtttgcgccagccgtaacccgcgctgggcacgggattatcacacggtccagatgccaaaagaggtgcgtaaagcacgttatttcagccgtcgcgaagagttgagcgaccctgagcttttgagcgcgattatctcccggcgcgactactacaccgatgcttggtggatggtggcggtggcaacaacccccgatgcgccttacagcctcgaacagttgcaggacggtttacgtcatccggtttttccgctttatctggggcgaaaaagtcatccgctggcgttaccacttgcgccgttactgctcgaaggcaacgcgtctgatgtcttacgtaacgcataccaacagtatcaggatcgtttccgcgaactgaaagtctcactcccgaaacttcaggatgaatgctggtgggaaggggagcacgatggtttggtcgcaagcaaaatattacgccgccgggatgttcctttaaatcgtcagcagtggctgtttggggaacgcaccatcaatcaggggccgtggctcagcaaggaggaaccatgtacctctcaagaataa

SEQ ID NO: 40401 - DNA, 135 bp, Escherichia coli
atgaactcgttttcacttctgacaaccccgtggttgcccgttcgttttaaagacggaacgacaggcaaactggcgccagtcgatctggcggatgaaaatgttgtcgatatttctgcgccgcgggcagatctctag

SEQ ID NO: 40402 - DNA, 294 bp, Escherichia coli
atgagtcttttgcaaattatattgtatgtgaatcaagaacacggcagagggaatatgaaaaataacacacaagcctttattaaggcaattgacaggatgatgatagataatgaagagtattttacgattttgagagggttgaaagatgaaaacaaccaagcattaaaggataaagtttacaatgatttcaatttagagaataatgactctcattttaattcacttgattcatttaagaatttaatcagcaatcatgttcttagttgtgaaaccagctatgacatggatgtatga

SEQ ID NO: 40403 - DNA, 618 bp, Escherichia coli
atgataccgttgcagttaatgcccgaaccgcagaattttgatttgaatgtcagacaaaagggtgctttatttcttaacaaggtgccaaatcccaactataaagattttgtaggaaaagattattggcgaaaggcagcaaaagaactttatagttcctatcgttctatctgtgcatatagctgtatatatttacctacatctcctggggttgtggatcattttttacctaaaacgaaatatcctcaactcgcctatgaatggagtaattataggttatgtttggatagacttaatcagtataaaggtaatattgagaatatttgtgatccttttacgattgaaatcggctggttcgttcttgaccttccaagctgtttgataaaaccaggtgaaggtctcccccaagaactccatgataaaattttatatactattgatgttttgaagttaaacaaggatgatggcttagttcaaaatcgatgtgatatcatcatgtatcttatagaaggggatataaatatgaatttcgtggaggaaaagtatccattcatagcacaagaaattaagagacagggattagtcaataacttatctgatatttttaaaagaatggattag

SEQ ID NO: 40404 - DNA, 1002 bp, Escherichia coli
atggttcccggatggattgaccccgatacttttaaactcaatgaacacgctgagactgtaagactgattttcaaactgctgctagatggtgaaagtctgcataacattgcacgtcacctacaaagcaacgatataaagtcttttagtcgccgtaaagatgctaacgggttcagtgttcatagtgttcgtactgttttgcgctctgagtcagtgataggtacactaccagcatcacagcgcaatgaccgccccgctataccgaactactacgaagccgctatagatgctgcaacgttcaataaagctcaagaaatcctcgataaaaatcgtaaaggccgtacacctgcaagtgataacccattaacgattaacatcttcaagggattattccggtgtcagtgtggggctagtgttcaccctacagggactaagaataagtatcagggcgtttatcggtgcaataaccatcttgacggtcgctgtgatgttccaccgttgaagcgtaaaccgtttgaccgatggatgattgataattttctggggatgattgacgtggggaatgatggagaatcagagaggaagattgcagcgttacagcatgaggttgaaattgtcacatctcgaatcaagaaagctaccgccctacttctcgaaatggatgacattacagagttgaaagcacaggtgaaggaactgaaccagaagcgcacagaactacagaccactatcaacactatgaagcgtaaaacctcactcagtgacaagggattaccccaactcaaagacattgaccttatgactaaagcaggtcgtgttgagtgtcagttgattttgtccaagcatctaaaagggcttacattgggtaaggattcggtaactgtaacgctacagaacgacactgaaatcaccatacctacaaacccgttaccgctaaatgatgggtcaccaatctttgaaattgctgataaagagctactggatgttgacgcttatcaactgtaa

SEQ ID NO: 40405 - DNA, 621 bp, Escherichia coli
atgcgccagaatgcgctgttgcttgagcgaaaacctgctgtaccgccatcgaaacgggcacatacaggcagagtggccgtgaaagaaagcaatcagcgatggtgctctgacgggttcgagttctgctgtgataacggagagagactgcgtgtcacgttcgcgctggactgctgtgatcgtgaggcactgcactgggcggttactaccggcggcttcaacagtgaaacagtacaggacgtcatgctgggagcggtggaacgccgcttcggcaacgatcttccgtcgtctccagtggagtggctgacggataatggttcatgctaccgggctaatgaaacacgccagttcgcccggatgttgggacttgaaccgaagaacacggcggtgcggagtccggagagtaacggaatagcagagagcttcgtgaaaacgataaagcgtgactacatcagtatcatgcccaaaccagacgggttaacggcagcaaagaaccttgcagaggcgttcgagcattataacgaatggcatccgcatagtgcgctgggttatcgctcgccacgggaatatctgcggcagcgggcttgtaatgggttaagtgataacagatgtctggaaatatag

SEQ ID NO: 40406 - DNA, 582 bp, Escherichia coli
atgattaagtcggttattggcggtgcggtagctatggcagtggtgtcttttggtgtaaatgctgctccaactatttcacagggccagggagaagtagctttcaaaggaactgttgttgacgctccatgtggtattgaaacgcagtctgcaagacaggaaattgattttggtcagatctctaaatccttcctgcaagaggggggagagactcaaccgaaagatttgaatattaagcttgtaaattgcgatatcacaaattttaaaaagaaccagaacccagcaggtgctggggcagccaaagcaggaacggtggctctgactttttccggcgtatccagtgggaacaataaagatatgctgcaaacagttggagatactaatactgcgattgttgttactgattcgaatggaaaacgggtgaagtttgatggagccactaagaccggggcttcaaatctgattgatggcgataacacaattcattttactgcatttgttaagaaagatgacggaaacggaaaaggccccgtaaaagaaggtgccttctcagccgttgtgaatttcaacctgacttatcagtaa

SEQ ID NO: 40407 - DNA, 177 bp, Escherichia coli; identical to SEQ ID NO: 27493

SEQ ID NO: 40408 - DNA, 786 bp, Escherichia coli
gtgatattggttgtctggagattcagggggccagtctatggtgcttatgctaatgggaaaaaagcatatattaatttagattatgtggcacttgaaactgtggctgatggaagttatgcagttgctattcgacaaggtaacattgatataaaaaatagttctattacaacaacaggcactaaagcccccattgcaaaaatatacaatggtggagagttatttttttccaatgtcaccgcggtatcaaaacaagataaaggaatatcaattgatgcatcaaatatcgattctcaagccaaaatagcactattaagtgttgaactttcaagtgctttggatagtattgatgttaacaaaactacaacggatgtaagtatccttaatcgaagtattatcacacctggtaataatgttctggttaataatactggaggtgacttaaacataatttcgtccgactctattctaaatggagcgactaaactcgtcagcggcacaaccacgctgaagctttcagaaaatacaatctggaatatgaaagatgactccgttgttacccatctgactaattcagacagtattatcaatctttcgtatgatgatggtcaaacatttacccaaggaaaaacattaaccgtaaaaggtaattatgtcggtaataatggtcagcttaatatccgcaccgtattaggtgatgataaatcggctacggacagacttattgttgagggtaatacttcgggttcaactaccgtctatgtgaaaaatgatcttacccagcaatag

SEQ ID NO: 40409 - DNA, 441 bp, Escherichia coli
atgcgccagaatgcgctgttgcttgagcgaaaacctgctgtaccgccatcgaaacgggcacatacaggcagagtggccgtgaaagaaagcaatcagcgatggtgctctgacgggttcgagttctgctgtgataacggagagagactgcgtgtcacgttcgcgctggactgctgtgatcgtgaggcactgcactgggcggtcactaccggcggcttcaacagtgaaacagtacaggacgtcatgctgggagcggtggaacgccgcttcggcaacgatcttccgtcgtctccagtggagtggctgacggataatggttcatgctaccgggctaatgaaacacgccagttcgcccggatgttgggacttgaaccgaagaacacggcggtgcggagtccggagagtaacggaatagcagagagcttcgtgaaaacgataaagtga

SEQ ID NO: 40410 - DNA, 672 bp, Escherichia coli; identical to SEQ ID NO: 33817

SEQ ID NO: 40411 - DNA, 174 bp, Escherichia coli
atggactggctggctaaatattggtggattctggtgattgtctttttggtaggcgtcctgctgaacgtgattaaagatctcaagcgcgtcgaccataagaaatttctcgccaacaagccggagcttcccccgcatcgtgatttcaacgataagtgggacgatgacgacgactga

SEQ ID NO: 40412 - DNA, 615 bp, Escherichia coli
atgaacgcaataattattgatgaccatcctcttgctatcgcagcaattcgtaatttattgatcaaaaacgatattgaaatcttagcagagttgactgaaggcggaagtgccgttcagcgggtggaaacacttaagcctgatatcgtcatcattgatgtcgatatccccggagttaacggtatccaggtgttagaaacgctgaggaagcgccaatatagcggaattattattatcgtctccgctaaaaatgaccatttttacgggaaacattgtgctgatgctggcgctaatggtttcgtgagtaaaaaagaaggcatgaacaatatcattgcggctattgaagctgcaaaaaatggctactgctatttccccttctctctcaaccggtttgttggaagtttaacgtccgaccagcaaaaactcgactccttatcgaaacaagaaattagtgtcatgcggtatattcttgatggcaaggataataatgacattgctgaaaaaatgttcatcagcaacaaaactgtcagcacttataaaagtcgcctgatggaaaaattagaatgtaaatcactgatggatctttacacattcgcacaacgtaacaaaatcggctaa

SEQ ID NO: 40413 - DNA, 153 bp, Escherichia coli
atgaaacaggaagtggaaaagtggcgaccttttggacatccggatggtgatattcgtgatttatcatttcttgatgctcatcaggctgtctacgttcagcatcatgagggcaatgaaccgccccgggtttcctggagagtgttttatctgtga

SEQ ID NO: 40414 - DNA, 747 bp, Escherichia coli; identical to SEQ ID NO: 40400

SEQ ID NO: 40415 - DNA, 390 bp, Escherichia coli
atgacagatggtatctcaacttcgccacattgtctttataaatcaaatatagtagatgatgtaataataaataaaacaagacaaaatgagttagtaaaagtgttttgcgagtataaaacagagttcttaattttgtttgatgactttttcagaagccaggattttcctaaaccatctccagtcctccatcatttttttcaatatactcatctgagagatgcacatttttatagatgtaaactcatagaacatacagttcaattttattttttaaacacaaaggcatcacattacttagattggatgtttttgatgacagaacaagcgaatgtctttctgaagagattaagatatatcaagaatgctatgaaaaattcgttaagttcttaa

SEQ ID NO: 40416 - DNA, 201 bp, Escherichia coli
atgctatgtattaaattcgaatatttgacagataaaatgattaagcatgtatcagacctgctcatcaaagaaggtggtttcggtgatgcttgcaatccaaaagatatcttcattcatgccaccagcccaaacgcaacactaaagacagcagttacagcggaatggtttgaacgaaataaagcggaattaggttattggtag

SEQ ID NO: 40417 - DNA, 2190 bp, Escherichia coli
atggcagcagtaaaaatctcaggtgtgctgaaagatggtgcgggaaaaccaatacagaactgcactattcaactgaaggcaaagcgtaacagcaccacggtactggtgaacacggtggcttctgaaaatccggatgaagccggacgttacagcatggatgttgagtatggccagtacagcgtcaccctgctggttgaaggttttccgccttcacatgccgggaccattaccgtctatgaaggttccagaccaggtacgctgaatgattttctcggtgccatgacggaagatgatgtcatgccggaggcattgcgccgttttgaggtgatggtgaatgaagtggcacgtcatgccggagcatcatctcagagcgcagcggcggcaaagaaatccgaaactgcagcggcatcatcgaagaacgcggcgaaaacctcagaaacgaatgcagctaacagcgcacaggcggcagcgacctcacagactgcatcggcaaactccgcgacagcagccaaaaaatcagaaaccaacgcgaaaaacagcgagacagccgcaaagacgagcgaaaccaacgcaaagtccagccagacggcagcgaaaacaagcgaaacgaatgccaaagccagcgaaactgcggcgaaaaacagtcaggatgcagcagcccaaagcgagagtgctgcagctggttctgcaagcgcggcggctgcttctgccactgcatcagccaacagtcaaaaagcagcaaaaaccagtgaaaccaatgcaaagacaagcgagactgcagcggcgaactcggcgaaagcatccgctgcaagccagaccgctgcaaaagcaagtgaagacgcagccagagagtatgcaagccaggcagcagatccgtataaatatgtcttacagccgctgcctgatgtgtggataccgtttaacgattcactggatatgattacgggcttttcgccatcatataaaaagattgttattggtgacgacgaaataacgatgcctggcgacaagattgttaagtttaaacgtgcatcgaaagcaacctatattaacaaatctggtgtgctgacagaggctgccattgatgagccacgatttgaacgtgatggcctgcttattgaggggcaaagaactaatcttctgcttaattcaacaaatccatctaaatggaataagtcaggcaatctggaactcacagaaatatccacggattcttttaattttacttatgggagatttactgtaaaagatactcttattggtcagacaagtgctattaatatcgtaacgatttctggcagtaaagggtttgatgtcacaggtgatgaaaaatatgtgaccatttcatgccgtgtaagaagtgatgttgaaaatataaggtgtcgtttaagatttgaacaccatgatggttatacttacacttttttgggagatgcttacctcaatttatcaacacttgtaattgataaaactggtactgctgcagaccgtattattgcaaaggctgtaaaagatgaggttactggttggattttctatcaggctacaattaatgcactagatacagagagcatgattggtgcgatggttcaatacgctcctgtaaaaggttcaggtacagcatctggagactatctggatatcgcaactccacaagtggaaggtggatcaagtgcttcgtcatttattgtaactgatataactgcaagcactcgcgcaagcgatatggtgacagtcccaatcaagaataacctttataatcttccttttacggttctttgtgaggtacataagaactggtataaaacgccaaatgcagcaccgcgtgttttggataccggcggtcatcaaaccggagcggctattattcttggcttcggtcgttcaacagattacgacggatttccttattgtgatataggtttggctaacagacgggtaaacgaaaacgcatcgcttgaaaaaatggttatggggatgcgtgtaaagtcagatcagtctacgtgctcagtaagtaacgggcgtatatccagcgaaaagaaagccacatggtcctatattcagaactccgcaattatccgtattggaggccagactacagccgggttgcgtcatttatttggtcatgtcaggaatttcagaatatggcacaaggcattgactgatgctcagatgggggagtcaatctaa

SEQ ID NO: 40418 - DNA, 471 bp, Escherichia coli
atgcgctggctcaacgactggattttttcctgttcgcggccgtattccggtgcaacccattgcatcaggggaatacgggaaaaaccggacgaaaacggcgatgattttttcaggctggcagcatggctcatcgcttcctttcgttcggtgttcagatcttcccagcgtctgcgcgtcgcctgcatatctgccatcatcgacatggctttactggtgagtttccatgctgcgttactgtccgtcggcaacgcttcgatgatgtcatgcagtatgtacgaagttgcgttgtcaggaagctcaatattcagaaggtcagccatacggcgtgcgggctctgtcagctcactgttcctgagttcgtcgcgggaaacctgtatttccaggttaagcctgttaatcaggcgattctgttcgccgcgttctgtttcgatgccccacttttccatcgcacaggccgactttccgaggtga

SEQ ID NO: 40419 - DNA, 129 bp, Escherichia coli
atggcaaccaaaaagtggatgaacgaggtacaacaaataacactcatattatcaaccatggccagcagaatgttcatggcggggtatctaatggaagtcttattgaatctggtggatatcaagatatag

SEQ ID NO: 40420 - DNA, 855 bp, Escherichia coli
atgcaggccattgcggcggaaggtgatgtcaccacacctgtggtggtgaagccgtcggatggagaaggcgcagttatcagcaccaccagcaacccggagtattactttgttgttgccctggccgggcagtcaaacggtatggcgtatggtgaagggcttccactgccggagacatatgaccgtccggacccgcgtattaaacagctggcgcgtcgcagcactgtcacgccgggtggtgcgtcctgtaactacaatgacattattcctgcggaccactgcctgcatgatgttcaggatttgagtaagttttcacacccgaaagccagtgcagctcagtatggatgcgtggggcagggattacatatcgcgaagaaattgttgccgtttattccggcgaatgccggtattcttctggttccttgctgccgtggtggttctgcatttttggcgggcgatgaaggtaccttcagcgaatccaccggcgcaagcgagacctcggcacgctggggtgtagataagccactgtacaaggacctgcttacccgtactcaggccgcactgaaggccaaccctaaaaatattctgcttgcagtggtctggatgcagggcgagtttgatttgaaacagggtgcatacgccactcagccggggctgtttgattccatggtggaaaaatatcgttctgacctgtcggaattcggaggtcagtgtctcgggggctctccgtcatcggttccctggatttgtggcgacacgacctactactggaagcagacttattcttcgcaatacgatgcggtgtatggtgcatacaagacgaaatccgcaaaaaaatcttctttgtgccgtttatga

SEQ ID NO: 40421 - DNA, 261 bp, Escherichia coli
  misc_feature (245)..(254): n is a, c, g, or t
atgaaaatagcgtttatcggcgaagctgtttctggatttggcggcatggaaactgtcatccgtgatgttattactaccttcaggcaacaacatatccaaagtgaaatgtttttcttttgtcgtaatgacaaaatggataagggatggctggaaggtattaaatactcatgttcattttccaatattcgtttaggttttttgcgtcgggcgaaacatattcatgctctaagtaaatggcttcaggnnnnnnnnnngatgtga

SEQ ID NO: 40422 - DNA, 537 bp, Escherichia coli
atgtcatttattaaaactttttccgggaagcatttttattatgacaagataaataaagacgacatcgatattaacgatatcgcggtttccctttcaaatatctgtcgctttgccggtcatctttcgcacttctacagcgtcgcccaacatgcggttctttgcagccagctggtgccgcaggaatttgcttttgaagcgttaatgcatgatgcaacagaagcgtattgccaggacattcccgcaccactgaaacgccttcttcctgactataaacggatggaagaaaaaatagacgccgtaatccgtgagaaatacgggttacccccagttatgagtacacccgtgaaatatgccgatctcatcatgctggcaaccgaacgccgcgatctcgggcttgatgatggctctttctggcctgtactggaaggcatcccggcaacagagatgttcaacgtgattccactggcaccgggtcatgcctacgggatgtttatggaacgttttaacgatttatcggagttacgcaaatgcgcatga

SEQ ID NO: 40423 - DNA, 465 bp, Escherichia coli
  misc_feature (134)..(143): n is a, c, g, or t
atgattttaatctcatcgccatccatcattatttcccacttaccttcagtacctttaaattccatgttagcctctgttgtttatgccaaaaataaaggccgactatgcggcctaggaaggaagtccaatcatcnnnnnnnnnnttctacccgtaaagcaggaagtgctgtacttgctttatctgcttcttttggtagcaattctttgctttcaggccaaacttcaataagtcgcttaactgttgtgactgagttcaaagcagcccatacatttgattcgatatcctttttcttggcttcaagtttttgttgcaatgctcagatttcatcaaacctttttgttatttcgtgttctgcgtcaaacatgcatttatctttttctggggtggggagcaatatatcttcaccgttgccgtctttcccatatgaaagccatccaacccttctgccagatacagtcagataa

SEQ ID NO: 40424 - DNA, 387 bp, Escherichia coli; identical to SEQ ID NO: 39805

SEQ ID NO: 40425 - DNA, 294 bp, Escherichia coli
gtgccttacacgctcgatgccaacgatatgcgctttgccaccgctcaggggtttaataccgctgaacagttttatacctatctgagagacagctttgatgtgctgtacgcggaaggcgaaacgtcgccgaaaatgatgtctatcggcatgcactgccggttgctgggccgccctggacgctttcgcgctctgcaacgttttcttgattacgtgcagcagcatgagcgcgtgtggatttgtacccgccagcagattgccgaccactggcggcaggtgcatccgtaccagccatag

SEQ ID NO: 40426 - DNA, 768 bp, Escherichia coli; identical to SEQ ID NO: 35171

SEQ ID NO: 40427 - DNA, 1386 bp, Escherichia coli
atggatagtgtcagtagtgttgagcgtttaagaacaaaagctttttatcagttgcttgtggataggcttggaactgaggcctgggctgctcgcaaagctgcatatttcaagcgcataagagagaaggaggctaagtttaacatcaatctgccgatagagccccagctcttcataccagcagaagatgacatcgactggtacattctggcgtcgtatctgtctcatgattttccatatagtgatgctacttacagcagcagacgtatctacccctatgctatggccatcggagctgttgcagaccagcttcgcaaagtcccatacgtcgatgatgttctggacaaaatgctagcaaataacaataaaccagaaactcaaatttttgagctgctgacggcatcgttctacctaaagaacggctatgaggttgccttcatcccagaaagcagcattgtttggcccgatggaaagaccaaaaaatcaccggatatgctcgtcaagttaggtgatctggagttctacgtcgagtgcaaaaggtcggataagcaaaccaagtactcaaagacagaagagcaagcctgggccaacatctggcatcaattgagccaacatatgctcaaagtcgcaccatggaacattgtcgatataattttccatgagcaggtcgccagtgtgactccggcagacgttattaaagcggtgaatctagccattaaaggggggacgggaaaagctaatgaaggttcaatcagtgtgggaatacgagccatcgacaaattaggtctcagacgtcactacagaaaattttcagtcagagccaatagcccacagcatgaattgctggtatttggggatctagatagcaatgagaaacgaagtatctcgactatcgctcagagagttattcgtcctggcaccaataacgatattctcaacatttttgtagaggatgttgcaaagtgcgttggagctcagtggtgctgcgatcatgagatttctcttggcctcagatccaagcatttcaagagcttgctcaatgatggagtcatgcagattccccctgatcgtgctggcgtggtgcatatttggtatgagacttgcgaaggcatagatattgaagaactacgtagggataaaaacatggagcatatctcggcctacgatgcctctaaaacaaccgtgttgggtgctttcctgcatgccgttaattattacccattagaggacaactatgagtgggctgagactgttcaagactttgcccgtgtcccggatttgatggggctcttccttagacagccattgatgcttacatctgactcgacgcgtggggtcgaaggtgtcacacattgggagcaagataagaccgcaaaaagcatgcgttga

SEQ ID NO: 40428 - DNA, 1047 bp, Escherichia coli
atgagtatattttcaattgatgagtctggttacactgggcgagatcttcttcaaaagtcacaaccttggcaaggggccagcgctgtaaagattagtcatgacgatgctcttcatcttatcagacaacattttcctaaacacaaagcccctgaattgaaatttagctctcttaaaaagcgagatagttatcaaaaaccaatttttactttgcaacaggaactacttgccaattttccatgtgttacttgtgttgccgataaacgtttgattctaattcaaatgtttattgagtatgcggtagagcctttttactatgaccatgggataaatctatacgaaaatggtggaaacgtttctatggcatcaatggcttactatgtctgccaaagctactttggtagagattttgataatatcctaatatcttttcaaaatgcgatgcatgagaaaacgcacacagcagtaaataaccttattgcgaacgttagggccgtgaattggcgtctattaccggaagtgctggggccactagctttagagcatccagattgtattacggcaataactaatccaaaaatttctactgatgcagcatttgttattcttcaagcactaatatcacgcactgaattaatgtcagagggaccgtatagcattgagcatgatcgttctaaaaatcttttacaatacaatgaatatctttcgatgcttatcaaatgtcagacgccagccgagtttaagatgtctgaaatcgccagtattaaattcccattaaagcttgagcatgttcaccaagttgattcaaaactaagcccggcagttcaattatgtgatattttgattggtagtgctataacaggagtgcgtcaattattgaatgataaatcattgtcattttattctcctttaaaactgtatgaagataaccaaataattcatttttcacctaatttagatttcgaagggcagcaaaaattcaggcataacggccaaggtaatgagtatattgatttcattgctgaacaatttaataagtttggaaagtga

SEQ ID NO: 40429 - DNA, 735 bp, Escherichia coli
gtgagggtgtcacaggcgtgggcggggccggggttcggtaacctggcgataccgcgtgtgggtcaggaagtgatagtggacttcctgaacggggacccggaccagccgctggtcatggggcggacgtaccatgaggacaaccgttcgccggggagtctgccggggacgaagacgcagatgacgatacggtcgaagacgtataaaggaagcggttttaacgagctgcgctttgaggacgccacggacaaggaagaaatctacctgcacgcccagaaaaatatgcaggtcgtggtgctgaacagcaaggataagcgggtcaactatgaccgggcggtcagcatcgggcatgatgaattcctggtggtggcaaatgaccggaaagtgacggttgaaggtaaacaggaccataaaaccaccaaagaccacgtcagcctgacagagggcaatcagggactggaggtgaaaggcgatctggcacagaaaataagcggcgcgctgggtatcagcgtacagggcgatattgttttacagagcgacagcaaaatcagtctgcgggtgggaggttcatttgtggtgatccattccggcggcgtggatattaagggcgcgaaaatcaatcttaacggcgggggcagcccgggagacgtgatcctgccgatgcgcccggtgatcctgaaagccgcagccgggagtggttcgatgtttgtggcgcactgcccgaaggaggataagtga

SEQ ID NO: 40430 - DNA, 855 bp, Escherichia coli
atgagtaacaatctcctacatactatgaaaaaagaagctttttcgagaaatccgttaaagcaagagatattacttaaaacatcatccttcgataaaatttttgtttttgaaggtgttgatgattaccctgtatacgatgaatggatgaaacacaatccagagtatgctaatgcaggccaccttgtggcgaaaggaaaaaaacagataattgagttatacgagcatgcaattcaacataatgatcaagaaatattaagcaattgctacttttttgtagatcatgactttgacctatttgagcataattctgataacattgttactctttcatgttattcaattgaaaactatattattaactcttcctctacaaaaagctatttaaaggacgagttcaaaatggatataacacagtctgatttattggcgcgtgtcaaaaaagattttgagtccgacttccaactatttcaaaagttagcaaaagaattgtgccgacctctatttgtaaatcataatgcaaacgggaaaacaagattctacaataaaatatcttcagttatcaatattgagtataaaaatatctcaatcaaggataatgctacgttaatagattatgaagtaaatgaagactcagaggatgtaaaagcattgatttcattcttcaatgaattaccgtacgaaagagccattaagggtaaatatgtctttgagttcattaagctctggttgtcatccttaaaatcacatttatccgtcaataataatttgaaaattactaaggatcctttaatgttagaaagacgaagattagcttgtgcaactcccatacctaaagaaatattaagatttgcttaa

SEQ ID NO: 40431 - DNA, 1467 bp, Escherichia coli
atgactacacgtaataattacccgattgaatattttagaatgacaggagttcatggttataaagatataactatgaaaatgaaaggcaagacaacagttttcgtatccgagaacggcgcaggaaaaacaaccatacttaatgctataagacttcttctcgagcaagattttacaaaccttatgagaattgattttaaatcaatattcataaagattcttggtcatgaggaggttgaaattaaaaatgaaagagcatctttaataccttttggtgaaataaaagcattcctcaatgaaagattttctcttaatgagtcattttgggatgatcgtgatattaccaagtttgcgaagactttaattgactcgaagcaaaatgaattcaatgatgatgctttagtcaatgacctatataataccgtaaaatacccaaaggattatataaatcattttctaagagaactaaaagacaacatagttaataaaatgaagaataaggaacagcataatttaaaaatgcattactctaaaaataataattttagagtggttgctgaagcgcttagggatttagacgttatatttctaccaacatatcgaagggtagaaaaaagttttgagacgacacctagggaagaaagagaaaatcttcaccctcgcatgtttggtagaaaaagagggatgaaactacaacgtgatggcatttcatatgggttaaaggatgtcgaagatgctttaaaaggtctaactttagaaattgaaaggacatcaaaccttggctatagatctttaagtgccaaaatgcttgaggatttaattaaatatggtaacaatgagcggatagctaaagaacaaaatgcactaccttctatagaggatttggaaagattccttaatcgagttgaggatactggtacaaatttgcgagaaaaaagagcatctgaatcaaaaaagaaatctttaattgattcacttaaattgctatataacaaagatgaaataaaaaacatcacttacttgaaatattttttaactcaattaaactcggttatacaagaaacaaaagagcaagagtcaaaaattgagaaattcgttgctgtttgtgataaatatctttcatcagcaggtgattctaaatctctaaaatttgatcctcaaagattagaagttatcgtaaaagatacatatacaggagatcgcatctctcttaatgacttatcttcaggtgagaaacaagtaatttcgctaatggctacgatttatcttaatgataatacccctaaaataatattaatagatgaaccggaactttcgttatcgatagagtggcaacggatgatattaccagatttgaatgcgggtgaaaatgttaggcaaataattgccataacgcattcaccattcatatttgacaatgagctagacccttatgcaactgctatgaaagtacgaaagggtagtgtctga

SEQ ID NO: 40432 - DNA, 435 bp, Escherichia coli
atgaggttttacagaagttcatcatatgtatattggcgttgcaaatatcacatagactggacggcaaagtaccgttttaggatcctgagggataaattgggcaaggagctgtacagaaccatctatattctttgcggaataaaagattgtgaggttctggagttaaatgtacaggcagatcatgtgcatcttgtcgtaatagtgccgccaaaaatctcaatatctactctgatggggcacctgaaaggtcgcagtgcaatcagactctacaatcgattcccgcatatcaggaagaagttatggggaaaccatttttggtcgtggggttactttgttgatacggtaggcgtgaacgaagaaattatcagacgatatgcgaggtatcaggaaaagatggagcaaacacatgaacagcagatggagttgctagagtag

SEQ ID NO: 40433 - DNA, 144 bp, Escherichia coli
atgaatggtgctcacacgcaactctccccgcgcttgaatggcggcgatacggttgtcggctttaccaaaccagggaatggatggccagagagcgaccgcgagcagcagtgccagaatgccgatgaacagataattaatctttaa

SEQ ID NO: 40434 - DNA, 2190 bp, Escherichia coli
atgagttttaacgcaaaggatatgacccagggcggtcagattgcgtccatgcgtatccgcatgttcagccagatcgccaatatcatgctttactgcctgtttatttttttctggatactcgttggtctggttttatgggtaaaaataagctggcagacgtttgtgaacggctgtatttactggtggtgtaccacgctggaagacatgcgggatttaatcaagtcccagccggtctatgagatccagtattacggcaaaaccttccggatgaacgctgcccaggtactgcatgataaatatatgatctggtgcggagagcagctatggtccgcattcgttctggccacagttgtggcactggttatttgcctgattaccttctttgttgtctcctggattctggggcgtcagggtaaacaacagagcgaaaatgaagtcacaggtggtcgtcagctgacagacaatccgaaagacgttgcccggatgctgaaaaaagacggcaaggactccgatatccggattggcgacctgccgattatccgggattccgaaatccagaacttctgtctgcacggcacggtcggggccggtaagtcggaggttatccgtcgtctggccaactacgcccgtcagcgcggtgatatggtggtgatttatgaccgttcaggggaatttgttaaaagttactatgatccttccatcgataaaatcctgaatccgctggatgcccgctgtgccgcatgggatttgtggaaggagtgcctgacacagccggattttgataataccgcgaacacgctgatcccgatgggcacaaaagaggatccgttctggcagggttcaggacgtaccatttttgcggaagcggcgtacctgatgcgtaatgaccccaaccgcagctacagcaaactggtggacacactgctttccatcaaaatcgaaaaactgcgtaccttcctgcgtaattcaccggcggccaacctggtggaagagaaaattgagaaaacggcgatttccattcgtgctgtgctgaccaactacgtgaaagccatccgttacctgcaggggattgagcataacggtgagtcttttaccatccgtgactggatgcggggtgtccgggaagatcagaaaaacggctggctgtttatctcgtcgaatgccgacacccatgcctccctgaagccggtgatctccatgtggctgtccattgccattcgtggtctgctggcaatgggagaaaaccgtaaccgtcgtgtgtggtttttctgtgatgagctacccacgttacacaaactgccggacctggtggagatcctgccggaagcccgtaagttcggtggctgttatgtgtttggtatccagtcctatgcccagctggaagatatctacggtgagaaagcggcggccacgctgtttgacgtcatgaacacccgtgcttttttccgttccccgagccataagattgcagagttcgcggccggtgagattggtgagaaagagcacctgaaagccagcgagcagtattcctacggtgctgatccggtacgtgacggggtatcgaccggtaaggatatggagcgccagacgctggtcagttattccgacattcagtctctgccggatctgacctgttatgtcaccctgcccggaccgtatccggcagtaaaactctccctgaaatatcagacacgaccgaaggtcgctccggagtttattccgcgtgacatcaacccggaaatggagaaccgtctgagtgccgtacttgctgcaagggaagcagaaggtcgccagatggccagcctcttcgaaccggaggttgcctccggagaagacgtgactcaggctgaacagccacaacagccacaacagccacaacagccacaacagccacaacagccacaacagccagtgtcttctgtcatcagtgataagaagtcagatgcaggtgtgagtgttccggcaggggggatcgagcaggagctgaaaatgaaaccggaagaagagatggaacagcaacggccacccgggatcagtgaatccggtgaagtggtggatatggccgcttatgaggcatggcaacaggaaaatcatccgggcatccagcagcagatgcagcgtcgtgaagaggtgaacattaatgtgcaccgggagcgcggggaggatgttgagccgggagatgatttctga

SEQ ID NO: 40435 - DNA, 222 bp, Escherichia coli
atgatcaatcgtcaactttcacgtctgctgttgtgcagcattctcggcagcacgacgctgatttccggctgtgccctggtacgtaaggattctgcgcctcatcaacagctcaaaccggaacaaatcaaactggccgatgatattcatcttgccagctccggctggccgcaggcgcagtggtggaaacaactcaatgacccgcagctggatgcgctgatctaa

SEQ ID NO: 40436 - DNA, 588 bp, Escherichia coli
atgacagtaagtaatatcataagtccggtcatggtgtattttgatcgatttatagtgtcaaatattatgggggcagataaagttgcattttattctgcaccagcggaggttattctaaaattaggaataatacctgcagcaatcgggagagcagtgtttccaaggttaagtaacatcaaagactttaaagaatttaaacgtaatgtaaataaatcattgcttttaatgtttctaatctgtttgccggtgataatcataggcttgttatattcagggcttgtattgaaaatatggtttggtgagaattaccaaattaattcctttaatatattaaatgtgttattgatcggttttttcttcaatgcgctggcaatgataccattctctgcaatccaggcattaggaaaatctaaaattactgctttgattcattgtgctgaattggttccttatttagcccttttgtattttatggtcgaaaaatatgggttgctgggtgccgcaatatcctggagcatacgtgtaattttagatgctctgttattacaatggctttatactagaatgtgttctgtatatgaaaactaa

SEQ ID NO: 40437 - DNA, 381 bp, Escherichia coli
atgatggatgaggaactttttattgattatgtcgatacagaatggtgtcttagatgcttaaactatggcatattagttcatatcattcctgatatagaaatggttcatgctattggggataagtcagtaaaaatctgtgggattaacataccaattcactcgccagtacgtcgttattatcgagtaagaaatgcatttcttttgcttagaaaaaatcatgtgcctcttttactctctattagggaagttgttttttctttaattcatacgactttaattatcgcaactcaaaaaaataaaattgaatatatgaaaaaacatattttggctacgctggatggaataagaggaattactgggggcggtcgttataatgcatag

SEQ ID NO: 40438 - DNA, 258 bp, Escherichia coli
atgatgcaggtctggggcgggcaaaatgtttatttcccgatgggcatggtatggaaggtcagtcagcgcgaccgggaaatcttcagggagtttaacggacgcaaccaccacgaactggcccgcaagtttggtgtttcgcttcagtgggtctacagcgtggttaagcgggtcagaaaagaagaactggatcggatgcagggcaggttgtttgatgaagatctgccagaggagacgaaagacgttaacaaatccagataa

SEQ ID NO: 40439 - DNA, 819 bp, Escherichia coli
atgtttgagcaaatttcacattggctatcaataccttatgtaggtagcattattggtataattggtgttgcaatagcaattttcactattttttttagcagaaaatgctataaaatttcacttcacaaaacaaccaatgacttaatcggtttgtcagattcattattgcctaatcaagtcgagattttgtatgagggtgaaacggtaaataagcttgcctcttcgactttcgtcatatggaattccggaaacaaaattataaccaaaaattcacttacaacaattgaccctctcagaattgaagccattaatgatgtaaaaatattaaggcatgagattatccggttaagcaatcatacctgcaatatttcaactcatattgacgaaaacaaaaccagcattttgttgagttttgattttttagagaaaaatgatggtgttagaattaaaatccttcatacaggcaatgactcagatataaatttagtgggcaaagttataggtgttaaaactcctaaaacaacgcccagaccggaaaaaataaaaagcacaatgatcattgataaattattgtttggaaaaaccacgttgggattttatttaacagccatagttttccttacagcaatatttactgcaacgattatatggccagatgagataattaaatttaatgagctatcatcagcgtccacggtatggatgttaagagcattcgctataattaatttattttccttactatttttattcggtcttaaccgaactaattatcctgccgttttaaaggaaaacgaatctgaaaagaatgaaggctag

SEQ ID NO: 40440 - DNA, 462 bp, Escherichia coli
atggcaaatcaaattaccaaactaaaaaatataaatgttgtgaagtttcgcggactgaaaaatataaacatcgagtttggttctcgcctaactgttatttgtggtaaaaatggcacatctaaatccacaattcttggcattatcgcccaaatatttagctttacaaaggactttaccaaaaaccctgagactgatttaacacaatataaaacattaacaaatggcagcttcaagtcagctttcagcgaacattttaggctttcagaacaatttgatgttcctggttcaatggacgtcaaaattagtgtctatgatggtgcatcgaacaaacatcttgaaaaactaacattaggtttatacagctacagtgacagagataaatcaaggcctgtagtcaggggaaatgattcaataccggaaaaaaccaaagtagaaacgttactcatcctgttatttttttaa

SEQ ID NO: 40441 - DNA, 375 bp, Escherichia coli
atgtctcaatacgcgcgtgctgctttaattgcttattatttggttgctgataattcattatcccctcgtgatgcatgggaggctgctgtcgctgaggttacagaaagcgaatcggcaagaaagaaaggatgcccaagggcaacgtttctcgctctgacggatagcggttatctgaagaatgtaaaaccacagcatggggagagaaaggtcggtaagttgtaccaaagggcaattgaagttgcgaatctgattcttgatttgcccggaatcagcaaagctgagttagttgataaaacttgctataaagacaggcaagggtcttatgacattgttctgacactcgctcagtacggatttcttcaacgtcctcagtaa

SEQ ID NO: 40442 - DNA, 1332 bp, Escherichia coli
atgttagatacactatctttcactgaacgtgacgagttccaacgaagaaacatcgctgaaaatatcatcaagttgctaaaaccagaggcagacatttcaccactggtaatagacggcgcatggggaacagggaaaacagaatttagtatcaaactgaaaaatctcattattgagcaagaaactgaatctaaagttgtttatattgatgcctttaaaggggatcatgcagaatctccattacttctcataacctctgcaattgccagcattttgcctgaggaagaaaaacaacacttcattaagagatctcttcctgcaattcgctttggtttaaaaacggtactaaaagctggtgcaggttggtttttacgacaggaggctagtgaagttgccgaagaattccaagatgcgatgaagaaagcaagcaatgcagcaatagatgggactattgaaaatttgcttgaagaccatatggactcagagaaaaacataaattcacttaaatcctgcatcgaaagcatatcaaaaaatcaaaaaatcgtaattataattgatgaattagaccgatgtaagccgagtttttcaacaaatgtcattgaaacaataaaacacatttttgacatcaataatgtcttttttattttagttacaaacacagaacaattaaaagcatctataaatcatatttatggttatagcattaactcacaaaagtatcttgacaagtttataaaatataccatcacgcttccagatacatgtttgataaatggtcacaacgtatgtaaagcctctgttatatattgggattaccttgtgaaaaaaacaaggttattgaataaaatcaatagattatcaggttactttatccgtgatttaattcaacgaaccaacttatcattacgtgaaacacaaacattttcacgcaatcttaacatttttcaactgttaaacgacgatgagaacaaaagcagtgatcctttaataaatatgatctttgtcgtagctgccttcatacattgctttggtaacaaggaaaaactaaaacaagaaattaccgctgaatctatatcttatttagcagacctgcttaacataaaagaaataccttattcttatgagagaagatcgcaaatccctgaaatatccattgtattcttcggaataattaaagacagtattactcttaatgagcgatttgcccctaaaagtgatgaagaacttaaaaaattcacaaatgtttatactgattatgaacacataaatttttggagtactacacccagagagttattgataaaatatattaatcaaatgtcattcatccagtaa

SEQ ID NO: 40443 - DNA, 1302 bp, Escherichia coli
atgattaagaaaagacgtggggatacaataaaagactcaaataataaaaaacaacctgataaatcagaaaaagtcaatattgtttcaaaaacacctaagttggctgaaaaagataagaaaaaaaacattactaataacttagctaaaaatgaacctaaaatgattacaacaaacattaggctgtttacaaaaataaaccacttgatacatacgggagaaggtataaattgttcatttcatattgaacaatggatcggtgaatttatagcctcaaatgaaaggtttgcattattaattagagacattaatctttataattgggctattacaaaatatcccaatgtggatattgtgtatgcaaagtcagccatcgcagtggaacaggttctgaatcagttaccatatcttaaagcaatttactatctttctaatactggtaatttgattcatactctaagatataatatttaccaacatatatttttaggacatggcgatagtgataaagcagcaagtgcgcataagttttttagggtgtatgatgaaatttgggtagcagggcaggcacatattgatagatttaaaaatgcaggattcaatgtagaacatataaagtttgttaaagtagggcgtccttccttaaagcaaattgtaaaacaatctgttagtaataataatgtgacagaacatattattaaaacactaacttactttccaacatgggaaggtgcttttgaggagaataattattcatcagctagattgtcacctatatttctctctgaattacaacaaaaacttaattgtaaaatagtagctaaataccatccacttacaggctcacgagataaaacattagaaacgatccaagatgcattacaaaatagtttcatagatcgttcttgcatgctttcaattgctaacaagtcagaaccgatacccaacttggttgttaacagtgatttgtttatttgtgatatttcagctgtagtaagtgaatgtatatcttcattatctccaattttcatttatattcctgaagatcgtaatgtgattacttctggaagtgatatgcattattctgattatgcatacaccttttcaaatatagagcagttgatgcaactaatagaaaacataattattaatgggaatgatcatctagctgaagccagatataaagcattagattatcttttgagtgtaaatgaaacagtaaacgatgcatttttaagtgagcttaagagaataagttcaactgtttcagaaaaagaaaataaacgtgaatttgtcattcaataa

SEQ ID NO: 40444 - DNA, 180 bp, Escherichia coli
atggatcatgttttgattttactgacggatccccgccagattctgacgggtgaaaacccgcttttttgccagatttcgacgcatcaaattttgacgggtcagattttgatgcgtcagattttgacgggtcagaatctgacagttgagaaaatgccgctgcctgaagcttcgcaacgttaa

SEQ ID NO: 40445 - DNA, 270 bp, Escherichia coli; identical to SEQ ID NO: 8342

SEQ ID NO: 40446 - DNA, 546 bp, Escherichia coli
atgagcaagagcaaggctttaaacataaacaaacgatttagtgaaaatcctttcatcaaagatttgataattcctgtaaaaaacaaacaagtaagaatatcgcgattaggagaagataataacataatgattaaccaatcaactggagaggttttagggggaacctcggtagtaacttataaaaaagttgatagtgataattttattaaattgtttacccaaaatataaaattggctttcgagttaacacaagctggtcaaaaagcactatttgttttattttgggcagtacaaaataaaacaaataatgatctagtcttattagatcaatacacgctaaatgattttataaatgaaaacaaaggattaagcatgtcccttccaacattcaaacgtgggcttggggagttggtaaaatcacaaatattagcaatgaataagcgaaagggattttattatataaatcctaattttgtttttaatggcgatagagttgcattcacaacagttcttgaaatgaataaatcgagccataaagacaaatga

SEQ ID NO: 40447 - DNA, 321 bp, Escherichia coli; identical to SEQ ID NO: 5987

SEQ ID NO: 40448 - DNA, 765 bp, Escherichia coli; identical to SEQ ID NO: 10506

SEQ ID NO: 40449 - DNA, 312 bp, Escherichia coli
gtgagcaattatctgtactggtctggcttagtggctaacattgcgctcatgttgttcgtggctctttgcatctgggtttggtttatctggccttttgtagaggctatgagcataactcggtgctttatttgcgcatcaaagacttctggatgcaaaccaactgtaagagcaattatcagaactttaaaatactggtatctggatttgcttttcggcaggggctggacgcgaattagtaaccgccagtttgaatgggaaggcgtcggtaactggcgaattcacagcagcaaagaaacgcaggaggtgaagtaa

SEQ ID NO: 40450 - DNA, 903 bp, Escherichia coli
atgattacgctcattctttctgcaccagtaacagaaatggctgaagcatttaagcgggtattcgcaaatgcagataatgtgaatattgtcggaaagccatttgaaacaatcagggaatttgactgcatggtaagtgcggcaaatagtttcggcctgatggatggcggtgttgatgccgccattaccgcattcttcggtgctcagttacagtcccgcgttcagaatcatattcttcgtgaatatctgggcgagcagccggtaggttctgcatttgttattgaaacggggcataatcatcacccctggctgatacatgcgccaacaatgcgtgttccgctgacaattgacggaacagacgctgtatataacgcaacctgggccgctctgcttgccatctttcagcacaataaacacgcaacgacagacaggaaaataaaaacggtggtattccctgcaatgggggctggatgtggtcaggtgccgtttgaaagtgttgcccggcagatgaagcaggcatgggataactttaataaaaaaacagtagcaattaactgggaatacgcatatttccgccagtggggggtatttaacacatgtgcatactgccccggtaaatctggttgtcgttatgctgatattaaatatattggatgtggcgattaccgtacgtattgctcacgttccgggcaggtctgtattaaccctgaacatcaggctgatgatgtactgatacaacatcaggctaataaccggtttcgccctggttcgcatatacaccggattaatccagaaaattccgtaggtaatgtcatctctgacgcacatagccacggaagtagcattgttactggtgctcacacccatacgctcaataaacaatattctgtctctgatattaagtag

SEQ ID NO: 40451 - DNA, 426 bp, Escherichia coli
atgatgaatgatttcattctgcacgaaaccaataaatcacaattctggttagttctgaaacaaatcctctctaccggcaaacgctggcgaatcaaaatatctgagtaccgtgagaagcgtacattgtcacaaaacaatctgatgtgggtgtggaatgcagaaatagccgcacagttatctgctgcttctgctgaaaacttcacgcctgaagaggttcatgagtggctgaaagatatgttttgtccggctaaaagggtgacgatttttaatattacacgatgcgttaaatcaacacgtcagcttgatattggagatatgcacaaatatctgaccgatattgaccagtgggcgcatcagaagggattacgactaaccattcctgataattgcgagtacctggatctaaaggagaggcaagtagagtga

SEQ ID NO: 40452 - DNA, 228 bp, Escherichia coli
atgagttcgatgactgagcttgtccgcgccgactttcaggagaacattggtcgtgcaaatcggtactggtctgcttccagacttccgactggcgagagacagaaaaacgcccctaagccacgtatctatccgcgtgaccgcgttcttcgccggttggttaaaatcgataatgattttcagtgtgacagaattatccagcaattagatttgatgactgatgatgaatga

SEQ ID NO: 40453 - DNA, 429 bp, Escherichia coli
atgactccgtgtttggaatttggcggtttaaaggacagcaagggttatggaagggtttggattaatgggaaaaaagtatttgctcatagatttgcttattgtgtggcaaaagggatccagcttgaagatatagatggcttagtaattcgtcacgcatgtgacaatccttcttgtattttaccttctcatttatgtgctgggacaagtcagcaaaacgcaaatgacatggtggagagaaaaaggcaggcatttggaagcaggaatggtagggcaaaattaactgaagatgatgtaagaaacatcattagtgaatatataccaagacaccccttattcaacacaagggcattatcaaaaaaatatggagtaacgccaaattatatagctgccatttgcagaggtgaaaaatggaagcacataaaaaaataa

SEQ ID NO: 40454 - DNA, 123 bp, Escherichia coli; identical to SEQ ID NO: 23009

SEQ ID NO: 40455 - DNA, 909 bp, Escherichia coli
atgattgatattgctgaagcacgtggctggactgagatccaagtaaaaggtactgaagattttcggcgtgaagcatggttacaggctacggccagaggactaaccgcccatggctacaagccaaaagaagaggatttagcacggctgaaaaaagtagccggtgagcgcaacattaacgaagttgaagcgcgtgaagttgctgataacgtgaaaacgtcaccttctgccccttccggtacaacgtcaaaaaatcaatccgaagcccctacatccaaaaccggcaccactgagtcaagcagtacggcgcaaggcagaaatgagggtgctaaagttgaagctgaagaaaaggttaataagctggccggtaagttggtagagcatggcgtggccccttatgaacataagaaagacaacaaagataattactatgtaacgctggaaaacgccgatggtaagcaaagcacaacttggggtgttgatttacaacgtgccatggccgagagtgaagctcaaccgggtgatcatattgagttggaaaaccttggccgcaaagctgttaccgttgagaaagatgttaaagacgaaacgggcaaagtggtcaaaaaggaaactatcaatacgttccgtaatagctggcaggttaaagctgatgccattcgcgatcaggaacgcccagcgcgagaaatagttaaagaacatcccgatttagtaaacgaaattacagcggttaaactggctgagaaagtatctcaatcaatgaacgctgacgacaaagaacgctttatgagccgcgtccgtgacaaattagcggataaagtggccagtggcgaaaaagggccagaactgaaaatcaaagaggttcaaacggtcgataacccacgggttaaagataccgaactggaacgctga

SEQ ID NO: 40456 - DNA, 153 bp, Escherichia coli
atgaacaataaaatactggatctgaatataccgggccgtgaaattgagatgagccgccaagaagctgaagagttaggcgcatttgaagaaagcgccttatctgaagctgatgcaagagaggcgattgatattgaagacgagcaggagggttaa

SEQ ID NO: 40457 - DNA, 1158 bp, Escherichia coli
atggccagaggtgacgacaaagagaagaaaccattctatgaagaaattgctgatcgtctgatcaaacagcttgaggaaggaaccgcgccatggcaaaaaccatgggaaccgggttcaagcagaatgccgcataacccggttagcggtactcgttacaagggagccaacgccctatggctggctatgcaacagcgtacagatccccgctggatgacgtataagcaagcccaaagcgtgaatgcgcaggttcaaaagggcgaaaaaggtacgctggttcaatactggaagtttaccgacacaatccccaagctcgacgataaagggaaaccggtactggatgataacggtaagaaaaaaatgattaccgtgaaacttgatcgcccaaaagtcttttccgcagtggtatttaacgcggaacagattcaaggcttaccgccattagaagttaaggcaacaaaacccgattgggaacgccatgaacgagccgaaaatatcttgcaggccatgagcgtacctatcaagcatgatcaagctgatggcgcattttaccgcccttctacagattcgatacacctcccggaacgtagccaattccccagcgccgataattactatgccactgcattgcatgaagctggccattcaaccggacacaaaagccgtctggatagagatttaaccgggcgatttggttctgagtcctacgcaaaggaagaactgagagctgaaatagcctctttgatgattggcgatgaattgcaaataggccatgaccccggacaacacgccgcttacgttaaaagctgggtgaaggttctaaaggatgatcccaaagaaatactgagggcagcaaaagacgctgaagctattagttcctaccttttgagctatgagaaagaaaaggcgcaggaagcccctcaaaacgcaccagaaagcgatacagaccaaaaagaggggaatgatagcgcattgcctttaaaactcgctgagaagcttgcagagcgttttaacaacgcagaagatcgggctaaattcatggaaaagatacagtccagacttacccacgaaaaaccagatacggaaataaaaataaaggaaattaatacggttgtagtaagcaaaaaaggtctaaaacaagatactgatttagagcgttaa

SEQ ID NO: 40458 - DNA, 993 bp, Escherichia coli
atggccgttgaaagcttgtcaaaactccttgagggtaaagtaaagactaaatccaacaaaactacagatctgaaaagtaaggctagtcgcatagctaatcgtgcgtctgaagtgatggttaaggtgagtggcaatgcaaaaggcccagctcacgttaaagcccatttagattacatcagccgaaacgggaagctggaacttgaaaatgaacgcggtgaaatattgaagggaaaggacgacgttaaagccgttcataaggaatggactcaggatcaaggtaagcgacgtgccaatacgcgcgatactactaatgtagtgctatccatgccgaaaggaacggaagctaaggccgtcaaagaatcggctagggcatttgcaaaaaaacaatttggcgaaaactaccagtatgtttttgcacttcatgaagacgttgatcacccgcatgttcatatcagtataaaaaccttgggtttcgatggcaggcgcttacatgtgaaaaaaggcgatcctcaaatatggcgtgaaggttttgctaaagaacttcgcgctaggggagttgaagctgaagcaacaccacgcgctacacgtggcgtagttaaaaaaggtattgatcaggcgatttttcatattcgcaagcgtggattaaccccggaagtcgataaagccaaaatcaaagagatcgtagaagagtttaaagatacgagggccggaaagcctgcaaaagcgaaaccgtgggaaaagaaaatacagacaaggcagcaggaagttagaaaagggtggctatcggcggcgcaggaacttaaccagagttcagagccgggcgataaaaagcttgccgctgatgttgtgaattttgttaataccatgcctcctatggctacggaacgacatgaaatggccaaagcagttagtcagaaactagcaagccagcagcccggaaaaaagcaaaattcaactggcagagatagagataacgatcaggaagaacgataa

SEQ ID NO: 40459 - DNA, 516 bp, Escherichia coli
atgccgaggatcgttaagagagttacgccggaattaaaagagaagtggcaaaccttttgtcatgagcgtggtgttagtgaatccgatatgttggggctgttgctcgaaaaggtaacggcgggaatagtgcctaatgaagctaaaggattggaagaaccacgttcagataaagtaacgatacgtttgtcaccgaaagatattcacagcatgacagaacgcgctaaggctgaagggtttcccagcagaaccacatggcttactaatttagtgttggcaaccttgagcaaagaaccggtattaactgacgccgaagttaatgctttgcggggttccaatcgtgagctggccgcgataggtagaaacctgaaccagatagccagagcgttgaatgtagagtttcgtgatagcgataagctgaacaaggaattaatagatcggctgcttgaacagatagatggccatcgagacaaggtatctaatcttattgatagaaacatgaatcgttggggaggttaa

SEQ ID NO: 40460 - DNA, 717 bp, Escherichia coli
atgaaacctacacaacagacttacgaagaattgcaggttgcttatgaccatttcaatgaagctctttttgatggttcacttcccccctgcctgatcactctccagcgggaaaagaaaacatatggctatttctctgccgaaaggtttgttcacgccaatggaacccggacggatgaaatagcaatgaaccccgcctattttgccgtatgcccgccagaagaaattatgcaaacgctagtgcatgaaatggcccatctctggcaataccattttggtaaacccggacgccgtggataccacaataaagagtgggctgacaaaatggagtctatcggtttaatgccatcctctacggggaaacccggcggtgccagaacaggtgatagcatggccgactatgccattgaaggtggccagttcatggatgaatacaacaagcttatgcaggatgattttcgtatttcatggatggatagatttccagcaagggatcgccttcttgaggccattgcatctggcaatgctgaccagttcgcgggtgacttagaagccatggggattgaagttggtgaagatggcgagttgacgataaagaacgagaataaatcaaacagaattaaatacacctgctctatgtgcgaaacaaatatttgggggaagcctgacctgaatgtgatgtgtggagactgtaacgtagcctttgaagtcgctaactga

SEQ ID NO: 40461 - DNA, 228 bp, Escherichia coli
atgaaaaatcgcatagtgctaatcagcggcgttatcgccgctttagtcctgattctttttctggcgtatccctacctgaaaaacagccaatcttttttggctgtagtagctatttgcgtaacgtttgcggtattggcattagctataccagccaacttatttagttggctgcgaggaaagaggggtaagcccggattcatcaaaagcacctttttccgatggcgttaa

SEQ ID NO: 40462 - DNA, 1125 bp, Escherichia coli
atgagcgccaaaaagggattggatttaagcgggctggataacttttcagctttgatgggaggcgacccggcccctactcaatcagcggcttcaacagacgtacctgaaggtttcgcaggaaaccttatccgtgtgcctctgaaaaaaattcataaggatgcagataacgccagaaagaatatcgacccgcaggaactccgtgaactggccgattcaatgaagtctgtaaatccggcaaccggaaaaccacgcggtaacaaaaacccggtaagcctgaagcctcatccagatataccgggggaatatattcttaatgccggtgagcgccgttgtgctgctgctgaacttgccgagttacctgatgttctggcgttcattgatgaggacgcggacgaatttgataatgccgtagataacattcagcgcgtagctctttcaccaattgaaaccgctacgtttatccagcgccggattgagaaaggcgataaaaaaagcgctattgcggcccggttgggtaagccagcatcgtttgtatcagaccatattattttctttgatatggctgattgtatccgcgatatgtacgacagtggccgtgttgtctccatgcaggcaatggccctgttacatcgcgcctataaaaaacatgctgaagaagtagaggctttttgttccgaagcacaagacgagctaactactgctgatgtgcgggctttttgtgattcactcaaagagccggaatctaaagccgtgaatacgtcaggcgacaatgaagaaggtcaggagctgccgagcgatgccaacgcatggattggagggagtgctgatagcgacgaactggagaagggcgaagagcaacaacctttagttattgacggcgaaccaatcagcggcggcccatcttctgatttggaagatgaagccagcaaaatcattgccgcagatgaggcaggcgacaagattaaaaaggcgattgtccagattcaatatgatgaacgcccagcgcgattactcacgaaccgccgagcttcttatgggttcggttggattaaatacgatgatgatggcagtgaagacgagattgatttaaaggacgttagtgttgttgccattgttgaaggttga

SEQ ID NO: 40463 - DNA, 753 bp, Escherichia coli
atgaatatcataacagtgacgaatcagaagggcggggtaggtaaatctacaatcgccgtacatcttgctatggcccttcaggaacgaggcgacagagtgctgtttgttgaacttgatccgcagggtaacgccagtaagactttagaaaaggctggaggtgtggcggcacttcaggcaagccaactttttgaagaacaacagttaactattacgccaaatgaaggcattacgttaattaatgctgatgcaaagatggccgatatagaacgcgccccgttaacggttatgtcaacctttaaagaccaccttaccgcgctggcgtctcagtttgaccattgtgtcattgatacccctcctacccttggtttgcgtatgtcagcggcgcttatcgttgcaaatcatgtgttgtcgccaatagagctggaagaatattccattgatggaattacaaaaatgctgcaaaccatttttggtgttaagtcgaaatggaatcctgatctgaacttcctaggcatgttacctaatcgctttaattcccgttctgaagaccagaaaaaaacattaatgaatctggtagagaactacgctcatctgttaattcgagcgcggatcggcattcgttcatcaattccagaagccctttccgaaggtattccggtatggcagttaaagaaaacatctgcgcgtgaggcagggaaagaatttcaggaagcttttaagatcattttcgaaaaaatgggggttgcgaaatga

SEQ ID NO: 40464 - DNA, 363 bp, Escherichia coli
atgaaaaaacgactaacgcaggccgaatttgaacatgccatttctaacctgtcacgcgcactaaagccagcaaatgtagaaattgtgaaagcaattttggttgatggcagaaagcaaaatgacatggtgattgaaacggggttaagccgtacagcaatagcggcaatgacgaagaaagttagagaagcgcacaagttacatggcaaaccaccggcaggctgggaacgtatcgagctatgtataccatcatcaatggttcctatgttaagggctatggaagatgaggcgcgtaaacaggcaaacgctaagggtgaaatgaatgaatatcataacagtgacgaatcagaagggcggggtaggtaa

SEQ ID NO: 40465 - DNA, 510 bp, Escherichia coli
atgctgaagcgttggaatattattttcctagttttatttttaccgttgcaatatgcaattgctgatattcatggcgaaataatacgaattatcgacggtgatacagttgatgttttagttaataaaacgccaataagggtgagattagttgatattgatgcccctgaaagcaagcaacctttcgggcagaaatcccgccaatttttggctgatatgatctttcgccaacaagtaaccatcgttgaaaagggaaaggatcgctataaccgcgtgttaggtacagtttttaaggaagataacaccaatgtaaatgaatctcaggttagtaacggtatggcgtgggcctacagataccgtgagcaggcgacgaatccagccatgctagagcttgaacaggacgctaggcaaaaacgccttggtctatggtctgatccgcaatcaagcattgtagagccttggaaatggcggcgagataacaataaatttcgtgcgcacgaaaccgcaaaatga

SEQ ID NO: 40466 - DNA, 303 bp, Escherichia coli
ttgaacaacgtaattagaactgaaaccttacgcccttttagtgatggttggacgcctccgacaggtgaagaaatcaaagcggtgttaagtctggtagaagagcgatcaggaaataaatttactggtgttgacgcatcaaaatacataggtctaccaagtgaaacagggagaggaaagggaagccggacatttaggcgttggtgtaaagaaggcgggataccttacgcggcatgggcgttactttgttataaagccgggttcggtgttatttgggaagcagatgaacaaaaaggcgaaaattaa

SEQ ID NO: 40467 - DNA, 150 bp, Escherichia coli
atgaacaatgatattttagcattggccgagatgattaaaaaggcaatagatagccacacctcctttaagcttcctcccctatccgggagcgagtttaaagcggtgatggaagcattacgcgagcagaacgcaggctttcaggccgtctaa

SEQ ID NO: 40468 - DNA, 222 bp, Escherichia coli
atgaaaaacagcaattttgaagaggctaacgagattaacaacgccatcaatgaaatgattagtgaacgtcaatctatcgacgcaggtcggaacgacttcctacaagaaacttggcttcttgttcgcttagggcatcagtataaagaggctggaaaagattggtatcgctgggctaaagctacggctatccgtctttgggagagtggccacatcgttaaatga

SEQ ID NO: 40469 - DNA, 1353 bp, Escherichia coli
gtggctacatcacaactggcgctttttaatccagccgacgaagcggagacttatcacaattccgggcggcatggtttcttttctgtactggctcagtggccaacgggtaaacgccaatcttcttacccattaagtgagatggccaccgttcttagcatggtcgatacctcacgcgatacatggataacccaagctgaatttatgcgtcctaaccggcgtgtagtaaacctcttacgtttggggttgctttttgtcgatatagatacctacaagatgagttgggcgcagggtagaacacctgaagctttggccgctgcaatcaactatttctgtcaacaagaaggcataccagaaccctcctttatggtctattccgggcgtggtattcaggctaaatggctacttgaaggaaccttgccacgtgccgcgctaccgcgctggaatgcttgccaaaagcatttagtatctaaactttcctcactaggggctgatcccgcagctaaagacgccagccgggttttacgattagttaatacggttaacactaagagcggcaatatttgccgtgtagtaagcgttctagaacgtgatggcgcaccaatccgttataacttcgagtaccttgctgaaatgttattgccggtggctcgctgggatattgaaaagcaacgccagacaaaagcagaacagaaacttcaattgctgcccggaggccggcaaagcaacctcagaggttttagcggtcgtcagcttgcatgggataggcttgaagatttgcgcaagctggacgagctgcgcggcgggttagctgaaggggaaaggatgcgtcatttattttggcgtattaactttttgctgttgtccggggcgacaaattcaacgcagatgtatcacgaagcggctgcactggccacggagatctcccctgcatggtcttaccgttcacaagagttaatgacgctgtacagcaaagcaaagcagtatgaagccggtgagaaggtatctttcgggggcaaggaattttcaccactctacacgccaaaaaatgacactctaatcaatctgtttcaaattacagatgaagagcaacgccagctaaaaactatcatttctaaaaatgaagcgttagagcgtagacgcgcacgagacagaaagcgtgacgaggaacgccgcagagctgccggagccgttgagcgtgatgtttacgaagctaattcactgactaaacagaaaccatgggaagcgttaggaatgagccgcgctaaatggtacagattgggcaaaccatcaggcagtgagacaactccctcccctattacttgtcatggccaaatggccgctaaatcagcttag

SEQ ID NO: 40470 - DNA, 315 bp, Escherichia coli
atgaaccagacacaagtattaagaccggcaacgccgggtgacgttctgctttctcagttcttggaaccgaacaaaattagccaaacggcgttggccacctataccggatggacgagaaaacacgttaatcagctctgtcatggaaaagtggccataacaatagattccgcgctcatccttgcaaaagtctttggtaacaatcctgatttttggctggatttgcagaagaaagtcgatttatgggatgcactgcattcagaagatcgccgcagcagaatagataaggcgcgcccttttcaattactggcggcctaa

SEQ ID NO: 40471 - DNA, 261 bp, Escherichia coli
atgataaattaccgactcaaacccattaggacgcaagcaaagctttctcaggagaagctgggcgttcttgcgggcctagacgaaaccacggccagatcgcgtatatctcagtacgaaaccggcacttacagacctacctttgaaatggtgtgctcaattgctgccatcctcgatgtaccagagtgctacttctatattgttgatgatgattttgccgaagaggttttgcagctttacagaagtaaaaaacgccagaaataa

SEQ ID NO: 40472 - DNA, 372 bp, Escherichia coli
atgagaacattcaaagggttaagtgaccaaacccggaagccgataagtaacgttgttccgattcgtccgggtggggatgtagcttctaatgatgatgatagtggtgttacgaaagctaagtggatcgctggggcggcggcaaaaggcttaggaagcgttttgcgctccctaagctttctcattatgttgtggctacggttgccagttcgcctgttgttgattgccacatctgcgatggcttttattggcgtggttctctgtctcgttatttttagcgaccgttccatggttccgggcttcatcataattggccttgcttctacggctcttgcttggctctatgatttagttctcaccaagctgaccccgtaa

SEQ ID NO: 40473 - DNA, 309 bp, Escherichia coli
atgaacacggtaaaaattatcgctgtagccttggggttgactcttatttctgccatgccagcccaagcaaaagacccttgtaaagcggttttatgcctcgcgggtatgctgaccggcaatgacggcggatcagagtgcaaatcagcagttaatgattacttttcgatagtcaaattcaagaagggcaagttcaaaaaaagcgcaactaaagaagctcgcggcgcttttctacaacaatgcaccagtgaggatgaaggctggattaacaaaataaatagcgcctacggcactgttcgtaagggtttctaa

SEQ ID NO: 40474 - DNA, 747 bp, Escherichia coli
atggaactcttttcaatattggcaacctgcgccgctttaacttttggtacaggtagcccagcagaacaggcttaccctgttagtgagcaagaatgtaaatcagcagcggcgatgtatcgtgagcagttgcaaaaagtacagctcaccgatcaggacagggatgctattgcacgtgttgccatagccgaagcggccaatcaaggtgattcgggtttagctggcgttgtgtatacgattattaaccggcgtcttagcggtcagtttggccagactgtgacggacgtagtaaacagccctaagcaatttgagccagttaccaaagttggtggtgactggaaaaagttaccttccgtaaccgtttcacaatatacgcaagtacaaaccatcatcaatttggcgttagaaggtcacttgcctgatattaccaatggtgggttatttttccagaaccccgcaattgtagctgacagagaaaaagcaggaaaagtatctaaaggtttaactaatttcggtggttccgcaccatcagcgatcattaaagatcatgccttctacgccagtattaataaaggtggcccgtctaactcttccccggttcaattaactgcttccgctgtgcctgagcctaaaaaatgggatgtatacggaactgcaaagttccagaaaaatagtaacgccgaatggaatgtattttctaaaaatacgccatccaaaagcgtttatcaaaatgaaggggtgcagccatga

SEQ ID NO: 40475 - DNA, 1983 bp, Escherichia coli
atgaaattaatgattgtggaatctccggggaaagttaagaaaatacgcgagatccttggcgatggttggaaagtcgtcgccagtgtgggccatgtcagagatttaccagaaaaagatattggagttgccgcacctgacttcaaaccaacgtatgtggccactgagcgcggcaaagaggttttggccaagcttaaacaggacgttcagcatagtgatgctgttttcctcgcaactgacttagaccgggaaggggaagccattgcatggcatctgaaacaggcgctacggcttgagaacccgcagcgggtaacgttcgctgaaatcacccctcgcgctatcaaagcagctctggcgtcaccaagggcaattaatattcctatggtagcctcacaagaagggcgaagagtccttgatcgccttgttggttacatggtttcgccgcgcctgtcagaaatgagtgggcgacaagggttatccgctggccgggttcaaagccccgccgttcgtattattcttgagcgtgaacgtgcaattcaaaactttaagcctacctcccattttggcgtaagacttaattttgcaggagattggtttgctgaatgggatgtaaaacctttcttggccgaaggtagcgaatatttcatggatgaaggctttgctaaagaaatagccgccatacgggaagttgacgttatttcttatgaagagaaaaacgcatcaaaagcacctcctgcgccttttatcacttcaacattacagcaggcggcatctaataaattaaagatgaagccaaaagcaacaatgacaaccgcgcaaaaattatatgagcaaggccatataacttatatgcgtaccgataaccccaacctttctgatgatgctctggttgaaatataccaactctgcaaagcaaagggcttacctatggcgtctaaacctcgcacatggaaagcaaaaggtgatgcacaagaagcgcatgaagctatacgaccatcacattttgacgttgaagaagcagggagtacgccagaagaaaaagctctctatcgcctgatatgggatcgcgctgttgcctgtcaattagaatcagctcgctacgccgttcgcgtggcccgcttccgggctactgataatagcggcgaaaaaccagttgagtttgaggctgaaggccgaacgctaacgtatgccggatggacaacgttgtttaaagacgataccgaagccgatgatggcaaaaaggaagagaaacctaagaacccgatcccctctttgcaacgtggccaacaccttaccgctgaaagtgggaaggtattaagtaagacaacccgcgcccccagccgctttactgaggcgtcacttatcgcagaactggaaaggttaggcattgggcgaccaagtacctacgcggcgatcatggaaaacatcatgcgccgtggttacgtcaaatcggatagcgcaaacaaatatcttttgcctactgaaaccggtgcattagttattgatgctttggttaaaggcggttttagctttatcgagtacgactttacacgcgcgatggagggcgagctggataaagtcgcccatggccagacatcttacaaaaacgttgttggctctgtttatgaacgtctggaatcagaacttagccacctgaaaattgacgttgcacctcaatacccctgtccaaattgcggcaaggctcttttccgcaaaaaagggactaccggcttcttttggggctgctctggttatccagattgctctaccacgttaccagatacagcagggaaaccggggaaaccaaagcccaaaccagaagcttcaggctttaagtgtcctgactgtggaaagcctcttatccggcgtaaaaaaccagccaccggcggcaaaaaagggtatgactttttcggctgttctggctatcccggttgctcatcaaaatttgatgctgtgaacggaaagccaaaattcgagaaaaagtaa

SEQ ID NO: 40476 - DNA, 255 bp, Escherichia coli
atgaacaacgaaacgataacagaaccagaactgattgataaccttgggaatcagtcagtaaagaagatgatgctggtacagggtgaagatggaaaatttagcatccgcgtacagctttcgtggaaaggaggagatcttttattagagacacaaaggaagacgccgcgagtgtggtcgagtttagacaggttagtgaaacacattaacagtaagtacgggaaagtcccgatcattgagttacaacttatggagtaa

SEQ ID NO: 40477 - DNA, 309 bp, Escherichia coli
atggcaaatgtaaaaaccttcacccgtcagattgcctctaccacttggctaatgttgggtttgatgatgttaccgggtttagctcacgcagccggtggcgatccaattaaccaagggcttcagtggttaattgatctcttaacgtcaggcattgcccgttcttgcgcaatcttagcgatcgccgtgttgggttacttagcatgggccggacgtctccaagcccgtaatgccgggtttgctatcggcggtatcgtgctggtatttggtgcggtgtctattgccgacgcaatcattgctgtagtcaagtaa

SEQ ID NO: 40478 - DNA, 252 bp, Escherichia coli
atgctatttgcagcgagaaaaatcactccagttgtagcgatacagaaaattattgcctcgtatgttacgccccgcacaagtgaggggcgtgtagcaccggcaaagagaacatcttttcctgatgccatgacgctctccttacttgactacagcaatgattgcgtcggcaatagacaccgcaccaaataccagcacgataccgccgatagcaaacccggcattacgggcttggagacgtccggcccatgctaa

SEQ ID NO: 40479 - DNA, 2451 bp, Escherichia coli
atgagtaatgcaactgcgacaaaatcacgccaatgggtgaatgaaaactctgttgctgagtttatcccttattctgttcaccttgacgaaaacactattaaaactaccagtggctattatcttcaggtaattaagattgatggccgcgcccatgaaagtgcagatccagaagatgtgattaactggaaagaacaacttaatgggctgctgaaaaatatagcctcaccaaatatatctctttggacaaacattattcgccgtgaagaaaatacatttcccggcggggagtttgaagaaggtagctttgctgaacagctaaataacaaatacaaaaatcatgttggtaaaaataacatgatggtaaacgagctgtatcttacagttctttatcgcccttcaggtattcccggcgttaatctccttcagcgttttgaaaaaaatgttgaatctattaaacgcatacaggctgaagctattgaagggttacacgaagtggttaacaccgtcaccagtagcctaaaacattatggggcgcgggttttagggtgttatgacagaaagggtataaaaaactctgaagtattagagtttttatcttacctgataaatcttgagtggattcctcgcgctttacctcgcaaggtactctctgaagcgttgccttttgatcgtccgttctttggtgaagatgcctttgaagttaggggcgtcactgaaagcaccgtgggcgcagtcctgagcattggtgaatatccagaaggcaccgaagcgggcttaatgaatgcgtttttatccgcgccattcccgttaattttgtcgcagtcgttcaactttttaagtaagccggttgcgactgaattattaggcagaacacaacgccgaatgaaaaacgccggtgacttttccaaaacgcaaatggaagagatcgacgacgcacttgatgatttaacttcaggccgtcttgtattcggtgaacatcatttagccctaacaattctggccaaagatgcgcgaagcctgaagaaaaatctttctgacgctaaagccgagctggtcgattgcaacatgatcgtgtcgcgtgaagattgggctatagagtctgctttctggtctatgttgcccggaaactttaagtaccgggcaaggccagcccccataagttcacgtaattttgcggggttttcctcatttcacaactacccaacaggccgcagaaccggcaaccagtgggggccatcggtaacgctatttaaaactacgtctggcgctccctattatttcaatttccatagcgagttaagcgccgagaaggccagaaaactagcgcaactggaagcggaaaagggggcgggtagcattcaggaaacaaaagaggaacaaaaagccctagggaatacgttaattatcgggccttcaggctccggtaaaaccgtaacgcaaggtttcttgatggctcaaagtaagaaatttaaccctactcaaattatcttcgataaagatcgtgggttagaaatctatgtaagagcagaaggcggcgtttatttgccttttaagaatggtgcccgcactggctgtaacccgttccaaatggaaccttccgaagatacttatcagctccttgagcagatagttaaaaaatgtgccgggggttcattcacgaccgttcaggatactgacattagtaatgccgttcgcggagttatgcgcctgccgaaacacttacgccggatctctgcctgccttgactttatggacccaacagatccagaaggtgtaggcgctcgtctggccaagtggtgtggcaatggaacattagcttgggtattcgataacgaaacagacgacattgattttagtaataacacaatgtttggttttgacgttacggacttccttgataacgccgagatcagaacgccattaatcatgtatttgttccatcgtatttctcaaattattgatggccgtcgaatgatgattttcatggatgagttctggaaattattgttggatgaatattttgaagactttgcacaaaacggcctgaaaaccatccgtaaattgaacgggttaatggtgtttggcactcaatcagctaaagacgttcttaaatccgctattgggtacagcatcattgaacagtgcgcaacgatggtctttatgcctaaccctaaagctgattgggatgattacgttaaaggcttcaaacttacagaacgggagtaccagttaatcaaaaccgacatggcccccggctctcatcagttccttattaagcatggccataattcagtgatcgccaagctcgaccttgcagggtttagcgacgaactagccgttatctctggaacggctgacaacgtggaactattggaacgcatcatgcaacaagtaggggatgatcctaaagtctggttgccagagttccataaacagcgcgtagctgcctga

SEQ ID NO: 40480 - DNA, 645 bp, Escherichia coli
atgaaactgaaaaatttagcgttagcgctagccattgcaggaagccttaatgccgttagctatgctggcgttcctgtgaatgtagttgcagacccgcaagcatggaaagcacatcttgaggacatggccaaatatgttgagcaaattaaacagcttgaaaaccagtttaaacagcaggttaagcagtatgaatccatgaccagcgcacgtgggttggctaatgtaatcaactcccaatatgacactgacgccctgagtggcatcaataccgacagcattttacgtgatagcggcattaattcagccagtgattttaagcttcctgaagacgtggccgaactttacgacacggcagcaaaaaacgccgccacctatgctggccaagcttcccgctcgcttgaacaagcacaatctcgttttactgagctatcaggtttggtacgccgggtaaatacggcaaccgaccccaaagaagtgatggacttaaacgcgcggattggggccgaacaagcctttttacaaaatgaagttggtaagttgcaggttctccagcaaacagcgcaggcaaacgatgcgttgtaccaacagaaggttaaacagatggccgttcaatcatctggctcactgcgtaatgtgaactggtag

SEQ ID NO: 40481 - DNA, 249 bp, Escherichia coli
atgtttttttcgtgcgcacgaaaaataagcgcggtgtgtctggtaagccttgcgcttaccggatgcttcgacaaagaagaaacgcattccgttgaatggttctctaaccacaatgcagaacgggccgaaaccgttaagcgttgtagtgataaccccggcgagcttggcaatacgccaaactgtaaaaatgccattgctgcggaacaaaaagcctctagtggctcattgcgccacattaataattggtaa

SEQ ID NO: 40482 - DNA, 1014 bp, Escherichia coli
atgggtacgggaacaaacttatttgtccgtatttttgccaacgttgactcggcgttatcaacctacattaccgatacggtcagtaatgtaattggttatgcctcgccactgttcaccagcatgatgatcgtctggattgccatgtggggcattctgatgatgttcgccaaagttgatgaaccggtacgcgatggcgtctttcgcatcattcgtattggtgggattgtcgcgctgggcttaacggtcggtacttatatggatgtggtcgttaacgtcctacaaaaaggcccggaacacatttcagcggtggtttccggtacaacgggaacaacagccgacacgctggatgcgctctttaccaaaatattcaatgtggccaaagctgcatgggataagggcggggtcatgaacggaaacttcggtttgtatctgatagccctgattgtgctggttgttgggtgtggattgacgttgtttgtggcgttcttggtcttgttgtcaaagttcatgataaccatcctgctagggattgggccactgttcatcattgcactgctatttaacaccacgcagcgtttctttgaagcttggttagcgatggtatgcaactttggcattctgctgattctttcggcatcggtaggttcgctgatgatctcgttaggtgacacctacatttcaaagatggcaccaacagaaagcgcagcggccaatatggctaacttaggggatgcggcgatgttatgccttgtatttgcgctttgcattttagtggtaaggcaagttccttctatcgcttcagcattaggcggcggtgtggccatggccacgcaaggcgcgttcggctctgccatgaatgcgttacggccaacagcaatgaaacgcggtatgcaaaacgttaaccgagaagttaagacgactcaacgcgccctgacttcccccgttcgcggtggtcaagcggcttatgcctcctatcaaaaacgctttggtggtaattcagtcgcacaaagatag

SEQ ID NO: 40483 - DNA, 219 bp, Escherichia coli
atgaagaaatctctagcagtaatcgcactcactttcacccttggggcttgcactctcacgccaccgccaccggctgaagctgtagacgatgggcgcggcatggttccgattaacccggcaatggttacgcaagaacagattaatgccgtcagctcgaagtacaaggacgtgaataagaaacaggttcagcaattgaaggagtttgcgcatggccaataa

SEQ ID NO: 40484 - DNA, 759 bp, Escherichia coli
atggccaataaaaaagcagccccagccaaagaaaaaaaagtaaccgacaaggattactttgatgaggctaaaagctgggatgaatctgagattgtcagagaaaagaaatcagcccgtagagcttggtcggcattttgggctatgactggtgttgtaattgttcaggcgattgcaatttctacaatgatgcctctaaaaacaattgaaaattcaattgttcgcgttaatgacaccaccggcgaaactgaggtgatcagcaacctgaaaaacatggatgagactaccgaacaggtgatgagccgttactggttggctaagtatcttcgccaccgcgaagggtatcactggaacacccgcgaagatgatcgccttcaggttggcatgttgtcagacggggccattcagcaacagtacgctgattacaccaatcccaaagttaacccttacgcgccaatcaagatttatggtgaaaccactgaggttgatattaaggtcaatcccgccattacatacctaaacggtaaaggtggagtgaaaccagagaagggcgagaaggatcagttcggtgaaacggtatatacagcgttagtacgctacacggctaccgtgaagaaagacggtgaaatgccggtaacaacccattgggccgctactgtctctttcgtctaccgtaaagagccaatcaaggtggatgatcgcctgataaacccggttggttttcaggttattagctaccgtaaagatcaggaagggggttaa

SEQ ID NO: 40485 - DNA, 822 bp, Escherichia coli
atgctttcgcttaataaaaccaccttatcggttcttctcgttctcggcattttttcttctacggcgtttgcgcttgaagttccaagaggcggcgcttatgacaaacgagtcaagttcatttcatacaaccatgagcaagttgttaaattgattggccattatggctattcaacagatattcaatttgcccccggcgagaacgtcaccaacatagcaatgggcgacccggacgcttgggaagttgcgccagtagaaaaccatatcttcattaagccaacaggcgaacaagccaccacaaacatgacggttttaactgaccggcgcgtatacacgtttgatttatccgctactggtaagaaaaccggcgatatgtattttcaggtaaatttccgttatccgcaggacgaagcggcgcggcgtgtagctgaagaagatgctcgcagactgaaagaacggatgaatgaaaaagcgcctaacgcttggacaaactggaactattgggtattcggttctcgtgaagtctccccttggcgtgcttatgatgatggccgttttacctacttcaagttttccggtaatacctcgatccccgctatctacattaaacatgctgatggctctgaaacacttctgaacccaacgatggattccgatcacccggataccatgattgttgaaaaagtggctcctaggtttgttttacgcaacggcaaatatattgccaacgtctacaacgaatctttcaaccctcatggattaatcaataccagtggcacaacgtcacccggcgttaagcgtgtaattaagggaggggcgcagtaa

SEQ ID NO: 40486 - DNA, 1188 bp, Escherichia coli
atggctaaagaccgcgacgacttagatacagaaatcgaacaggaagatgctgatcgtggtatgccctcgatttccaaaaacaggaaaaccggtaaagcctccggtattggtcagaaaatcgtagctgtaatcatagggattatcgttattctggcgttaatagcggtgaatggtggctttaagggtagtgaagaagataaaccgcctaagctcaccggtaacaccagtgtagccaaccggcttggcccgccgccttctttaccgccgccgccagctccaccaaaggctgagacgccaaaagaagatcggatgttgaatacagggcaaatagccccgccgccgccatcttcagcttcaggaactggtggcaatgggaagcatgaacagacaccagacgaacgcaagcggacaagctctattctggcgtttggcagtatttctaaacctcaacagcccggacaaaaagcaggtaatggccagcccgttcaaatggccggtgaggtacaggagggtaatagctcactatctgaaactgaccgcgctgatagtctttctaaccggcttaaaggtactgaggttagcggtagcagggcaagcctgttagtagacagaagttactttatcacacaaggcactttccttaattgtgcgctggaaacggctattagcagtgatgttcccggaatgaccgcctgccgtttaactgatgatgtctacagtacaaacaagaaagttttgctactagaaaagggttcaaaaattgttggccaatatcaaggcggcataaagagaggacaggcgcggattttcgttctctggactcgtatagaaacgcctaaaggggtattggttaaactggattcgccgggtactgatgcccttggccgttctggacttgatggcttcctcgatactcacttttgggatcgttgggggggcgcaattatgctgacaacaataaatggaggcgttacctacgcagccaatagcgcaaatcgtagcaacggcggtaatcaatataactttggtgatacagcacaagcaacaaaggatgcttccagtattgcgctggaaaactctatcaacataccgccaacattaaccaaaaatcagggtgacaatatttctatctttgtagcccgcgatctcgacttcaggggggtgtatgaccttaaagcagcctactaa

SEQ ID NO: 40487 - DNA, 1038 bp, Escherichia coli
atgaccttaaagcagcctactaatgctaaaggttcatcacttttggagtaccttcgggtactccagccctttttaaacgaagacggggttactgaagtggtggttaataaacccggagaggtaattactgaaggccggaaagggtggcagtttcataacgtaccaaagttagattttgctgcttgcgctgacatatcaaagcttacggccacttattctggccagtcatttgacgagcgtaagccgattgtttccgcaacattaccctacggcgaacgtatccagattgtgcggccaccggcgacactgagcgaccgttacagcctgactatccgtaaaccctctgacgtgatcagaacgttggatgattacgagcgtgacggggcattcgatcacatcgtaacggacgctgtagggctgcgtgactttgagcgagaactcattgagctgaagaacgccagacgctttaaagagttcctcacgctggcgattaaacatcgccagaatattatcgtttccggcgctactggttcaggtaaaacaacgttcatgcgttcattgcttcagcttgtacccgatgatgaaagactgatcaccatcgagaacgtagacgagctgaagctataccaaacacataaaaacgttgtgcctctgttttacagcgccggtggacaaggtattgctgatgtgacccagcagcaccttttagaaagttctcttcgcatgaaaccagatcgtgtgtttgttgccgagttgatacgtggcgatgaggctttctattacctgcgtaacgttaacagtggccatccgggatctataacgtctatgcacggcactaacccacgaatggccatagaacagcttgttttgttcattaaggaaagccaaagcggcggaacaatgtcacgtgaagatattaaacagcttctgtttagttgcatcgacataattgttcaattccaaaaccatcaaggccgtcgatatatttcggagatctattatgagccagagttcaaacaaaatattttggtggcttaa

SEQ ID NO: 40488 - DNA, 1929 bp, Escherichia coli
atgagccagagttcaaacaaaatattttggtggcttaaaatcctgctgctgattagcttgccgcttatctttttggcggtagcagcttggattggcggggctatattcatggccggtaatggatacgaggccaaagatgctacaccactgacgctataccaatactggtactattacggcgatatacctaaaactaatctatggctgatggggtctatggttggcggtttggttattactgcgttgccttgcttgctgccgcttctaccgaagaaaaccccattgcatggtaacgctcgctgggctaacagtcgtgaaatccgcgaggctggcttattcagtgatgatggtattatcgtcggcgtaaaaaaaggctttatgggccttttcatgcagtaccttgtattttccggttctcaacacgttttgatggccgcgccaactcgttcaggcaagggggttagtatcgtagtccctaaccttctttcatggcgtgatagcgttgtagttctggatataaaacaggaaaactgggatataacttccggctttcgctctcgtcatggccaagactgttttttgttaaatcttgcgccaagggattaccgttcgcaccgctggaacccactcttttatatttctgacgatcccaattttcgcattaacgacattcagaaaattggtcagatgttgtttcccaagattgagaatgaagcgccaatttggcaatcatcggcccgttctctttggttaggtatggtgctttacctcatcgagacggaagagttgccggtaacaatgggtgaagctcttcgccagttaaccatgggtgatgaacgtctggctgaaattgtcgaagccagacaagaatctgaaacccctttatcagatgaatgttacttagctctaaaagaatatttagatacgccagataaaacacgtggttctgtccgtaaaggttttacttcggcgttagaacttttctataacccggtgatcgatgccgtaaccagcggtaatgactttgatttgcgtgaactgcgtaagcgccgcatgtctatctatgttggcattacaccagacgatttagaacgtttggccccgctgattaacttatttttccagcaagtcatagatctgaacacgcgggaactgccggagcaaaatcccgaccttaaatatcaggtattgatgttaatggatgagttcacggccatgggcaaagttaacattctgtcaaaaggcattagctatgttgcgggttatggcttgcgaatgctgccaataatccaaagccccgcgcagttacgagaaacctatggccatgatgcagcggaaacatttattgataaccatgcgttacaaatagtttttgcgccaaagaatcttaaaattgccaaagaagtttcagagtctcttggtactaaaacagtgaaaaccagatcccgcagccgttctactattgggagggcaagcggttcagaaaataccagcgaaactggccgtgcgctgttaatgcctcaagagcttaaacagatggggaaaagcaaagaaattattctgttagaggattgccctccgatccaatgctctaaaattacttggtataaagaccccacttttgaagccagaggtaatggccgtgatggcgttaaattcccttccccggaagtgacaattattgacccggccaacaggccaaaaggtgaagtttcctttatgagcaaccgggtagaacaggctgaagagacaaaaaccgaagttgtggaacgtgctgttaccgttgctgatattgaaaatatcgacaagctgaatcttgatgattttagttgtgatttttcaaaggttgaaatccctaaaggggatattaccgatgatgcgatggatgacatagttaatcaatttttctctggtttagaagctgcttaa

SEQ ID NO: 40489 - DNA, 237 bp, Escherichia coli; identical to SEQ ID NO: 9729

SEQ ID NO: 40490 - DNA, 279 bp, Escherichia coli; identical to SEQ ID NO: 31935

SEQ ID NO: 40491 - DNA, 159 bp, Escherichia coli
atgtcaggcatggttctgtgcataatatatccaaatattgttattaatatcacaagatgtgatgaaggctctaaaactgaccatatgtatcctaacctatattttccaaatcgagtcctaatctctctaaaaaaaagggcttttactgctgagcactga

SEQ ID NO: 40492 - DNA, 495 bp, Escherichia coli
  misc_feature (17)..(26): n is a, c, g, or t
  misc_feature (455)..(464): n is a, c, g, or t
atgctctctaccatgcnnnnnnnnnntgcgcgagcgaatgaacgtctctttagcttctacagacttatcgataaaggctttgggattttgatatttattctgttaatcgcctgcgccgctgccttcctgcttgataggtatttcaataaaagcgcaacgcctgaagagatcctgcgacgggctataaataatggggagatcgtccctttttaccaacctgtggtaaatggtcgggaagggacattgcggggagttgaggtgttagcccgctggaaacaacctcacggtggatatatatcacccgcggcatttattccacttgctgaaaaatgcggattaatcgttccgcttacgcaaagcctgatgaatcaggttgccagacagatgaacgctatcgcgagtaaactgccggaaggttttcatattgggattaattttagcgcctcgcatattannnnnnnnnngttctggaagtcaccgagcgtgagccattaa

SEQ ID NO: 40493 - DNA, 471 bp, Escherichia coli
atggcgttcgccatctggttcatgttttcgatattgcgcgagtgcattgccgccgtgtggtggcaaccgccttccagtttcaccgccagcgcaatggcatccgccacgttggcgacgcgcacgacgggcagcaccggcatcatcagttcggtcacggcaaacggatgttctgcggtggtttctacaaacagcagtcgcgtttctgacgggacgttcaggccgattgccgccgcgattttcgccgcatcgcgaccaacccagtcacggctgacggtgccttttccgcgctcgtcgatatttttcagcaacaccgattgcagttgctgcgcctgctctgcggtcagtttcaccgcatgctggccttccatcagacgcatcagttcatcggctacgctatcaacaacaatcagtaccttttcgtcggcacaaatgatgttgttatcgaaagaagcgcctttgacgatggactga

SEQ ID NO: 40494 - DNA, 417 bp, Escherichia coli
atgctgctacaggtaaaattaggaattaaatgtccagctccccgtatcggtcacaatatcagcttcaatgatacggtcacacttcatatatttgaacgtagccacatcaccgaatttatatttggctggcagggttctgttaccgacgctctccattttacagttccctctgtttacccgaatggatttcagcaccacgttgtcatcagtgatagtgagctgaataacaccatatttggtattccagccttcattgctgacggagctgccgaactgaactttaaacggtggtgtcgtagattgctgtgcctgctgttgctgagagggatcaggtttattagcctgctggctaccaacgccattaatgccattctgaaggaggcttctggaaaccttaatggtacccggcttgcatga

SEQ ID NO: 40495 - DNA, 528 bp, Escherichia coli; identical to SEQ ID NO: 28374

SEQ ID NO: 40496 - DNA, 585 bp, Escherichia coli; identical to SEQ ID NO: 28375

SEQ ID NO: 40497 - DNA, 270 bp, Escherichia coli; identical to SEQ ID NO: 28376

SEQ ID NO: 40498 - DNA, 987 bp, Escherichia coli; identical to SEQ ID NO: 9105

SEQ ID NO: 40499 - DNA, 627 bp, Escherichia coli; identical to SEQ ID NO: 24059

SEQ ID NO: 40500 - DNA, 1431 bp, Escherichia coli; identical to SEQ ID NO: 28378

SEQ ID NO: 40501 - DNA, 933 bp, Escherichia coli; identical to SEQ ID NO: 28379

SEQ ID NO: 40502 - DNA, 186 bp, Escherichia coli; identical to SEQ ID NO: 28380

SEQ ID NO: 40503 - DNA, 2787 bp, Escherichia coli; identical to SEQ ID NO: 28381

SEQ ID NO: 40504 - DNA, 633 bp, Escherichia coli; identical to SEQ ID NO: 28382

SEQ ID NO: 40505 - DNA, 510 bp, Escherichia coli; identical to SEQ ID NO: 28383

SEQ ID NO: 40506 - DNA, 1374 bp, Escherichia coli; identical to SEQ ID NO: 28384

SEQ ID NO: 40507 - DNA, 1410 bp, Escherichia coli; identical to SEQ ID NO: 28385

SEQ ID NO: 40508 - DNA, 1050 bp, Escherichia coli; identical to SEQ ID NO: 28386

SEQ ID NO: 40509 - DNA, 1410 bp, Escherichia coli; identical to SEQ ID NO: 28387

SEQ ID NO: 40510 - DNA, 1824 bp, Escherichia coli; identical to SEQ ID NO: 28388

SEQ ID NO: 40511 - DNA, 711 bp, Escherichia coli; identical to SEQ ID NO: 8875

SEQ ID NO: 40512 - DNA, 981 bp, Escherichia coli; identical to SEQ ID NO: 8876

SEQ ID NO: 40513 - DNA, 1266 bp, Escherichia coli; identical to SEQ ID NO: 8877

SEQ ID NO: 40514 - DNA, 789 bp, Escherichia coli; identical to SEQ ID NO: 28392

SEQ ID NO: 40515 - DNA, 897 bp, Escherichia coli
atgaccagaattgcatgcgtgggtatcacagttcaggacagaatttattctttgcccactctgccggagggtggcgggaaatatcaggcaaatcattatcttgagattggtggcggcccggcagcaacagccgctgttgcaatcgcaaagcttggcgtggaggttgatttcatcggtcgcatcggcgatgacagttgtggaaataccttacttgcagaacttgaggattggggcgtcaataccgcattttgccgccgatatcctaacgcccgttcgtcgcaatcagcgatcctcgttgatcagcatggcgaacggattatcgttaattatccaagtcctgatctcggtactgatgccgaatggttagaagcgatcgatttctctcgttatgatctgattctggccgatgttcgctggcatagcggtactgaaaaagcattctcgctagcgcgccttgcgggtgtgacaacgcttttagacgccgatatgacaccgcaggatatttctccacttgtcgcgcttgccgatcacgccgtgttctcaacaccagggctgaaacgcatgactggcctgcagtcacctgaagaaggtttgttccaggcaacgacacaaacagcaggtaaagtgtatgttacgctgggttctgaaggatcgttgtggattgaagatggtcatttgtgtcaacaggaggcattttctgtcaatgtggttgataccactggagcaggcgatgtttttcacggcgcactcgcggtagcgttggcagaaaaaatgccaacaaaagaggctattcgttttgccagtgcggttgccgcgatgaaatgtacccagcctggcggtcgggccggcattcctaatcgtgagcaaaccgaatcatttttgtcactttatgcgtaa

SEQ ID NO: 40516 - DNA, 879 bp, Escherichia coli; identical to SEQ ID NO: 4823

SEQ ID NO: 40517 - DNA, 888 bp, Escherichia coli; identical to SEQ ID NO: 28395

SEQ ID NO: 40518 - DNA, 1011 bp, Escherichia coli; identical to SEQ ID NO: 28396

SEQ ID NO: 40519 - DNA, 1434 bp, Escherichia coli; identical to SEQ ID NO: 28397

SEQ ID NO: 40520 - DNA, 1350 bp, Escherichia coli
atgtctgaaaagttacccgcaccgcgtgaagggctttccggtaaagccatgagacgtgtcgttatgggcagtttcgcaggcgcgttaatggaatggtatgacttctttatttttggcacggcagcaggactggtatttgcaccgctgttttatccagacagcgatccttttataggtcttatagcttcctttgcgacctttggtgtcggttttctgactcgtcctttaggtggcatcgtctttggccattttggcgataaaatagggcgaaaaataacgcttatctggacgttggctattgtcggttgctccacatttttgattggttttattccgacgtatcaggaaattgggatctgggcaccgctcatattaatggtgctacgtttaattcagggctttggtcttggtggcgagtacggcggagcggcattgatgaccatagaatcagcgcccgaatcccgacgcggatttttaggttcactcccgcaaacggctgcgtctgtgggtattatgctggcaaccggtatttttgctctctgtaaccattttcttacttcggagcagtttctctcctggggatggcgcattccgttttggctttctgcggtgatgttgatcgttgggctgtttatccgcctgcataccgaagaaacgctggattttcaaaagcaaaaaacgacgaataataaagaaaagtccgttcctccgttgattgaattattcaaaaaacatccacgaaatattttattggcactgggtgcgaggctggcggaaagtgtctcctctaatattattaacgcctttggtattgtctatatttccagccaattagcattgtcgcgagatattcccctgacgggtatgttgattgcctcggcgatcggtattttcagttgtccattggttggatggttatcagatcgtataggtcaaaaaagtctgtatttgtcgggagcaggattttgtgtcctgttcgcgtttcctttcttcttattactggatagcaaaagtacgctcatcatctggtgcagtatgatcctcggctacaacttaggtccgacgatgatgtttgccgtgcagccaacacttttcacccgcatgttcggtaccaaagtacgatataccggcctttcttttgcttatcaattttccgcgattcttggcggactaagcccccttatcgcctcaagtttgctggcgctagggggaggaaaaccgtggtatgtcgctctgtttttatttgctgtctcagttctttcctttgtttgcgtctggctgattgagccgaccgatgaacaagaaaccgcttcttaccgctacatcagggaacaatctcatgaaaactga

SEQ ID NO: 40521 - DNA, 888 bp, Escherichia coli
atgaaaactgaacgaaaaaacgagcattacttggcgctacaacaggcgtttgacgcgccatggcctgggcctgtaggagagttagtgatgctggaaaaaggcaatattcacctgcagatttatccgcatgatggtgccaggataacctcgttaaaggcatttggttctgaagtattacgccaatggcagccgcagcgcagagcttttcagtatggctgtttcccaatggtgccgtgggcagggcgactggggaatgcgacgctgaatgctggtgggcaatgttattctttacccgccaataaaccaccacatgcgttgcatggtatggcttgttactcaacgtgggaaatcatcgacaaaacagcagattccctgactttacgtatgcccctggcttcaccgtggccctggcaaggggaagtgattcagacttttttgctggagaacgatgcgctggttttgcaactggaagtccattcatatgccgatacattcccggcctccgcaggctggcatccgtggtttgcgaaaaagctgactccgcaaaatacagaatcgttgcaggtgctttttgatgcggactggcaagaagaagcgggtagtgatgaactgccaactggaaatcgtatctctcctcaagttggtccctgggatgactgttttggtttttatgacggggtgaaggttaagttactgtggcctggtaaactcgcgatgaccatgacctcttctgcaaacagtctggtggtatttgataaacagcccgatgccacctgtattaacccgctgactcaggcacctaacgcaataaatctaacgccggaatttgtgacaccagataagccgctggtcatcgaaactcgttggcaatttacacctgaatcttaa

SEQ ID NO: 40522 - DNA, 600 bp, Escherichia coli; identical to SEQ ID NO: 28400

SEQ ID NO: 40523 - DNA, 873 bp, Escherichia coli; identical to SEQ ID NO: 28401

SEQ ID NO: 40524 - DNA, 438 bp, Escherichia coli; identical to SEQ ID NO: 3029

SEQ ID NO: 40525 - DNA, 942 bp, Escherichia coli; identical to SEQ ID NO: 28403

SEQ ID NO: 40526 - DNA, 909 bp, Escherichia coli; identical to SEQ ID NO: 28404

SEQ ID NO: 40527 - DNA, 312 bp, Escherichia coli; identical to SEQ ID NO: 3032

SEQ ID NO: 40528 - DNA, 291 bp, Escherichia coli; identical to SEQ ID NO: 28406

SEQ ID NO: 40529 - DNA, 213 bp, Escherichia coli; identical to SEQ ID NO: 3034

SEQ ID NO: 40530 - DNA, 279 bp, Escherichia coli; identical to SEQ ID NO: 3035

SEQ ID NO: 40531 - DNA, 219 bp, Escherichia coli; identical to SEQ ID NO: 3036

SEQ ID NO: 40532 - DNA, 930 bp, Escherichia coli; identical to SEQ ID NO: 28410

SEQ ID NO: 40533 - DNA, 636 bp, Escherichia coli; identical to SEQ ID NO: 28411

SEQ ID NO: 40534 - DNA, 903 bp, Escherichia coli
atggcttatcaatcgcaagatatcattcgtcgttccgcgactaacggtctgacccccgcgcctcaggcgcgggacttccaggaagaagtggcgaaactcatcgacgttaccacctgtatcggctgtaaagcctgtcaggtggcgtgttcagagtggaacgacattcgcgataccgtcggcaataacattggggtgtacgacaaccccaatgatttaagtgccaaatcgtggacggtgatgcgattctcggaagtggagcagaacgacaaactggaatggctgatccgcaaagacggctgtatgcactgttccgatccaggctgcctgaaagcgtgcccggcggaaggggcaattattcagtatgccaacggtatcgtcgacttccagtccgagcagtgcatcggctgcggttattgcattgcgggctgtccgttcgacattccgcgcctcaacccggaagacaaccgcgtctacaaatgtacgctgtgcgttgaccgcgtggtggttgggcaagaaccggcctgcgtgaagacctgcccaacgggcgcgattcacttcggtacgaaagagtcgatgaaaacgctggcgagcgagcgcgtggcggagctgaaaacccgtggttacgacaatgcgggtttgtacgacccggcaggcgtcggtggtacacatgttatgtacgtgctgcaccatgctgacaagccaaatctgtatcatggcttgccggagaacccggaaatcagcgaaaccgtgaaattctggaaaggcatctggaaaccgctcgcagctgttggctttgcggctaccttcgcagccagtatcttccactacgtgggtgtcggtccgaaccgtgcggataaggaagagaataatctgcacgaagagaaagacgaggagcgcaaatga

SEQ ID NO: 40535 - DNA, 2415 bp, Escherichia coli; identical to SEQ ID NO: 28413

SEQ ID NO: 40536 - DNA, 588 bp, Escherichia coli; identical to SEQ ID NO: 28414

SEQ ID NO: 40537 - DNA, 834 bp, Escherichia coli; identical to SEQ ID NO: 28415

SEQ ID NO: 40538 - DNA, 1374 bp, Escherichia coli; identical to SEQ ID NO: 28417

SEQ ID NO: 40539 - DNA, 315 bp, Escherichia coli; identical to SEQ ID NO: 28418

SEQ ID NO: 40540 - DNA, 825 bp, Escherichia coli
atgcaaaacataacccagtcctggtttgtccagggaatgatcaaagccaccaccgatgcctggctgaaaggctgggacgagcgcaacggcggcaacctgacgctgcgcctggatgacgccgatatcgcaccatatcacgacaattttcaccaacaaccgcgctatatcccgctcagccagcccatgcctttactggcaaatacaccgtttattgtcaccggctccggcaaattcttccgtaacgtccagcttgatcctgcggctaacttaggcatcgtaaaagtcgacagcgacggcgcgggctaccacattctttgggggttaaccaacgaagccgtccccacttccgaacttccagctcacttcctttcccactgcgagcgcattaaagccaccaacggcaaagatcgggtgatcatgcactgccacgccactaacctgatcgctctcacctacgtgctggaaaacgacaccgcggtcttcactcgccaactgtgggaaggcagcaccgagtgtctggtggtattcccggatggcgttggcattctgccgtggatggtacccggcacggacgaaatcggccaggcaactgcacaagagatgcaaaaacattcgctgatgttgtggcccttccacggtgtgttcggttccggaccgacactggatgaaaccttcggtttaatcgacaccgcagaaaaatcagcacaaatattagtgaaggtttattcgatgggcggcatgaaacagaccatcagccgtgaagagttgatagcgctcggccagcgtttcggcgttacaccactcgccagtgcgctggcgctgtaa

SEQ ID NO: 40541 - DNA, 810 bp, Escherichia coli
ttgaacaaaatcagtgaagccatcgactatgaacccgtgattggtgtcatgggaaaaactggcgcggggaaaagcagcgtatgtaatgcgctgtttaaaggggaggtttgtgcagttagcgacgttgaggcatgtactcgtgaagttcaggaattgcatatacgcttcggaaaacattcgctgaagataattgatatacctggtgtcggtgagaatgcccggcgggataaggagtatgaagatttataccgcaatttgcttccctccctggatctcatcctgtgggtaataaaaggtgacgatcgggccttttctgcggatgagcatttctacaacaatgttctgctccctgctggtgggggtgagcgcgttttattcgtccttaaccaggttgataaaattgagccattccgcgagtgggatactcatctgcatcagccatctcctgcacagcgcatcaacatcgaaaagaaagaagcctacattactgaacgatttggttttacgcactatccggtgacacctgtctccgccgatgagggctacaacattcttcgtctggtagagactattattcgggctttgcctgatcgggctaaaagtagcacggcttcgcagtttaaggatgagttcaaaaccgaagaggtcaagacggaagcaaaaaacggcttcggcagcgtaatctccgggatactcgacgacgttattgattcttttccgttaccaaagcctgtcaaagagcttacccgtaagggtaaagacaaacttatcgagtgggctggtaatgcctgggaccatttttttggatag

SEQ ID NO: 40542 - DNA, 453 bp, Escherichia coli
atgaagcgattattcgtaattgctccactcttagtgttggttggatgcgcacaaaatatatcgccaaatagttattctgttggctctgtgggcatggttaatcgaactatcgctggtacagttattagtgccaggggggttaatatcagtgggacttccgcgttaggcgggactgctggggctgccgtgggggcaaccgctggttctgcgcttggtgggggagttcgttctaatatcgttggtgccgttggtggtgcagtcattggtggtattgccggggcagcaatcgaatcttcagcaacaaaacaaacaggcatggaatatgttgtcgaaactgagaatgggaatttaatgaccattgttcaaggcaaagatccgttatttactcaaggaagtaaggtccttgttttatacggaaacccttctcgcataataacagacccgcgtcactaa

SEQ ID NO: 40543 - DNA, 561 bp, Escherichia coli
atgaagaagataatattattagccatgattattggttctttaacaggttgcgctagtgtgccaccattgaatttttcaacacctaacgtgggagttagccagaaaaaaatagatgctgaaattaagtcattaacggtatcacttgctcgtccagatgagcagaaaggggatatcactgctggtatggaggctataactccaatttggcgtgaatctttgcaggaagcactcgaccgaatgactatttttcgtgatagttcaccaaatacggttagcttaaatgttaaagtgttggctcttgacgttcctgcttttggtgtttcaatgacaactaaagcaattgcaaggtatgaaataatcaaccgtgcgaatggtgatattatatatacgcaggatattgagtctaccggtactgttccagccagttacgcattctacggtattgttcgagcacgcgaatctgttaatcgcgcggtgcaaaacaacataacgcagttcttgcaagcattagaaagtgttgatctttctcgtccaatgtttcctgttagggtagctaaatga

SEQ ID NO: 40544 - DNA, 192 bp, Escherichia coli
atgcgcaccaaaatttatcaactttcgttatggatatttatttcgtttctagcgatctatgcctttattatctataaaggttcttatattggagtagcattgcatcaaattgcttggatcatcattattgcctctggcttgattgctaggctaactaaaccaaagcaaaaaccaatttcgtccaataattag

SEQ ID NO: 40545 - DNA, 144 bp, Escherichia coli
atgttgaaaaccatgcaggagcagggcgtggaaattatctatcctgacgtcgcccctttcaaagaaaaagccttaaaagtctatcaacaattcccggaatggacccctggtttgtatgacactattcagcaacagctgaaataa

SEQ ID NO: 40546 - DNA, 189 bp, Escherichia coli
atgaaaaattgtctactgttgggcgcgcttttaatgggctttactggtgtggcgatggcgcaaagtgtcaccgtcgatgtggctcctgcgccagctccggcttaccgcccgcatccttatgttcgccatcttgccagcgtaggtgaagggatggttatcgaacaccagattgacgaccatcaccattaa

SEQ ID NO: 40547 - DNA, 1167 bp, Escherichia coli
atgacagaacagcaattacctgaaggctggcaaatggtgaagtttggcgatatcgctaaacatatctctaaacgagtggaaccgagcgagacagaccttgaaatttatgtcggtttggagcatttagaccctgacagcctgaaaatcaaacgtcatggtacacccagtgacgttgaagggcagaagcttttagtgaaaaaaggccagattatttttggtaagcgtcgtgcttatcaacgtaaagtcgcggtagcagattgggattgtatctgttcggctcatgccatggttctggaggcaaattcaaatactgtaatacctgagtttttaccctttattatgcagtctgatactttcatgaatcgtgcagtagcaatttcggaggggtcattgtctccaacgataaaatggaaagttttaagtcagcaggaatttattattcctgaaatggatctgcaagttgattttttaaattctttaaaaaaaatcgaacaagtattacattgtgcaaatgagactgaaaggtctgcattaaatttatttcaaagattaattgatcggttgactacatttgatcgaaaagaaaaactgccatttggatataacaaagttagattgaaggatgtatcaaatattaattttgacttgttaagtaatgatgccaataaaaataagctgattaggtatatagatatatcttcagtgacttttcctggttttgtcgatactcctaaagaataccatttcgctgaagcccccagccgagctcggcgtattcttaaggaaaaagatattgttgttagcactgttagacccaatcatagagctacgttttatgtgtctgaaatattgaatgattcaatagcatcaacaggttttactgttctaagggcaaaaaatgatttgtccgattttatttattatttcactttgtcgaagcaattcacttattcattaaccaatttggcagttggtacaagtttcccggctgttaatgatgccgatgtacattctcagaagatggttataccaccatcaagagagcttgggaaatataaggatatattacatttagccgaaaacagttatagagaagctaaatcaaggcttcaaaaaattcgtaaactcaagtccagttatttgaatattcttctgaggggacaataa

SEQ ID NO: 40548 - DNA, 435 bp, Escherichia coli
gtgcactttgatcaattccacaggtgcgccgagggcgttaaagcgggcttcgatggcgtccaccaccggacccgccgctccgttcccggagttaatcaccagcttgagcggcgtgaggtttttgacgttgatataaccgaacaggtgatcaacgtaagcgtcacgcagattgatttgctgatagcgaccgcgtttggtttcatcgacgggagggaagtcgttggcttctgccagacgctggacatcgcgcagtccggtatcaccgctgatcgggcgggccccctcgcgcaccagcttcatgccgttataatccatcgggttatggctggcagtaacttcaatgccaccatccacaccaagatggaacgtggcgaaatagatctcttcggtgccggacataccaatatccagcacgtcgacgcccgcatcctgtaa

SEQ ID NO: 40549 - DNA, 231 bp, Escherichia coli
atgagtaaggccggacatgtgtcgcttcgcagggcgttgtatatgcctgcaatggtagccaccagtaagacagagtggggacgagccttccgcgaccgtctggcggctaatggcaagaaaggaaaagtgattctcggcgcgatgatgcgcaagctggcccaggtggcgtatggagtgctgaagtcaggcgtgccgttcgatgcgtcacggcataatccggtagcggcgtaa

SEQ ID NO: 40550 - DNA, 171 bp, Escherichia coli
atgtcagaacgtaaagactcaaaatcacgccgtaattatctcgttaaatgttcctgcccaaactgcacccaagagtcagaacacagtttttcaagaatacaaaaaggtgcccttttgatctgccctcattgcaacaaagtattccagacaaatcttaaagctgtagcttga

SEQ ID NO: 40551 - DNA, 747 bp, Escherichia coli
atgagccaatatctgatttttcagcttcatgggccgatggcatcctggggcgtcgatgcccccggcgaagtgcgtcatacccatgaactgccttcgcgctcagcattgctggggctgctggctgccggggtagggatccggcgtgatgataccgaacgcttaaacgcgtttaatcgccactattcactggtggtttgcgccagccgtaacccgcgctgggcacgggattatcacacgatccagatgccaaaagaggtgcgtaaagcgcgttatttcagccgtagcgaagagttgagtaatcctgaactgctaagcgcgattatctcccggcgcgactactacaccgacgcctggtggatggtagctgtggcaaaaacccccgatgcgccatatagcctcgaacagttgcaggacggtttacgccatccggtttttccgctttatctggggcgaaaaagtcatccgctggcgttaccacttgcgccgttactgctcgaaggcaacgcgtctgatgtcttacgtaacgcataccaacagtatcaggatcgtttccgcgaactgaaagtctcactcccgaaacttcaggatgaatgctggtgggaaggggagcacgatggtttggtcgcaagcaaaatattacgccgccgggatgttcctttaaatcgtcagcagtggctgtttggggaacgcaccatcaatcaggggccgtggctcagcaaggaggaaccatgtacctctcaagaataa

SEQ ID NO: 40552 - DNA, 966 bp, Escherichia coli
gtgacggagactttttactgggtggcactccccctgactacggtaaacggtgtctctcagtttcagccggaatggatatgctgggaaccaggtgtggagtgggttcgtcagccaccagatgacgctattacagatatgtcgtacttcccattttatcggtatgccatgacgtttgaagaatttgttccggcattttcttcctggtttgccggtaaccggtgtggagtggcaatactgactggtgtccgtgctgatgaatcgctcaatcgctttatgggactggtgtctcagcgcaaactgagatatgcagatgataaaccctggaccacagcgtcacctgaagggttttattacaccatgtatccgttgtatgactggaaagctcgtgatatctggatatataacgccagaacccgagctatctacaatcccctgtatgacctgatgtaccgtgccggcgtgccgttacgctacatgcgtgtctgtgaaccttttggtcctgaacagcgtaagggactgtggctttaccatgttctggagccggaaacctgggccaggatgtgtgagcgggtgtcgggtgctgccagcggagcgctttatgccaatgagagcggtgcctattttgccctgcgtaagcgtatcacgaagccgcctcatcatacctggcgtagctatgcgatgttcctgctggatgtgatgccggaaagaacggcagaacattaccgtaataaaattgctgtctacctgcgctggtatcagacgcggggcttcccggatgacatcccggatgaacaggagaatgacctggggagccgggatatcccgtcctggcgacgtatctgtaagacactcataaagaatgatttctggtgccggaccctctccttcagcccgaacaaaccccggcactatgaacgttatctgcagcgtatgaaagaaaggaggaaggaatgggggattctgtga

SEQ ID NO: 40553 - DNA, 564 bp, Escherichia coli
atgctggcggtgaccgcactggtgcctgccgtctggctggtggcagagatctccaccgtgccgtccggctgcgtggtgaccgtcggagcagtcgtggcaccgttgtccgccaacacgctgactgtctgcccggcaagcgtattaccgaatgcatcggttaccctcgccctgagcatgttcgccattgcgccgtcagccactgagccgtccttaatgaccaccagatcagcgatcttcgccgtcctgacatctgcaacaaacgtcacgttccggctcgcggtactgctgttgatactggcggtgaccgcactggtgcctgccgtctggctggtgacactgatttccaccgtgccgtccggctgcgtggtgaccgtcggagcagtcgtggcaccgttgtccgccaacacgctgactgtctgcccggcaagcgtattaccgaatgcatcggtgatcttcacccgcagcgtgttcgccattgtgccgtcagccactgagttatcctgcgtcacctccagactcgcgatctgcgccgtcctgatatcggcgataaacgtcacgttctga

SEQ ID NO: 40554 - DNA, 390 bp, Escherichia coli
atgtcaaagtcagcagcgggtacggtcagccagccgggacgcaatgtccgggcaaaatcaggtttaaaccgttcggtactggatcagggctggtatgaaatgcgccgccagcttgagtacaagcagctctggcgtggcggtcaggtgcttgctgttccgccagcgtatacaagccagcgttgcgcgtactgtggtcatacagcgaaagagaaccgcctgtcacaaagtcaattcagatgccaggtatgtggatatacagcgaacgccgatgtaaatggcgctcgtaacattttagcggcggggcacgccgttcttgcctgtggagggatggtgcagtcaggccgcccgttgaagcaggaacccaccgaaatgattcaggcgacagcctga

SEQ ID NO: 40555 - DNA, 369 bp, Escherichia coli; identical to SEQ ID NO: 14436

SEQ ID NO: 40556 - DNA, 927 bp, Escherichia coli; identical to SEQ ID NO: 8397

SEQ ID NO: 40557 - DNA, 423 bp, Escherichia coli; identical to SEQ ID NO: 8332

SEQ ID NO: 40558 - DNA, 1617 bp, Escherichia coli
atgacagagcagcatgacgccaccgggggcgataacaccacctacggcgaagcctaccactatgccgacaacttcctgcaaaaaggcgataaagaggcagcggaaagcggcgcgttttatgcccgtatccgccacgaacgctacctgaatgaacaggccattctcaaaggccagagcaccagttcactgctgatgccggggctggaaatcagggttcagggcgacgacgcgccagcagtgttccgcaagggcgtactgattaccggcgtgacggccagcgcggcgcgtgaccgcagctatgagctgacgtttaccgccatcccgtactcagagcgctacggctaccgcccggcgcttatcccccgcccggtaatggccggcacactcccggcgcgggtcaccagcacggtgaaaaacgatatctatgcccatatcgacaaggacgggcgctaccgggtcaacctcgactttgaccgcgatacgtggaaaccgggttatgaaagcctgtgggtgcgccagtcgcgcccgtatgcaggtgacacgtatggcctgcatctgccgctgctggcgggaacggaagtcagcatcgcctttgaggaaggcaacccggaccgaccttatatcgccggggtaaaacacgactcggcacacactgaccatgtgaccattcagaactacaagcgcaacgtgctacgcaccccggcgaacaacaaaatccgcctcgacgatgagcgcggcaaagagcatatcaaggtcagtaccgagtacggcggcaagagccagctcaacctcggtcatctggtggatgccgggaaacagcagcgcggggaaggttttgaactgcgtaccgatctgtggggtgcagtacgggcaaagaaaggcatctttatcagcgccgacgcgcaggacaaggcgcagggtcaggtgcgcgaaatggccgacattatcagcgaactgaacagcctgagcgataaaatccagaaactgtctgacgatgcggccacggcgaacgccgatccggcggatatggccgcgcagatagcattgataaccagccggataaatgacctgaccgcctcggtgattttgatgcacgcaccgaaaggcgtggcggtcgccagcggcgagcacctgcaactggccgcggtgaaaaacctccagataaatgcgggaaacaacgccgatatcggcgtagtgaagaatatgtttatcggcgtgggacgggcgctgagcgtgtttgtacgcaaggcgggtatcaggctgattgccaataaaggcgcagtatcggtacaggcgcagcacgatctgatggagttactggcgaaaaaatcgatagagatcgtcagtaccgaagatgagattaaaatcaccgcgaagaaaaaaataacgattaatggtggtgggagttatatccggatagagggtagcggcattgagccgggaacgccgggggattataacgtcaaagcggtacattacgggcgtcagcctaaagcctcggagaaggttcctatgccagaatttcccatcctttcagccgtggactcatccgatttttgtcttgaatgcctgctgaatgccatcaaaaacgatgacgctgttgttgaaggagtgtaa

SEQ ID NO: 40559 - DNA, 567 bp, Escherichia coli
atgacgcgccgtgctatcggggtgagtgaaagaccgccacttttacagacaatcccgcttagtttgcaacatttgttcgccatgtttggtgcaaccgtcctggtgcccgtcttatttcatattaacccggcgactgtactgttatttaacggtataggaacactgctgtatctcttcatctgtaaagggaaaattccggcttatcttggttccagctttgcctttatttcaccggtattgttactgttgccgttggggtatgaagttgcgctgggcggctttattatgtgcggcgtgctgttctgcctggtttcttttatcgtgaagaaagcggggaccggctggctggacgtgctgtttccacctgcggcaatgggcgcaatcgttgccgtcatcggtctggagctggcgggcgtagctgccggtatggcgggtttactcccggctgaagggcaaacgccagactccaaaaccatcatcatctctattaccaccctggcggtcacggttttaggttccgtgctgtttcgtggtttcctggcaatggtaatgactccaacttattga

SEQ ID NO: 40560 - DNA, 1020 bp, Escherichia coli; identical to SEQ ID NO: 28988

SEQ ID NO: 40561 - DNA, 696 bp, Escherichia coli
atgggaattgtcgataccacgccgattattaatgctcactggtttgcgctgccgaccctctatacgccgcgcttcgagtggtttgccattctgactattctgccagcggcgttagtggttattgccgaacacgtagggcacctggtcgtaacggctaatatcgtcaaaaaagatctgctgcgcgatccaggtctgcaccgttcgatgtttgctaacggcttgtcgaccgtgatctccggtttctttggttccacaccaaacaccacttacggagaaaacattggcgtgatggcgatcacccgtgtttacagtacctgggttatcggcggtgcggcgattttcgctatcctgctttcctgcgtcggtaaactggctgctgctatccagatgattccattgccggtgatgggcggcgtttcgctgctgctttacggggtcatcggtgcttccggtattcgtgtgttgatcgaatcgaaagtggattacaacaaagcacagaacctgatcctgacttccgttattttgatcatcggcgtcagtggcgcgaaggtaaacattggcgcggcggagctgaaaggtatggcgctggcgaccatcgtcggtatcggcttaagtttgatcttcaaactgattagtatgctgcgccctgaagaagtggtgctggacgcagaagacgcggatataacagacaaataa

SEQ ID NO: 40562 - DNA, 1074 bp, Escherichia coli; identical to SEQ ID NO: 30063

SEQ ID NO: 40563 - DNA, 183 bp, Escherichia coli; identical to SEQ ID NO: 11598

SEQ ID NO: 40564 - DNA, 267 bp, Escherichia coli
atgataaagaaaaaaggatttaccttactggaagtgacgattgtgttaggtattggaacgcttatcgcttttatgaagtttcaggatatgagaaacgatcaggaagcggtattggctgataatgtcggaacacagattaaacagcttggtgaagcggttaaccgctatatcagtattcgttatgacaagatttccacactgtcatcatccaacaatcaaagtagcgatccggggccaagaacctgttcctacaccaacagtccctga

SEQ ID NO: 40565 - DNA, 429 bp, Escherichia coli
atgaaagttagaagcataggatttacaataaataacaataacaaaaatattaataccgttgacgtaatgaatgcttttatcaacgcatcaaacagagaacacagtcgcacagactatactcgtaaaattctcatttcggatgtgaatgatttctattatggattagttgtcacattcagaaaccaaaaaaagaactgtaagtcgcaatttgttgatggtaaattccagcttaaaattgaagatcttcaaggaagtgacaaacttgctaatttcaactttttcttaattaaaaaatctaatctttctggtctctatatgtatcaccacggttcatgcagtctgaacactctcttttctcatttagaaacaataagtaatgaatttatcagaaatcaaaataaagaagaaataaaaaaacttggtgggtga

SEQ ID NO: 40566 - DNA, 423 bp, Escherichia coli; identical to SEQ ID NO: 8332

SEQ ID NO: 40567 - DNA, 132 bp, Escherichia coli
atggttgttaccaaaaagcgtatcgagatcgtcggttttctcaatcacgaattgcaggttgtcgtcttgcttttgattgtctgccagcaccaaccggatcttgttccagtcatcgaaaaagtattcctgtaa

SEQ ID NO: 40568 - DNA, 411 bp, Escherichia coli; identical to SEQ ID NO: 14449

SEQ ID NO: 40569 - DNA, 153 bp, Escherichia coli
atggatttcatcaatatgttctctcttaaaggtaaaaatgctttagtcactggagcatcatatggtattggttttgagatcgctaaacatataaagagaacaacatcaacgcacatggttatttatttgatattacagatgaacagtctgtga

SEQ ID NO: 40570 - DNA, 825 bp, Escherichia coli
atgaacgagcaccatcaaccatttgaagacttacgacaatatggaagcgaagggcaggaatattggtcagcaagagatttggcaccactactggattatcgagattggcgaaactttcaaaacgttctatcacgagcagctcaggcgtgtgaaaccagcaaccaagaggtttcagaccatttcgttgataccaccaaaatggttgttctagggtctggtgcccaacgagagttggaagatgttcatttgtccagatatgcctgctatctagttgtgcagaacggcgatcctagcaagccagttattgctgctgggcaaacatattttgcaatacagaccagacggcaagaactagctgacgatgaaacattcaagcgactccgcgaggatcaaaagcgcctttttctccgaaacgagttaaaggaacacaacaagcaacttgttgaggcagcacagcaagctggtgttgaaacaacattggactttgcaatcttccagaatcacggatacaaggggctttatggcgggttagaccaaaaggctatccatcagcgaaaaggtcttaaaaagagccaaaagatactcgatcacatgggttctaccgaattggcagccaacctgttccgagcgactcaggcagaagaaaagctccgcagagataatgttaaatcgaagcaaaaagctaatgaaactcacttcgaggtcggccggaaagttaggcaaacaatccaggagctaggcgggacaatgccagagaatctgcccgtaccggaaaaaagcatcaaacaattagaatctgccgccaagaaactggataaaaaatag

SEQ ID NO: 40571 - DNA, 882 bp, Escherichia coli
atgagtaagttatttaagctcaaagaatggctgacgttatcggaagcctcagagaggctatcagtattcttaggtgaaaaggtttctgttgctgattgtttgcagctggcattggataagcacataaccatttcagcaatttttaacgagagccagcacgctatccatgcgaaggtaatcacaacgacccaacgtaagcagttttctaaattcattatccggacaacagaggatggggcctatattggccttataggggaagatcgctttgtctcaaacagtgaattagattttgagtatgaagatattgaaaggtacggtgatgttttcacgttgcgtcatgggatctatgacctgcctatgctgggggccgaagaattggatgtcatgcatcagcttgatttgaacgctggaagagcgcctcgggaattctgcaatatggaggggccatttttgataactccatatggcttggtgaatatcttaaaccagttcaatccttggatgttaaagacgaatgatagcggctcaccagagtattacgataaggtaaaaaacgagttcgtagatttgagccatgaaggctaccgcgggtttctttatccggccgatgctttgggcgattttgagcttgtattcagaagagaaaacatcgaaaagtttgagcaagaaaattctggtgatggccaacaatcgctaaaacttgatgagagcctgcatgtaataggtgctctgcttaacgccttaaaaaaagctgaaccagcatctaagcgatggacgcaagaggcgctaaaggcggagatgatagatcacggggttaacctaagccctcgacatctcgataaatatttctcggcagcgaataaatcttttaaatcatag

SEQ ID NO: 40572 - DNA, 828 bp, Escherichia coli
atgctttgtgcacgcgttggcgcagagctgcgtgtgatcccgctcaaccccgacggtactctgcaactggagacgctgcctacgctgtttgatgagaaaactcgtctgctggcaattactcatgtctccaacgtgcttgggacagaaaatccgctggcggagatgatcacacttgcgcatcaacatggcgcaaaagtgctggtggatggcgctcaggcggtgatgcatcatccggtggatgttcaggcgctggattgcgatttttacgtgttctccgggcataaactgtatggccctaccggaattggcattctttatgtcaaagaagccttgttgcaggagatgccgccgtggcaagggggcggttctatgattgccaccgtcagcctgagtgaaggcactacctggaccaaagcgccgtggcggtttgaagccggtacgcccaataccggaggtattattggccttggcgcggcgctggagtatgtttcggcgctggggcttaacaacattgccgagtatgaacaaaatctgatgcattacgcattgtcgcagttggcagcggtgccggatcttacgctctatggtccgccggacagacttggcgttattgcttttaatctcagtaaacaccacgcctatgatgttggcagttttctcgataactacggcattgctgtgcgtaccggacatcactgcgcaatgccattaatggcctattacaacgtccctgcgatgtgtcgggcatcgctggccatgtataacacccatgaagaagtggatcgtctggtaactggattgcaacgtattcatcgtctactggggtaa

SEQ ID NO: 40573 - DNA, 333 bp, Escherichia coli
gtggatggttttcatcgtcagttgctgggcagggaagcaggtacgggaaaacgcctgaaaggctggttgccagtggcctgtattaatccggaaagaaagggacaggcctcccgtattgctgcgactattcgacataaccgtgccagagggaaacaccagataacttcaatgtctgatattgtcagggacctgtcgcgcctgggctggacggatgaacgcattggtacagagctgggcatggaccaggatgaagtactgcggctgaagcagattagcgggctgacagagctgtttcaggaagaggacttcagtccggcatggacagtccggtga

SEQ ID NO: 40574 - DNA, 1656 bp, Escherichia coli
ttgcatacagctctgcatcaactagagcagcaacagagtcgcatcacgagccaggagcaagctcgccatcaactggagcaacaggtcaataccctgacgttacaattgagtgaagaaacacagcgtgcatctcaccttactctcgcgctcagcaagagcaacagagcattgagcgaacattcgcggcaaattaccgaattacagcttcagttggaacaagcgctacatatccaggatacacaggttcgtacactggccgagcgagacaatatggtgaacttgttgcaacagcaggctaatgcattgcagcaacagcttgacggtgagcagcaaactaaaaaccagttgcagcatgcttatggattactggaagcacagcacgatacgttaggcttggaatatgatgcactgaaaaaggtaagtgcaaatctacagcaacagctggaagaagggcaacttgtgcaacaaacattgcagcaaagcatagatgagcaaactcttgctttggctgcggcttctaaacaatgtgatgaactgactcaactaatagcagtgcacgagtctaatattgcgtcacaaagcgacgtaatggctgctcaacaagcagagtataagcaactcacagaggcgctatcagcattacaacaacaactggcagttgaacagaccacacatcagcaacagattagcgaacgggacttggcattagccgagcgttttagtgaaacggtagctctaacacgtctattagaagagcgcacgcagattatcactgaactagagattgaaaaacaattgcttaccaccaagttgtctggcgtagagcagcagttaagggctgagcaagagtcgcttcagcaggcccagtctgcattgctctcagcagcaaaagaaaagcaacatcaacttgatgagttggaatcggtgctcaatgagcggtacagtgagattgcaaccttaacccgttggctggaagaacgtgatcaggcactccttagtgcagcaagtgaacaacaacagaccaatgaaacatatagagctcagcagcaagcctggaaagaagagaaggaggccttaatccgggaacaaaccttgctgcagagccagcagtctgtactgcaagaccaggtaagagaactaaccacactcaacggaaggttggaagctaatattgcagagcgtttccaggagttggcagtcatgacgcggcatatggagcagcttagctgtgagttaaaacaaaaagagcggcaattgaatagagcaaaagaacgcgctcagaatttgaagagaaccgtctcttggaagattacagccccagttcgtgctcttggcagaacatttaaggaggagactccatccagaacaacagctacagagagtgccgcggagcgtattgccgcttcaggattgtttgatgaactctggtatcaacatcgctacccagaggttgcagacactgggctctcagctcttgagcattttattagcgtgggggcggataaaggttatagccctagtgagcagtttgatactcgctggtatttgcaaacctatccggatgtggcccaaggaggcattaatccgctgcttcattacattatgtatgggaagtttgagcagcgcagttgcctgcctgtcaataagggagaataa

SEQ ID NO: 40575 - DNA, 510 bp, Escherichia coli
gtgccgcctcgcgtacagcaggatgcttccctggcttttgatctcagtggtaaaggagtcactaacgatgaaattatcaaagcggtagacaaatcacatatcggcccgtcagtaggtgatacggcaaaaatacatggagatgtaaaaggccaggtcgctggaggttatgtcgcaggagggtatctggaaggtgtactgtcagaggataaattttcaattaatggcggggtcacgaaggtattaggctggcgtgcagatgtgtctgccgggttgacttttgggccttacccgattaaagattttaatcctacttatgattattctggtgctatatcgacaggtattttttcagttgaagggagtattggtaaagacggctttggcggctctttcagagttggtggaggaattggtgcgagtattcgacaaagtgaaaacagtaataatcagccggaaattaacggttctggtagtaccgaactaatttcttggcctataaaaaaggactaa

SEQ ID NO: 40576 - DNA, 489 bp, Escherichia coli
atgtggttacttggtgccgggacaaatgccgggatgcagtatgcagatagtggtgaaataaacccggtcaactcagtggcagcaggctggataaatgtgataaccatggggcagggctggaaagggacaatagcctggaatgcggcaggtggagcattaaccaacgctataaacggagatgagcctcttactggggcgattacaaatggagcgggggccgggtttggatatggggttggcaattatgtggtgaagcctgttgcaaatacagcaggcaagtggataaccggtggctggaatcctaaattcgatccgactctactaaaatatactgaagttaaagggcagttaggtatctccaaagaaatggtgccgagcaagattccgggggctgcaggtaatatgggggcttctattacatcagaaatgacggggactgaactacaaaaagtcattaatgataaattgaagaaaggagagcgtgaatga

SEQ ID NO: 40577 - DNA, 513 bp, Escherichia coli
atgatcaagctaccatcaactatatctgaacataaagattatttggctgctgttgcttctgattttactaaagatgtagtaatttcaactggttatactgatgaggcctatgagcgttttatccttgataactttaccaaggttagaaatatttatctgctgcaatgcacctcggcttatcccacaccgaatgaagatacccagctaggtgtgataagacattattataatttggcgaaaaaggatccacgtattattcctggtttttccagccatgatattggtagcctttgttccatgatggctgtcgcagccggtgcaaaaatgattgaaaagcatgttaaatttggcaatgtggcttggtctcactttgatgaagttgccatagacttggtgaacggcgattttgcccagttcgtaaaagacgttcgtaaagcagagcgaattgttggtagtgaagtgaaggttattcattcgactgagcaccacaaatactgggtatctcccagatag

SEQ ID NO: 40578 - DNA, 807 bp, Escherichia coli
ttgtacgtctctgatcgtaatcttcctgagggcgttgaacatctatccgctgaatttataccctatactcctgagtcggcagattttctgattcaacgttttttctctgaaactatccatattgaaagtgcaattgttgttacagcacttaaaattgccaatcagattgctctatctcaaaatgagaccaagaatgtgtatctgcttggatttgattttacgataaagggggggttcactagcaagatcccctgcgcagccttgcatgccgaaccagaatatcaagagcgaattatcagtagtcaagaacagctattgcagatgctccttgcagaaaaaacacgcctgaatatcaatatcaatcatgttggtaataagccttacagcgtatattctgttgatgcatttaatcaagtgttcgctgcccgccatcgtggagtcgtgctgcccacacatgcccagatttccactacatcatcacaaaatggggtgaaggtgatcgcagagattactactaatcactttggtgatatggaccgattgaagtcaatgattgtagcggccaagcaggcaggggctgactatatcaaactgcagaagcgtgatgttgaaagtttctatagcagggagaagctggagtcaccgtacaactctccttttggcaccacctttagggactatcggcatggcattgaactcaatgaagagcaattttcctttgtcgactctttctgtaaagagattggtatcggctggtttgcttctattttagatatgccctcgtatgagttcattcggcaattttaa

SEQ ID NO: 40579 - DNA, 282 bp, Escherichia coli
atgtcctttgttactcgtagcgcactgaatatatggcacataaaaattaccaaaacggttaacttactgactacttcaatagtgcgactaatataccaaatggacacgctatacctgctcataaataacagagagatattgtacagcacggcacaaaaagcaatcaccgacaccccgttccagatatcacagcgtaaaccattaaagtatagattaaccgaaagcaaggttaaccacatgaaaatcattatggtaacatatgaggctttccaaaccacctga

SEQ ID NO: 40580 - DNA, 141 bp, Escherichia coli; identical to SEQ ID NO: 11051

SEQ ID NO: 40581 - DNA, 234 bp, Escherichia coli; identical to SEQ ID NO: 38275

SEQ ID NO: 40582 - DNA, 621 bp, Escherichia coli
atgccttttaagtttgcaagaagtttattaaaaaaagtccggcattgccctgagccagagaaagttcattactgggaactcaaccatacaaagaacaaaccatttgtcatagcaatgcaggattattcaaaaagaatgtccatggccttctcaagcgaagccttgcatagctatttgtacgggattgatattgagtcaggcatttctattgaaagacatacagatgaaaatagaagtatcaagtcgaacttttttggctcagaacaaaataattatgtttctgccgttttactcactactcaagcaaccatacctaagtttaaccggatgggaattcttgcaggtgtagaggcgagtggattcaaagtgtacgtcagtggtgttaaaactgatcaggatgcagccccacatccattttcagccgatgtaagtgaccctaactatcaagaaccatggtgtacagccatgtacatgtaccataatccaaacgctatacaccctgttgactatcaattattcccaaatgtagttcatgtatttaaaaaggacgaacactttgaagagtacattcccagaaactatattctccaatcgactactatgatatgtaaaacggaataa

SEQ ID NO: 40583 - DNA, 1509 bp, Escherichia coli
atggaacaggatgctcgtttactcagtgcaatgcaaaagatgtgtgaccaaaaaatgccacttaatactcttgagagaaaatggcaaatcgcaaatattccttatatgttacaagaaaaacgttatcaggaactagatgaaatttataaccaggtattacaggagagtttcacttctcgtcaggctgaaaagcgctattttttatcctggacccaaatgtgcaactatttttatgatatgaacacgctagttgatgccggaacagaaggtttaagactcattaaaacctggcagcaagcaagacctcattctacacatgcctggcttgccgaagcacaatactggaatcaccgtgcatggttatatcgcagttatggctgggcaaatgataccacacatgcaatgtggctttgtgctggtgcatgtaatgaacaaatggtcatcgctacacttaaagcaattgattgtgacccacgacaatggatggctgcattacttaccagcaccaactcaaaagtatttggtcagccagcctggctggcggcacaccttaacggtgatagtgtcgcaggaataccattaatgatcgcactgaaaaattatcaccgccgctccccgcaagaagtggaagcgttgatggcgtattccggactttcgtttgagcatgcaatatgccccgttttgcctcgccccaatatacttcctgagtatgatgatgatggtgggcaaaaatattggctttctgtttgcctgactatttttcctcacactttttatccttttgttgaatatataccatttcgaatgccacgctggggagggtcgcataaagaaatttccgaattgctggattcagtaacctgtaagcacttatctaccgaagaacatgactatatggatctcttactttggtgggatgattaccgagatgtcagcattgaggacattgcgcccgaggagcaacaatatgcaatcgacttagcagagaatattgctcagtacgcacaatttcaggaatgtcgccataatgccctagagtggttacttgcctgctataacaagcagaacgatcacgataagttgtggtgctgtatacagcgagcggtgatggaagacatgaagctcaataattattacactgcgtacgcgataaaatttgcattaagttattatccagattcattctggatatataattttatctgccaaaattcacagaatacaacttatgctacacctgttatttatagggggtttttccagcgagagggtattttgggttttgaaaaagatgaagggcagggcgatgcttggctggaaaaagctagtgacattaaatacaatcataattggcggtcggcaataaaagatttgagttggtttgacctttctgattatttcattccgcttgcgacaattggtaagcaaagaaatattcctgccgcattaaatttagttgctcttgaatatttggataaggaagacaaggtgatgctgccaacttactga

SEQ ID NO: 40584 - DNA, 2373 bp, Escherichia coli; identical to SEQ ID NO: 10298

SEQ ID NO: 40585 - DNA, 375 bp, Escherichia coli
atgtacgaacaggacacgctcagcgcactggatgccatcaccgaagcacagcggattgcctttgctcctatgcttttccaggcagctttgtgcctgcgcaatgcaggaatattagattatttggatcaacagggtaaacagggagctccccttaatgcgattactgagcacacagtcctgaatgaatatgccgtgggtgtgttactggatatgggcttaagcgggcgaattattacctgtaaagagggaatttattacctggcgaaaatcggtcattacctcctgcatgacactatgactcgcgtgaatatggatttcacccaggatgtctgttaccaggggctcttcttccttgccgattcactcaatgggtaa

SEQ ID NO: 40586 - DNA, 2226 bp, Escherichia coli
ttggcagcaaaatccgagcaactgataagactgaacgcaacatggcaaacgttaagccagattcgggctgcgcgtgagcttattgctaatgatattgagcaatatctcgataatttaaataaattactttccggacaagaacaaaaagtcactctactgaagagtgctaaaacggaatggaaaaaatatcgcgccggtgaatcactgatctattcattattttcctggctcccggcggttcgcagtaagcgacagtaccaaatacagctgtttctcgaagataaattaggcgcgctgattgcaggaaatcagtggtctgatcctgaaactatcgaacgtaatattgatgggctgctcaattccgctgagcgcgagcaaacaacataccggcagcagattgactccgcccatgaaatcattcttaaagaacagcaggcggttcaggagtggcagagactggctcttgatttagggtatgagggcgacgaggaactgagcttctcacaggccgatgaactggctgatacgcagattcgcttccctgcatttttactgacgactcactactgggaaggtcgttggctgatggatatggccagcattgatgatctgcaggaagagaagaagaaaaaaggcgctaaaggggtaaccgcccgttggcaacgtcgaatgaaactcactccatgtgtggtgatgacatgctatatgctgcccggcaatatgcagataagtgagcacaaaggacaacgtaaattcgagaaaagttatttgtatgattttgccgatttactcattgtcgatgaagccgggcaggtgcttcctgaagtggctgctgcctcgtttgcattagctaagaaggcattagtgattggcgatacggagcagctcccgccaatatggagtattgctcctgcgattgatgtcggtaacatgctggcggaaaaaattctgtctggcagtacgcaagaagagattaccgcgaaatatacggcaatcgcagaccttggtaaaagtgccgcatctggcagcgttatgaaaatagcgcagtttgcttcacgctatcaatatgatcccgaactggctcgtggtatgtacctatatgaacaccgccggtgcttcgataatattattggatactgtaatacgctctgctatcacggtaagttgttgcctaaaagagggcgtgaagagagcaatttaatgcccgcaatgggttatctccatattgatggtaaaggtgagctggcaagtagtggaagtcgatataatttgcttgaggctgaaacgatagcggtctggttggcagagaaccagcaaaatattgaagcgcattacggtaaatcgcttcatgaagttgtcggtatcgtgacgccttttagcgctcaggtatccactatcaaacaggcgctgggtaaacaaggtatcagtacgggcgcgaatgaaaagtcgctcacagtgggcaccgtgcactctcttcagggagcggaaagagcgattgttatattctcgccagtctattcaaaacatgaagacggcgggtttattgatagcgataacagcatgctgaatgttgcagtctcccgtgcgaaggatagcttcctggtcttcggcgatatggatctgtttgaggtccagccagcctcatctccacggggattactggcaaaatacctctttgagtcagagaagaatgcgctctcttttgattataaagagcgtaaggatttaaaaaccgccgggaccaaaatctacacacttcatggtgtggagcagcatgataacttcctgaatcagacgttcgaaaataccgataaacacatcacgatagtttctccatggctgacctggcaaaggctggagcaaaccggttttcttgattccatgattgcggcgtgttcacgtggaattaacgtcacgatagtcactgacagaagctacaacactgaacataatgattttgagaagcgaaaagagaagcagcagaactttaaagcggcgctggagaaactgaatgcgctgggtattgctacaaagctagtaaaacgtgttcatagcaaaattgttattggtgatgatggtttgctgtgcgtgggatcgttcaactggtttagtgcgacacgggaagcgcgatatgaacgatacgatacatcaatggtttattgcggtgataacctgaagggtgagattgaggctatttataatagtcttgagaggcgtcaggtttag

SEQ ID NO: 40587 - DNA, 516 bp, Escherichia coli
gtggagggcgaaatcattatccgggcgttgactgacgggaaagttgactccctgagtgtcactgtcgggcaaatggtcaatcccggagacaaccttctgcaggttattcctgagaacattgaaaattattatcttattctctgggtcccgaatgatgctgttccttatatttcggctggtgacaaagtgaatattcgttatgaagcctttccggcagaaaaatttgggcagttttctgctacggttaaaactatatccaggactcctgcatcaacacaggaaatgttgacctataagggagcaccacagaatacgccgggcgcctctgttccctggtataaagtcattgcgatgcctgaaaagcagattatcagatatgacgaaaaaaacctccctctggaaaatggaatgaaagccgaaagtacactatttctggaaaaaaggcgtatttaccagtggatgctttctcctttctatgacatgaaacacagtgcaacaggaccgctcaatgactaa

SEQ ID NO: 40588 - DNA, 261 bp, Escherichia coli
  misc_feature (208)..(217): n is a, c, g, or t
atgaaaaacaacatggagaattacagaaactatcagacaaaagggctgattaataaagatcagttaactaaccaggtggcattatattatcagcaacaaaacaatcttcttagcctgagcggacagaacgaacagaatgccctgcagataaccactctggagagtcagattcagactcaggcagcagattttgataaccgtatctacnnnnnnnnnnggttaacactgatgtggagggcgaaatcattatccgggcgttga

SEQ ID NO: 40589 - DNA, 144 bp, Escherichia coli; identical to SEQ ID NO: 9158

SEQ ID NO: 40590 - DNA, 261 bp, Escherichia coli
atggatttacatggtctcatggtatttactggtctgagtattttgcatggctggttgttcctaaacgtgtttcctataatggatatgatatatatcttgaacttcagtccagaggaagtttttcacttgatgcagaagataatgataattactatcttaccaagggatttgcatgggatgaagcaaacacatctggacggacatgtttcaatatcggagaaaaaagaagtctggcatggtcatttggtggtgttaccctga

SEQ ID NO: 40591 - DNA, 276 bp, Escherichia coli; identical to SEQ ID NO: 8395

SEQ ID NO: 40592 - DNA, 168 bp, Escherichia coli
atgcgtgatacaactgaacggcctgccgcggttaaagcaggaacagtgcgtttagtaggcacttgtgataaggcaatcgtgagtgaaactattcgtctattagatgatgatgtcgcatatcagtcaatggtagatgctgttttaggttttagatatcaactggaataa

SEQ ID NO: 40593 - DNA, 294 bp, Escherichia coli
atgaataaagtatataaagtcatttggaaccatacaacccaaaaatgggatgttgtttcagaattgacgagttgtagaaaaaaatgtaaatcaactcgcttaggaattgctttatcagcaatggttctggggggcgctattgcaattaattgcaataacgcaatggcagatgtcatattgtcaccagactggcgtccgggtacgaataactcgggtgttggggctgcaacagtaagtggtaaaaccgaatacatcactgtaatggtttttgttttttctccggtattgacgtaa

SEQ ID NO: 40594 - DNA, 141 bp, Escherichia coli
atggatgaggctacaagttctcttgatacagaaagtgaacgtttcgttaatgctgccataaaaaaaatgaatatcacccgggtgattattgcacacagagaaactacgttgagaactgttgacaggattatttctatttaa

SEQ ID NO: 40595 - DNA, 435 bp, Escherichia coli
atgtggcatacattacttaactggccttggggaactgtgtggtcagctgtatcggctttaggttcaattgtaactgttacattaggtttttgggcaatgaatgtttggcggcgacaggaggctctgaaggccaaaatggctctgaaaatggcagtggctgattattcaaatgcattatcacaactacctttatctcttagtcgtaatgttcgtattgaaaaaagggccgagctacgagagttaaatcataaattaaatgctgttaataatgcttttttgatatgcgaacatatgttggaaaaatacccacgtgtaaacagcggttgtcgttctttatctgttgcccacaaagaatatattagaatgagagataatagtattcaggcgaaatatatttgtcataatattctttcagaacagtttgtattcaaatga

SEQ ID NO: 40596 - DNA, 1218 bp, Escherichia coli; identical to SEQ ID NO: 34527

SEQ ID NO: 40597 - DNA, 366 bp, Escherichia coli
  misc_feature (354)..(363): n is a, c, g, or t
gtggcttattacagcattggtgatgttgctgaacgttgcgggattaatcctgtcactctccgggcctggcaacgccgctacggtttgttaaaaccacagcgcagtgaaggcggacaccgactctttgatgaagaagacatacaacgcatcgaagagatcaagcgttggataagtaatggcgttcctgtaggcaaagttaaagcattactggaaactaccagccaggatacgcaagatgactggagccgcctgcaagaagagatgatgtcaattcttcgtatggctaatccagccaaactacgcgcgcgaattatttcactgggtcgagagtacccagtagatcaattgattaannnnnnnnnntga

SEQ ID NO: 40598 - DNA, 321 bp, Escherichia coli
atgagcagtatgtttgacggcgcattaattgaatacgcagcggccttacttttcgaaatgcgccgtaagcccggtaaagaggccattctgatggcgtggaatgttgaagagagagcacgattgtggctggaagcatggcgtttatcattgtcaggatggcacatttctgttcttgctgatcccattgaatcgccgcgcccggaactgttcccaacgcaaacattgattgtctggacaggcatggcaccaacgagaaggcaaaacgaacttttacaacactggggtgagcaaggttataaagtcatctttcatgccccctaa

SEQ ID NO: 40599 - DNA, 276 bp, Escherichia coli; identical to SEQ ID NO: 8395

SEQ ID NO: 40600 - DNA, 747 bp, Escherichia coli; identical to SEQ ID NO: 22330

SEQ ID NO: 40601 - DNA, 2022 bp, Escherichia coli
gtggcattttcaatctatgatagtcatttcgaaaaactttttcgtctattatcacgtaaggccaataaaatagaatggaaagagcaaaactatccgtttttacctttcaatggtctttctaatatagaatcatcgaccgaatggttattacctgctgataatagtcgtaataagcatttgcatatagagtcagatggaagtttgtctgtagaaatggatttgataaatggagactctttttatttacaaactggcagtatgaatattaatgggttgccattggacaaaaactcctggcgtatcaatggtggattcaagtatcgattagtattaaatgcatcatatggagagaatcgacctgaatgtgcaatttttattatccagtatgatgaaaataaaagaattactcacaaatatcaacttatttataacggtattaatcatattgaattcgatacaatgcctgatgcgcgttactttagtatggcattacgttttaaagggcaaggttcacttcgtattgaacctattaaactctacattgaagaaactttacccgtgaatgcaataaggcttgataattgccaaagccatgaggaaattatacgacactttgaagtgaaagcaaaaacgctgacaaaagctttcgagacgcgaattctctcattaccagaatcaccacaaatacaaaagcaaaaaattgacgagcttaaagacaagcttgttacagctctctacgagaagcagaaactagaaaggtctttatactatcgtttaggcaaaactatggtagagactaaacgtagcagcctgaaaggttttctttccttgcctcaaaagctaataaagattcgtgcggctaagcgtaaaggcaaatttgatcacccccctcttaactgtagtgtcaagaagcaattgcttgaaagtgttggtgtttataatgaggtaaaacatgataatgagattagttggcctgtctttgaatcacatgcacatttgcgaaatcagcatatcaatgttgtaacgatctgtgataagtttacttatgaatgctttcgctatgaggcaaactttattccgttaaccaagcaaaattggaaatcagagattgacgaatcacacccagtaatgttatttcttgaatcagcttggaatggtaataatggtgagtggacatataccatggtgagttataaaaaacatttgggtgatccacttcgcaaagttatcaaatactgtcaatccaagaatattcctgtagtattttggaataaggaggatccaaccaactacgaagtctttattgatgttgcagctgattgtgactatatattcacaactgatgggaatatcttagaaaaatacaagtctcgtgttggacataatagagtatacgcacttccttttgcggcacaaccagctatccacaacccaattcgtgataagaataaaaaacttccagtttacgaagtatgttttgccggtagttggtataataatggacatgatactcgtcgagcacaaacagaaattgtccttgatggaacagcacatcgtgaattgcatatatacgaccgaatgctgcatgcaaccaaacatagagaatcacgaatctttcctgaaaaatatcaaccatttatagttggttcacttgactatgaacagatgctcactgcttatagacaatacaagctattcctgaatatcaacactgttcaggactcaccaactatgttctcccgtcgggttttcgaaattttggcttgcggtacaccagttgtatcaactcattctgatggtatgaaagctatgcttggaaaccatgtacatattgtaaataataaagatgaggcaaaaaatatcgttcagcagttgcttaaatctgatctaaggcgtgaaattcttgggcatcaagctgcgcggcattgtcttctgtatcactcttatgaaaaacgatttaaacaaatccttaatactgtaggaattaatacttctccacttaaagatgataaaatctggtaa

SEQ ID NO: 40602 - DNA, 519 bp, Escherichia coli
atgatgtacagacatatgcctctgatacgtcttgttgtcagagagttatcactgaataaatcacctgagccagaaatatctgtgcctgtagcatcgctccgtcgtccggaacgccttaaacagcaaacccgcaaaaaacggcatcagcattggacagaggttatggccctgcataacaagggatgtagtttcagggaaatatcccgtattacaggcctgtcgcgtgtgacagtcagtcgcagggtgcgttcaggaacattccctgaaatgtcaacccggcctccaaagcgagggcttctggacccatggagggagtggttaaaagagcaacgagaaagtggtaattataacgccagcaggatatggcgggaaatggtggcccaggggggtacaggcagtgaaaccatcgtcagggatgctgttgccaaatcgcgtaaaggctggatcccaccggttactactgccgtcaagacttccttcagtgtcccgggtaagccactggttaataatcaggggtga

SEQ ID NO: 40603 - DNA, 249 bp, Escherichia coli; identical to SEQ ID NO: 14162

SEQ ID NO: 40604 - DNA, 477 bp, Escherichia coli; identical to SEQ ID NO: 7981

SEQ ID NO: 40605 - DNA, 207 bp, Escherichia coli; identical to SEQ ID NO: 7982

SEQ ID NO: 40606 - DNA, 411 bp, Escherichia coli
ttgcatccggacgtagcaccactgctgttggttcgtgaatgcatgccagaccagttcgcatcgctgggaactgcagcatgcgttatcgacaaagccggaaacggcatggctctcagcagttggtcggcgtcagatgcaactggtgccgtgacggtgggagttgtggcgaagggcacacatcagaattcaatggcacagggggagttttcctgtacaacccgtgaaaatgaagtttacatcagatatgactcaggtgtcacaaaccctgtcagtccgcggggaccggataaaatccggggtcccggtggtatcagtgatggtgcatgggatacggaagcagccactatcaggcaactgaacccgctgacggatgaggtgtacagtggcatcagtggacggattacagcataa

SEQ ID NO: 40607 - DNA, 1080 bp, Escherichia coli; identical to SEQ ID NO: 7984

SEQ ID NO: 40608 - DNA, 1467 bp, Escherichia coli
atgtcagtgggaaagtatcgttatgcgaataaaacatataatgatttaatagcacaaggcacctatcaatacggcctgacgaatgatattactttaaacagtggtcttaccacagcttcaggatatacagcggggttagctggcctggcctttaatacccctctgggtgctatagcatctgacattacattgtccagaacagcattcaggtattccggtgtaacgcgtaaaggttatagtctgcactcaagttatagcatcaatattccagcctcaaacacaaatataactctggcggcttatcgttattcatcaaaagatttttatcatctgaaggatgcgctatcagctaatcacaacgcgtttattgatgatgtttctgtaaaaagtacagcgttttatcgtcccaggaatcaattccagatttcaatcaaccaggaattaggtgaaaaatggggtgggatgtatttaacaggaacaacctataattactggggacataaaggaagtcgtaatgaataccagatggggtacagcaacttctggaaacaactcggctatcaaattggattgtctcagtcaagagataatgagcaacaacgccgtgatgacagattttatattaattttactctccctctgggaggaagtgttcaaagcccggtgttttccactgttttaaattatagcaaagaagagaaaaatagtattcagacatcaattagtggtactggcggggaggataatcagttctcttatggtatttcaggaaacagccaggaaaacgggccttccggttatgcaatgaatgggggttatcgttcaccttatgtaaatataaccacaacagtcgggcatgatactcagaataataatcaaaggtcatttggtgcgtcgggagcggtggtcgcacacccctatggagtgacattgagtaatgacctgagtgatacttttgccattatccatgctgaaggagctcagggggctgtcatcaataatgcctctggtagtcgtctggatttttggggaaatggtgttgttccttatgttacaccctatgagaaaaatcaaattagcatcgatccctccaatttagatttgaatgttgaattatcggcgacggagcaggaaatcattcctcgtgctaatagcgccacgttagtgaaatttgacactaaaacaggaagaagtctgttatttgatattcgtatgtctactggcaatccccctccaatggcttctgaagttctggatgaacatggacagttggccggatatgtcgctcaggccgggaaggtatttaccaggggactccctgaaaaaggtcatctcagcgttgtatggggaccagataataaagacagatgttcatttgtatatcatgttgcacacaataaagatgatatgcaatctcagctcgttcctgttctgtgtatacagcaccctaatcaggaaaaaacatga

SEQ ID NO: 40609 - DNA, 282 bp, Escherichia coli; identical to SEQ ID NO: 979

SEQ ID NO: 40610 - DNA, 1182 bp, Escherichia coli; identical to SEQ ID NO: 8788

SEQ ID NO: 40611 - DNA, 294 bp, Escherichia coli
atgttgcttagggataggtatatttttgtcacgcaaaatgtaattggaacagaattaacatctatgacgtcgctggcaaacaagcttaataaatttgatgtcggctgggaagggaatgcagtgagcgaatctagtttatatgccctcagtaatactggttcatggggagcaatgatgtgtgttgatgatgctgggaatgtgataatatatgatccatatcaagggagtcgatatctgatgactgaacaggaatttaaggaggtatggaatgggcatagtgtttacaaaccataa

SEQ ID NO: 40612 - DNA, 195 bp, Escherichia coli
atgaaaacagcgcagcgtactttatttgccgcaacattgctgactattttttcgacctcagttatggcgcaggatgtcacgattatttataccaatgatcttcacgcccatgtggattcctataaagtaccgtatgtcgcagacggaaaacgcgacattggtggctttatttttggctttctcttgttttactaa

SEQ ID NO: 40613 - DNA, 549 bp, Escherichia coli
atgcaaattggctatgtaagggtgtcaacaaatgaccaaaatacggatcttcagcggcaagcgctcgaacgcgcaggatgtgaacaaattttcgaagaaaaaatgagcggaacggtagcaaaccggccagcactaaaaaagcttctcaaggcattaaatgagggggatacgctggtggtctggaagctggatcggcttgggcgcagcatgcgtaatctggtgctgctggtggacgaacttcggcagcgcggtatccactttaagagcctcaccgacagtatcgatacatcaagcccgatggggcgcttcatcttccatatcatgtcagccctggcggaaatggagagggagttgattgtggaacgcacccgggcaggtctggctgcagctcgtgagaaagggagaatcggcggcaggcgtccgaagctcacccaggagcaatgggctcaggcagcgcggttgatagcgaacggcgtagacaggaagcaggttgcaataatttatgacgttgcagtatgcacgctatataaaaaatttcctgtgggataa

SEQ ID NO: 40614 - DNA, 744 bp, Escherichia coli
atgcaggtgggagcgtttggcctggggagtagttcagcgcaggtaattggtgatgtatgggataaatcattaggtagcagatttataatgatgtctccagcaacttcaggtgggccaaaattctattctatgggaattagaatatcggagcgcaattatggaaatggcccaaatgatgtttcgcagcaatcattttctgccttctcgatgggaggaaaaagattcacatggatgacaatggctgatggtgtcgattctgggtggctagaggtttatcatagcggcaataccacaaaatccagtgatggaacactgaaagctgcctcgcctgtgattaaacttttttcagatggcagatacctgaccaatgatgaatcagagggctgtactgtaacccgtctggccataggtgaatatctggttaaaggctgtgaagggctaaactcagatgccgcatggggcggcattgatggtggttttgatatccccacagaccgcaacaaacaacccctgatctggctggattatgaagttaatgctgacggttcagtattagtaaaaacctatcaccgcacgcatccagacgcgccagcgttcggcagaaatgaattaatgggtgttaatgatggcgatccggtcgatattccgcgtgaccagtttgtcagtattcgagtggaaatgcccgcggacagcatctggaatcaacgacaaaaagatacaacgagagcccctgtaaaagagtaa

SEQ ID NO: 40615 - DNA, 1557 bp, Escherichia coli
atgctttataacactggaaccattgctattaacggaaataccgccaccgggacgggcacaaactggacggcaccggccagccaggttcgcgttggccagacaattatcgtgatgtctaacccggtgcaactgttccagatttcatccgtgaacagctccacgtcaatgacggttacgcctgccgcttccccggcgctgagcggccagaaatacgccattctggtgtcagacattatctccgtcgacggactggcccaggcaatgtcgcaactcatcaaagagtatgacgagaacattggcgcgtgggagacgttcgccactacctcagcaaaccagaccatcaccgttaccatcaacgggaccaccgtaaccatccctggcatcggtaaactggcacagaaagggagcaacggtgcggttactgtcacaaacggcggaaccggcgcaacgaatgccgcagacgctcgcacaaacctcggtttgggaaacagcgccacaaggaacgttggaacggctgccggaaccgtggcggcaggggatgattcgcggttgaatactgtcgataaaaaaacagggggaaatgtttccggcagtttgatggtaactcagggcaatagtattggggtatccacgcaggaaggtggtgataaggctgttaagctatacaacattacaggggatgggactgtcggaagttatgtaaacgctgtgggaggggcctggtataacggaaactggtctcttggtggcgttcggggaagcgggactaatttagacagagcgcagttaaatgttaatagcggaactggtacggcgggttcatttttattttaccccgatgagagattcaaatcatcttcgtgtggagctgatggagctggttatggcggctcatggtcagacattaacacatggcaaagaaatatctctttttttagaggtaacgtatccgttaacaatgatgctgggtttattccttttgcccgttggcatagtcaatgcagtggtggatattcttcaacagtagggcttggttctatagctaccgggcctagttcatgggcggatgtagcaataacaacactcggggatggtggttctgccggacagcgtatatttcaattcacgacagcaaacggcgatatatacgccaacgctggtggaaatctttccggtaactatattttccagaagcagcctaactgtgacattacgctgaagcacgatattaaatatgatgatggttatcagtcatacgagaatatgaagaaattcctgccagcaacttacgtctacaacgatgaccctcgtgagagagttcgccgaggtgtaatcgctcaggacgtcatgaagattgatagtgagtacgtcaagctggtccctgctgcgccaaagtttgatagcgaaggaaacagggttgatgctgatgatacgttggcgcttgatacgaacgtcattatgcttgataccgtgctggccctgaactacgtgattaagaagctggaggctacacagaacgagctggaggagctaaagcttaaaatagcggcatcatga

SEQ ID NO: 40616 - DNA, 363 bp, Escherichia coli
atgaaacgattatttgccgtggcacttttgctgatggctggctgtgccgataaagacagagactatgtcttcaaaatggattacccggtggatgcggcgcgcatatctcttgggggagatattcatgtgaatattgactgcgctacgagggaagttaatgtaatttcagacagtagtaatggcattttcagccgacatataaataagcggatcagcaatatctgttataagaaaacagataagcttgatgtcgtataccgcttcgaacctgcaaaaggtgtgaagcaagacctgatcgctactcaatacccacgcgtcccgccagcatcaaattccgacaaactgagcgattggaattcgtaa

SEQ ID NO: 40617 - DNA, 642 bp, Escherichia coli
atgagcggattcgaagtttataacagtgccggcaagttgctcgtcgattcgcaaaacaggtccacccttttttatgatcagcgttctctgggggctgtgactgaaaaagggttttaccgggtagacagcccgtttggtgacggaagcacgctgggatttacccagcaacaattctggaatgacgggaatttgcgctggcttcaactggatgcaaataagtatggtttacccggcgccgatcttcttgaagataatgcagggaggatgatacggacgacgcgaaatattggaatgcagagcggttaccttgatgtattcgacgccggtggaaaccttatctggagtgcagcatcagcatcgaaaatgcccagggtagttggtttttttgatgtgccagccagttatgatctgcagaacaatacctttgcgataaacctcggctttaacccatggattttggttaacaactgtccgggaaacctgagtgatgatggtggggcgactggttactcaggggtcgctttaaaatggactggctcacagctgcagggcaggtatatatccaaaaatcagcgcaactggagccagatacttcaggggagagggttacgaattccaatcgctcagtttgtcggaatttga

SEQ ID NO: 40618 - DNA, 297 bp, Escherichia coli
atgccacaggggttgcaatgctgggacggagcagggcgtattgccgttgatttaagtgattatgctatccgctatattggaagcacaacagtaacatttgctgccggggaaacagcgaaagacgtttcattttacggtatcacccaggatggttcatttatatccattgttacaactggcgtaactgcaaatgaatattactgccgcgcttttaatggcggattcactgcattctatttaccgaccactggtagtcctgcattcactttcacagttgaggtttataactttcaatga

SEQ ID NO: 40619 - DNA, 3477 bp, Escherichia coli
atgggtgaaaaaatgcagcttcttaaacaagaaaccatcctgaagggtgcaaaagggggcgggggtagcgcgcatactccggttgagcagcctgacgatctgctgtcggtcgcaaagttaaaaatgctcattgccgtttctgagggggaaatacagggcgacctgaccgctcagaacatttttctcaacgatacgccgctggcaaacgacagcggggaatacaacttcagcggcgtgaaatgggagttccgcaagggcacacaggaccagacctatatttccggaatgccccaggtcgacaacgaactggcggtgggcacaacagtcaccaccaccgcgccctggacacgccagtttaccaatctttccctggatgccatccgcatcaagctcagccttccggtacagtatctctataaagataacggcgatatggtgggcacggtcaccgagtatgcgattgatttatcaacggacggtggcgcctggaaaacggttgtaaacggcaagtttgacggaaagaccacgacggaatatcagcgtgaccatcgtatcgatctgccaaaatccacgtccggctggtctgtcagggtcagacgtattacggctgatgccagcggatcaaattcgaaactggttaacgccttcaaggtgttttcctatgcggaagtcatcgacagcaagcttcgttatcctctgaccgcgctactgtatgtcgaagtggacagcagccagttcaacggcagcgcgccgaaggtgacctgtaagataaagggcaagctgataaaggttccggataactatgatccgacaacccgaacctattctggctcatggtccggcgggtttaaaatggcctggtccaataaccccgcctggatattttacgatctggttctggatgaaatttacggcatgggcacgcgcgtggatgcatccatggtggataagtggtcgctgtactcaatcgcccaatattgcgacgaaatggtttccgacggtgccggtggcaccgaaccgcgtttcacctgcaacgttttcattcagagccaggaggacgcctggcaggtacttaacgatctcgccgcggtatttcgtggaataacgttctggggcaacgatcagatttatgtccaggcagacgtcccgcaggacgatgtggactgggtttataacgcctcaaacgttatcgatgggctgtttacttatgcgggcggctcatacaagaatcgctacagctcctgcctcgtgtcctggtccgatccgcagaaccattacagcgataccgttgagggggtctacgattcagagcttgtagagcgttacgacgtcaggcaaacgtccctgaccgcaatcggctgcacctcgcaaagtgaagcgcaccggcgcggtcgctgggtattactctccaatgccaaagacgggaccgtatcgtttggggtggggctggacggctatattcctctgcccgctgaaattatcggtgtcgccgatcctttccgttccggaaaggagaacgggggccgcatagtggcagtcaatggccgccagattacgctggatcgagaaatagattacgcagcgaaagaccggctggtggttaacctgcccgacggaaaagcccagacgcggacaatcagcgcggtgagcgccgataaaataacggtgacggtggctacggccttcagtcaggcacctgccgctggtgctgtatgggcgatagacagtgataacctcgcgatacagtacttccgggtcacgtcaatcgctgccaacgatgacagcacaggcggtttcacaattacggccgttcagcacgatccaaacaaataccgttacatcgatgaaggcgttcggatcgagtcgcccccgatcaccgtcacgccgataagcgtcctgtctgcgccgaagaatatcgtggtgactgagagcgatcatgtgtctcaggggctgacggtagcaagccttgacgtgtcatgggacaaggttgagggcgcaatccgatacgttgcccagtggcgcaaggataacggagactggatcaacgttccggttaccagcgcgcaggggttctcggttcagggcatttattcaggtagctatgatgtgcgcgtccgggcgctgaatgcgcaggatacgtcgtcaccatggggatacgccgaaacaacgtacctttccggaaaaacgggaaaaccgggtaccccgctcaacttcctggcgaccgaagatgtggtctggcatatcgatctgacctggaaatttccggatggctcaggcgacacggcctatacagagattcagcgcgccacaacctctgactacgccaatcctgaactgctggtcctggtgccgtacccggctgcagattatcagcatggccccatgcctgctggcgttcgccagtggtaccgcgcgcgcctgattgaccgtatcggaaatgccggtgactggaccgactgggtcatgggcacgtcctcgatagatgtcagcgaaataaccaatgacattctggaggacatgaaagattccgacacgttcaaagacctgatcgagaatgcggtggacagcaacgaaaaagttgcaggcatggcggatgacatcaaaaagcatgccgacgagctggagaagcaggcgaaacacatccaggagaacgctgacgggctggcgcaggccgaagtgaagatcgacgagatttctgtgtcgatggacggcatgacgggcggggtaaagaactcggcaattgcgattattcagaatgggctggcgcaggtggtaagccgtcgctcgcagaccgccacgaacgccgggaacagcgccagtatagaaagagtggatactacgattgccgatgccagccaggcggtcgcgcgcgcgctggtcacgctggatgcagaagctggtggcaatatctctaactcaacggacctgacagaaactcttgctgatttcacacaggcatcggcgacaaaaattaacaccctgactgttaaatctggcgaaaacagcgccgcgataaacgtcaacgcacaggctatcgcagatgtaaacggtaacctcagtgccatgtacaacatcaaggtgggcgtaaccagtaacgggcagtattacgctgccgggatgggtattggggttcagaatacaccctccggcatgcagtcacaggtaatcttcctggccgaccgctttgctattaccactgctgccggaaacagcgtggcgttaccatttgtgatccagaatggtcagacgttcatcagggccagcttcattcaggacggtaccattgagaacgccaaaatcggtaactatatccagtcgaataactatgtggctggctctgtaggctggaagcttgataaagggggaacgtttgaaattaacggtgtgggcggcggcggcaggatgttgatatccagcacgctcattcaaatctacgacagcaacaacgtgctgcgtgtcagaatggggttatggtaa

SEQ ID NO: 40620 - DNA, 618 bp, Escherichia coli
atggttaagacgcttattctcgaagggaaaatggctaaaaaattcggtaaacgcgttcagtttgatgttgccgacctgcgcgaaatgctcagggccatgtgttcacaggttcccggattcaaaaaatacatgtcagaagctcatatgaaggggatccgtttcgccttttttaacggtgacaacaatatcgggctggaagagtttgatatgacccgcggtggaagcgtgtaccggatcgtgcccgtttatgagggggccaaaagttcgggcgtcctgcagatagttgtcggtgccgttgcgctggtcgctgcattctttaccgccggtgcgagtatggcagcctggggggcggcgatgagtgcaacagccatcagcgccacgtcaattttgaccggggtcggggtgtcaatgatgctgggtggcgttgttcagatgctcacgccccagccatccttcggcgcgggtaaatcctccagcacggacaatacgcctaactacgccttcggggcgccggttaatacggtcgctatggggcatcctgtccccctggcctacggtctgatcgaggcagggggagcgatagtcagcgccggtatgtactcgagcgatcagcaatag

SEQ ID NO: 40621 - DNA, 720 bp, Escherichia coli
atgcctgaaaaattgctggatgctatccgtcagcacgtcgctgctgaataccccaaagaagcctgcggcctgattgttcagtcaggccagcaacaaatctatattccctgccgcaacattgccgataaacccgaggagacattcacgctctcgccggaagatcagctcgctgcacgcgcgcgcggtgagatcatcatgctcattcattcccatccggatgtggttcggctggtgccctctgagctggaccggatccagtgcgactggtcgggtattgagtgggggatcatgtcctggccggacggggacttttgtacgatctccccgcgtgaagaccgggattatgccgggcggctgtgggtgctgggttacgcggactgctggtcgttaatccgtgaatattatctgcgcgaatacggcattgttctcggggactattcggtaccttacgaatggtgggagagcggcaaggagcggctctacgacgacaactgggagcgcgagggattcgttgagatcgccgccggtgcaatgcagcccggtgacatcatcatgatgagtgtgcaggcatcggtgactaatcacgccgcggtatatgtgggtgacaacatcattctccatcatctgttcggacatctttcttcgcgaacgccttatggaaaatattatcgcgacagaacggtccgggtggtcaggcataaggaccgaatgcatggttaa

SEQ ID NO: 40622 - DNA, 738 bp, Escherichia coli
atgagttttacggcagacattcaacagcttgagcccggcagcgttattcagctgattgagatcgacggcactgaattcggtatggatcaggtgctgcgttttcatgcgcacaatattcaggaagaggggtgggcagccttcgccgcagaaaatctgcccgccattatctggcagggaaaccagtacgatccccatccctacgaactgaaggggatggagttgtcgagtacaggttcccagccaacgcccacgctgtcggtcggaaacgttggaaattatgtcaccgcgctgtgtcttgaatatgacgatatggtcagggctaaggtcaaaatccataccacgctttcgaagtatctcgatgccgccaactggaaaaacggtaatccgggtgccagcccggccgatgagagcgtccagctcttttacgtcaatgctaaaaccgcagagacgcgggtacaggttgatttcgagctgtgttctcctttcgatattcagggcctgcagctgccgacacggcagattactcctgtctgcacctggtgtatgcgaggctggtaccgaagcgggaccggatgcgattacaacggcacgaaatactttaccaaagacggtacaccgaccgatgacccgtcgaaagatgtttgtggcggccgccggcaggattgtcaggatcgtcacggcccggacgcggcgctgccgttcggcggttttccggctgcaaacctgcaggggaaataa

SEQ ID NO: 40623 - DNA, 339 bp, Escherichia coli
gtgacggacacgtttacctggcgcacgcgaaaaacagcgcagggcactgaaacagcccgaacgctgcaggcccagttcggggatggctacaaacagatagcggggatggggatcaacgacaaacaggaaacgtggaacctggactggacgggcaccagacaggaggcggctgcgctgcgcgctttcctgatgtctcacgttactaaatcgttctggtggaccacgccatggggtgaaaaaaagctgttcagaatgaaggccgattcgttcagcgtttctttccctaccgggaaaaaagccactgtggccttcacttttgaacaggcgttcgcgccctga

SEQ ID NO: 40624 - DNA, 273 bp, Escherichia coli
atgctggctggaatgacttccagtgagctgggcgactggcaccagttctatcgggagcattattttcaggacgcgcagctcgatgcgcatttctcagagctgctttattccatctccactcttttcttccgcgacccggaacttacccccgcacatttcagcctgctttctccttcggatgtcgtcatcagcgatgacgagccggatgatgatgcgctgatggccgcagctgaggggataacaggaggtatccgatatggcccagcagattag

SEQ ID NO: 40625 - DNA, 432 bp, Escherichia coli
atgtttctgaaaaaagagaagttcacctggcaaacagaatccctgaccatcttcgagctgtcggcgctgcagcgtattgagtacatcacgtttatggccgcagaggaaaaggctgtcagcgctgacagcgacggcatcagcgatcaggaaatgacggccaggctgattggctcaaatattcgctgcggtgcgcgtttgattgcgatgtctttgtggcataacgatccggctggcacggaagtggaaacgctttatcagcaggtgcttagcggctggccgccggaggcgatcggtaaagcagaaatggaaataaagctgctctccggcatgctcgttccggttgaggatgacaacgttgccgatccggatgcctcagcggaggccgaaagcgctgaacccgttacggcggaaaagcccttgccagcgagctga

SEQ ID NO: 40626 - DNA, 744 bp, Escherichia coli
atgcctactccaaacccgctggcccccgtgaaaggtgccggtaccaccctctggctttacaccggaacgggcaacgctttcgctaacccactctcggatatcgactggaaccgcctggcgaaaattaaagagctgacgccgggcgaaatgaccgccgaatcgtatgacgacacttacctcgacgacgaggatgccgactggaacgcgacagcccagggggcaaaatctgctggcgatacctcgttcaccctcgcctggaagccgggcgaagaagggcaaaaagaccttgtcgcatggtttattgatggctcagtacgctattacaaaatcaaatacccgaacggtaccgtcgatgttttccgcggctggtgcagcagcctgggtaaagccattccggcaaaagaggtcattacccgtacagcgaaaatcaccaatactggcaagccggaactggcagaagaaagcgggaccccgaatatccccgtgaccggcgttacgctcgataaagccacggcaagcgtgggcgtcggcgcaaccacaacgctcaatgtgatggttaaccctgccagcgcctcagatacctcgttccgcgtggcaacctccgacggggcaaaagcaacggtcaccgttagcggcaacgcgatcaccgtcaccggcgtggcggcaggcaccgctgacgttattgttatgaccagcgacggtaatttcgttgcggtctgcaaagtcaccgtaactgcagcgtaa

SEQ ID NO: 40627 - DNA, 402 bp, Escherichia coli
atgaacagacacagcgcaattcgtgcagccattctggcaaaactgaaagccgagatcaccgacacggtcacctggtttgacgggcgccctgtttttttagaagagcaggatctccctgccgtggctgtatacctttctgacgcggagtacaccggcgattcgcttgacgaagattcgtggcaggcggttgttcacatcgaggtatttcttaaagcctccagccccgacagcgcgcttgattcctggatggaagagaaagtgtatccggcaatggccttcatcccgggtctgaccgaactggtcgagacgttcaccccgcagggttatgactatcagcgggatgatgaaatggccacctggggttcagtcgatttcacgtacttaatcacctattcaatttaa

SEQ ID NO: 40628 - DNA, 579 bp, Escherichia coli
atgtctgtgaaaggactggaaagggctattcagaacctgaacagcctcagccggttaatcgttcctgaggcaaccgcgaaagcactaaaccgggtggccagcagaacgataagccaggggagcaaagctgtagcgaaagaagcaacagttgatgataaccggaaaaaggggcttccggttcgtctggtccgccagcgttcccgtctgcgcaaggctcgtcacgatcgcccggtcgcgtcgataaaaatcaaccgcggtaatcttccggcgataaagctcggcacggcgcgcgtccggctctcgcgtaaaaaaggggccagaaacggagcgggcagcgtccttaaaatcgggccctatacctttcgtaacgcttttatccaacagctctcgaacgggcgctggcaggtcatgcggcgcgtaggtcaggcccgttatccgattgatgtggtcaaagttcctcttgagacaccgcttaccgtggccttcaccgctatttcaaagcgccttattgaaagcgatatgcccaaagaactttccgcagccctgaaaaaccaactaaggatccacctgaagcgatga

SEQ ID NO: 40629 - DNA, 243 bp, Escherichia coli
atggacgcggccaccataaaaaagatgggaaagacagcgatcatcaatggcagcagctatgacgttgttccagccgatcaactcgaggaaatgggaccattgtcgggaacaggtacttcgctggtggttttctctgagctttaccagccacgccgaaacgacagcgtcgactacgacggtaagaacctgaccgttacccgctatgacatgttcaacggaaaaccccgcatccatctcgaatga

SEQ ID NO: 40630 - DNA, 327 bp, Escherichia coli
atggctaagaactatgcgcaggatgggaaaacgatccctctggtaaacggcggtgcaaccgatgttcacagcggcgacccggttgttgttggaaaacttatcgcggtggcaattaccgatatcccggctggcgataccggggacggttttaccgagggtgttttccttctgccaaaagtatccgcagatgcgtttactgccggggcgcaggtgtatctgaaggacggcaaaatcacgatcgaagaaacggacgccgttgccgcgggcatcgcctgggaagatgcaggggcaaacaccaccgttgttgaagttaagatcaatgcctaa

SEQ ID NO: 40631 - DNA, 2016 bp, Escherichia coli
gtgccgaagccaaagaaccgggcgcgccaccgtccgaaagccagcgcaaaaagtaattcgtggttccgcatgcaggccagcaataacagcgaggccgacatttttatttatgacgaaatcgggtactggggcgtaacggcgaaacagttcgtcaatgatctccgggcacttggggacgtcacccacatcaacctttatatcaactcgcccggtggtgatgtcttcgacggtattgctatttataacgcgctgaagcatcacggcgcggcgattaccgtgcatatcgacggtctggcggcctccatggcctcggtgattgcgatggtaggcaatccggtcatcatgcctgaaaacacgatgatgatgatccataagccctgggggtttgctggtggtgacgcgagcgatatgcgcgactatgcggatcttctcgacaaggttgaatccgttcttatcccggcttatgcgcagaaaaccggaaaatccaccgaagaaattgcggcaatgctggaggacgaaacctggatgaacggcagcgagtgccttgaactgggttttgccgaccaggtgacaccatcccttcaggctatggcctgtattcattcaaaacgtattgaggaatttgaaaaaatgccaaaaagcattcgcaacatgatcaccccgccgcgcaacactacccagcgtgacccggttattacccagtctccggcaccgcaggcaaaaacagacccggcaccggatgaaaatgcgatccgcgcgcaggtgttggctgagcagaaagctcgtgttaacgctatcggcgatctctttgccatgttcggcaataagcacatggatctgcagaaccagtgtgtagccgaccctgattgctccgtcgataaggcgaaagatttgctgctggcagaactcggtaaaacggccacgccgtccaataaaaccacccagccgcatatccatgcgggcaatggtaacttcgtcgcggatggtattcgccaggcactgatggcgcgtgcggggttcgaaggtcaggagcgggataacgtttataacggtatgacgctgcgcgagtatgcgcgtatggccctgactgaaaaaggtatcggcgtggccagctacaacccgatgcagatggttggcctggcgctgacccacagcacctctgactttggcaacattctgcttgatgttgcgaacaaagcgctgattcagggctgggacgaggcgcaggaaaccttcgagcagtggaccaaaaaaggccagctgtcggacttcaaaacggcgcatcgtgtcggtatggggggtttcccttcgctgcgaaaagttcgcgaaggggctgagtacaagtacatcactaccagtgataaaggcgaaaccatcgcgcttgccacgtatggtgaaatcttctcagtaacccgccaggcgatcatcaacgacgatcttaaccagcttaccgacgtaccgatgaagatggggcgcgcggcgaaagcaacgattggcgatctggtttacgccattttgactaaaaacccgaaactctcagacggaaaggcgctgttccatgccgatcacaagaacctgagcgcgggcgcaatttctgtggccagcctggacgagtcgcgcaagctgatgcgtctgcagaaggagggggagcgaaccctgaatatccgtccggcctacatgctggtgcccgtcgccctggaaactctggcaaatcagaccatcaagtcggccagtgttaaaggtgcagacatcaatgccgggatcgttaaccctatccagaactttgcagaagtcattgccgaaccacgcctggatgaagctgatgcgaaagcctggtatctggctgccgcgaagggcaccgacaccatcgaggtcgcttatctcaacggcgtcgacacgccgtacatcgatcagcaggaaggcttcaccactgatggtatcgccacgaaagtgcgtattgatgccggtgttgcaccgctggactatcgcggcatgaccaaatcctctggtcagtaa

SEQ ID NO: 40632 - DNA, 1500 bp, Escherichia coli
atgagttttttagatgatacgattggcctgttttcaccaggctggaaagcctcacgcctgcgtgcccgcgcagttattaaggcgtatgaggcggtaaaacaaacgcgtacccacaaagcccagaaggaaaatcgttcagccgatcagctcagccagatgggggcggtttcactgaggcagcaggcgcgctggctggacaacaaccacgatctggtgattggcgttttcgacaagctggaagaaagggtggtgggtgcgaagggcatcatagttgaaccgcatccgatgctgactaacgggaagatagctaaaaagctggccactgatatccgcagaaagtggggtgaatggtccgtaagacccgatgttacaacccagtttacccgccccatgctggagcggctgatgctgcgaacgtggctccgggacggtgaggtatttgctcagctggttcgcggtaccggaaatggtcttcagccggttgctggcgtgccgttctggctggaagcgctggagccggacttcgtgccgatgaacagcgatgccgccacccagctcaatcagggcgtttttgtcgataactgggggcgcccgaaaaaatatcaggtctataaaagcctgccagtatccgggcgtcagttcgataccaaagagattgatgcagaaaacatgcttcatctcaaattcacacgacgcctgcaccagacccgcggaacgtctcttttgtcaggtgttctgatgcgtctgagcgcgctgaaagagtacgaggactcggagcttaccgctgccagaattgctgccgcactcggcatgtatatcaaaaaaggcgacggacagagcttcgagtctgattccagcagcgatgaccgcgagctgatgattcagcccggtatgctctatgacgagctgcaggccggggaggaaatcgggatgattaaatccgatcgcccgaatcctaacctcgagtcgtttcgtaacggacagctacgcgcagtgtccgccggcagtcgcctcagcttttcaagcacatccagaaactacaacggaacgtacagtgcccagcggcaggagcttgtcgagtcaaccgacggatatctgattcttcaggactggttcatcggttcagtaacccggcccatgtaccgggcctggctgaagatggctattgctgccggagaaatcaagctgccgagaggcatcgatatggactcgctttataacgcggtttattcggggcccgttatgccgtggattgatcccgttaaagaagcgaatgcctggaaaacgcagatccgcggcggtgctgctactgaatccgactggatacgtgccagcggtcgcaacccggatgatgttaagtcacgccgtaaagcggaggttgacgagaaccgtgaacagggcctggtgtttgacaccgaccccgccaatgataaaggaggcaccagtgccgaagccaaagaaccgggcgcgccaccgtccgaaagccagcgcaaaaagtaa

SEQ ID NO: 40633 - DNA, 216 bp, Escherichia coli
gtgaatccagcagatattcaaaacatgatcgaccgctacgctgcagccgagctgtctgttctggaggggaaatcaatcactttcaacggacagcagatgacgctcgaaaacctgtcggaaatcagaaaaggccgtcaggaatgggagcgacgactggcaacgctcaataacaaacgccgcgggcgacccggctacaggctggcgaggtttggatga

SEQ ID NO: 40634 - DNA, 2103 bp, Escherichia coli
atggcaaagcgggcatccgccagggacatccgccgcgatgtttccggtattttacgagccccgcgtcgtatgccggtggccgatgcggtcagtacttatatgcgcgtgccgatgggggcgggaaactcagttccgtgggatccggatctggcaccctatgtgattgagccgatgaactgcctggcatcgcgtgaatacgatgcggtggtgtttgtgggcccggcgcgaacgggtaaaaccatcgggctgattgacggctggattgtttataacattgtctgcgatccggcagatatgcttgtgattcaggtatctgaggaaaaagcgcgcgagcattccaaaaaacgcctcgaccgcacttttcgctgtagccctgaagttaaaacccggctaagcccaagacgtaacgataacaacgtctacgaccgtacattccgcgccggtaactatctgaagctgggctggccatccgtcaatatcatgtcgtcctcggactataagagtgtggcgctgacggattatgaccgctttccggaagatatcgacggggagggggatgctttttcactggcatcgaaacgaaccacgacattcatgtcctccgggatgacgctggttgagagctcgcccgggagggatatcagagacacaaaatggcggcgctccacgccccacgaagcccctccgaccaccggaattttatcgctctataaccgtggtgaccgccgtcgtctttactggccatgcccgcattgcggcgaatatttccagccggaaatggacaatatgaccggataccgcgacagcagcgatcctgtgcttgccagcgaagcggcgtttcttcagtgccctgcctgtaaaggcaggatcacaccggacatgaagcgtgcgctgaacatgaaatgtgtctggctccgggacgggcaaaccatcgacagtaaaggccaggttagcggtgatggccgtcgttcccgtattgcctccttctggatggaaggtccggcagctgcttaccagacctgggcgcagcttatttataagtttctgaccgccgagcaggaatatgaatccacgcgcagcgaagaaaccctgaagacggtgatcaacaccgatttcggcaggccctatttgccgcgggccagcatggagcagcgtaaaagtgaattgcttgaacagcgtgccgaagaagtcccaaaacgctcggtaccggacggcgtgcagtttctcactgcgaccgtggacgtgcaggccgggcgcaaccggcgctttgttgtgcagattacgggttatggaagtatgggtgagcgctggatagttgaccgttacaacatccggcattcgctgcgctgcgacggcaacggggaaagcttacaggtggatccggcgagctacccggaggactgggatcttttactcaccgacgtctttgataaaacgtggccactcgcagctgacccgtcaaagggcatgcggctgatgtcgatggccgtggactcagggggggaagatggcgtgacggataatgcctacaaattctggcgcagatgtcgtcgtgaagggctgggtaagcgtatctatctcttcaagggggacagcgtcaggcgcagcaaacttatccagcgaacgtttcccgacaacacgggcagatcaacgcgccgcgcacaggcgacgggtgatgtgcctctttatcttctccagaccgatgcccttaaagaccgggtgaacaatgcgctgtggcgtgattcacccggccctggctatgtgcatttccccgcctggctgggcagctggttctatgacgaactgacgtatgaggaacgctcgaatgaagggaaatggagtaagcccggccggggcgcaaacgaagcatttgacctgctcgtttatgccgacgcgctcgccatccttagtggttacgaaaaaatcaaatggccgtcagctcctgagtgggcacggcgggaaacgtggatcgaggacacgcagacggaaactggcgaaatgccatccccgccgcctgcgccgaaatctaaatcaaaaccaaaacgtgagaagcccgtaaccgagcaggctaatccgtggtcttcgtcaggaggttgggtgtga

SEQ ID NO: 40635 - DNA, 489 bp, Escherichia coli
atggaccaggaaattgccactttaaaactcaatatcaaccagctggcagggataaccggcgtacaccgtcagacggttgccgcgagactgaaaaatgttgaacctgctccaggcagcaacagcaagttaaagctctatctggtgaccgacattctgaccgaactgatgatccctaccgtttcggccaacatcgatgatatgcccccctctgacaggctgtcccactggaaagcagagaatgagaggctgaagttcgaacaggatacggggcagttaatacccgcagatgaagtggcgcgagaattctcattgatggcgaaagccgtcgtcatggtacttgaaaccctcccggatgtgctcgagcgcgactgtgctttaacgcctgctgcggtagttcgtgtgcaaagcgttatcgatgatctgcgcgaccagatggcggagagggtgcaggacgttgaaaaagaggaggaagagcctgaggaggactga

SEQ ID NO: 40636 - DNA, 741 bp, Escherichia coli
atgataaatcttctgagttgcggctttttctcatgccctaaggattccgtccgcggcaatcaggactcatatgtattgccaactccgacaggaaaggggtttttatttgcagtcgctgatggtgtcggttcatacgagggtgctaaagagatagccgatactgctacttcagctcttcgttctttcaagcacgacaacttcaaggacatccaaaaaacattcttggctctcaaagaaaaggttgatgcggttgtagttgctaaatctgaatggatcaatgcagcgaccacgctttcattctgtttcgtcgacaatgaagctttgtatgttggacatgttggagacacccgcgtctatgttaaaaaaggcgcaaagcttcagttgatcaccaaagatcacacccaacaccaagaactttttgatgacgggatttacaccaagaaagagttacgtgacctgccaggtaaaaacactctcacttcagcgatatccagaaacattgctttacgcttccaaagcgtcacgttgcccttatctgaactggttgatgaaaatggactcattactgtttacatcatgtctgatggagcccatcacttctgggaacaaagaccaaggctctcccttgaaactatttcgaaagcaccaaaattcgcagcaagcttactaagaaggatagaacggtctggacccatagatgattacacactggtcgctgtatctttccaaacttcgaaatag

SEQ ID NO: 40637 - DNA, 768 bp, Escherichia coli
atggaagctagagggaattatcgtttaaggccaatttcaaaccttggaagtgggacatttggacgtgtagagaaaatcgaactctacaattcaagtgggcatttttgcggcttttacgcccgcaaaagtctcgcagttaatcatgatattgtgggttctatattcactcctgatgactggagaagaagatttgaacgagaagtgacttaccaatctcgatgtcggcattctaatgttgtcccagtattgatacataatctcaatgctgagcatccgtggtttgtaatgcctctggcaaatacggatctcatgaaggagattgaaggtaacgcattaagcgatgatgagaaactatcagcgattagaatgatgttactcggcgtcgaatatatccacagtcgcggatatcttcatcgggatctcaaaccagaaaacatccttaaattcgatgatggacaatacaaggtgtctgactttggtttggtgaggcatgatgatcctaacgcggcctcagcagttttaaccaatatagctgtcagcatgggaactgatggctataaagctccagaggtcaatagtggtctgtatagtccaaaaactgacatctatgcagcgggtgccatagtgaatattctaaatttgagccatgtggatggtatcgatgctttaataggtaaggcgacagcttacaaaccgactgcgagatatgattcagtcagtgagatgcttgccgatcttaacgccataattgaacggaggcaggcatga

SEQ ID NO: 40638 - DNA, 513 bp, Escherichia coli
atgaaaattaatccgggtcttatcggcgttgtcgtaatagctggactttcggtcgctctcgttaagagttgctcaaatgccagaagccttcagagcgataacgacgttctgcgaagtgacaactctttgcaggggcaagtgattgccagccaggcattcaacttcaatcgattcaatcaggttgcagaacatgccaacaggcttaactccctgatcgataccagcaccgaagaaactgtaatcgaataccgggagattctccgccgtgaaaaaacctgtgatctgcctgttcctgctgacattgctggtgggctgctcgaatacgcgtaccgtttacgttccagcgcaatgcacaccgataccgacaaacctgacgcagccgatgatagtaccgctgccgccggctcaataacttactgccaggctgtgctctggattaagccgttgctggctgtgattgaaaagggtaacaacaacttcgctgggattagacagattgaacgaaaccgatag

SEQ ID NO: 40639 - DNA, 540 bp, Escherichia coli
atgatgtcgaacaaagcaaagctcagcgcagcagtgctggcgctaatcgcgtcaggggcatctgctccactcattttcgaccaattcatcagcgagaaagaaggcaatgcgctggtggccgttgttgatccgggcggggtctggtctttatgtcacggcgtgaccgttatcgaaggcaggcgtgttgttaagggcatgacggccactgaggaacaatgccggaaggttaacgctattgaacgcgataaggcattagcctgggttgatcgcaacatcaaagtgcctctgacagagccacagaaggtgggtattgcatccttctgcccgtataacatcggcccaggtaaatgcttcccatcgaccttctataagcgcatcaacgcaggtgaccgcatcggtgcatgcgaggcaatccgctggtggattaaagacggtggccgtgattgtcgtctaaccaaaggccagaagaatggctgctatggtcaggttgagcgacgggatcaggaaagcgctctgacgtgctgggggctggaccaatga

SEQ ID NO: 40640 - DNA, 216 bp, Escherichia coli
atgtatcgaatggaaaaaatcacgacgggtattgcatacggcgcatcgggaggggggaccggatactggttgcttcagcttctcgataaagtctccccatctcaatgggcggccattggtgtgctcggtagcctcatgtttggtttgctgacgtggttaacgagtctgtacttccaaatcaaagcggatcgccgcaaagctgcgcggggtgaatga

SEQ ID NO: 40641 - DNA, 480 bp, Escherichia coli
atgttatcagctaaagatgatgcattcattttaaaatcagatgggtcaaaacttggtccctacaaagctaagtttgcaggtgatacggtcattgtgaatgacccaatggcagacatcgatgatggtgatactgtcatgcgtatcttgccgaatggaaaagaagagcataaagaaatttacaaagctaacttccacgaccgtggtattgctggatttggccctcattttcagcttaaggtcggtcctaaaaaaacggtccctgccttttcatcacagcaaatcaatattcatggtggcaatgttcagatcggagatcataaccgccaagagattaccactagcatcgaaaccttgaacaatctcattaatagttctcaggctactaccgagcaaaaggaagaagcaaaggggctgctgcgcaagctggccgagcatccacttattacggccatagccggtggcgctatcggtcttttttaa

SEQ ID NO: 40642 - DNA, 693 bp, Escherichia coli
atgaatttacaagaactggaatatacgcggattgaactgcgccgcgcgctggtggatttgtcaggatcgacaaaaggacagctgcaggcgttcagtgagcatccaccagcagataagaataaataccctcggcaccatcctgaaatcgtcatggagggtggggaaggttgtggagcgaaggttgtaaaaactctggccactccgctttatgttcttgagacaaggagccgtcgccgacctttaccgcctattaaggatactgagttcgcttgttcagcatggcgtcgatcggtcaatggtctgggggagcatttgcaggcatgggtgaggtactgctatgggtatgacctgaccttccagtaccagacgttaatgtgccagtacgtgtgggaacagtttcagcgtcagcatagcggcaaaaaaattcagggccgtgtcactaaaaaactgatagggcttgtttggctggcggcgcaagaagttgctgcctcgcgtaataacgatacctatcaggagtatgctggagcagctctggcgcgcatggtcagcgttgagcgttccacctggcttagagtgtattcaggccactgggcggctttcaaagcgtcgtttgctgaaatggacagccaggcactaatcgaaattttgtcacggtacgaagggtaccaagaactgaaagtggcggaaatgtga

SEQ ID NO: 40643 - DNA, 888 bp, Escherichia coli
atgacggaaaataaatactgccgcgcactggctgaactccgttcaaaaccagcgcatgaattgaaagaggttggtgatcagtggcgcacaccagatttactgttttggggcataaattcaatatttggcccgctggttctggatttgttcgcagacgacagcaacgctaaatgccctgcctggtataccgccgaagataacgcactgacgcaggattggtcagagcgtctggcagaactcggtggcgccgcgtttgctaacccgccatacagccgctctcagtatcatgaaaagcaggccatcaccggcatgacccacatcatgaatcacacgatggcgatgcgtgaaaaaggtggtcgttacatctacctagtgaagtcagccacaagcgaaacatggtggccggaggatgccgatcacatcatgtttattcgtggtcgtattgggtttgatcttcctgtttggtttgttcccgctgacgagaagcagcagcccaccagcgctttttttgccggggctatcgcagtcttcgacaaaacgtggcgcggtgaaagcttcagctatatcaaccgcaacgagctggaagaaaaagggcgggctgcattgtcattggctcaattcgctgtggcaaaaatggcactcccgacactgccggaaaaggtgatgactgctccaattgaaacgcctgaggtagagtcgcgcatctggccactggaagttggtctggtattcgatcaggtcgagggagcggactctctggggattaaccaacagaacaagttgaaggccaacatcaaccaactctggcttgagcgtatgcctactaacgaaataatcagcgttgctggtggtctggtcagctgcatgcagggggccgtcaatgcgtga

SEQ ID NO: 40644 - DNA, 855 bp, Escherichia coli
atgagcactaaattaacaggttacgtttgggacgcttgtgccgcttctggcatgaagctgtccagcgttgccatcatggcgcgtctggcagacttcagcagtgatgagggggtaagctggccttccatcgctaccatcgcgcgccagattggtgccggtgagagcacggttcgcacagccatatcacaactggaaaaagacgggtggttaacccgccagcagcgccgtaaaggcaaccgcaatgcatcgaacgtttaccagctcaatgttgcgaaattacaggctgctgccttttctcacctgtcagattctgacgcatcgaaatctgatgcctcaaaaaccgacgcgtcaaaatctgaggcatcaaaaaacgatgaaaaaggaggttttcacccgtcagaatctggaggggatccgtcagtaaatacaactactgatccatcagttaaaaaaccttcttgtccggttgcgccgcaaccagaccctgaagtgatgatcaccaataacgccatcctggttctgaatcatctgaacctggttagtggctcacgataccaaaaatcaaaaacttctctggaaaacatccgtgctcgtttgcgtgaaggttacaccgttagcgatttacagctggtgatcgaccttaagcatgagcactggaacggcaatgacgtgcagtaccagtacatgcgccctgaaacgctcttcggtccgaaaaaatttgaaggttatctgcaaagcgggatccgctgggacaagaaggggcggccaccgcgtgacagctggggcgaaaagaaacatgacccgatgaagttcggtccggttgatagcaagattccagaggggttcagaggatga

SEQ ID NO: 40645 - DNA, 135 bp, Escherichia coli
atgggtaaaaatggcgctaatttcgtaaccggcagccagcagggcttaaataccgaggcatcccatatcgtggtaggcaaaaacgacggttttcattattcattttccttgctggatggacggataacttgctga

SEQ ID NO: 40646 - DNA, 327 bp, Escherichia coli
atgcctagtctcgtgggctcggagatgtgtataagagacagaaattacgccagtttttgccatcgacatcgtgatgattggacgatcggcatactgctcctgcatctccagggtcgcggcaagcaacgtcagcacatcgctggtactttgcggcatcagcgcaatcttaggaatatcggcgtcgaaggactgcattttgcgcagacgggcaatgatttcttcggcttccggcgttttatggaagtcatggttggacatgacaactttcacatcatgcgcgtgggcgtaggcgacggtttctttaacctgatcatcgccggtaaataa

SEQ ID NO: 40647 - DNA, 642 bp, Escherichia coli
atgggccgggatcgtgagttttgctatcctggatctccagaaaacaataccacaccggctgttttttattataattttggcacaacgattatttcagatataaataataatataccaggtactattctgcccgaaaaaaactggaaaattggtctgtataaggcttattgtaattccattagcaattatgaggtatattttagcggagtgtcaggtattgatccatctggtacatctggtattcaacaggggagtgatatatttgttccagtgacgcatgaaatatcaatttctacacatgttaaactctataataaaaatgggacacagacagataaaacagtaccattttataattatagtactaattatccaacggatagaagtaaaccatcaaattggtcttcaggaacagagggctatattaaaattaaattggataaaaagattatctctgatatctctctgaataatgtacttttagtttcattgtatgccagtcagcggcaaacggaacatgggccagtaccattatttaatgcctggatcagcaacctggatattcaggttccgcaaggttgcacaattaatgaggtacgagttttactgttaatatgccggatgtgtgggccagtgaattga

SEQ ID NO: 40648 - DNA, 1194 bp, Escherichia coli
atggttgattttagcagtgtgaatgtaagctcaaatcccggcgttgcaacattaattaacccgcaatatatagccagtgtaaaacataataaaggatatcagagcgtcagcttcggtgatggtcagaacagttaccatattgtggatcgtaatgaacacagttcatctgatctccacacaccaagacttgataagctcgtaactgaggttgctccggctaccgtaaccagctcatcaacagctgatatattgaacccttcaaaatactcggcattctacagggctggttcgggaagtcagtatattcaggatagtcagggtaagcgacattgggtaacaggtgggtatggttatctgacaggaggaatactcccgacatcattcttttatcacggctcagacggcattcagctgtatatggggggcaacatacatgatcatagcatcctgccctcttttggagaggccggcgacagtggttctccattatttggctggaatacggccaaagggcagtgggaactggtcggtgtttactcgggagtaggaggggggaccaatttgatatattctcttattcctcagagttttctctcacagatctattcagaggataatgacgctcccgtcttttttaatgcctcatccggcgcccccctgcaatggaaatttgacagcagcaccggcactggctctctgaaacagggttccgatgaatatgccatgcacgggcaaaaaggttctgacctgaacgcaggtaaaaatctgacattcctgggacataatggtcagattgacctggaaaactctgtcacgcagggtgccggttcactgacatttactgatgactacactgtcaccacttcaaacggaagtacctggaccggggccggtattattgtggacaaggatgcctccgtaaactggcaggttaatggtgtgaaaggtgacaacctgcataaaatcggcgaaggaaccctggttgtacagggaaccggtgttaatgagggcggcctgaaagtcggggatgggaccgttgtcctcaatcagcaggctgacagttcaggacacgttcaggcattcagtagcgtgaatattgccagcggccgcccgacagtcgtgctggcagacaaccagcaggttaatccggacaatatatcctggggctaccggggggggggttctggatgttaa

SEQ ID NO: 40649 - DNA, 207 bp, Escherichia coli
atgttttatttccggatcatccgttggcatcttttcaagattcacctgtatagcaagctgaaagaaaatatttgttattttttcagccaacctggcattatcaccagaaatacagaaataaattgtcatccgctttttccgcacctgccgcaaatcaaaatcatttccatcagtagcatttgccacattggggttagcaaacggtga

SEQ ID NO: 40650 - DNA, 342 bp, Escherichia coli; identical to SEQ ID NO: 982

SEQ ID NO: 40651 - DNA, 504 bp, Escherichia coli
atgattcgtttatcattatttatatcgttgcttctgacatcggtcgctgtactggctgatgtgcagattaacatcaggggaaatgtttatatccccccatgcaccattaataacgggcagaatattgttgttgattttgggaatattaatcctgagcatgtggacaactcacgtggtgaagtcacaaaaaccataagcatatcctgtccgtataagagtggctctctctggataaaagttacgggaaatactatgggaggaggtcagaataatgtactggcaacaaatataactcattttggtatagcgctgtatcagggaaaaggaatgtcaacacctcttacattaggtaatggttcaggaaatggttacagagtgacagcaggtctggacacagcacgttcaacgttcacctttacttcagtgccctttcgtaatggcagcgggatactgaatggcggggatttccggaccacggccagtatgagcatgatttataactga

SEQ ID NO: 40652 - DNA, 513 bp, Escherichia coli
atgattaattttaaaaagttcacatcctacaccccagatgaagataagtcagagcttgttgaagctggagttgtatttttacgtgatgaaaacggtaatgactggtatgaatgtcagaaattttttcatgagaacacgataaagatagtttatgacagcgataatattgttgtgagtatttcaaacgatgtttcaacactctggccagtgggggcatctgtagcagaaatagaaatcctgcctgagggagtagatatcaacggtggttgggtgtttagagacaactctgttgttaaacgcatatattctgatacggagttacaacagcaagctgaatcaaaaaaggctgccttactttcacatgccgaatcagttattgtaactcttgagcgggcggttaaattgaatatggcaacagatgaggaacgagctaaactggaagcatgggagcgttatagcgtgttggtttatcgcgtagatacagctaaaccagaatggccagaagaaccgtag

SEQ ID NO: 40653 - DNA, 810 bp, Escherichia coli; identical to SEQ ID NO: 6004

SEQ ID NO: 40654 - DNA, 1083 bp, Escherichia coli
atgatttaccgcctccgtcagcagaagccggtctgggcactgtgcaatgacacggcctgttctgcagccatgctgctggcgtcggcctgctcccgacggctggttacccagacatcccgtatcggctccattggcgtgatgatgagccatgtcagctatgccggtcatctggcgcaggccggtgtggatatcacgctgatttactcaggggcgcacaaggtggatggcaatcagtttgaagcgttgccggcagaggttcgccaggacatgcagcagcggattgatgcggcgcgccggatgtttgccgaaaaagtggcgatgtataccggtctgtctgttgatgccgtcacgggaacagaggctgccgtttttgaaggtcagtccggcattgaggccgggctggcggatgaattaatcaatgcgtcggatgccatcagtgtgatggccacggcgctgaacagtaatgtcagaggaggcactatgccgcaattaactgcaacggaagccgccgtgcaggagaaccagcgagtgatggggatcctgacatgccaggaagcgaaaggacgtgaacagcttgccacgatgctggcagggcaacagggcatgagcgttgaacaggcccgggcgattctggccgcggcggcaccgcagcagccggtggcatccgcacagagtgaagccgatcgcattatggcgtgtgaagaagcgaacggtcgtgaacaactggcagcaacgctggcggcgatgccggagatgacggtggaaaaagcccgcccgatcctggctgcttcaccgcaggcgaatgccgggccctcacttcgtgatcagatcatggcactggatgaggcaaaaggggctgaggcgcaggctgaacagctggctgcctgcccgggaatgactgtggagagcgcccgggctgtgctggctgcgggatcaggtaaggcagaaccggtctctgcatccacaaccgccctgtttgaacatttcatggcgaaccattcaccggctgcggtccaggggggcgtgtcacaggcgtcagaagacggtgatgcggacgtgaaaatgctcatggccatgccatga

SEQ ID NO: 40655 - DNA, 1083 bp, Escherichia coli
atgatttaccgcctccgtcagcagaagccggtctgggcactgtgcaatgacacggcctgttctgcagccatgctgctggcgtcggcctgctcccgacggctggttacccagacatcccgtatcggctccattggcgtgatgatgagccatgtcagctatgccggtcatctggcgcaggccggtgtggatatcacgctgatttactcaggggcgcacaaggtggatggcaatcagtttgaagcgttgccggcagaggttcgccaggacatgcagcagcggattgatgcggcgcgccggatgtttgccgaaaaagtggcgatgtataccggtctgtctgttgatgccgtcacgggaacagaggctgccgtttttgaaggtcagtccggcattgaggccgggctggcggatgaattaatcaatgcgtcggatgccatcagtgtgatggccacggcgctgaacagtaatgtcagaggaggcactatgccgcaattaactgcaacggaagccgccgtgcaggagaaccagcgagtgatggggatcctgacatgccaggaagcgaaaggacgtgaacagcttgccacgatgctggcaggacaacagggcatgagcgttgaacaggcccgggcgattctggccgcggcggcaccgcagcagccggtggcatccacgcagagtgaagccgatcgcattatggcgtgtgaagaagcgaacggtcgtgaacaactggcggcaacgctggcggcgatgccggagatgacggtggaaaaagcccgcccgatcctggctgcttcaccgcaggcggatgccggaccatcactccgtgatcagatcatggcactggatgaggcaaaaggggctgaggcgcaggctgaacagctggctgcctgcccgggaatgacagtggagagcgcccgggctgtgctggctgcgggatcaggtaaggcagaaccggtctctgcatccacaaccgccatgtttgaacatttcatggcgaaccattcaccggcagcggtacagggtggcgtggcacagacgtcagcagacggtgatgcggacgtgaaaatgctcatggccatgccatga

SEQ ID NO: 40656 - DNA, 240 bp, Escherichia coli; identical to SEQ ID NO: 31418

SEQ ID NO: 40657 - DNA, 234 bp, Escherichia coli
atgttgacctataagggagcaccacagaatacgccgggcgcctctgttccctggtataaagtcattgcgatgcctgaaaagcagattatcagatatgacgaaaaaaacctccctctggaaaatggaatgaaagccgaaagtacactatttctggaaaaaaggcgtatttaccagtggatgctttctcctttctatgacatgaaacacagtgcaacaggaccgctcaatgactaa

SEQ ID NO: 40658 - DNA, 1134 bp, Escherichia coli; identical to SEQ ID NO: 8777

SEQ ID NO: 40659 - DNA, 672 bp, Escherichia coli; identical to SEQ ID NO: 34799

SEQ ID NO: 40660 - DNA, 324 bp, Escherichia coli; identical to SEQ ID NO: 10084

SEQ ID NO: 40661 - DNA, 324 bp, Escherichia coli; identical to SEQ ID NO: 9185

SEQ ID NO: 40662 - DNA, 309 bp, Escherichia coli
gtggccaacgttgccgagcaactgcaaagcgcggttgctgaaacgctgaaatactccgttaaaccggaagatatggcaaacgatcctgagtggtttcttgagctgacgcggcagcttcacaagcgccgttttatctcgaccggtggggcgctaaaaaacgtcctccagttggatcgagaaaccaatgaggatcttgtcattgccgacgatgtaggggatggcactgatgacgggaagcggacggcgtttgtctgggattcaggtaaacggcgttacaaacgcgcccctgagaaggataaatcggattaa

SEQ ID NO: 40663 - DNA, 267 bp, Escherichia coli
atgaatattaatattgaatacctgaatggaaataagactattggtttatttttttcaagaagtgaagcggtgattcctgacaggtttaaaaaccttattttgcttattgatggattaagttttggcacatttggttttcatccgcacgaaggttttgaggatgaattaattttatatattcagaaaacaaacgagagggtaaaaactctttttgtgaaaatagatttaaacggtatcaagtttggatttttaagaacgcattcttag

SEQ ID NO: 40664 - DNA, 483 bp, Escherichia coli
gtgtggtggaaccgtctgtgtgacaatgtactgccggaaaaaaccatgccgtttgacctgctgacggttctgcccacccgcctggatgttgaagtgaatggctttaacggtggtgttctgaacggtgttccttctgcgtatcactggtatacggaacagtatggcgtgaagtggcctgtggggtatgaggtgaatatcagccgtcagggagaaaacttcattcaagtggatttcgacacgccgtggtgtcagccggaaagcaacgttgttgcagaattaagccgccgtttcggctgcacgctggagcactggtacgccgaacagggctgcaatttctgtggctggcagcgatatgagcgtggagagcttgttgatgtgctgtggggggaactggaatggtcttccccgacagatgatgatgagctgccggaagtcaccgcgccggagtggatagtcgacaaggtggcgcattacgggggatga

SEQ ID NO: 40665 - DNA, 483 bp, Escherichia coli
gtgtggtggaaccgtctgtgtgacaacgtactgccggaaaaaaccatgccgtttgacctgctgacggttttgccgacccgcctggatattgaagtgaatggctttaacggcggtgttctgaacggtgttccttctgcatatcactggtatacagaacggtatggcgtgaagtggccttgtgggtatgacctgaatatcagtagtcagggagacaacttcattcaggttgatttcgacacgccgtggtgtcagccggaaagcgacgttattgcagaattaagccgccgtttcagctgcacgctggagcactggtatgccgaacagggctgtgatttctgtggctggcagttgtatgagcgcggagagcttgttgatgtgctgtggggggagctggaatggtcttccccgacagatgatgatgagctgccggaagtcaccggacctgcgtggatagtcgacaaggtggcgcattacggtggatga

SEQ ID NO: 40666 - DNA, 489 bp, Escherichia coli
atgaccactattgcatgggatggaaagaccatggcatctgacacccaggcatcatctggtgatgttgtgtgttcgtatacagaacaaaagatttacacaccgccagaatctgggtgggaggtttgcggcagtaaagtggttgcattaggttgttctggtgattgcggcgcggagatggaattgcaggaactgcttaagaataacctgacgtatgcatcagaatttctcccgacattctctttcacagcgcttgctatcatcggtgctggtcgtgcttacatcatctcaaaagagaaaggcgaaacgcgggcgagtatttcgctacaggttgaaccttacgccattggtagtggtgggctgattgctcgcactgccatgcactgtggcaaaaatgcgagagaagcggtacaagtcgcaattgatcttgactgctattccggcggcagcgttgattcgttccccgcttggaagcaaacagaagggaaataa

SEQ ID NO: 40667 - DNA, 306 bp, Escherichia coli
atgcttccaattaggttaaaaaaagcccgattgaatgctgggttaactcaagaacagttgggaatacttgttggcattgatgaatgctctgccagtgctcgcatgaatcaatatgagaaaggtaaacatatgcccgatttttcacttactaaaaaaatcgctgatttattaaatgtccctgtctcatatttttacacacccgaagatgacttggcagaaattattttgttgattaataaactagacaaaaaacagcggttaattttattaaaaaatttatcagatggatttataagtcatgaataa

SEQ ID NO: 40668 - DNA, 897 bp, Escherichia coli
atgagcatttgggaacgtttttttggtagtaaagaaaaagaatcatttaatacacaaggtgttttagtagccaatgctgaaattgataacccactaagtttagtcgttgtatttgatacccttccggaaaataattcaaaagaactcacccgcttgttgcgtaattatcattccagtatgaaacaggcaacgagtgaacttgaacctgagctggattttttcggtttagcaggatggggaaaacatgttatttcaatggtcggatttaaagcaccttacccacaagaatccatcgagcaatgcgtcgtgccagctcattactcacaggaagtaaaagagcaggtacgggcaactggtgcaaatattattttatattataagggttatgatacttcgcctttagagcaatatgttgcgttggctgcggttgcaggtgcattaagtaacatgggagctgtcgctgtattaaatgaatcggctcatacttcattacctgcgggggtatttaagtctcaggaattaggtaagcatagtctggaaatgtggcgtgaaggttttcctctgacattaatattttgtggatttgtgaagtatgaagttgaggatgtcaaaggtgtatggatgcgtacctatggtgctgattgctttgggctacctgattttgcagctcatgcacaagggcaccacgaagggcaaaaatactctgatattttcaataatgttctgcgttacctacttgaaagtggagcagaaatggctgccgggcataccatgcaagttggtgaaacaacatttatgaaattgcgcgatccccttgacgatgaatattacttacagggacctgggaccacattagtggttgaactgattgaacaagacgagtgtaatactcattga

SEQ ID NO: 40669 - DNA, 1068 bp, Escherichia coli
atgaatagcaaaattttatcagtgcattacatgagggctttggcctccatcgcggtgttaatagatcatttctcaggtctattggttatcaatgggaatccaattccatttttatcgagaggtggatttggagtagatcttttctacattattagtggatttatcatctacatttcgtcaggaaacaaagataataacaaacctataaaattcatactaaagcgatttttcagaatttatccattattcatcgttgcatggataatagggatgtcatttgtgttcaagagtgacagcgtatggtcatttttagagccgctactattggtatatcaaaattataatggaatggcccctcagttcggtacccatgttatgggaaccccatggacactggcttacgaactactcttttacgcaatttttgttttagctatttcaataactcacaagcaccgggcggcattatcaatagcgatactgatcctaatgccgatatcactacaactaatattcaacgattcattctccattcagagttctgcatttgccaatgcaagtaaagacattcctatgtatggagtaattagaatggcaagtggaacaataatgtttgagtttgctataggaattttattaggtgtttccttcaagaaaatgaagaagattgatataacacaaagcgcatctacgttattcttctattctggggtaatgatatctattgcaatacttattaccaacggaaatcagatttctaaatttggtttgcaaggctatttcattccgtcaattgttctttttatatcgtttttcttcagggataaaacatcaaatataaaacacaatggattcctggagttcttcggaaatatttcatactcgctgtacatcacacatttcataatttatgtatggatagttcagcatcttgacagggtatggatggaaccggttagggggtaccctatagttattatcggaatggttgcaagcattatattctcttggtgttgttatgtctttgtagagaaaccattcataaaagtcggcaagcgatatttataa

SEQ ID NO: 40670 - DNA, 771 bp, Escherichia coli
atgtttgatacaaaacaactccgatatagcggaaaggatggggtttatttccatctgcaaggtaacccagataactttctgtcactgtcggcgactgagaatatggaatatgactcccctatgatggtgacaactcaggctatgcagtctgggcagaccattacagataacgttcaaagagcacctaaaacaatcactatctcaggtgttgtagtagttgattcaagcggttctcttttaagaaccagacaagggcaacttgtagagaactttattagcacagtagaaacatggagagaccagaaacagattattactattgtctgtaaggatggaatcaagattgatgatgctgttattacccaatttaaggcatctaaagaacataccatttcaaatggtcttcgtattcagatgaccttccaaggtgtggattttaaagctgtgctagggactacagatgtgagtgcagcaactggtaaaacagcaactaccaaagacgatggggtaacctccaaaaagagcattggtaacacaacgacagaccgtagcaagaatacgcctatgctggcttgtaaggagctttataaccgttcttcaaatgaacttaccgacgaacagttaaaagcccgtctgaattgttctaggaatgttacggtaaaaaatggtgaaagtaccttcacagactccgctaatgctggagctacaaaggcgcttagtagcactttgaagaagtacagtgtgaaccctaataagcgcggtacttattaa

SEQ ID NO: 40671 - DNA, 222 bp, Escherichia coli
atgtatgagaagcgtttaaaaactatcaaggcagtttgtgaaaaacttaaaaaccaaccacgtaaaccaaaaacggtaaagagtaagcatcaacctgtcacctcaaacagcaaaacaaagattcgcaaagttcctacgtggtgtattgaccgtgttccggttggttcaaaaattatttgtgaagatggtgattatcattgggtatcagttgtggttagttag

SEQ ID NO: 40672 - DNA, 708 bp, Escherichia coli
atgtctattagaaacgaacatgaaataattattgattccaggccaagtgctcttgatatttctcaaatgagtttacaggaatctattgatagggcatggagagagtcacatggtgtatttagaaaagaaccttatcagccacccgaaatggttcatcagaatacaaccagaattgattttgatatgaacacagagtgtgagcttaatttaaaactgaagcttcagagaaaatacttcagtcaacttaagctttctcaggaagcgatgaaagctgaatatgaaaggcttcaagaaaaaattgaagatgagattgatgaaatggctattctaatggagttgcaaactaatccttctgcatattgcacaaaatttgaccgtgatggttgggggtatgaccctgtagaaattggtaaagttatttctgatttacctgaaggtcataaagttattcgtacagaaagagctatcagagcaccacaaaggctggctttgattgtttctgataagacgcacgaagaactttcagagactgcaaaacagagactgttaaaggcaaaggaacgagatattaatcttatgaaagcaaggctatctaagttgattagtgatcatcagagaatcgccaaaaaatacaagcaagaattatcgcagattgtaagttttaatgacttcctgagcgttcctaagaattacagtaaggctatttga

SEQ ID NO: 40673 - DNA, 309 bp, Escherichia coli
atgaattatccaatgcaaattatggttgaccaagaaactatgaattggttggttgacctgaacaagtcaggtttcaatattcactttgcgaattgctctgaagcttcaacttatatcgataaacacactatcaatacaataaagcttggtgactatgttcacaagctggaagtaacagacccacacaataaacgctttatcattgaagagtgtagcagactggatttaagcccagagcaactactaaagctgaatgtattcctggcttatcagaacgaattaaacccttacagtgagattatgcaatga

SEQ ID NO: 40674 - DNA, 201 bp, Escherichia coli
atgttatgtattaaattcgaatatttgacagataaaatgattaggcacgtatcagacctgctcatcaaagaagatggtttcggtgatattcataatccaagggatatcttcattcacgccaccagcccaaacgaaacattaaaaacagcagttacaacggaatggtttgaacgaaataaagtcgaatcaggctattggtag

SEQ ID NO: 40675 - DNA, 279 bp, Escherichia coli
atgactaagcacactttaaccagagttacaaagacagcctttgacgaacttaaccgaatcaagaagattacagggctatcacatgcagcagtgatgaaacttgcaattaatcgtgacattgacgaacaagatttacttaatagtcgcttagaggctgcaagacaccatatcagaattacacaaaatgaccttgatagtctgaagtcttcaaatacttttgagctagatttagcaagacttctaagcatcaagattcacaagttatctatgggggtttaa

SEQ ID NO: 40676 - DNA, 555 bp, Escherichia coli
atgaacgacagagaatttcaaaagtttcttgaagaatccaagagacgcaacagacacaacggttacagctacacagatacccccaccagctacgaagtaccagcctttaccaaatccgaacgtaaaaacattgaatcggtcattcgtagcattacgccacgaggcagatatatgccaacacgcaaaacaacaaagaataacttaaaaactttcttgatgagctttgattcttacgagcaactaccatcaaaaattgaagatttaattatcggcacttgtcgcagttttggaagggataactatcaccggaaagttttctatttactgcgaagtcttgatgagattagctcaagtacagtaacaaattatcttcagcgtcaagcaactagacttagctatgaattaccaggtgataaatattgcgctaacttaaccaccatttgcatgaaagttattgaggcaatcaatcatcatgcggaaatgggaaatatcagccttacaaccagtgaaccagactttgaatttgacgtatacgcacaagcagaaggattttaa

SEQ ID NO: 40677 - DNA, 789 bp, Escherichia coli
atgagtgatgagtcaatcacagattccgtgaaagatgttgttaaagagcgtctgaaaaatcctttatggggttacatagctctttcatggtgtggctttaactggcaaaacttggcggtcttgttcatgagcaagtcatcagtaactacccgcatagagcaaatcacaagtgctgaaaatttctatttgttgtatttagcagcacctatcacagtagggattgtgttgtctgtcatatcgccatatttaaattatggtatagcatggacaaagcgatggttagaaagaaaggagcgtgaaggggttaaggcttcattactggctgaatacagcatgcagcaagaaaccgctgagaagaagattgaagcattgaatgctgagaagcttgctcaggctaaagcagatacggatattgctaaagaaaaagagcagacagatgccttaaaacgtcaggctgatgaacttagaagagaacttgaaggcattagaagagatattgctattaataatcaaacgattgaaggagccagacggttaactgaagatgttgttgaagagtactggcaatgggtggataaagctgctgagttgattgtagctattgatggttttgtaagagtcgataacagtacttccattgcagactttaaaaagagcatttcgcatattgttgcgaaagatgctctggctgcatctctaaagacggtcagggaaaggcagaaagaaaaaggcttgagcggaaatggcacgctctcagatgcattcagattgtcaggtggtcgtccttaa

SEQ ID NO: 40678 - DNA, 378 bp, Escherichia coli
atgcatgtacagcccatttcaactttccgtttgttccaggaaggtcatctgctacgtaatagcatcgctatttttgcgctaaccacgctgttctatttcattggtgcagagttacggctggttcacgaactttctcttttctggccgctgaatggcgtaatggcgggggtgtttgcccgctatgtctggcttaatcggctgcattactatgcgatcagttatgtggcgatgctggtttatgatgccataaccaccgaatgggggctggtttcactggctatcaatttctccaatatgatgtttattgttaccgtcgccttactggtcgcgcgggataagcgtctggggaaaaataagtacgaaccagtaagtgcctga

SEQ ID NO: 40679 - DNA, 288 bp, Escherichia coli
atgctggctgtgactgcactgattcccgccgtctggctggttacagatatctccaccgtgccgtccggcttggtggtcaccgtcggagtgaccgttgcgctgttgcctgccaacacgctgaccgtctgcccggcaagcgtattaccgaacgcatcggtgaccctcgcccgcagcgtgttcgccgtcgaaccgtctgccactgcgccgtccttaatgaccaccagctcagcgacctgcgccgtgctaacatcagcaataaagttcaccgttttactatcgctgctttga

SEQ ID NO: 40680 - DNA, 384 bp, Escherichia coli
atgttagttagtaaaagcaacgaaattaacactagcacatttataaatagtggaagttgtaatgaaagaaaatcttctaaatccatggagttactagcttatagtattataaaattaatttgtaaagaagctgcctcagggacgtataacggtgctcttgaaattttacaaaaaatgatgtctgaatgtaaatatcatgaaggcaatgcttttgtcattatgggagccggagaacaattaaaacgtattaaatatgatgctaatgaaaataaattaaaagtatacaacgtacactttgataataatcaagagttagttgctgatggtgagcctgacgtagtatttttaaaaaaacggtgtgggaagaccttctcgttaaactaa

SEQ ID NO: 40681 - DNA, 837 bp, Escherichia coli
atgtcatgccggaggcattgcgtcgttttgaggcaatggtggaagaagcggcacgcaacgccgaagccgcctctcagagcgcagcggcggcaaagaaatccgaaacggctgcggcatcatcgaagaacgcggcgaaaacctcagaaacgaatgcagctaacagcgcacaggcggcagcggcctcgcagactgcatcggcaaactccgcgacagcagccaaaaaatcagaaaccaacgcgaaaaatagcgagacagccgcaaagacgagcgaaaccaacgcaaagtccagccagacggcagcgaaaaccagcgaaacgaatgccaaagccagtgaaactgcggcgaaaaatagccagaatgcagcagccgaaagcgagagtgcggcagctggttctgcgacttcagcagctggatcagcaactgctgcggctaacagccagaaagcagcgaagacgagcgaaactaacgcaaagtccagccagacggcagcgaagaccagcgaaacgaatgccaaagccagcgaaactgcggcgaaaagcagtcaggatgcagcagctgaaagcgagagtgccgcagctggttctgcaagtgcggcggctgcttctgccactgcatcagcaaacagtcaaaaagctgcaaaaaccagtgaaaccaatgcaaagacaagcgagactgcagcggcgaactcggcgcaagcatcggcagcaagccagacagcagctaaagcaagtgaggatgcagccagagagtatgcaagccaggctgcggagccgtataaacaagtattgcagccgcttcctgatgtgtggataccatttaacgattcgctggatatga

SEQ ID NO: 40682 - DNA, 201 bp, Escherichia coli
atgcgactgtggttaattcgtcatggtgaaacgcaagcgaatgtcgatggtctgtacagcggtcatgcgcccacacccctgaccgcgcgcggtattgagcaagcgcaaaatctgcatacgctgctacatgatgtttcctttgacctggttttatgcagtgaactggaacgggcacagcataccgcgcgactgggttcttag

SEQ ID NO: 40683 - DNA, 714 bp, Escherichia coli; identical to SEQ ID NO: 28164

SEQ ID NO: 40684 - DNA, 201 bp, Escherichia coli
gtgccgaacgacgaaggcatggaagcagtgaaattgctggcgcggctggaaggcattctgcttgatcctgtgtataccggaaaagcgatggcggggctgattgacggtatcagtcagaaacgcttcaaagatgaagggccgattctgtttattcataccggcggcgcgcctgcgctgttcgcctatcatccccacgtttag

SEQ ID NO: 40685 - DNA, 1263 bp, Escherichia coli
ttggcatggagtcagttccccgtcatcttaggtatcactttaactcacaggtgtccagtaaatatgaacaggatcccagtaatcattatcaatggtttccttggcgcaggaaaaaccactcttatgaaaaacctgctcacacaggcaaacaggaatcacttagctgtatctgtcattgtcaatgatatgagcgatctggatgttgatggtgtacttattgcaaatacagaaatcgttaatattgcgaacaataatttcgtgagtatcacatctgatagtatcagcagtcagagtgggattaagacggtcgacaaggcaattaaaaatatgctcaggcattatttgcctgacgttatatttgtcgaaacatccggaggtagccacccactgccattaattaagtatctgcagactcatgagcgattacagctaaaatcacttttatcacttgtcgataccgttatgctcaatgatgactataacggagggaaagcactgatacctgcatttcaggagaatcttttccatggcaagcgcagaatagagaatttactggctgagcaaatcatgttttgtagcactttgctgttaaccaaaaaggatcgactgtcattcgacattgtcaccgatgtggcgaaagcaatccatcctctgaatccttacgtaaatgtgatagctgtgtcatgggggaaccttaaactagcagagttactaacccttccggattacgattttaaccgggtcggattacttatcagagaactggaagacacaatcacagtagaagaagcaaaaatttcagcccaaaatggcgaaataatttcgcgagtgattaaagatgacaggccattccacccacaaagattatgggaaacctatcattattttatgggaatgggtatttatcgtagtaaaggctttttctggctaccaggaagacctgacatggctctgctctggaaccaggccgcaggaagtatcaatctggagtttatcagctactggaattccggtgtattggcagaccctgataatcacctgacccacgaagagcgctctgttttgcagaaaaaagtcaataaaactatggggcggtttggagacaggagatgccatttaacgattatagggcgttctgatgaagtccatgattttacctccgccttaattaactgttttctttctgaagaagaaattgtctggtggcaatcaggtggcgttttcgcggatccctggcccgttaatatatcccggctgaactga

SEQ ID NO: 40686 - DNA, 234 bp, Escherichia coli; identical to SEQ ID NO: 10869

SEQ ID NO: 40687 - DNA, 174 bp, Escherichia coli
atgaaacgaattgcgtttgtgggtccgtcggggcaggaaaaacaacgttatttaatgcgttgcaggggaattataccctcgcaagaaaaacacagaccgtggaatttaatgataatggcgatattgatacgccgggtgaatattttagccatccccgctggtatcacgccttaa

SEQ ID NO: 40688 - DNA, 180 bp, Escherichia coli
atgactgaaaaaatcactgacgaggaactggcagatttgttggaggcgctcaaaagagcgcatggcatgggcgtttgttcaaaggcggttaagctggcacagcgttgcgctgatgtgttccctgctattgttgcagagttacaggaataccggaatgccgctaagcgaacttcagcatga

SEQ ID NO: 40689 - DNA, 516 bp, Escherichia coli
atgcgtacattagcattaacaaagatatggcgtatgcgggatgaaacgaaagaggccatgcggttgtttataggtggcagatgttacacggtggcaaacctcgaaagggattacctgggcgaagtggccgggtacagtgacgatcgctgggaagccccacagcgtgccgcacgcctagcagcggcggtaaagcgttacaagacctctgaaatgctgcgttttatttttgccaccgtcgcatacgatcccgacccggatcttacccctctggccgtgaagcgattatgcaaggcgttattcggtagaactgggagccagtggctgattgtcgagatttttggggagaagggacggcaacaccgcagcgatgacagcaatccggaggccgtagaaaaaatagccgcaagatatcgccgcgaagccggacggcactggtctgcaacgctggccgaaattgaacgggtaaagcgtacctaccaggcaggaatcaaggcctccaggaaagacgagaactga

SEQ ID NO: 40690 - DNA, 264 bp, Escherichia coli
atgataacaattccatttcctatatttaccgcaataacaattgtgctgtgcctcggatatacaatcaacttcaacaaatatatttggttaacttcccttgttctgtatttagggttttggttttcattcaatgcgagcgatgttccatcattcgatattaccgctattgacgatactatctggtatgttattgggaaagccactatcgctattattgcagtagcttcaggaatgttttacctgaaaaaattcatgtcaaaatag

SEQ ID NO: 40691 - DNA, 255 bp, Escherichia coli
atggcaaacgggattaatacagtaaacttaaacggcgaagttaaacacataactgaactggacgatctgtcactgtgcaatgaatggacaaagattaaagaagaaaacaatcatctatatgaaattaacagagaagcaaacagaggatggcgcggtttcatcctgaagttaattggtgttaacctgccagataaaagaaccgtgtttataaaaggaataaattcaaaaggagagaatgtatatccagatatttaa

SEQ ID NO: 40692 - DNA, 183 bp, Escherichia coli
atgcagtataggtctttgggatttccatcatcagatgctacccacccatttaccaaaccccgttcgaatatcttatctattgcccatctcatattaaatataaccgataatttggtggatactaatagtaattaccttgttattgaaaatataattattgttatttttagcctcattaattaa

SEQ ID NO: 40693 - DNA, 456 bp, Escherichia coli; identical to SEQ ID NO: 20158

SEQ ID NO: 40694 - DNA, 228 bp, Escherichia coli
atgaatagagaattagatttgaccgtggaagacctgagcacaattgctgaatacatgcgcggcgacgatcctgataagcctgtcacggttgatatgaaatatttaaaatgcgcttttatgacttcttcaagattgataagcattaaggcaattataaaggcgcgctgggaaagttggcaggaatacaaagcaaaaaataaggcaaaaagaaataatgcggcaaattag

SEQ ID NO: 40695 - DNA, 663 bp, Escherichia coli
atgaataaatcaaaagcaatcggtataattagccatcgcactaaccctgagtgttacccatcgtttgaggtggtaacatgccgcacagaatataattttggaacatactatttattgggtgttcgcgctgacaatggtggcacttattcggctatggcttcaggttggaaatttgaaaaatacgatgttttatcgaataaggatgatgacggcatgaataaagaaagcgaaattattgatgaattgatcgaagatgaacgacataattgcgaaacgcaaccagaaaaaactgaatggtgggcaggtgaaaagcctccggttggtgtgtggcttgattgtgtaggtcttacgagcggaacggttctcgatgtcgttaaatttaaatatgttggtgataaatgggctatatgtgaaagcaaggaagatttaggcttagagaggccgctatcatggacaacatgctcttttaagctgcgtatagatccgaaagaaaaggcgctcgctgaaatagcgttcgcgctggctactaaggtaatgggtgaagacgcgtcaaaagagattgactttaaccacgacaatgatttttcgtgcgattatcgcaatatggcgcaagctattattgatggatgtatcggacacgttgaatacacaggggatagataa

SEQ ID NO: 40696 - DNA, 135 bp, Escherichia coli
atggggagggagtgcaataatgaatacaccagtaaagcaaaagccgcattacctgataatgactctcttatgatgtttctcactatttccagtttttctttaaaagataacttttttatttgtacctctgattaa

SEQ ID NO: 40697 - DNA, 144 bp, Escherichia coli; identical to SEQ ID NO: 22420

SEQ ID NO: 40698 - DNA, 288 bp, Escherichia coli
atggggctctgtgcgcagttcacctcgggagcacagcgtggaagcgaagttcagggggtttttgacgatccggagtcgctgggttttgccggtggcggggtccgtattgaaggaagcagcccgtcattatttgtgcggacggatacggtgcgtgccgtgcggcgtggtgacacgctgaccattaacggcgagatgttctgggtggatcgtgtttctccggatgacgggggcagctgttatctctggctcaaccgtgggcaaccacccgctgttaaccggcgacgataa

SEQ ID NO: 40699 - DNA, 240 bp, Escherichia coli; identical to SEQ ID NO: 8148

SEQ ID NO: 40700 - DNA, 258 bp, Escherichia coli; identical to SEQ ID NO: 29581

SEQ ID NO: 40701 - DNA, 276 bp, Escherichia coli
atggaaaacaataccatcaaatgcccgtttccatggtcagaatcaggtcgtagttgcgacacagacggcggctgtttagcgacggtgttatatggcacttatcccggctggtatgctgctgttgttttgctgttgacttttggtttatcggcgttgagcggtatgtcaacaggtatggcaggagctactatcagccttccgttaatcgctatcgtaggatttgtagctggtaaggttatttttgctgacaatgtagtgttttggcgaagaatgtag

SEQ ID NO: 40702 - DNA, 294 bp, Escherichia coli; identical to SEQ ID NO: 4783

SEQ ID NO: 40703 - DNA, 348 bp, Escherichia coli
atggtaacgaaaaccatcactgaacaacgtgcagaagtacgtatttttgccggtaatgatccggctcataccgccacaggcagcagcgggatttctcagccaacaccggcactgacgcccctgatgctggatgaagccagcgggaaactggttgtctgggatggacagaaagccggtagtgcggttggcatactggtactgccgcttgaaggcacagagacggcgctgacctattacaagtcggggacctttgcgacggaggcaatccgctggcctgacagtgtggatgaacacaaaaaggccaacgcctttgccggtacagccctgagtcacgcggcgctgccgtaa

SEQ ID NO: 40704 - DNA, 312 bp, Escherichia coli; identical to SEQ ID NO: 9190

SEQ ID NO: 40705 - DNA, 711 bp, Escherichia coli
atgaccaaatggacatttgaaaaaaatattgttgcacaaggaattgctgcaaaaaataaatctggacgtattccggcgattgacattcaaccaggctctggtcttttgaagcgtcatcaaatggcgttgtatgaaagcgcaatcaacttcagagcgccaattgaggaaaataaatgtgggcgatacaaccccccagggggatgtgtggcggtatggtatgcctctgactctgcgttaacggcggcggcagaagcttatgggcgtttgctccatctcgaagggacgatttcttatcctgaatcggtactttcacaacactatatgtgctctgtggatgtcatgaggccagtgaaagtgatcgatgttgtagcgctctgtgagttgttacatattcctttggatagcttagagaacgaggattacacttttactcaatggctaatggaacatctttatacacatttcgggcgtgactatgacgggatagcctatacctcaaggcataaacgctataaacgctgttatgccttttgggaacgaccggatagtacaccagcctttaccgatacccctcaggggatggtgccttatgccagttacatcgaaaatgacgaaggtatcttccctaaagggtggcacaaaggaacgatgtcaggtgaagagatgttcgaagaactgcttggattcgaaattacgccagaaccaatgtaa

SEQ ID NO: 40706 - DNA, 645 bp, Escherichia coli
atgatcaaacacaccgcagcagaaagggaaaccaacacttcagctaagctgaatgaataccagttgaaccttctgaaaagaattaacaacctcgctatttccctgatgcctgaatttgaagacaaaaaccaggcaattaatgctatcacgctggatgatagttcactgatgcaattgctctacaccgttcaactcgaacagaagactcgtgtcaatgactacgaactacgtaaagtgcgccgtcgtcgcgaaaatctggaacgattttatcgtgggcttcaggagttaggcggtacgctaaaggtaaatgacgtggtcgatattcttggaatcacccgccaggcgatcaacattcgcgttaagaagaacaagcttttagcattcaagcagaacggtgattttattttcccgaaatttcagttcacagataacgggctgattcccggctttgaagacgtaatggcggcatttgacgagaatacccatccaatgctgaggttgggtgtgctgaaatcaccaatagaggttaatagcgaaggcctgaaaaagacgccgattcaaatcatgcaggacggcgctaaaaatagtgaacttagtctggctatccgtgccgctaaacagttcggaaatcatgtatccagttaa

SEQ ID NO: 40707 - DNA, 924 bp, Escherichia coli
atgttacataaaaaatcagcacaagaaaatgtagccttcgggcttgctgtacttaaatactatcttcgtttcaactccaaagagaatttacaagatgctaatgtgagttcggaggaattgataagcaatttaataaacattttgaaagatactaattttgtttgcacgtcagaaatttcagccacatatccaggaatagatgccttagacaaagaaaataaactaggccttcagataacacatacaaaaaatacttcaaaaataaataaaacaatagataaaatacgcattaataaagttaacgaagaaattgacaccttatattttttcattacatcggaaaggcagaaaaaatacactatcaaagcacaatgtccaaaactaaatgtcacaacaaataatatattagactttgatgacctagctaaactgttatcgaaaagtcaggataaactgagtaaagcagaatccgaacttatgaaagcaatgcctcgtctctaccaagaaggaaaagaacggtatcaagcaatgcttaataacattcttgaaaccagaaataaactagatcgaagagtattcactgctaacaaaatcttagaagaacctgaagaaatgctgttgtccctcaaagagatcaggatagatatacaaaaagatggcataatgaacaaagccaatcctgctgtctctgattcatttaataaaataataaatattattgatgatgtagagagtaaaattgctgtacaatatcccgatgaatacaaaaaatataaagcaaagatccttccatcgtggaattctccagaaaaagaagaatgcttagatattttaatggctataagaaaagatgttttggaacaaatagacaatattgatattgaggtaaataagctaaaaagcattcttgataataacatttag

SEQ ID NO: 40708 - DNA, 312 bp, Escherichia coli
ttgataaaggatactcatgcgtgtaaaacgcaaaataccctgagtaatcagggtattaaacgcggaaaagtaaaggttgagcgctttacattttccattcacaccagaggcgtgactaaatctaaaattgattctacggcaacgttcaatctacgtcaaatcgccaatggttttcctgttatgaaaattaccggaggcttcatgttgttaaccatcatcgacacctatcttcatgcttcattactgacacagatactggtaatcccgtttatctgtgcggtggtgtgggcggtaaagaaaatccgggtataa

SEQ ID NO: 40709 - DNA, 1128 bp, Escherichia coli
atgacgattacggcctactccaaaacgttcaagcgtgaacttgatgccaggcagttgaaaaatctttttgatgaaaataatgccgattcagcgctgagtttccgggattttgtgaaagcagatattgaatgcccagcctgcaatgtttctggcggtcattatgttgcagaagctaaatcgcagtcgaaaggcaatgttgtaaagcaggctcattttgcatttcgcgacagccaaggaaaagatactcatcttcctttctgtgatttttacactggttcagacaagctaaatgtcgtttctaacgacgggcgtgttgatttcatgcgttctggctctgaagccacgcaactgatcggcttaatggtctgtgccgggattgaagccaatatattcactcagcaagacattcggaacatgcgacaatggttcctagacttgcgtgagcaaggttcgtttatcttcaatctgaatccacatatcgtacagattgccagagcttctctgataagaaacaaaagaaatagagatcaatacattgttgatatcagtgaaaccaagaatagttggtttgatattgataatgaagtctaccagtcgctttacttcaagtttcccgagttggctttggatcatcgggataatcccgaactatgggggataaggcttaaaggggttgtcactaaagctaaaagcattattgtgaaggactcgggtacatccacatttgataggtcaatcctttctgaaaaatatcagttggcaacacaaattgcatcactggttagaagtactcatccacggctacgcgtactgttaggatacacaaccaacgctctgaggagtagcaatccactgatggcatttgcagcgcttctgctgtttgtatctgattgggatgttacagtcgctgaaaagaagattaaagcgatattggccgtagaaacagtgactgacattaccgctggtaatgtggttggcatgaacccttttatccattatagcgcgtggatcttggttaaagccctgcatgaactacaatctgagctggggtacgaagttgattttgacgctgagtttaacttcgaaaaagaaagactgatgaaactatattttcctagtgagtcataa

SEQ ID NO: 40710 - DNA, 228 bp, Escherichia coli
atgagtggtattatttatagtatagatagtgttgaacctgataataaattaacaaaaaaaatgtattatgcaaaattatctgatgttgttgatgggctaaataaaaaagaatatataaagaaaatgattatggaaataacttcagcattgcattgtgatgtttttagctctaacaaagcattaatagagagaaaaaacaatgcgttaagtgatatatttggtatctag

SEQ ID NO: 40711 - DNA, 930 bp, Escherichia coli
atgttgtccgggggtgcggtcatccttgtcatgtttcggttctccagtgtccgttatcttgacaaaagcagtttcccaaaacatgacaaggatgtcaaaatattggacagaccccggtcaccagctatgtccgcacccccggtcaccagctatgtccgcacccccccccataagtcgttgatttacaagccttttgaaaatcgcccttctctcattctcttggtgcttgttttggcgctttcagcggggcacccctgcggggttcccccacgccttcggcgcggctccccctccggcataaagtgcccccccagcgggggggcgcatcggttccccccgactgcgcggccttcggccttgcccagcggggcgctgcccctctggactccccacactcgccgccgtgaggctcggggggcaggcgggcgggcttcgcccttcgactgcccccactcgcataggctgggtcgtttcagtcgcgtcaaggccaagccgctgcgcggtcgctgcgcgagccttgacccgccttccacttggtgtccaaccggcaagcgaagcgcgcaggccgaaggccgaaggcttttccctcctgaaaaaattaaaacttggtggagcaaggccgaaggccgcgcagttggagccggtgggtatgtgggcgaaggctggggagccggtgggcaatccctgtgggcaagctcgtgggcaggcgcagcctgtccatcagcttgtccagcagggttgtccacgggccgagcgaagcgagccagccggtggccgcttgcggccatcgtccacatatccacgggctggcaagggagcgaagcgaccgcgcagggcgaagcccggagagcaagcccgaagggcgctgcaaccggcgcagccggtcacgactttgcgaagcaaagtctagtgagtacactcaagtattga

SEQ ID NO: 40712 - DNA, 990 bp, Escherichia coli
atggcggcatacgcgatcatgcgatgcaagaagctggcgaagatgggcaacgtagcggcgagcctcaaacacgcctaccgcgagcgcgagacgcccaacgctgacgccagcaggacgccggacaacgagcaccgggcggccagcagcaccgatgaggcaatgggccgaatccgcgagctgctgccagacaagcgccgcaaggatgcggtgctggcggtcgagtacgtcatgacggccagcccggagtggtggaagcaggccagccaggaacaacaggcggcattcttcgaccaggcgcacaagtggctggcggacaagtacggggcagatcgcatcgtgacggccagcatccaccgcgacgaaaccagcccgcacatgaccgcgttcgtggtgccgctgacgcaggacggcaggctgtcggccaaggagttcatcggcaacaaggcccagatgacccgcgaccagaccacgtttgcggcctctgtagcggatctggggctgcaacggggcatcgagggcagcaaggcacggcacacgcgcattcaggcgttctacgaggccctagagcggccaccagtgggccacgtcaccatcagcccgcaggcggtcgagccacgcgcctatgcgccgcagggtttggccgaaaagctgggaatctcaaagcgggttgagacgccggaagccgtggccgaccggctgacaaaagcggttcggcaggggtatgagcctgccctacaggccgccgcaggagcgcgtgagatgcgcaagaaggccgatcaagcccaagagacggcccgaaaccttcgggagcgcctgaaacctgttctggacgctctggggccgttgaatcgggatatgcaggctaaggccgccgcgatcatcaaggccgtgggcgaaaagctgctgacggagcagcgggaagcccagcgccagaaacaggcccagcggcagcaggaacgcgggcgcgatcgaggcggctacagccgatag

SEQ ID NO: 40713 - DNA, 510 bp, Escherichia coli
atgggccaccagaacgccgtggtgatcggccaaaagaccttggccaagctgctgggtgtgagtgaacgaaccgtgcgccgcgccgtggcggatctggttgaagaacgctggattcaggttgtccggcttggccgtggcaaggaggccgcctacgtggtcaatgaccgcgtggcgtggggtcagcctcgcgaccagttgcgcctgtcggtgttcagcgccgccgtggtggccgacttcgacgaccaggaagaagctctgctaggccacggcgacctgcgccgcatcccgaccctataccccggcgagcagcagctaccaaccggccccggcgaggagccgcccagtcagcccgacattccgggcatggaaccagacctgcccgccttgaccgaaacggaggaatgggaacggcgtgggcagcagcgcctgccgatgcccgatgagccgtgttttctggacgatggcgagccgttggagccgccgacacgggtcacgctgccgcgccggtag

SEQ ID NO: 40714 - DNA, 390 bp, Escherichia coli
atgaaaattcgcataatgctatttatattaatgatgatggttatgccagtgagctatgcagcatgttatagtgagttatctgttcagcacaatttggttgttcagggggattttgcacttagtcaaacacaaatagcgacatatgagcataattttaatgattcgtcatgcgtgagtacaaatactatcacccctatgagcccgtcggatattattgttggactttataacgataccattaaattaaatttacattttgaatggaccaataaaaacaacatcacgttgtcaaataatcagaccagtttcaccagtggttattcggtaacggtgacacctgcggccagtaatgcaaaagtgaatgtttctgcgggggcggcggttcagtaa

SEQ ID NO: 40715 - DNA, 144 bp, Escherichia coli
atgcagttgaaagacgccggattacggattctggtttataccgtcaataaaccccagcgcgcggcagagttgctgcgctggggcgtggattgcatctgcaccgatgcgattgacgtgattggtccgaactttacggcccaatag

SEQ ID NO: 40716 - DNA, 555 bp, Escherichia coli
gtggcgctggtccacagccaccccggtggtatgccctggctgagtgagaccgaccggcggctgcaggtgcagagtgatttgccgtggtggctggtttgccggggagcgattcacaagttccgctgtgtgccacatctttccgggcggcgctttgagcacggggtgacggactgttacacgctgttccgggatgcttaccatctggcggggattgagatgccggattttcatcgcgaggatgactggtggcgtaacggtcagaatctctatctggataatctggaggccacagggctgtatcaggtgccgttgtcagcggcgcagccgggcgatgtgctgctgtgctgttttggttcatcggtgccgaatcatgccgccatttactgtggtgacagcgagctgctgcaccatattcctgaacaactgagcaaacgagagaggtacaccgacaaatggcagcgacgcacacactccctctggcgtcaccgggcatggcacgcatctgcctttacggggatttacaacgatttggccgccgcatcgacctgcgtgtga

SEQ ID NO: 40717 - DNA, 672 bp, Escherichia coli
gtgcgcatcgtagggaaagaacgcgctattctggcgaaatacatccagttcaatcagcctcacgccatgttctggctgggatttgatgttgaccgcatcggcgcagccattgactggagcgaccgcaacgctcccgcacctacgctgaccatcaccaaccccgaaaacggacacgcgcacctgctttatgcgctggaaacctctatacgcacagcacctgacggaaaaatgaaaccgttacgctacgcagctgccgtagagaatgcgctacgtagaaaattgggagctgacacgggatattcggggctaatttgcaagaatccgaaccacagtcactggaaaattgccgccgattatggtttaggccgtaactgcactctgttcgacaaaacccgcaagtgggcatatcgtgtcatccgtcaggggtggcctgagtatgagcagtggttacaagcctgctatgaacgagcctgtgcctacaatttacaattcgtatcaccattaagtgaaaatgaagttcttggaatatcaaaaagcatctcaaaatggacagcgaataatttttcagaggatcgctttattgagtatgtaaaaaatacgcaccgttcagaaattcaaagaaagagagggggtaaaggaggaaagctaaggaaggtgcgaacaagttcctga

SEQ ID NO: 40718 - DNA, 237 bp, Escherichia coli
atgaccgagatggaaaggcagcttctgagcgccttagaaagcttacaaacaagttatgaacaacagcaacaggcgtggcaggacagttacagcagcttgcaacgcatgttcgagactacctcacaggcactggagcgcaacggcagggtatgtctgaacttgagcaatcaggtgaacgccttgcacgaacaggtcgaacgcttgagcagcgatctgagccgattaacacgctcgtaa

SEQ ID NO: 40719 - DNA, 282 bp, Escherichia coli
atggcaggatgcgcaacaaagcaatatccacaggccgcgaacgtcaccggtccagaatcttccgcaatggattgcaaagcggtagctctggaaatcgccaaaacgcgcagtgtacaacaagaaattgaggaaaccggcgaatttgacgggcgcaccgtattaggtttcctgggtgattttgggataggaaatggcatggcaaaaggcgaagcccgcaaaaaagcagctaaccggctaaatcagctggaagccctgaaggctgcaaagtgtgcagatcaataa

SEQ ID NO: 40720 - DNA, 960 bp, Escherichia coli
gtgttcccgccggtgctggtgcagatgctcgaccggctggaaagtgaaatccttactgaccgggtgagtgaggaaagccgccgctggctggcatcgtgcggcctgacggtggcgcagatgcaaaaccagatggacccggtgtacacgccggcgagaaaaatccacctgtaccactgcgaccatcgcggcctgccgctggcgcttgtcagcacggaaggggcaacagaatggtgcgcagaatacgatgagtggggcaacctgctgaatgaagagaacccgcaccagctgatccgcctgccgggtcagcagtatgatgaggagtcaggcctgtattacaaccgccaccgctattatgacccgctgcaggggcggtatatcactcaggatccgattgggctgaaggggggatggaacctgtatggatatcaattgaatccgatatcagacatcgaccccctgggtttatctatgtgggaggatgcaaaatcgggggcatgtactaatggtctttgcggcacactatccgctatgataggtccagataagtttgattctatagatagcaccgcatatgacgccttaaataaaataaatagccaatctatttgcgaagataaagagttcgctggtttaatatgtaaggataatagtggcagatatttctcaacagcacctaaccgaggggaaagaaaaggatcatatccattcaatagcccttgccctaatggtactgagaaagtatcagcttatcatactcatggtgcagatagtcatggagaatattgggacgaaatattttcaggcaaagatgagaaaatagttaaaagtaaagataacaatatcaagtcattttatttgggcacgcccagtggtaattttaaagcaatagataaccacgggaaggaaataacaaacggaaaaggattacctaatgtctgcagagttcatggtaatatgtaa

SEQ ID NO: 40721 - DNA, 201 bp, Escherichia coli
atgctccaggaattgccagtgaaattttgcgcgggcgcgacgttcatcaccggcttcaatggcagtggctacagcgacggcaccttcttcctttattgcctgttcgtccggaatggcggcgcaaataaagactttactcattttgttttacctcattacagatttaagggtgaacaaatccctgccattgctggcatataa

SEQ ID NO: 40722 - DNA, 1521 bp, Escherichia coli
atgtttttaatttcaattattcaaatgttctcggttatgattataatgcttaatataaaaataaaagatgcatttagagcaattattctgcttttacttctattactatccatggttatatctattgaaataagcagcattatatcaataggtgagtacatacccacacttgcactagcaaatatatcagagacaaatagtgttggctggaaaataaaactactaccttttcttgtgttcttatcatttatgattgcatcattgattttgaaaagattgataaaagaaaaaaaaataagaaatataatggttgttgtttttttattatcattgttaataccaatatctccaataaatgcttttttttcttcatcatatgaagtttattcggaagcaaaagaatacaatatgtcaccacatgaaataagtgatataaagtcaaaatacacaaaagaaatagtaacaaacgacagttactcacatgaaataataaatggaaacggaaaaaatattttagtaatatttattgaaggtatgtcttcattggtaatatctaaggagctaaccccgaatttatatgaatttagaaaaaaatcaatatcatttaacaactattacaaccataccgcagctacatttagaggtttaagaggacagttaacctcatcatatcaaatgaccggtggttactataaagataattctggccttggccaagcatctaaagtagagatcgaacataaactaaatacttacaattacataacaaaactaccaatcatacttgaggaaaatggttaccatacatattttcaagcatctaattcaatagatgccccattgagtttaatgctatcaactttaaagtttaatcatatatacggaagggaggactataacaaaaagtcaggtgaactcacagacaaagagtctttcgatttattatttaaaaaattaaatgaggctaaacaacctttcttctatggtgtttatactgtaggtacacaccttggcttagatagccctgatgtaaagttttatgatgggagaaatgaatatttaaatcactttcatcaattagaccattggtttggtgattttatatctcattttaataagacaagcttatcgaaagatacaattgtcataatcacaagtgaccatgcaagttacccatcagaagattacaaaaaaacattcaaaactgataatactttttttgttgatcagattccattaataatatggagtaatggtgttgagttcaaagacattaatgcacacggtttaaattcactatctttaacgccaacaatactagatattcttgggatcaaggagtcacacaacatgttcataggtgagtctctatttgaaaaagaaaaaaataaaaatgaactcaactgtacatctgcaataggtgacctgtatgtgaaaacgtgtaatgggaaaatggaaatcgagaaaagaaaagaaaaaatagaattaataaaacaattgcaactttttggtgatagataa

SEQ ID NO: 40723 - DNA, 147 bp, Escherichia coli
atgaaactctgcagccgtgatggtcatggttttttgttcatcaggcgaaggggaatcttctccggatttcaggcggctgatacagaccagcaggaagcgctgttcctgcaaagtgagcttgtagcttgcctcgataagggcgtttga

SEQ ID NO: 40724 - DNA, 522 bp, Escherichia coli
atgacatatttattgcgtaaaatatcccatagtaaatgggaatgtaataaaggtagagcacctgacaatatatccgcagacgcgataacaggttgcacaaggacctctaataacaccttgtcagtttgggtttctgactctatcgattttcaagatgaatcggtagagaaaattattgttgcccttgccaccacgatgtcagagccagctacgatagatttggtttggcttgattcacaatggtttgaagataaaggtattgatatttctcgtactgaaggaaatactttgtataaatcagttaaccatttgcatcgagatctgtcagaattaaatcatagaaagcttgctgaggttggtgaacatatacttgagcaattaaaatctaaggattattataaaagaatcctcaagagtgaacttatagccttagtttttaaatggcagcagcgagatggtgattttgatattgatgatttgggacagaagtggtctaagtcattaaataaactgattaactga

SEQ ID NO: 40725 - DNA, 648 bp, Escherichia coli
atggtaaagaatagttttataataagtgatgaaaagccttttggcttacctaagtttaaaaatggggtaagttcaataggtgcattttctgattattatgatggtaacaatatcatttacgctgatattaaaagaaatgagctgtcacatagcaaaacaaatggtggctttcaattagagactgagtcaataaatcaaggttcgtcaactaagcagaactttgaaattcaggtttcaaaatgtacctctagactaattgagttaacatgttcagaagattacattgaaggcgagataagcaagacacagatttacatggagttcttgtatgataaaaatcaggatttattccaagagtcctttcaaaggacatgggtacaattgtacagaatgaatgatcaacatgtaaagaacttcattaattttgcatcgactattgaatatgaatggttaggtaataaagctgacgctatgattatgggagtttgttctcttgagaatgaacttatatttgaggcagcgatccgtgcagttgagtcttggggggaaaaatcatttattccagtccttgaaagaatgaggaaatttgatgctgattgggtggaagaatataaagaagcagttattggatatttgagaagtctataa

SEQ ID NO: 40726 - DNA, 696 bp, Escherichia coli
atgaaattgattgaacagacgcatcagattaattttttcacaaataataatgatatagttccaaatacactaactattggatctatgcttgataagattggaaaatttggatttgtacctacttttggtcaggagattaatgccatcactggtgagaaaaagcaaattcttatcatggtagataccaatcaaacagtaagagtcgagtttcctagccatggaatcatttttaatggtttggggggggaacctcaagcgttttcagaaatggttctatctatatctagggaactacaaaacgtatttccgatgaaaaaaggaaataggatagctgttctgaattcacgtatctatcaaggggatgaatctgtttactcttcgctttacaatgctttgtttacctataaaggtgttaatccatttgagtgggacaatcgtatagctgtaaggaaaaatattgaagagtatcaggaagaaattaatagtattagtacaattagacgcgctgaaatttcagctccatttttgaataatggtatgccaagtgattgcgtattatttgaaactgatactaatactcttcctcaaaatggatatatgcggtttggttgggatgaatatatccgcgtgctagagttattgtgtcaggacaatcttaaaactattgataatttacaacgctacacttctctgtaa

SEQ ID NO: 40727 - DNA, 1032 bp, Escherichia coli
atgtctgcatttaccccggcaagtgaagtcttgctgcgtcacagtgatgatttcgaacaaagccgtattctttttgccggagacttacaggatgacctgcccgcgcgtttagataccgcggccagccgtgctcatacccagcaattccaccattggcaggtgttaagccgccagatgggggataacgcccgtttcagtctggtcgccacggcggatgatgtcgcagattgcaatacgctgatttactactggccgaagaacaaaccggaagcccagttccagttgatgaatttactttctctactgccggtgggcacggatatttttgtcgttggcgagaaccgcagcggcgtgcgcagcgccgaacagatgctggcagattatgcgccgttgaataaagtcgacagcgcccgtcgctgtggcctctattttggtcgtctggaaaaacagccggaatttgatgccgataaattctggggcgaatacagcgtcgatggcctgacagtcaaaacgctgcctggcgtgtttagccgcgacggtctggatgtcggtagccagttactgctctcgacgttaactccgcacacgaaaggtaaagtactggatgtcggctgtggcgcgggcgtgctttctgttgcctttgcgcgccattcaccgaaaattcgtctcactctgtgcgatgtctctgcgccagcggtagaagccagccgcgcaacacttgcggccaacggtgttgaaggtgaagtctttgccagtaacgtcttttccgaggtgaaaggtcgttttgatatgatcatctccaacccgccgttccacgatgggatgcaaaccagcctcgatgcggcgcaaacgctgattcgcggcgcggtgcgtcatcttaatagcggcggcgagctgcgaattgtagcgaacgccttcctgccttacccggacgtgctggatgagacatttggcttccacgaagtgatcgcgcaaaccgggcgcttcaaggtgtatcgcgccattatgacccgccaggcgaagaaaggttaa

SEQ ID NO: 40728 - DNA, 300 bp, Escherichia coli
atgaatatcgaagaatttgtaagcgaagaaaaccatatgtgcaatttatgcggagatcttttttacaagatctttgaccaagaagtgatttatgacttacctaataacgagtttaataaagaaatcatttactggctcagtcagtaccttgtgggaaatctgagagaacctttagactcgatctctgagcttaatgcttgcaaacagatatatgtttacgagacctggttatctctaattaaatgtcctgatgaattgaaactcctagcgaagcggataattttatatctaatggattaa

SEQ ID NO: 40729 - DNA, 426 bp, Escherichia coli
atgttcaaaaacaatctcagccccacaatactttctcatcataaaaaagcacccgaaaaaaagcacataaatgatttagttcgttctcattgtgtcagtgtccgtcttaataactcggaacttcaattactcaacacaaaacgaggttctacatctaaaggtgaatggttacgtatggcttccttgcataagctccccacgattgtacctcctgtaaatatcgatacatggaagactctgggtgagatcaatcagaagctaaaccgtattgctcttcatatcgatagtaagagtaaagacagccagcttactcatacagagcttttcgttgtgaagcgacaactggaagagcttcgccagcaccttctaaaggctgacatatggagcaaatcctatgaagggtatgcagaagatcaaaaggggtaa

SEQ ID NO: 40730 - DNA, 1191 bp, Escherichia coli
atgaagggtatgcagaagatcaaaaggggtaagagcttcgctggtgtggttctctatgtgttaaagccaggctcacaccatagaaccgttccagaagtaattggtggcaacatgacaggtgattgctcacaagagttaatcgacgaatttaaccttacgaaagagcttcgcttagatgtggcaaaacctgtttggcacaattcacttcgattacctcaaggagaatctcttaccaacgaacaatggaaacgaattgctgacgattacatgaagcgaatggggttcggtgatacacacctctgttgctatgttcttcatgatgatcaggctggtcagcacatacacattatcgccagcagaatcgacatagccggtgggaagctctacttgggtaggaacgaaaaccttataagcacacgggtcattagtgaactcgaaatggctcatggtctgacagtgaccaaagtgaccaagacagcaccatccctctcaaatacacaaccgaagcggaaaagaatctctcgcaacgaacagatgctatcagaacggactgggcttccctgccccaagaaatcccttcagcagatacttgataaaagtttggcagatacaccggaccttttaacttttatcaagaggctggaagaagctgaagtatcctggaaggccaatattgcctctactggtaaaatgaacggcttttctttcgaatacacaggaatagctttcaaagcttcgcaattgggtaagagctacatttgggcaaatcttagtaaccgactcaactacaaccccgaccacttagaagttctgcgaaagggtatacagacgaaggaagctcttcctgctcctgctcctgctcctgctcctgctcctgctcctgctcctgctcctgctcctgcaacagttttgataaacattgagagaaaggaaagtatcagtgaaaaaatttctgaactcgaactacgactcaaagaagacagaagaaacgaaatcgtagaaaagattcttcaaaaaaactcagtacaacagcaaaagcatctcaggcttagtagctggcttccctttttacaacggctcatagagcttctccgaagctacggtaagagcattcttcacaagcccctccctggattctcaaatctctatgtaacccgacctttacataaagaaaggaaaattcatttataa

SEQ ID NO: 40731 - DNA, 315 bp, Escherichia coli
atgaaaacatatgctatcataacaatcattctttcaacttttttattaacagcctgtaattctgaaccttccgataaagacatctataatgtattcaaaagtgttgtagatagagcaaacgcaagtaggaaagcttttgattcaagagtttcagaaaaagaccttctaagaatcgactatgtgaagaaagtaagttgttcagaagaagcaaataatgtatataactgcattgtagatgcttctattagcaacaataaacagacaaagccaatcaaattagtcaaagctgatggtgtatggaaagaagttcagtag

SEQ ID NO: 40732 - DNA, 690 bp, Escherichia coli
atgtcgatgattcatgcctcgcgtggtgtgttaaaacccgccggtgtaatgctgaaatcagagtgtgcagtggtcgcgggaatcgcgcaagcagcactaccccagagcgtggtagcctgggagtatctggtggaagattatgatcgcattcgcaatgacattgaagctgtgctgccagagtttgccgactataaccagcgcatccgtcatcctggtggttttcacctgataaacgcagcagctgaaaggcgctggatgacgtcgtcaggtaaggctaatttcattaccagtaaagggctgttagaagatccctcttcagcgtttaacagtaagctggtcatggcgacagtacgcagtcacgatcagtacaacacgacgatttatggtatggatgatcgctatcgaggggtattcggtcaacgagatgtggtctttatgagtgctaaacaagctaaaatttgccgtgtaaaaaacggcgaaagagttaatcttattgcactcacgccagacggtaaacgtagctcacgccgcatggatagattaaaagtggtcatttaccctatggctgaccgctcactggtgacctattttccagaatcgaatcacatgctaacacttgataaccacgatccattaagtggcattcctggctataaaagtattccggttgaattagaaccatcaaattaa

SEQ ID NO: 40733 - DNA, 1929 bp, Escherichia coli
atggatcttgtagatagtgtcgaagcaggtaagctgacgatcagtgaattgattgatgccctggcgaaagataaaaattactcagcttccaagtgggatcagcgataccgtgaatttacgaccttgctacaacaaacctcaactttttctgaacctgaaacggatggtttagtcaagaggctctggtatgaacgcgataacggtattgccagtattcgccagggcgttccatccttagcagaatatcagcaaagcctgccactgcttagagaactaactgaacgaattcggcaacagccggatgaagaaacttaccaatatgttggcaatgcactacaacaagctaaagaaaacggacttctcaagcgtatgtataggagtttgagaaatcgcgtctttgccgcgttctcgccagaaaactacaccagtactgtggatgagaatgcttttagtaaagcagcagaattcctaaatcagcacttccatctcggtctggcactgaccggaaattggttacagaaaaactatgaattgaaacaagccatacacgcccaatctcctgacacagatccttattacgtgaatatggccatctggcatctctatgaattgctccgtgaacgcgataatgaacaaaagcaggagaaaatagcgagcactacattcataaccagcaatgagcccatcgagaacaagatcatcctacattcaccaactaacgtgatcttctttggcccccctggcactggcaaaaccttcaggttgcagcaaaaaatgaaagagtacacttctcatgctgttccagctgatcgtgatgcctggctggattctcgccttgaatcgttgaattggatgcaggttataacgctggtgctgctcgatcttgggaaacgagccaaagttcgccaaattattgaacatatgtggtttcaacgtaaggcattattaaacggtcgtaatggcaacctatcgaatacagcctgggcagctttgcaatcctatacagttcccgagtcgttaaccgttgattataagaatcggcgtgagcctgccgtatttaacaaaacagataacagcgaatggttgctagttgattcacagctcgagcaagtggaggatttggtagagctctacgccgaacttaaacgaggccctaaatctgccgaagccatccagcgttttgcggtggttacgttccaccaatcttacggctatgaagaatttattgaaggtatacgcgctcgctctgacgagagtggcaatatctcttatcccattgagccgggtatctttatgcgcctttcccaacgtgccaatgccgatccaggacatcgctacgccattttcattgatgagatcaatcgcggtaacatatccaagatctttggtgaactaatctcactcattgaagtagacaagcgtgcaggcatgcccaatgcaatgagcctacaactggcttatagcggtgatcacttcagcgtacccgccaatgtcgatatcatcggagccatgaatacagcggaccgttctttagctctgatggacacggctttgcgccgtcgctttgactttgtcgaaatgatgcccgatctctctttactgagtggagctaaggtgaaaggcatagagctcgagtcgttgttagagaaactcaatagccgcatcgaggctctttacgatcgtgaacatacgctggggcatgcgttctttatgccggtaaaaaatgcactcgatgccggtgatgaagaagctgcgtttaaacaattgaagatcgcattccagaaaaagatcattccgcttttacaggaatactttttcgatgacttgaagtggtttactgaatttggccacctgaacagaggtgatatgctcacctcagaacaacacaggtgccataatgaaaaaaagaaatttcagcgcagagtttaa

SEQ ID NO: 40734 - DNA, 303 bp, Escherichia coli; identical to SEQ ID NO: 6057

SEQ ID NO: 40735 - DNA, 1023 bp, Escherichia coli; identical to SEQ ID NO: 6152

SEQ ID NO: 40736 - DNA, 159 bp, Escherichia coli; identical to SEQ ID NO: 20872

SEQ ID NO: 40737 - DNA, 180 bp, Escherichia coli
atgattcattttcacggtggtccaataactcccgatacctgtgcgttgaaagcctggaaaggcagacacgcattcatcagttttgctaatccagctcagattgatctggcttccgaagtcacccaatcatttgctcttgataatggtgcattcacattctggacaaaaaacaaggcctga

SEQ ID NO: 40738 - DNA, 1002 bp, Escherichia coli
gtgccgcaacgaaacgacaggagccgcagcacaccgacgaccagtccgaagaataattcctggttcaggatgcaggctggtcaccagagtgacgcggatatttatatttatgacgagattggtttctggggtgttacagcgaagcagtttatcagtgatctgaatgcactgggcgatatcacccacattaatctccatatcaattcaccgggtggcgatgtctttgaaggcatcgccatttttaatgcgctgaaaacacatggtgcgtccattaccgtttatgtcgacggtgtggcggcgtcaatggcgtcggtcattgcgatggtgggaaacccggtcattatgccggaaaacaccttcatgatgattcataaaccatttggctttacgggcggtgatgcggaggacatgcgcacctatgccgacctgctcgataaggttgaggcggttctgttacccgcttatgcacagaaaaccgggaaaaccaccgatgaaattgctgccatgctggcggatgagacctggatgtccggtgccgaatgtctggcacatggatttgctgatcaggtgacgccagccgttaaggcaatggcatgtattcagtcaaaacgtacagaggaatttaaaaagatgccggaatccattcgaaacatgattactccgccacgcaacagtgctccacgcgtacaggatgatgaacctgcagcctcccggacgccagtgcaggcagcagcacccgtggtggatgaaaacagtatccgtgcgcaggtactggcagagcaaaaagcgcgtgtaaacggtattaatgatctgtttgccatgtttggcgggcgttatcagacgctgcaggctcagtgtcttgccgatcctgaatgttcgctggagcaggcccgcgaaaagctgttgaacgagatggggcgcgagtccacgccatccaataaaaatacaccggctcatatttatgccggtaacggtaattttgtgggggacgggatccgctag

SEQ ID NO: 40739 - DNA, 192 bp, Escherichia coli; identical to SEQ ID NO: 12354

SEQ ID NO: 40740 - DNA, 339 bp, Escherichia coli
atgccggattttcatcgcggagatgactggtggcgtaacggccagaatctctatcttgacaatatggaggcgactggtttttaccgtgtcgcactgacagaggcgcagccgggcgatgtgctgctgtgctgttttggttcatcggtgccgaatcatgccgccatttactgtggtgatggcgagctgctgcaccatattcctgaacaactgagcaaacgagagaggtataccgacaaatggcagcgacgcacacactccctctggcgtcaccgggtatggcacgcatctgcctttacggggatttacaacgatttggccgccgcatcgaccttcgtgtga

SEQ ID NO: 40741 - DNA, 1326 bp, Escherichia coli
atgacgcaatactggctggggttagattgtggcggtagctggctgaaagccgggctgtatgaccgagaaggccgggaggcgggcgtgcagcgcctgccgctgtgcgcattaagtccacagccaggctgggcagagcgcgacatggcagaactgtggcaatgttgcactgctgtcattcgctccctgcttacccattctggcgtcagcggggaacaaattgtcggtatcggcatctccgcgcagggaaagggcttatttctacttgataaaaacgacaaaccgctcggtaacgccattttgtcctcggatcgccgggcgatggaaatcgttcgtcgctggcaggaagatggcatcccggaaaaactctatccgctgacccgacaaaccttatggaccgggcatccggtgtcgctgttacgctggctggggatcgctgaaatcaatcacgccctgccgcctgttgtcggatctgccgaaatctgcggggaaatcaccgctcagacagccgtactgactggtctgaaagcgggtacccccgttgtcggcggcctgtttgatgtggtttccaccgcactctgcgccgggctcgaagacgaattcaccctcaatgcggtgatggggacctgggcggtgaccagcggcataacccacggtttacgtgacggtgaagcgcatccgtatgtctatggtcgctacgttaacgatggtcaatttatcgttcacgaagccagccccacctcttccggcaatctcgaatggtttaccgcacagtggggagaaatctcatttgctgagattaatcaggccgtagccagtttgccgaaagccggtggcgctctctttttcctgccgttcctgtacggcagcaacgccggactcgaaatgaccagcggtttctacgggatgcaggccattcacacccgtgcacacctcttacaggctatctatgaaggggtggtgttcagccatatgacccatctcaaccggatgcgcgaacgttttactgatgtgcacaccctgcgcgtcactggcggcccggcgcactccgatgtctggatgcaaatgctggctgacgtcagcggtctgcgtatcgagctgccgcaggtggaagaaaccggctgctttggtgcggcacttgccgcccgcgtcggtaccagggtttatcgcgatttcagcgaagcccaacgtgacttacagcacccggtacgcaccctgctgccggatatggccgcccatcagctttaccaacaaaaataccaacgctatcaacatctcattgccgcacttcagggttatcacgcccgcatcaaggagcacacattatga

SEQ ID NO: 40742 - DNA, 324 bp, Escherichia coli; identical to SEQ ID NO: 28561

SEQ ID NO: 40743 - DNA, 465 bp, Escherichia coli
atgcggataaggcagcagttcttcggtaagcatcacgacctgttttgcgttgtcggcatcaaccattgcatagccgagggagccgcagcaggctttaccggagtagccgttggcattaccgaattcatcacaggacgggacgccgaggaaagccacatcgatattcagttcgccgctctgtaccagatgcacacgtccgccgtgagagtggatttgcaccggttccgccagcagaccacgggagatttcttccgccagtggaccgcgcaggccagaggtataaatgcgggtaaccacgccctggcgaatgtgttctaccagcggcgcatggcaatcactcagggagctggaggccagggtcaggtttttaaagcccatcttcgcgatgacgtccatcaccatattgacggtcaggtcaccgccacggaaagcgtgatggaaggaaaccgtcataccgtcctgtaa

SEQ ID NO: 40744 - DNA, 414 bp, Escherichia coli
  misc_feature (392)..(401): n is a, c, g, or t
atgattctcgcactcgacatcaggaacacatatcgcccggataatgagatggcattttactatcatattcattcttttctcactcagataccggataatgaggatgatatatatcatgctgcaaggacatatctgcgaaattacgttaagttatgtttatccggatacacgccagcgaatgcgcatttcaaagatatctttgatggcgtatatgaattcattcgtaatattcgcaaaaacagtacaccaggaaaaacaaaacttatcgcaactatcaacacatgcaaagaaacctgtaaacatctgctttatttaagtaatgaagacaaggaaaaaataatttctgacttagataaagttcaggttgcatgttattatctcactatattacnnnnnnnnnncgaacttcattaa

SEQ ID NO: 40745 - DNA, 450 bp, Escherichia coli; identical to SEQ ID NO: 34306

SEQ ID NO: 40746 - DNA, 237 bp, Escherichia coli; identical to SEQ ID NO: 31674

SEQ ID NO: 40747 - DNA, 633 bp, Escherichia coli
  misc_feature (509)..(518): n is a, c, g, or t
gtggctgacgcgagtattcgtactcctgataataagatcatattagagaacctgaactttcatgtttcgccaggcaaatggctattgctgaaaggttactctggtgcgggaaaaaccacactgcttaaaacattatcccactgctggccgtggtttaaaggtgatatttcttctcctgctgacagttggtatgtgtcacaaacaccgttaatcaaaaccggcttactgaaagagattatttgtaaagcacttcccctgtccgtagacgataaatcgttgagcgaagtactgcatcaggttggtctggggaaattggctgcgcgtattcatgatcacgatcgctggggagatattctttccagcggcgaaaaacaacgtatcgccctggctcgattaattttacgacgtccgaaatggatatttcttgacgaaactacctctcatcttgaggaacaagaggcaatccgcttactgcgtttagtgcgagaaaaactccccacaagcggcgnnnnnnnnnnggcgtcattatggttacacatcaacccggtgtctggaacctggtcgatgatatttgtgacattagcgcggttatataaaaacaataaaagccctgctgtacggagatataaataa

SEQ ID NO: 40748 - DNA, 711 bp, Escherichia coli
  misc_feature (678)..(687): n is a, c, g, or t
atgaaaactgtttcgataaaacacacttactgggatatagctgctgatatctatttccctgacgattttaatagtgaaaaaaagtatcctgccattatcagtgcccatccaattggaagctgcaaagaacagacatcgggtagtgtgtatggtgccgccctggcaaaagctggctttatcgtcattgcttttgatgccagttttcagggaagcagcggtggagaaccgcgttatctggaagatccaacaatgcgagtaaaagacttcagcattgtcgttgattaccttaccaccttaccttacgttgatgccgggcgtattggtgtactgggtatttgtggtggaggtggatatgccattaatgccgcaatgacagaacgtcggattaaagccattggtactgtcacgggtgcaaactacgggcgtcttatgcgtgagggatttacagcgtttaatcctatcggagcactcgaagcaatggcgcaacaaagaacagacgaagctaacggcgcaaaacttcgcgtagatgatttgctcccttcttctccggaagcagctcttgaagcgggattaacagaaatagacctttttgaagcaacagaatattatcgttcgccacgaggctgtgcgcctaatggggtaaatcgttcgctattttcacatcagactgttgccgtnnnnnnnnnntccctgacatttatcatttattga

SEQ ID NO: 40749 - DNA, 432 bp, Escherichia coli; identical to SEQ ID NO: 20847

SEQ ID NO: 40750 - DNA, 306 bp, Escherichia coli
ttgcgctgtgaagatattatgcctggtcgatggaacactcaacttgtcaataagcacttaggttacagatacacaggagtattcaaaaccctggcaagtattgatgacaaaccgtcccgtttcgaaattttgataccattgatacaaactttagttcgcgacaatgtaaagctaaataatgatgtgtataaagaacttaataattttatgctcgattacgacaaaacatcctcagaaatgagaaaataccttaaaagcatcaacgagtgtatgttccttatgaaaaacatagttcatcaagattaa

SEQ ID NO: 40751 - DNA, 786 bp, Escherichia coli
atgtatatatttgaattgaccaaacctggcaactggcttgaaagtgaagacaaagagtggtcttggaaaatagaacggcttttggaccatcttgaatttgcattttatgaggctaatgttgcattaaatttatttatgcagcagcaaaacaatcaaatagaacaacaaggggtttcgcaattgcaatgggaaaaagaaatgcaagaacgaagaaccatcgaaacactagttcgtgaggagttaggtttatccccttttgagaatcctgaaaacatacaatttgaggtggacgcgaggtttaaacgagaaaagtggagttctggtgaaattccacgtagccacaaacattgtgtgatttttatttatgcaaaatcttttctttattctcttgatactattgataaatttataaaggttatttcgaatgaaccttatgctcctgagtcgataaaagccctacacgatcagataggtaaagattttcctgatctcagaggggttaggaattcaactcaacacctcgaagatagggctcgagggcttggcgcagggagagaaccgaagcctttgaatctccagcctataagtaataccttcataaatgcaccgcaaggtgctttgatattaaataatctgaatggcaccaaattcgggtcaactatatctgatggtcactatggtgaagtggacatttcacctgaatcgttatcaaaaatgcaaagtattgttcagggcgttcttgactcgtttaagtgggttggtaatcagcaacacttaccaagttaa

SEQ ID NO: 40752 - DNA, 690 bp, Escherichia coli
atgaatcaacaagacttgaattttgtcagaatagaactacgtcgtgcgctgtttgacttctctggggggacaaaagggcagcttgaggctttcactgaacacccaccagcagacaaaaatgccactccacgccgtggaattcatcttgtcgaactcgaaggtgataagggaccacgctttgttaactcgctttccgcgccattgtacgtgcaagaaacacgtagccgccccaggccaatgccgccgataaaagatgtagaatttgagtccgcgccgtggcgtagggcagtgtccgcgcttagtggataccagcaggcttggttgcggtactgttacggttttgaccttaactatacgcaccaggtgatgatgtgtgaatacgtctggaaggcttatcagaaatgcttgggtgaaaactcacttcaggagcgcgtagtaaaaaaactaataggcctagtatggcttgcaggacaggaaattgctgcaacccgaaacaatgaaacctataaagactacgctggtgcggcgctggcccgtatggttagcgttgaccgttcgacatggttgcgcgtctattcaggccactgggctgggttaaaggccgcttttacccagcttgatgagtctgcgctggccatggctcttgaatactatgaggatgaagaagctctcaaagtgggagaaatatga

SEQ ID NO: 40753 - DNA, 261 bp, Escherichia coli
atgggttccattgatggaaaggcattgtcagagattggaaggcgttctagggcatctggcgattattgggagcaattattgggtttggaagatacggccaggctaatgcaaatcaggatttcagatcttagattggccgtgcttagtggaaaaatgatcaatgggaaattgccgcccaagatccactctgttagtgggggcggtcatttcttttttgatggtcaggaaattaaagagtggctggcgttaaaaaatgactaa

SEQ ID NO: 40754 - DNA, 390 bp, Escherichia coli
atgaaaaaaaatgataggattcattcaattagcggtgagtcagataaggttattcctatccgacccggcatcactacatcagcaaatgatgatgaaaacccagcatctaaggccgcttgggcggctaaagtggccgtaatgggggcgcttcagatactccgttacctgttgtttgctgtgctcctgtggttgcgcttcccggttaagctggtgttcagcatcatatcaggattggcctttgttggctcccttctgacctggctattgtatgaagattattcaatgctgccggggttcgtgatgatgggagtcaccgccgctttgttggcttgggcttatgatctgctgctcggcctattgtcaccggctgacatggtaaacactctttaa

SEQ ID NO: 40755 - DNA, 495 bp, Escherichia coli
atgaagaatgcagcaaaggccgtggttctgatggctttgtttggcgtcacaacctcgatgttctccccctctgtgcaagctgcatctgaggatgaatgcgcgatctggttgtgcctacctggtgggttcccctccggttgtggtggggctaaaagcgcaatgctgaagcgcgttaaaaaagggaaaagccctctccccgacttcgtttcgtgcgcggtaaaaggagacagcggcggcagctcgatgacgtacgactataactatgcggcggctatccaggagcagcgcgtttgcaagcgaaccgaacggcgcgggcgtgacaattatcaatgtgtggagtgggaaactgtaccggcccactacaagaaaggggaggtttgcaggatcaacaaccagaccggcaaccgcaccccaagaggatgcacctcaacatatcgctatgttgatgtgttcattgatggtgccctggcgggcgatacctatttctggcgctga

SEQ ID NO: 40756 - DNA, 738 bp, Escherichia coli
atggagctgtttactatcctggccacttgctcggccctgacgttcggcacgggtagccccgtcgaacaagcatacccatacacaaaagaggaatgccaacaggcggcctctgaatataaagggatgctgacaaaagttaagctgaatgaagtagatcgggacgccatatcaagggttgcttttgccgaggctgccaatcaaggtgatgccggaattgcgggcgttgtatataccataattaaccgcttcgtcagtggcaattttggcgcgtctatttctgacgtagtaaacgctccccgccagtttgaaccagtttccaaagttggcggcaattggaagaaacttcccgaagttaataccgctcaacgttccaaagttgacaccattattaaccttgccctagatgggcatttaccagacctgactaatggggctcttttcttccaaaaccctaagattgttgcggatagggaaaaaaagggaaccgtttcaaaaggtcttactaatttcggcggctctgagccatcggctgttatcaatgaccatgccttttttgccgctgttagtaatgcagcgccggtaactgttcaagcaaataaagcggctgacattccagagcctaaaaaatgggatgtattcggcaattccagaaagtcgatgaatgataataatgccgcttgggatgtattcggcggaaagagtacgggaaataaatctgttttcgagggtgaacaatga

SEQ ID NO: 40757 - DNA, 1977 bp, Escherichia coli
atgaaattaataattgtggagagccccggcaaagttaaaaaaatatctgagatcctgggggcaggatggcgagttgcggccagcgttggccacgttcgtgatctgcctgagcgggaaatgggagttgaagcgccggacttcaaacccaagtacgtgaagactgagcggggcaaagaggtattggccaagctggcggggctggcgtccggtgctgagtctgtatttcttgcaacggacttggatcgagaaggggaggcaattgcctggcatcttcaggcagccttgcgcctcaataatgcccagcgcgtgacgttcgcagaaatcacgccgaaagccatcaaggcggccatcatggccccccgttctgtgaatatcccgatggtagcggctcaagaagggcggcgcgtactggatcgcctggttggctacatggtatcgcccaagctgtctgacatgagcgggcggcctgggctgtctgccggtcgcgtccagagccctgcggtgcggatcattgttgaacgagaaaaggccatccagaacttcaagccaacggctcactttggcgttgaactgcttttcaatggtgactggtcagccgaatgggatttgaagccgtggcttcctgatggcgctgaatacattctcgatggccaactggcccaacgaatcgccggtattcgctcccttcaggtgatcggctacgaggaaaaggaagcaacgaaagcaccaccggcaccgttcatcacttccacgttgcaacaggcggcatctgtaaagctgaagatgaagcccaaagcgacgatggcggcggctcaaaagctctatgagcagggccatataacgtacatgaggacggatagccccaacctctcggatgacgccctgatcgagatttaccagctctgcaaagccaaaggtttgccaatggtagacaggccgcgcacctggaaagcgaaaggcgatgcccaggaagcccatgaagctattcgcccctctcactttgacgtagaagaagcaggcgagacgccagaagaaaaggcgctctatcggcttatctggggtcgagctgttgcgtgtcagcttgcggcggctcgatatgccgtgagatctgtccgtctgcgggcaactgagcccctcgatggccgcccggtagagttcaccgccgaaggtcgcaccatgacgtttagcggctggacagggctgtttagtgacgataccgaagacgaagacgacaaggacaccaaggccaataacccgatccccgttcttgcacctggtcagcgtctgagtgccgaaaatggccgggttctcaacaagaagacccgcgccccttcccgctttactgaagcgtccttgattgccgaactggaacgactcggcatcggtcggcccagcacctatgcggccatcatggataacatcatgcgccgtcagtacgtggaggcagataaaagcggcaaatacctggtgccaacggaaacggggaacctggttattgaagccctggtgtctggccggttctcatttgtggaatatgactttacccgcgaaatggaagggcgcttagacctgatcgctcaaggacggctttcatatcgtgatgtagtcagcgccgtacatggccagttagaacgggaactgtccgggttgaagatcaccgccgccccgttgcacccgtgcccggattgcggaaaagccctacgcagaatgaaaggtaaggatggtttcttttggggatgcactggataccctgactgttctatcacgctcccggatgcagcaggcaagccaggcaaacccaagcccaagcctcaagcgtctgagtttgcctgtccaaaatgcggcaagcccctgatccgaagaaagaaagcggcaacaggtggcaagaaggctttcgacttcttcggctgtagtggcttccctacctgcaacgagaaattcgacgttgtgggaggaaagccaaaattcactaaatga

SEQ ID NO: 40758 - DNA, 357 bp, Escherichia coli
atgaacaaaaaagacttttgtcgtaaacctcgtaaaatgtgcccacctgccacaccagatgagcatattgaaatgggaaacgagactattagcgagcttgaacttatcgacaacttggccagcggagcggtgaagcggttgaaactcgttcaaggtgaagatttgaaattttgtatatacatccaactgagttggaaaggaggtgatctcttactggaaacccaacggaaaaaaccccgtgtttggtcaagtctggacagactcgcaaaacacataaacagcaaatatggatctgttcctgttgtagaactttatctttggagtaaagaatcaaatggaaaaaatcggcgttgttga

SEQ ID NO: 40759 - DNA, 324 bp, Escherichia coli
atggaaaaaatcggcgttgttgacaataaaaaagaagtatccaaggcccgccaggctatcgctaccctgtggctgttcctggggatcatgttcatcccgtccgtcgcctttgcgaaccccatcgctgatggtgtcgattggctgctggatctgctgaccaacggcattgcccgttccgtcgccatcattgcaatcgttgtcctgggttatatggcctgggctggccgcctgaccggtgaggccgccgttaaattcatcggtggtatcgtcctggtgttcggtggtgcggccatcgttgacctcattattgcggctgtgtcctaa

SEQ ID NO: 40760 - DNA, 321 bp, Escherichia coli
atggcaacagcaacagatccgctgttcgttggagccacacgcccatcactcgtgatgggcgttacctacgaagcgatcattatctgcgtttcaattgtcggtatgctgttcctcgctaccaataaccctttcttattgttgttttatatcccaatgcacggggcttgttatttaatttgcctcaaagaccctcgttttttcaggttcttgctgttgtggcttgggactaaagcaaaatcaatatcatggcgttattggggcgcggccaccgcaagccctcgggttagcactcgcaagcaatcacggagaatgccgggatga

SEQ ID NO: 40761 - DNA, 2448 bp, Escherichia coli
atgaaggaaaatactctacgggataataactggcatcgtgaaaatgatgtttcagaattcattccctatgctgtgcagcttaacgagaataccgttaagaaccacagcggcgattatctccatgtgattaaacttgatggtcgagcgcatgaaagcgccgacccgtcagacgttattacatggaaagagcaattgaatattgctcttaaaaatattgcgtcgccaaatctcgccatatggacgaacacaatccgccgtgaggaaaatactttccctggtggtgactttgagcctggctttgcggcgagctttaacgagaagtacaaagcgcacctgggcaaaaataacatgatggtcaatgaactttatttgactattcttctgcgccctggtgtgaacaaagccgatggttatttccagaagtttgagaaaaacgagcaggctatcagacgccagcaacaagaggccatcgagaaactgactgaagtttcaaacctggtatgcagtagcctttcatcctatggccctaagctgctggggacatatgagcggcgcgggattcttcattctgaggtgctggaattcctctctttcctggtaaatggcgagtggtatcccagggctttgccccgccaagaccttgcccaaacattggcatttaatcgcccgttcttcggctctgatgcgttcgagctgcggggtgtagtggattccaaagttggcgcaatacttggcattggcgaatatccagaaggcaccgaagcggggctgttgaatgccctgttgtctgctccgttccccctggtactgacgcaatctttcaatttcctgtcaaagccgatagggattgagctgttgcgccgtcagcaacgccgtatgcgcaacgctggcgacctggccacctcacagattgacgagatcgatgatgccctggacgacctgacagcaggccgctttgtatttggcgagcatcacctttgcctgaccgtgttcgggactgacggggccgacctgaaaaagaacctgtcagacgcacgggccgagctggctaactgctcgatggttgtcagccgtgaggattgggctgttgctgcggcgttctggtctatgctgcccggtaactttaagtttcgcccgcgccctgccccgctgagttccaagaactttgccgggttctctagcttccataactatccgaccggtcgccggttgggcaaccaatgggggccagccgtgacgatgttcaagaccacttccggcgctccgttctatttcaacttccatgagcccctggatgtaaacaaggcgaagaaacaagcccagctcgaagcagagttaggcgctaacaaaatggccgaatccaaggaagaacaaaaggcgctggggaataccctgattatcggcccgtctggttccggtaaaactgttgtccaaggtgtcttgctggcccaaagcaagaagttcaacccgacccaaatcatctttgataaagatcgcggtttagaaatttacgtccgggccgagggtggtgtttatctcccgctgaagaaaggcgttcgcaccggctgcaatccgttccagctagaacctaccgaaagtaacctgcttttcctcgaaagcctggtgaagaaatgcgccggggggaaattcacggttaatgatgaacaagaggtttcccgtgctgttcgtggcgttatgcgtttgcctaaagcgcatcgccgcattagctcatgcctggaattcctcgacccggtgaaccgggaaggtgttcacgccagattagggaaatggtgcggctctggctccctggcttgggtattcgattgcgctgaagatcagattatctttgatggtaattcgatgttcggctttgacgttaccgaattcctggatgatcccgaagtacgtaccccgctggttatgtacctgttccatcgcatcgagcaactgattgatgggcgacgggttcaaatcttcatggatgaattttggaaattgcttctggatgaattctttgaagacttggcccaaaacaaactgaaggttattcgtaaacaaaacggcatcctgacgtttggcactcagtcagcaaaagacgttctgaattcccccattgctcacagcatcatagagcagtgcgccaccatgattttcatgcctaaccccaaggctgcgcataaagactatgtggacgggctcaagctgaccgagcgggaatttcagcttatcaaagaagaaatgcaacccggctcccgccgtttccttattaaacaagggcataattctgttgtctcggaattggacttgaaggggttcagtgatgaactggccgttatttcaggtactaccgataacgtggagctgatggagcgcgttattgccgaatatggtaacgacccgaaagagtggttgccggttttccaccaaaaaaggaagtatggccaatga

SEQ ID NO: 40762 - DNA, 645 bp, Escherichia coli
atgaaaatgaagacgttagcccttagcctggccctcactatgggggctatttccccggcgtttgctggtatcccggtgactgttgttgccgaccctcaagcgttggcaaaccatatcaccgaactggccaagatggtcgagcagatccgccagcttgaaaatcagttgaagcagatggagcgtgaatatacgtcaatgaccggctcccgtgggctgggtagcttgatcaactcggcctatgacaaggatgtgctgaaggatctcgacctgaaggggcttatgagccaaaacggcctgaagtcgtccaacgattacaacctggggcaaggcgtgggcgaagtattcgacctgtcgaacaagaacgccgcccaatactccgggcaggcaaccaagagcctttcccaagcccaggaacgctttgacgagctgaaagggctggtcagcaaggtgaacaattcgagcgacccgaaagaagtaatggatctgcaagcccggattggtgccgagcaaagtttcctgcaaaacgaagtggccaagctgcaaatcttggagcagcaggcccaggccaatgagcaaatccgaagccagcgcgtgaaacaaatggctgttgagtcgtccggctcactgcgtcaagtagcctggtaa

SEQ ID NO: 40763 - DNA, 270 bp, Escherichia coli
atgaacaagatgaccgcgatttcgtacgtacgaaattttgccctggtaagcctggccagcctcgcactggccgggtgctttgaacaaaagccgctcgaagaaaccaagtcggttgaattctattcgcagaattccgccgaccgggcggcaatggtcaagcggtgcgccgacaaccccggcgagctgaaagaaacccccaattgcgtcaatgcaatgcaggctgagaaggccgcaacaagcggctctctgaagaagctgaataactggtaa

SEQ ID NO: 40764 - DNA, 1011 bp, Escherichia coli
atgtcaacaaacctgtttgagcgcatttttgcgaatgttgacgacgccctgaatacctacgttgtggatacggtcgggaatgtcgttggttttgcctcccctctgttcacctcgatgatgatcgtctttgtggccatgtggggctatctgatgatgttcggcagggtgcaagagccgttacaagacggggttttcaggatcattcgtataggtggcatcatggcccttggcctgacggttggcacttatatgggtgttgtcgtgacgttccttcagcaagggccagagcatatttcggctgtcgtatccggtgccggtggcaccagtgccgacacgctggacgccctttttagccaggtgtttgccgtgtcaaaggcagcctgggaaaaaggcggggttctggatggtaactttggcctgtacctgattgccttgattgtcctggtaattggtagcggcctgacgttgtttgttgccttcctgatcttgctggccaagttgatgactacggttctcctgggaattgggccgctgttcatcatttgcctgctgttcaaagtaacccagcgtttctttgaaagctggatcgctatggtgtctaactttggcttgcttctggtgcttgcctcgtcggtcggtacgctaatgactagcttggcgcaaacctacatagacaagctggcccccaacgaagcagccgccgccgatgccgcaaacctcggggatgctgccatgctctgccttgtgttcgccctgtgtatcctggtggttcgtcaggttccatcagttgcggcagccctgggcggtggtattgccctggctacgcaaggcgcgtttggttcagctatgaatgccctccgcccttcctccatgcaacgcgcctcccgtcaggttcaacgggagtaccgcgccactaagcaagctgttacagcccccgtaagagctggccaacgagtagcatctgcatatcaaaaacggttcggtagtggtaactccgtggcaagcatgtaa

SEQ ID NO: 40765 - DNA, 207 bp, Escherichia coli
atgaagaaaacccttttgatgattgctttggctctgtctgccactggctgcaccctttccccgcctccacctccgcaatgtgtggatgatgggcgcgggatggttccgcttaacccggaaatgctgacccaggagcagatcaaggccgtgaaggccaaataccaggaaacaacctggaaggacgaacgtactaagggagcacggtaa

SEQ ID NO: 40766 - DNA, 750 bp, Escherichia coli
atgacggctaaaggtgacaataaaaagcctggcaagggtaaaaccatcgaccagcaatattttgaggaagcgcggggctgggatagcgatgctatcgccaaaaccaagcaatcagagcggcgggcctggcgagttgctggcgtggccgtgacagtggccatcctggaagctatcgggatctcgtctgtcctccccctcaaaaccgttgagccgtttgttattcgggttgataacaataccggcctgactgacgttgtaagcaccctgaaggagaaggacgaaggcgtaaaagccacagctcaagaggcgctgaataaatactggctggcgcaatatatccggcaccgtgagggctatttgtgggatacccgtgactatgatcgggaaatggtcggcttgctctccgcaccgacgatacaacagcaatatgccgaatacaccgacccccgcaaaaacccacaagcgccgattgtggtatatggccaaaactccgaagtcgaaaccaaggttaaagccatttccatgctgaacgccggggaagaactggaaggcgaaacccgttataccgctctggttcgctataccaagcaggtgcgccgtgccggtgagttctcaccgatcacccattgggccgcgacaatcacgtttgcttatcgcaatgagcccatgaagctcgacgaccgcaccaaaaacccgcttggcttccaagtgatttcttatcgcaatgaccaagaagccgggggactctaa

SEQ ID NO: 40767 - DNA, 834 bp, Escherichia coli
atgcaaatgaagatgaaagcccttcctttggcgttgcttctggccagtttggccggttctgccctggcggtggaaatcccagccgggggcatctatgacaagcgggtgaaatatatcaattacaaccctgcccaggtgacaaaagtaattggccattatggcttttctactcatgtgcaatttggcgctaatgaagtaatcgccaatattgccatcggtgataaagaggcgtgggatgttgccccggtagaaaaccacctctttattaagcctctcggtgatatggctgaaacaaatatgaccgttatcaccaacgtccgggtttataactttgagctgaccgcccatgaatccaagaacggcgctcaccccatcccgaacgatatgtttttccaagtcaatttccgttacccggatgaagaattggccaaggcaaaagcagaggcagaagccgccagactgaaggccagaatgagccagaacgacgcgccgaaagcgacgaactggaactattgggccaagggtagccaagatgtgtcgccaatcagtgcgtttgatgatggccgctttacttatctgaaatacccaggcaaccgcgaaatgccagcaatctatatcgttaacccggacggttctgaaagcctggtaaatacaacggttgattccaaacacccggacacaattattgtccagaaaattgcgcgtcaatttacattgcgaatcggcaaccgtgttgcatgtattttcaatgaaaattatgacccggatggaatcgccaataagacagggacaacagccccaggagttgagcgcgtgattaagggaggtcaataa

SEQ ID NO: 40768 - DNA, 1215 bp, Escherichia coli
atgtctgaccagcacgaaaaagatctaccggtcgaagaagtcggcggggatgaagcagatcgcggtatgcccagcatatcgaagaaaaaacgccagccaggcagcggcggggtaatgcaaaagatcgtcgttgccgttatcggtatcgtcgtggtgctcgccctggtggcggttaatggtggctttagcagtggcaagaaggatgaagacaagccgaaaaccggcaaggggtcaaactccgaagtggtgaaccggctcggccctgcgccgtctttgcctgcaccgccaccgccgccgaaagcgccggaggaagataagccagccaccgccacagtggtaagaactggtgacgttgcaccgccgcccccgtcttctgcaatggagcgcccaagagggaacaacggcaagcaagagccgacccctcaagagcgcaagcgtaacccttctttgctggcgtttggcaatatgtcaaagcctcccaagcaaggtgctgatgatggccaaggcggcgcggcctaccaggctacagcggcgggcggtgatggctccctggctgagagtgacaccgcagacgggttaggtgctcgactgaaaggaacgacagtacagggcacccgtgcgggcctcctacgtgatcgctctttctttatcacgcaaggtactttcctcgattgcgcactggaaacggctatttcaagcgacgtaccaggcatgaccgcttgccgccttaccagggacgtttacagcaccgacagcaaggttttgttgctggaacgtggttctaaagtcgttggccaataccaaggcgggctgaagcgtggccaagcacggatctttgtgctctggactcgcgttgaaacaccaaacggcgtcgttgtgaacatcgacagccccggcaccgatgcgctcggtcgcagtggcctggatggctttgttgatacccacttttgggaacgcttcggcggggctgtcatgttgagcatgatagatgacattggcacgttcgtagcgaacaaggccagtggcgacggcaacaataaccaaatccaatttggcagcacggcagatgcagcaacccaggcggcaggtatcgcactggaaaactcgataaacattccgccaacactgcttaaaaaccaaggcgaccacatcaatatctttgtggccagggatcttgatttcaggggggtatatgacctcaagcccgcaaattaa

SEQ ID NO: 40769 - DNA, 1029 bp, Escherichia coli
atgacctcaagcccgcaaattaagggcgtcgcactgatggagaatcttcggattctccatccttatttgaaccgcgacggcgttacagaaatcgtcattaatcaaccaggtgaggttattacagaaagccgctctggctgggaacgctttgacgtacccgagttgaatttcaacctttgccaggacatagcaaaacttaccgccacgttttccggtcagtctctcgatgaacggaagccgataatctcggccaccctaccagagggggagcgtgttcaaattgtcgtgcctccggtaacactgtctggccgtgtcagcctgacaatccgaaagccgccgacatttaaccccacgctggatgattacgagaaaagcggggcgtttgaccaggtaattgattattcatctgaccttagcgaagttgaacgaactcttttagaactcaagcaaggccggaagtttaaggcgttttttgagctggcgatcaagtctcgtctaaacatcattgtgtcaggctcaaccggtagcggtaagaccacgtttatgcgctccctgcttcagcttgtgcctgatgatgaacgcctgattagcatcgagaacgtggatgaattggggctctataagacgcactggaacaccgttccgctgttctattcagccggtgggcaaggggtatctgaagttagtcagcaacacctgttggaaagctcattgcgcatgaagccagaccggatttttgtggctgagttgatccggggggatgaagccttttactacctgagaaacgtaaactctggccaccctggatcgattacctccatgcacgccaacagcgccagaatggctatagaacaactggttttgttcttgaaggaaagccaaagcggcagctcgatgaatagagaggatattaagcaacttctctttatgtgcgtcgatattatcgtgcagattaaaaacattcgcgggaaacgggtaataacggagatttactatgacccagaattcaaacggacacaaatggcgtaa

SEQ ID NO: 40770 - DNA, 1926 bp, Escherichia coli
atgacccagaattcaaacggacacaaatggcgtaaatacgccattttatttggcgtccctctttttatattggcttgggtttggctggctggtgcaatttttatggctggcaatggtctgaacgccaaggaagcaaccccgttgaccctttaccaatattggtactattacggggacattaaaaaaactcaagcatggataaccggggcggcctttggctccctgcttattttgctcctgcctgtattcctttatttcatgccaaagaaagaaagcctctttggcgatgccaggtgggcaactgaaaaagaaataaaggattccggtctttattctgaagatgggattattgttggcgtcaaaactgcgtttttcggcctgataaaaaaataccttattttcggcggggctcaacatgtattaatggcggccccgactcgttccggtaaaggtgtgagtattgttatccccaatcttttgagctggaaagatagcgttgttgtgctggatataaagcaagaaaactgggatataacttcaggttttcgcgccaaacatggccaagagtgctatttgctgaacctagcgccccgagattatcgctcgcaccgttggaatcctcttttctatatctctgatgacccgaatttccgcatcaacgatatacagaaaatcggtcagatgcttttcccgaaagtcgagaatgaagcgcctatttggcaatcctccgctcgtagcctttggctgggcctggtgctttaccttatcgagactgaggaactgccggttacgatgggcgaggctctgcgtcagctcactatgggcgatgaacgtctggccgaaatcgtagagcagcggcaagagtctgataaccccttatcagatgaatgctatctagcactgaaagagtacctggacaccccggacaagactcgcggctccgttcgtaaaggcttcacggcctccctggagctgttttataacccggtgatcgatgccgcaaccagtggcaatgattttgacctgcgcgacctgcgcaaacgccgtatgtcggtttatgtagggattaccccggatgacctggatcgcctggcaccgttgattaatctctttttccagcaggtaatcgatctcaatacccgtgagctgcccgagcaaaatccagacctgaaacatagctgtttgctgcttatggatgaatttaccgctatgggcaaggttggcattctgtcaaaaggtattagttatattgcaggttatggcctgcgtatgctgccaattatccaatcaccggcacagttgcgtgaaacatatggggctgatgcggcggaaacattcattgataaccacgccttgcaaatcgtctttgctcccaaaaacatcaaggtagcaaaggaaatatccgacagcctgggcaccaagacagtaaaaaacaaatcccgtagtcggcaactcacagggaaaacaagtcgttctgagaatgccagcgatacaggccgcgccctgcttatgcctcaagaggttaagcagattggccaaaaggctgaaatattgctgttggaaaactgccctcctattaagtgcagcaaaataacttggtacgccgaccagactttcaacgagcgcggcaacggtcgtgatggggttaaattcccctcgcctgccgttcctctggttgaccctaacaacaggccgaaaggtgaggtttcattccactccaacaaaattgaagacgctgaaacttcagaaaaaaccgttgtggagcgggatattaccgttgctgacattgagaacatcgacaatttgaaccttgacgatttttcttgtgacttctccaagattgaaatccctgaaggctcaatatctgatgatgcaatggacgaccttgtaagccagttctttaatggcttggctgaagcggcataa

SEQ ID NO: 40771 - DNA, 2949 bp, Escherichia coli
atggcaaatattgcacaggaaaaaacatatctggccattccttttgaagaacggaaagacgcttttcgagctgctggcaaactgccggacggcaagaacgctttggggctggatgaagatagcaagctctggtttgccaatcctggtgcggatctcgacaagctgaaaaagtggataccggacaccactcgccgggccgaaccaggcgaaacagatccggtcattgagtttggccaggcacttgaagacgccggtttcatcctcgatggcgaaccacagatggacggcaagaaacaccgggttagcactgtagacgacagaggcggccagaagtcgggcgtttatgtcggatacctggacggtgtaccggctggctggtatcaagatcaccgcatccatagcgaaccgcagaagtggaaggctaccggcaatcgtattgatcccgaagctcaagcacacctgaaggcagtagcggcacagcgcaagatagaacgcgaccaggcccaggcaagacagtacgaccacaacgcccacagaagccaacaagcggccagcctaatgcccgacgccaacggccaagagcaatatttggtcaataaaggggtgaaggctttccctggcgtaaaaactgataagcgcgggcgcgttgtaattccgcttcagaatgaaaaggacgaaataagaaccctgcaacgcattagcggaaacggttttaaatccctaaaaaagaatggccagaaatcaggaagttattttgttgttggcggcgaactaaaaaatggcgacccgattctatacgctgaaggctattcaacatcggcaactatcagtgaagccaccgggcggcctgttgttatgactgttgatgctggaaatatgccgacagttgccgcaaagctattggaaaaatacccagatagccagcatgtttttttagcagacgatgaccgaaaaaacacagcaaacaagggtaaggaaaaagcagagcaagcagccaccataacaaatggcattgctcaaacccctattttcaacaatcaagagattgaaaaaggcttttcggattttaatgaccttggccagtcaagagggcttgaggttgtacgggaacaagttgaaacaactcttaataaggtggcgaccgtggataaagtagaagaaaacaccgggccggtaattacggataaattcgagcgtgaaattgataccgccctttctaattcagaagacattcaaaaactcggcattctgcgtgatgaccaaggacgtttttgggacgggcaagaatttggcgacctggaagacgccaagcgttatgaaccagtggaagccctgaaagtggctgtccatgtttcccgtcaatacgagtcagagttagagggaagccatatttatattcgcgccgttgaacaagacgagccaagcgatagcgacggggttcacgttgtaaacactgaccaggctatgaactggccacaccttgaagccgcttataagagagggttcggcttgaatctggatcgtgatgaagccctggccataacggcccgttcgcctgctgcctccctggacaaccaggagcaagccgccgcccctgctgcctccctggacaaccaggagcaagccgccgcccctgctgccgccctggacaaccaggagcctgaagaaaacgccgtggagccattcattgagcggaaaatagaaacggctgacgctgacgttagggcatggctgaccaacagccgtcaacccataggtgagctgatcgaggaagacgagcggaaggctcaacatagaccacaagcggaaggtgaattttcatctgaaccaagccaggcaccgaagggccaagcctcaaactctgactttgaagcgaccacgttcaaaccgattgttcctgagaaggtcgcaaagtcttatatcgaggtagacggcaaatattactttggcaatcggcctgattcgctggctttcgtcgataaaggggccaagttgcaaaccaagctgtcgagcgagcaagtagcggcctcaatggttgatattgctgaagctcggggctggactgaattacagctctccggtactgaagatttcagacgggccgcctggcttgaggccgcatcacggggcttggcttctaggggttacaaaccgaaagaggaagacttggccaggctcaaaaagctgaccaatgaccggacttcaaacgagattgagcccagggaacaagctgacgttgtaccgccagcagccaagggcaaagaacagccgacgaaccaagataagcaacaaggccagcaggcggcccaatctccccagatggccaaagcggcagccgcaacagcgaccgctgataagcaacagcctgaagcggcggccccagctcaagaagttaaccggctcgcgggtaagctggttgagcatggcaaagccccttatgaacacaaccccgacaataacgggagttactttgtcacccttgagaatgcagacggccaacaaagcacaacttggggtgtgggcctagaaaaggcgattgaagaatcccaggccgaagctggccagcatgtcgagctggaaaacttgggacgcaaaccggtacaagttgaaaagcagatcaaggatgaaaagggtaatgttaccggcaccaaaacggttaactcgtatcgcaacgaatgggctgttaaggccgaagcaatccgcgattcttcccgtgacgctaaagagttggtcaaggagcacccggacttaatcaacgaaatcacggcggttaagctcgctgaaaaattcgcggcggcaaatttgagcgcagccgatcaagcccgtttcatggagcgagttcgcggccaggtagcggataacgtatcgaccggccagcaagcccctgagctgaagattagggaagaaacaaccatcgaacgcacgaaggagacagagaatgaacgataa

SEQ ID NO: 40772 - DNA, 147 bp, Escherichia coli
atgaacgataagttactgaagctgaatcagcccggccagattgtcgaactgaccaaacaagaggctgaagaattgggcgctttcgaggaaagcgccctttccgaacaagacgccctcgatgcgattgaaacagaacaggaggcgtaa

SEQ ID NO: 40773 - DNA, 1695 bp, Escherichia coli
atggccaagggtaaggagtcgagcggagagaaaaagccctattacgagctgatcgctgaaacacttatcaagcagctcgaagaaggcaccgcgccgtggcaaaaaccctgggaaccgggcacctctatggtgccccataaccctgtgagcggtacaaaataccggggcggcaacgccctatggttgaccatgcaaggcaggtcagatccgcgctggatgacctacaagcaggcgcaaagcgtcaatgcccaggtgaaacgaggtgaaagcggtacgctgatccagtatttcaagtttcaagaccaagtgcccaagttagacgccagcggaaaacctgagattgatagcgacggcaaaaagaagatgatcaccgtccaactggataagcctaaagtcttctcggctgttgtcttcaacggggagcagatccaaggactccccccaattgagacagaaaagaaagatcccgcatggaatagacacgaacgggcggaagccattctaaccaatgccggtatccccatttcacacgatcaagctgacaacgctttttacctccctggcaaagatgaaatccacttaccagggcgcgaccagttcgccaccgctgataggtactatgcaacagctctgcatgaacttggccacgcaaccggccatgccagccgcttgaatagagacttatccgggcgctttggctcggagtcctacgcaaaggaagaattacgcgctgagatcggttccctgctgataggggatgaattagagatcgggcatgaccctggccaacacgctgcctatgtcaaaagctgggtaaaggtgctgaaggaagaccccaaggaaattttgcgagctgctagagacgctgaagcgatcaaagattgggttattgccagggaacgggaaagcaccctaaccggcgacaacgccagacctccccaaacgcaacaagaagatcaggcggtatccctggctgaaactcgcaagctgatggagattgtagcgaaccagaacaaaggggccaccctgggggatgctgcttccctcgccctgaaagcattggggctcaacgaaaccaaacaggtgatcgatgttatctctacactcaatgacctggtgaaacaccccgccttagctcaacaggtgaaaaaggctgaagctgagttagcactattgaaaccccagcaccaggagcaacaccaggagcccaaggctactgaatcagcggcaacggatgacaagccacagactgaggctttcagtgaaactcgcaagctgatggagattgtagcgaaccagaacaaaggggcggccctgggggaatctgcggctgttgctttggaaggattggcccgtaatcaacctgaccaggcaaacgatgttatctctaatttgagtgacctacagaaacacccagcattagccaagcagattgagaaggccaaggccgaacaggaagcgattagagccacgcaaggggctgaccaagggcaacgcattgaccctatcagcaaattgcctctggcgcttgctgagaagctatctagtcggtttgcgaatgaggaagatagggcaaaattccttgaaaaggttcaagcccgactttctgacgctccccagcctgaaatcaagatccgggaggccgtggctacaagcaaagagcccaaggcacaagcggaagatatggaacgctaa

SEQ ID NO: 40774 - DNA, 996 bp, Escherichia coli
atgaataagggctatgacactctagccgggttgctagaggggaaggtcaagaccaaggccaataagaccggcgatctgaaaggccgagttaagcgagtcacggataaagcatccgaggtgatggttaaggtatccggcgcggccaaaggggccgagcacgtaaaagctcacctggactacatcagccgaaacggaaagctagagcttgagaacgagcggggcgaagttatcaagggaaaggcagcggtaaaggaggttcacaaggaatggacgcaagacggcgggaaacgccgagccaataccagggataccgctaacctggtgctgtccatgccaaagggtactgatccgaaagctgtccgagactcggcccgggattttgctaaggggcagttcggggataactaccagtatgtttttgccctgcatactgacgttgatcacccgcatgtgcatctgaccattaaaacgctagggcatgatggccgccgtctccacatcaagaagggtgatccgcagaagtggcgcgaagggttcgcggagcagcttcaacggcgcggcattgatgctgaagccacacccagggcaccgagaggcgtagttaaaaaagccgtctcccaggtgatcaagaatattcggagtcggggcgagatcccggaggtcgataaggctaaggtcaaagagatcgtttccgagttcaaagataagcaggcaggtaagccaccgaaggctaaaccgtgggaagaaaagatccagcagcgacagcaggaggttagaaaatcctggctgtcggcggccaaagacctgaaccaaggcgatgccgaagatagggaactggcgagcaagatagttggctttgtttcgtctatgccaccgctggcaacagaacggcatgagatagccgccaagctggccgagcagatgaagccccaacagaaagcccaggacgtagggcagggcagggcaaaaccagagagggacgaagacgagagataa

SEQ ID NO: 40775 - DNA, 531 bp, Escherichia coli
atggcaaagagctatcggatcgaaaggcgcgtcactaaggagcaaaaagaagcctggcaggctttctgccacgctcagggcgtatctgaatccgacatgttgggcctaatgatcgagaaggttacggcgggcagtgttgcccttgaccataaggggctgaaggaaaccaagacggatcagctcaatatcaggttgaacaccagagacatgaaacgcatcacgaagcgagcgaaggccgaagggttcaccagtcggacggcgtggctaacggctgttgcaatggccaacctgaaccgcgagccggttcttaccgagagcgagatccaagcactgcgaacgtcaaacagggaattggcggcaataggccggaacctgaaccagatcgccaaggtactgaacaccgagtttagagagtcggataagctcaaccgccaggcggttctagctctatctgaaaagatcgattcccaccgcgaggaagtcgccggtttgcttcaacgcaacttaaacaagtgggggatcgatgaataa

SEQ ID NO: 40776 - DNA, 732 bp, Escherichia coli
atgaaaccaacattgcaggcttacgacgaactacagcgggcatatgatcactttaacaacgagctgtttgatggtgtcctgcccgattgcctgatcaccctccaacgagaaaaacaaacctatggctatttcagcccggagaggttcgttaactcccaaggaacccggacggacgaaatcgccatgaatccggcttacttcgctgtatgcccccccgaagaaattatgcaaacgctttgccacgaaatggcgcatctatggcagcaccatttcggcaagcctgggcggcgtggctatcacaacaaggaatgggccgacttcatggaaggtatcggactaatgccaagcagcaccggcgcacctggtggagcacgaaccggcgacaagatggcggattatgccattgagggcgggcgcttcctggaagcatatgaaagcctgatgacggatgactatcggatcagttggatggatcgctttcccagccgtgaaaagctaatggcagcaatcgccaatggcaccaccgatgaaatggccggggatctttctatcatgggactggccgggatctctgttgaggatggagaaatcacgttcgagccaggggagcggccaaataagtcgaaccgggagaaatatacctgcccaagctgccaggcaaacatctggggcaagcctgggctaaacgtcctatgcggagactgcgacaccgcttttgaaacgggcaactga

SEQ ID NO: 40777 - DNA, 228 bp, Escherichia coli
atgacggcaaaagcgaaaacctactttgccgctgctgttgccgttggggtgctgttgttgttcgcggcctatccattgctgaaggacagtcaaaccctgttggcgtggctggccattattgcaacggtggccgtgcttgtgctggcggtgccgtcgagaataggccgcagcttttaccaggcgacgttagccgcctggcgcaagctggcaaatggcgggaacaactga

SEQ ID NO: 40778 - DNA, 1188 bp, Escherichia coli
atgagtggtaaaggggcagacctcagcgggctggattcgttcaacctgtccgacctgatgggcgggcctggtgccgcgccagtagaggcggcggaaccagagaataacaacctgctgattcgtgaagtgccgatcagcaaaatccatccagaccctaacaacagtcgccagcgagtagacccggcaaaaattaccgaactggccgactctatgaaggcggtcagtaaggtaacaggcaaacaacggggggtgaaaaacccccttagcctgaagcctcacccggagcttgaaggcgagtttatgattaacgccggttttcggcgttatctggccgcacaggaggcgggccttgataccgtcccggcgtttatcgactctgacgccgacgagtacgataacgccgtcgataacattcaacgggaggggctgacggcccttgaaatggcccacttcatccagcgtcaaatcgacaacggagacaagaaatcagagattgccggaaagctgggtaagcccgcttcgttcgtgtctgaccatatcagctttttcgagttgccggattgcattcgtgagctgtacgactcgggccgatgcgtgtccgttcaagccttggctatcctgcatcgttcattcaagaactaccccgacgaggtggaaacctattgcatcgaaagcatggttgccgaggatggggacgaactgacaacggcagacgttcgccgcttcagtaatgacctgaagaacccgagcacggagccggacagtgacgaccagggcggcgcaggctggccaggtgcaggcggcgacaaggagccggacagtgacgaccagggcggcgcaggctggccaggtgcaggcagcgacaaagagccggacagtgacgaccagggcggcgcaggctggccaggtgaaggcgataaggacaagcaacagccgttgaccatcgacggagccccgattggcgggggcgggccggatgcggcggctaatgccctgctgaacgctgacgagcaacaaggcaaaatcaagaagccgatcattcaggtgcgctatgacgagcgaccggctcgcctgttgtccagtcgccgcgctgcatatggcttgggctggctgaagtacgacgacgacggggaagaaatcgaagttgatctgaaccaagttcagcttgttgctgttatcgagggctga

SEQ ID NO: 40779 - DNA, 753 bp, Escherichia coli
atgaaaattgttactgtatcgaatcaaaaaggtggcgttggcaagtccactacagcggttcatctggctatggcgttgcgcgaaaagggtatgcgtgtcgtctttgttgaccttgatccgcaagcgaacgcgacgaagacccttaccgtatccgggagccctgtagcattggccgctagtgctctttttggcgtcgagcctttcagtctggcggcgggagacgctattaccctaatcgaggccgatcccctgatggctgatatggaacgggctgatcctgccgtcctagccaactttaaaaagcaggtggccacgctggccagcgagtttgatttttgcatcatcgacaccccgccgactttgggccttcgcatgactgccgccctgattgtggccaactacgtgctttcccctatcgagctggaagaatactcaatcgacgggatcgagaagatgctaaaaaccgtcttcggggtaaagaacaagtggaacccggatcttaatttcctgggtatgctccccaaccgcttcaatccgcgcagcgaagcccaacgggaaacgctcaagcaactgttgagcaaatatgctcacctgctgattgccgccaagattggcatccgttcatctattcccgaggcgctttctgaaggtaagccggtctggcatctgaagaaaaccgcagcacgggaggcagctaaagagttccaggaagcctttagcattatctttgaaaaaatgggggtggctgaatga

SEQ ID NO: 40780 - DNA, 339 bp, Escherichia coli
atggccgcctgtgatagggtgaaggtcatggcgctgaccaacgaggaatttgaatcagcactaaaacaccttccccgccgcttggctgccaagaatgttgagatcgccagggcaatcctggtgcaggggcggcggcaggttgatttagtgaaagagtccggcctaagccgttcggcggtagcggctttggttaggaaggtgcgccaagcgcacgaaaagcacggcacccctccggcgggctgggtacgtgtttcggtatgtgtgccggtcgatatggccccaatagttaaggccatcgaggatgaggcatataaacaggctaataaaccaaagggttga

SEQ ID NO: 40781 - DNA, 858 bp, Escherichia coli
atgaccatgattaagcctgaaatgaaagaaaagatcgtccgagctgctgaatcacttcgatctgaaggggtagcaaagccaacaaatgagcaggtacgcgagcgcatgggcggcggctctttgtctcatatctcgccggttatgcgtgagtggcgggcctctcaagagcaatcggacattgttgtaattgagctgccgggggagctgaaagccgggtttgatcgtgtggctgccgagttgtggcaggtggctagtaaattggctgctgctgatattgaagcggttaaagctcatgccgccgagcatgtggctatggcagatcaggagcgtgatgaagccctggacgaagtggcccgcctggaaagtgaactagatcgctgtcgtgttgctgtgagcgaaaaggaggccgagactcgggccgccctctctgaaaagatcactatcgagcagaaggcaatcggcttggcttcagaggttgagcggctgactcaggaactcgccgtttgtcgccagtctatcgagtcgtttacctctgataatgccacgctcaccgcgaacctgaaggcggccaaccaggagatcgacaagctggccaaagccaaccaggacaaccagggcagcatcgaggcgctgaaggaagaacgggccacgctcaccgcgaacctgaaggcagccaaccaggagatcgacaagctggccaaggccaaccaggacaatcagggcagcatcgaggcgctgaaggaagaacgggccacgctcaccgcaagcctgaaggcggccaaccaggagatcgaaaagttgagtaagccagcagcgaaacgccaacagaaaaaagacgcagccgacaccaaagagtaa

SEQ ID NO: 40782 - DNA, 1068 bp, Escherichia coli
atgaccgaacataaggccgaacgtgctccctggggagacttcccggcagtagtgaggaacggcgatctaaaggatctctctaaagaacctgaatacgaagccgccaaacatggcgaccccgccgccgccttggccattgccaggcgtttgatgaaaccggagacggtcgattcagtgaaggccatgataggcgaccagaaacccaaggttgtgcctgtcctagctgttgagtcagggggaaacaacaagatcccgttaatggccgcgcatgtgctcgctgaccgtctagggcttgaggttgaatacagcattgtccaagcggaaaaggtcggtcgtacaaactcaaatgctgatcatcggctggccattaacccggcttttgtcggggaggtcgagcgtgaccagccttatctgattgtcgatgatacgctggcgatgggcggcaccctggccagcttgaggggctacattgagaacagaggcggcaaggtcttaggggccgctgtaatgaccgctcaccccggatcggttgatatgcctgttaagcctcaaatgttggcagcaattgagcagaagcacggcaaggcaatggatgaatattggaggtctacatttggctatggaatcgaacaactcacccaaggcgaagccggacacctcagaaaagcattatcggttgacgccatcagagatcgaatcactgcggcaagagatgcggcaggctggggaatgggcaaaagcggagctgaagcgcctgaacgcccaggaaagcaagagttaacgccagaacaggcgaaggccgaagacttcaggcagctatcaaaccaagagcttctgaagaagtatcccggcgataaggcgatccaggatgccgcaagcgtgtacgctgtcgcggataagttcgcccaggtaaacattcaagacgatgcagaacgggggcgattcgttgactcagtaagggcgcgactcgctgataacctggccctcgggaaggataacccaaccccgaagattgccgaggctgtagagcccaagccccggaaccatgaagacgatctagagcggtga

SEQ ID NO: 40783 - DNA, 297 bp, Escherichia coli
atgattagacctgaaacgcttaggccgtttgctgaagattggcaggctccaaccgccgatgaaatcaaagaggtgttggagctgattaggcaacgaaaagggcttagtaagccgctcagtggtgttgatgttgctgatctcgttggtttgcctggtgagaggggcagcggaaagggaacccgaaccttcagacgttgggtgagcaaaaccaaccctagccctattgcttatggtgcttggtctatcttggcccacctggcaggtttcggggctatatgggacgctgaccgggattga

SEQ ID NO: 40784 - DNA, 156 bp, Escherichia coli
atgaacacggatattgtatcacttgcaaaacacattggcgacgctctgacggcccgccgccccgttcatatgccacgcatgaagatgcgggagcttggcttgctcttggttgaactgaaggcgtatcgggaggccgccgcgaccgtttcccattga

SEQ ID NO: 40785 - DNA, 426 bp, Escherichia coli
atgatgcaaacagaacttaatcccctgatctgctccctggtcgccacccctcgccgtatggctgcaatgcctcgccatgtaggccgcttctatgtggtgttcgagtcgatgctttaccagcaaatgaaagggctctgccgcgagtatcgcggggcttattggcttatgtgggagctgtcgaacggcggcttttatatggctcctgggcgtcgtgatgaaatgctgaacatcgaggccatgaactactttagtggccaaatgagcgccgatgctgccgggattaccgcttgcctctacctctatagccatctgtcatttcacacggaaggcgctgaccaggagcgtttttcaaggctgtatcacagcttgcgggattgggcttgtgagcatgacgaaaaagaggccatcttggccgcaatagactag

SEQ ID NO: 40786 - DNA, 279 bp, Escherichia coli
atgatccacacagctaaccgcacctttcaccaactctatcgagaatggatacgcgaacgccgcgagcatatgcacaacgttttgacctgggagcgtgatcgttacggtgctcgtctcgtcggtctgttttatcgttactgcaaggtggccaacccctttccccgttgcactctgaatactcggatcaactaccgcgcccatgcggtgaatctgccagattggccagcccgcagcctggagctgaataaaatgtggctcagttggagcgaaaaaaagtag

SEQ ID NO: 40787 - DNA, 315 bp, Escherichia coli; identical to SEQ ID NO: 9363

SEQ ID NO: 40788 - DNA, 327 bp, Escherichia coli
atgaaaagtatttatgttgttggtaaaggtttaattgtcgccggaaataaaatcacaattgatggaaaagagcatgttacagtagaaaatagtgacaatcttattgtcactgatgattgcattaaaattggcaataaaactgtggtttttaaaggccggagtattaagatagaaatacatggcaatgtgaataaaatagtaactgaaaatgctgatgttattattcatgggaatgctggagacgttgaaactgtaagtggtgatatcgattgtcgtcaggttactggcgatataaccactgtcagcggtgatataaacaggaagtaa

SEQ ID NO: 40789 - DNA, 357 bp, Escherichia coli; identical to SEQ ID NO: 23236

SEQ ID NO: 40790 - DNA, 1347 bp, Escherichia coli; identical to SEQ ID NO: 8463

SEQ ID NO: 40791 - DNA, 873 bp, Escherichia coli
atgaatccgtctgatgccattgaggcaattgaaaaaccgctctcctccctgccttactcgctttcccgtcacatcctggaacatctgcgcaaactcacccgtcacgagcccgtgattggcattatgggtaaaagcggggccggtaaatcttcactctgtaatgccctgtttcagggggaggtcacaccggtcagtgatgttcacgccggcacccgggaagtgcagcgcttccgtctgagtggtcacggttacagcatggttatcactgacctgcccggggtgggcgagagccgggacagggatgcagagtatgaagccctgtaccgtgacattctgcctgaactggacctggtgctgtggctgattaaagccgatgaccgggccctgtctgtggatgagtatttctggcgacacatcctgcagtgcggacatcagcaggtgctgtttgtggtgacacaggccgacaaaacggagccctgccatgaatgggatatggccggcattcagccctctcccgcacaggcacagaacattcgcgaaaaaacggaggcggtattccgtctgttccggcctgtacatccggttgtggccgtatcggcccgcaccggctgggaactggatacgctggtcagtgcgctcatgacagcgcttcccgaccatgccgccagtcccctgatgacccgcctgcaggacgagctgcgcacggaatctgtccgcgctcaggcccgtgagcagtttaccggtgcggtggaccggatatttgacacagcggagagcgtctgtgttgcctctgttgcacgcacggttctgcgtgccgtccgtgacacagtggtctctgttgcccgcgcggtatggaactggatcttcttctga

SEQ ID NO: 40792 - DNA, 126 bp, Escherichia coli
atggaaggagcgcttgaaaaagccctggctattgcgtgccagcttcagaaaatggggatgacgccggagcagattaagcaggctaccggactttccgatgacgaactgaagaaaatcactcactga

SEQ ID NO: 40793 - DNA, 210 bp, Escherichia coli
atgctgataggttacgccagggtatcaagggacaagcaagaaacggcgctgcaactggacgccctggacaaggccgggtgtcagcgcgtttacgttgagaagctatcaggggccagcacagaacgcccagagcttgaacggtgcctagataccttgagggaaggggatacgttgattgtgtggcacttagaccggcactgttgcaaatag

SEQ ID NO: 40794 - DNA, 297 bp, Escherichia coli
atgaaccaatcacgaccggccacacctggccagatacttgaaagggaattcttggccccgtacggaatcactcaaacagacttggccacccataccggatggacaagaaagcacgttaatcagctatgtcgcgggcgagtgcctgttacagtcgatagcgcgtttatcctggcagcagctacacgaacagagccggaatactggctagggctgcaaagtgccgtggatctatgggacgcagagaatgacgaggcgttgcgtagtcgtctaggacaggtgaggccgttagcggcatag

SEQ ID NO: 40795 - DNA, 1380 bp, Escherichia coli
atggcgcaagctcagttgtccttgttcggtcagaacgaggcagaaacatatcacgacacaagcgcaaggggctttttctcgctcctggtgcaatggccaaccggcaaacgtcaatcctctttccctcttgagcagatgccaacagtccttaatgctgttgatcatcgtcttgatacctggctatcacaggccgagtttatgcggccaaacaggcgagtcgtgaacctccttcggattggtttgttattcgctgatctcgatacctacaagatgccctgggctcaaggtcgcaagcctgaagaactggcggcggccatcacgtacttttgccagtctgaaggcataccgcagccatccatcatggtctattcagggcgtggcattcaggctaaatggctactggaaaggccagtacctcgccaagccctgccccgctggaatgcttgccaaacccatctaatcaacaagctggccgagttgggcgctgatccaggggcaaaggatgcaagccgagtgcttcgcctggtcaataccgtgaattcaaagagcggggccgtgtgccgtgtggttcacgtactggaagaagggggcttacccattcgctacaacttcgagtatctggctgaaatgctgttgccggtggctcgctgggacatcgagaagcaaaaggcggaacggcagcaagccaggctgacggtcgttaatggtggcaaggtcgggaacctgcgcaccttcagcggtcgtcaactggcctgggacagactggaagacctacgcaagttgggccagctcagaggcggaatcaacgaaggcgagcgaatgaggcatcttttctggcgtcttaactttctccttctctctggggcgacaaacagcgcccagatgtaccatgaggccgccgctctttcctccgagctggatactcgttggtcttaccgctccaaagagcttatgacgctctacagcaaggcgaaatcctatgaggctggggaacgtgtcgagttcggcggaaagtcgtttgcaccgctatacacgcccaaaaacgacacgctgatcaacctattccagatctcacagcaagaacaagagcaactgaagacgattatcagcactgacgaggctcagaagcgccgcagagagcgcgatagactgcgtgatgaagaacgtcgccgcgccgctggccagcttgagcgtgaagcctatgaagccaactcattgagcaggcaaaagccctgggaagctatgggcatgagccgggctaaatggtatcgcctgggtaagccttcacctcaacaaaacagtgagacaagtccctcccctattactaatggcgaagcctcagcggttgcgcttcaggcggctaggtgtgaagccgtttag

SEQ ID NO: 40796 - DNA, 366 bp, Escherichia coli
atgaaacgcaaggtcaatctgcgcctgagcaaaacatgtctggtattccagttcccgtcgttctgcctcacgttcccgctggcggctgtatttctgctctgtcagcgtggttttctgacgacgccgctcaccttcacgaaaaggaacggacgggaacagacgatgccccgcatcggatggcaggggaagaacacagacttcaccaaaactttcaatcagtttatccacggcagccagccacaggagacggttgccatgaaattcctccttcgtcagcgcaggagcaaaaaagcggagatcggtcagcgaaatccggcggctgccattcaggcagcgaaagaaagcgctggcataaggccatgctga

SEQ ID NO: 40797 - DNA, 219 bp, Escherichia coli
atgttggtatcgctgattaccttcattgtttgttgcattaacccgaacgcgatttcgatgatttacgcgatcagcggcccgctcattgccatgatacttttcatcatgcctacgctgtcaacgtatctcatcccggcgcttaaaccctggcgttccatcggaaatctgattacgctgatcgtgggtatcttgtgcgtatcggtaatgttctttagctaa

SEQ ID NO: 40798 - DNA, 192 bp, Escherichia coli
atgaatatcagcacagaaacccgcgaaattctgcgtaattacaaagccgtgattaatgcgcggcgtcgtgaaatggggcagaaaccgctcaccactgcgcagattgttgatgaaatctgcgattttgtggcgaatcagcaggctgtattcctcggcggtcactacatccttcagggcagcagaaacaggtga

SEQ ID NO: 40799 - DNA, 477 bp, Escherichia coli
gtggataaactgattgaaagttttggggaagtctgtgttcttcccctgccatccgatgcggggcaccgtctgttcccgtccgtgccttttcgtgaaggtgagcgtcgtcgtcagaaaaccacgctgacagagcagaaatacagccgccagcgggaacgtgaggcagaacgacgggaactggaataccagacatgttttgctcaggcgcagattgaccttgcgtttcatactcccgccacggtcggaagctggttgtcccgctggtctggtgttgttgaggagcatgatctggaaacgattttctgggggtggtgcgggcgttttccatcactgtcatcatttgaccggtttttctggcaggaggaaccactctggcggctgatttttgaagccggtgaggccggtcgtggtgcaccggtacaggtacgtgcacttgagcagtggatgatcccgaacaagctggagaacgtaatatga

SEQ ID NO: 40800 - DNA, 597 bp, Escherichia coli
atgatgaaatcagacgaacaatatcaggttcccgtgtggatgcgacctctgttgccgttgctctgcaataccggtggtaatgatccggaggaactgctgaatgatacagaaaccaccgccagtgcgaatattgtccgttatgtactgatagttgcagtgcggtcgcagattgatctgctgcagctactgtacaggaaaggactgttgcgcacagagataccaggtggcttttcaccggaagaagcgcaggaactcctggataatctggtgcgcagccatatcagcaaggcgctgtcgggtgagcgaatggcagcccgtgacagaaatgccgatctgacctggattcgccagcaactggtcgatgccgcctggtttgtccgtgccacactggaagcgcatgggatgggcgtcggaaatgagagtccctctgctctgccggagacaatgccggacatacagacacgggaactggttatgttgatcaagcgactggcatcatcgctgaaagcggtgaaacccgacagtagcgtggtgcgtgaagcgcaggactggctgtgcgacagaaaacttgtggatatcacagatattctccggtga

SEQ ID NO: 40801 - DNA, 192 bp, Escherichia coli; identical to SEQ ID NO: 5763

SEQ ID NO: 40802 - DNA, 528 bp, Escherichia coli
atgagtgcacgtggtatcaacaaggtcatcctcgtcgggcgtctgggcaatgatccggaagtccgttacatccccaacgggggcgcagtggcaaacctgcaggtggctacgtcagaaagctggcgcgacaaacagacgggggaggtgcgggagcagacggaatggcaccgcgtggtgctgttcggcaagctcgcggaagtggcaggtgaatatctgcgcaagggcgcgcaggtctacatcgaggggcaactccgtacccgtagctgggaagataacggtatcacccgttacgtcactgaaattcttgttaagaccacgggcaccatgcagatgctggggagtgcaccacagcagaacgctcaggcgcaaccgaagcctcagcagaatgggcagccacagagtgctgacgcgacgaaaaaaggtggcgtgaaaacgaaaggccgtggacgtaaggccgcgcagcccgagcctcagccgcaaccgccggagggggaggattacgggttttcagacgatatcccgttctga

SEQ ID NO: 40803 - DNA, 528 bp, Escherichia coli; identical to SEQ ID NO: 15035

SEQ ID NO: 40804 - DNA, 648 bp, Escherichia coli
atggcagcgacgcacacactccctctggcgtcaccgggcatggcacgcatctgcctttacggggatttgcaacgatttggtcgccgtatcgaccttcgtgtgaaaacgggggctgaagccatccgggcactggccacacagctcccggtgtttcgtcagaaactgaatgagggctggtatcaggtgcgcattgccgggcgtgatgcaggcgaaaatgaattatctgcccgtcttaatgagccgctggcaaatggtgccgtgatccacatcgtgccgcgtctggcgggagctaaaagtggcggtgtgtttcaggtggtgcttggggcggcgctgattgcggtggcatggtggaaccctgtgggctggctgggggccgcggctgtatcgggcatgtatgcggcaggggccagtatgatcctgggcggagtggcgcagatgctggcaccgaaagccaggacgcccacggcagccagtacagataacggcaaacagaacacctatttctcctcactggataacatggttgcccagggcaatgttctgcctgttctgtacggtgaaatgcgcgtggggtcacgtgtggtttctcaggagatcagcacggcagacgaaggggatggtggtcaggttgtggtgattggtcgctga

SEQ ID NO: 40805 - DNA, 366 bp, Escherichia coli
atgaaacgcaaggtcaatctgcgcctgagcaaaacatgtctggtattccagttcccgtcgttctgcctcacgttcccgctggcggctgtatttctgctctgtcagcgtggttttctgacgacgccgctcaccttcacgaaaaggaacggacgggaacagacgatgccccgcatcggatggcaggggaagaacacagacttccccaaaactttcaatcagtttatccacggcagccagccacaggagacggttgccatgaaattcctccttcgtcagcgcaggggcaaaaaagcggagatcggtcagcgaaatccggcgactgccattcaggcagcgaaagaaagcggtggcataaggccatgctga

SEQ ID NO: 40806 - DNA, 315 bp, Escherichia coli; identical to SEQ ID NO: 8997

SEQ ID NO: 40807 - DNA, 741 bp, Escherichia coli
atgctgcaaaatattcgaattgtgctggtggagacgtcacacaccggcaatatgggttctgttgcccgtgccatgaaaacaatgggattaaccaatctgtggctggttaatccactagtgaaacctgactcccaggcgattgccctggcagcaggggccagcgatgtgattggtaatgctcacatcgtcgatacgctcgacgaagcgttagccggttgtagtctggtggtgggcaccagcgctcgctcccgcacgctgccgtggccgatgctcgacccgcgcgaatgcggtctgaaaagcgtcgctgaagcggcaaatacgccggtggcactggtttttggtcgtgagcgtgtcggcttgaccaatgaagagttgcagaaatgccattatcatgtcgcgattgcggctaacccggaatacagctcgctgaacctggcgatggcggttcaggttattgcctatgaagtgcgcatggcctggctggccactcaggagaacagcgagcaggttgaacatgacgagacgccgtatccgctggtcgatgatctggaacgtttttacggtcatcttgaacaaacgctgctggcaaccggctttatccgtgaaaaccatctggggcaggtgatgaataagctgcgtcgtctgtttacccgtgcgcgcccggaaagccaggagttgaatatcctgcgcgggattctggcttctatagagcagcagaataaaggtaataaggccgaataa

SEQ ID NO: 40808 - DNA, 876 bp, Escherichia coli
atgtttaggttgaaccctttcgtacgggtcgggctgtgtttgtccgctatttcttgtgcatggcctgtgttagcggtcgatgatgatggcgaaacgatggttgtcactgcatcttccgttgaacaaaaccttaaagatgctcccgccagtatcagcgtcattacccaggaagacctgcagcgaaaaccggtacagaatctgaaggatgtcctcaaagaagtgcctggcgtacaactgacgaacgaaggggataaccgtaagggcgtaagtattcgtggtctggacagcagctacaccctgattcttgtcgacggtaaacgcgttaactcccgcaatgccgtcttccgccacaatgatttcgatctgaactggatcccggtcgattccatcgaacgtattgaagtggtccgtggcccgatgtcgtcgctgtacggttccgatgcgctcggcggtgtagtgaatatcatcaccaaaaaaatcggtcagaaatggtcgggtaccgttaccgtcgataccaccattcaggaacatcgcgatcgcggtgatacctataacggtcagttctttaccagcggaccattaattgatggtgtgctgggaatgaaagcttacggcagcctggcaaaacgtgaaaaggatgacccgcaaaactcaacgaccaccgataccggagaaacgccgcgtattgaaggattctccagcgcgacggcaatgtggaatttgcctggacaccgaatcaaaatcacgattttactgccggatacggtttcgaccgtcaggatcgtgattccgactcgctggacaaaaaccgcctggaacgccagaactactccgtcagccataatgggcgttgggattacggcaccagcgaactga

SEQ ID NO: 40809 - DNA, 222 bp, Escherichia coli
atgtctcatctcgaggagctggtgccgggcgtggagcagtacagtattgatgagatgtttctcgacgtgcggggtattggcagctgcatcgatttcgaggatttcggccggcagctgcgtgaacacgtcaggaacgggactggcctgactatcggtgtcggaatggggccaaccaaaacgctagcaaagtcagcacagtgggcttccaaagagtggccatag

SEQ ID NO: 40810 - DNA, 798 bp, Escherichia coli
atggacagaagaacatttataaaatcttccgcattagtaacagcagcaataacatctaatactgtttttgctgaaaataatcgatgcgaaatagcacaaaacaacggtcttgataagggcgcaaaattttatcgcaatggaaaggttgcacaatataaaggatgttccgtaatctgccatacagataaagacagcaatttatttaaagcaatgcttaatattcaggttcgaattcaacgagattttggtgattgcattgtgttattacctccaaactcttatcacatgactatcatttctttaattagtggcgatagaaaaaatccttggccttataacacccccacgaatataagcatggaggaagcgacaaagttaattgcaaatacacttaaaaataaacaaataggatttgaaaaacctgttacaatgaaggtagatctaaaatctacaccatcgctacctccagagtgggacgataataaacaaccagcctttattatacctttaattcctgcaagcaactcagataaagaaatactaatcaactttagaaattccgttgctgaaataacaggagtgaaacataaaaaccatgacacatatagatttcatacaacttttggttatcaattcaaaccaatgacaaaagaaacatacacgcaatttaaaaaagattattatgaatggttggattacctaaataccgaagcagaaccaattacatttagtaatccagcactatgttattttaatgacatgtttcaattcgaccctgtattagaattcaatacataa

SEQ ID NO: 40811 - DNA, 231 bp, Escherichia coli
atgattgatatacaaaagctagctgattatttaggactcacagttgatgagcttgaagcgtcgggagttagcgaagatgatattcaggagaatcatgggaattctggagaaatgcactattcgtacttcttagtgattcctgatgatgctaatgttgagatattgaagaaagccaaattttccttaactcctggtaagataataaatattccacgttgggatttggaatag

SEQ ID NO: 40812 - DNA, 891 bp, Escherichia coli
atgttcatctcagacgaaacgattcgaattattcatctggtcgccagacaccagaacatcaccaccgcagccgaacagttaaataaagtcccttctactatcagttacaccctgaagaaagcggaagaaaccctgggcgttgaactgttcattcgtaagggacgatatattgaattatctccggcggggagttacttcatcgaacatagcaaaaatattctccgcgatctggatgcattaaagcgcaacacagtgctgattcacgatggtattgagcgtgaactgacaattgcggtgaacaatattatacctggtgattttctggtgtcatttattcaagattttgaacggcaattcacatcaacaacactgacggtagatattgaagtatacaacggctgctgggatgcgctgtacagtaaacgtgctgatctggtctacggtgctcctcatgcagtaccaagcagtgaaggcatcattagcgaaccggtcggacaaatagaatgggattttgtcgtcagcccacttcatccactggcagtgaagcggaatccattagaaaacagtgaattgcgtcattatcctgcggtttgtatccgggatacctccgttaacttccccccaatgcaagcctggttgttggaaggacaaaaacctatttttgttcctgacttcgccatggcaatcagcttaatagaacaaaacgtcggtattggttatattccacatcatctggcattgccgttattgaacagaggtaaattgcttaaaaagccaatgcgcgaacataaacacgccaccaagttatttcttgccgctcgttccgatggtataggaaaagcctgtctgtggtgcatgtcgtatttaagaaataagcaattcatggcgtaa

SEQ ID NO: 40813 - DNA, 1032 bp, Escherichia coli
gtgggagaaaaagcccgcctgccaacatacggtattgtgaaatattcatttggcgaaaaaggggccatcgccattaatattttgatggctataagtctgttcggctggattgccgttaccgctaatatgtttggtcattcggtgcatgacttactggcgcagaatgggattgaagcgccactggcactgttagtggcagctggttgtgtcatttttgtcgcctctacggcctttggtttttccattctgggcaaagttgcccaggtcgccgtgccggttatcgcactggtgctgtgttatatactctatgtggcaacccataccgaagtatcagcgccagcagcgatagcggagatgagtacaggtgtcgccgtttccaccgttgttggcactattattgtgctggttgctacacttcccgacttcggtagttttgtacataaccgaaaacatgctctgattgccgcaggtatgacgtttctggttgcctaccctctgctatactgggcgggtgcaacgccgagtgccattagcggccagggctctttactgaatgctatggcagtattcggtgcggttatgcctgcagcactgttgctgatattcgcctgcgtcaccggtaatgcgggcaatatgttccaggggacgttggtagtttccacactgcttagccgctttcccaaatggcagattaccgttgcgctgggtatcctttccgccatcgtaggcagtatggatattatggcgtggtttattccgtttctgctgttcctgggtatcgcgactcccccagttgccggaatttatatcgctgactttttcctttatcgccgtaatggctatcaagagtcggtgttaactcaggagtcacaggttaaagtactgacattcgctgcatggatcacaggcacagcggttggctttatgaccgtaaaaggcttattcaccctgacgacgatcccttcagttgactccattctggtggcatgtatcgcgtatgcgattctcagtcgggcaagtcaacaccgctaa

SEQ ID NO: 40814 - DNA, 516 bp, Escherichia coli
atgggtgcgatttctgttaaacatgtggttttgtcgttagcattaatattgccgactacgtcaaattcctctaatgttttaatcgaaccgggcagtagtttgaacggtggagttgtgaccttttatatttcttgttctgacatgcctcagaacacaaccattgatatagataattgtctgcggattcagctaactcagatcgaatgggtcaggaataagtattcaactgccgctttgaatcgtttgaaggaagaccataaaaatgagccacagcgtctgcgggacttaacagaagcttttgacgcagaaagtgaagcttggtcagaattagtagaaaaagcctcaacgtcagtagagagcgatgcttctggtggagtaaccactaattccgcaattgcatcgcgtcaaattagtctacagaaattacgaacacatgatatttgggaacactggttacgatttgaagattcaacaccaccagttttgccagaaccccagtttaaatctgaccgataa

SEQ ID NO: 40815 - DNA, 540 bp, Escherichia coli
atgtggatcagcccggcattccatctgaaggtgatccgtactttcgatatggtaaccagcgcacccgaaaaattatccgggcaggctgctgacaagatgcaggctggcgtgatcctgctggactttatgcgccgggaattaaacctgtctaactcatcagtgcttggtgcctgtcagaaactccaggaggctgttggcttaccgaatctggcaccgcgctatgccattgatgctcctgctgacgcgcctgatggctcaagtcgccccacgctgtcgctgagtgcactgctgaaacagtatggtatccgccttacggctaatcaggtatatcaccagatggtgaagctggggatcgtcgagcagcgcgaacgatacagccgtacctcgattaacaacatcaaaaaattctggtcgctgacagtgaaaggctgcatgttcggcaagaacatcaccagtcctgcaaatccgcgcgagacgcagccgcacttcttcgaatcccgattccctgagctgttaaagctgctcaataccgttcattga

SEQ ID NO: 40816 - DNA, 270 bp, Escherichia coli
atgaaaacatatgcaataattactatcattctttctactttgctattaactgcttgtaattctgaaccatccgacaaagacatctataatgcattgagcaaatggacgggaagcagtctgacttctgtgaaaaaaatagattgcacaaaagaatctgataaaagttataagtgtaatgtaataactgtgtttgataatcatttaaaacaagcatcaacaattaaattattaaaagcagatgataatagctggcagtttgtaagcaattga

SEQ ID NO: 40817 - DNA, 480 bp, Escherichia coli
atgagccttatgagtgagattcaaaaattcattgaaagcaatcctggatgtacgaccggtgatattgcgaacgcgtttgcatactttccacgtccccgtgtactgaatacgaccagtaagttacgccagtgcagacgtgtcgcttatcgcagtgaaggcaaaacacacaggcatttttctcgcaaggctgtattgccacctgagccggtgctgaaacatatgagtgtggccagtaaaagctacgtcggcactaatgatcagcgggtgattttgcgcctgattcagcaggcagaagatctggagtccagaggtttattccgccgggctgcaacggtgtggatggaggcattccgtgaaagccactcccagccagagcgaaacaattttcttgcgcgtcgtgaacggtgtttacggaaaagcagcaagcgggctgcatcaggtgaagagtggtatctgtcagggaattacgtgggggcttaa

SEQ ID NO: 40818 - DNA, 231 bp, Escherichia coli
gtgaatgaaggaggagcacacgtagacgtagaaatctggcaactgcctctggccagttttgccgaactgttaatgaacgaacccgaaggcctgaccattggaaaaatcaaacttgccgatggtagcgaagtactgggcgtactggcagaaagctggctgactgaaggccagaaggagattacagcactggggggctggcgcaaatacaccgggaattttcacacgatgtaa

SEQ ID NO: 40819 - DNA, 255 bp, Escherichia coli
atgatgcaagtaatttcagcagtcgctgaatttgaacgagaccttttacttgaacgcactcattccgggatagtaagagcccggggcgcagggaaacgttttggtcgaccacctgtgttaaatgaagaacagaaacaggtggtattcgaacggattaagtcaggtgtaagtataagtgccattgcccgggaattcaaaacctcgcggcaaaccattttaagagccaaagcaaaacttcagacacctgacatataa

SEQ ID NO: 40820 - DNA, 426 bp, Escherichia coli
atgaagaaattatccctttcactgatgctgaacgtgtcgctggcgctgatgctggcactgtccctgatttacccgcagagcgtggccgtcagttttgtcgccacctgggcgattctggcgacggttatctgtgtggttgccggtggtgtcggcgtgtatgccacggagtatgtgctggaacgctacgggcgggagctgccgccggaatcgctggccgtgaagattgtcacgtcgctgtttttgcagccggtgccgtggcgcagacgggcggcggctctggtggtgatggtggcgacgtttatctcgctggtcgctgccgggtggatttttaccgcgctgatttatcttgtggcgtcgctgtttttccggctgatacgtaaagcctgtcgtcagcgtcttgaggggcgggaactatgtcaaagctga

SEQ ID NO: 40821 - DNA, 363 bp, Escherichia coli; identical to SEQ ID NO: 5701

SEQ ID NO: 40822 - DNA, 1272 bp, Escherichia coli
atgttgccgtccgttgtcagtcggcaggtcgccgacagcgttgccgcctttttacgggcggcgttcccgctaaacagcccgctgtttaacggtgagaataacgataatgtctcaatgctggagcaatttctggcccagccggaaacgctgctgaaaggaccatacctttccgcccagttgccgtttcgtaaaagtgacttaccgctgaattttttccctaatctgacgctgccgttcccgccgcacgcgcatcaggcccgggcatttcagcgtctgggaagcgacgcgccacagccgacgctggtcgcaaccggtaccggctccggtaaaacagaatgttttatgttcccgctgctcaaccactgcgcgggcgcgtcacaagccggggttaaagcgattatcatctacccgatgaacgccctggcaaccgatcaggccagccgtttcgccaaaaccatcgccagcgatccacaactgcatggcaaggtgaccgtcggcctgtttgtcggcgacagcgaaatcgaacccagcaaaaaaatgtcggcagaaaaggtcattacctgtaagcacacgctgcgcgaaagcccgccggacatcctgttgaccaactacaaaatgctcgactacctgctgatgcgccctggcgatcagccgctctggcgttacaaccagcccggttcattgcgttacctggtcgtggatgaattgcatacgtttgatggcgcgcaagggtcggatctggcctgtctggtgcgacgtttgaagcatcacataggtgtggataaccaacgattcgcctgcgtcgggacatcagctaccgtcggcgacgaactggggcaactgctcgattacgcaaaaacaatctttgaccagccgtttaccgatgacgccgttattcgcgaagatcgctacacggcagcggagtacttgcagaattacgccattgcgtacagtcagtatccggggccggaggtcgcttcggccctggacccgcagagttacgctaccccggtagcgtatcttaacgggcaaatccctttgtggttccccgacagcgacttgcaactcccggacgatctggagagcgacgacgggcgtgaaaagcgtattgcgctggggtcactgttacgccgccacagcgtgtgcatgtcttactccatgatctgcaaggcgggatcctctctgaacgagagtgtctggaaaatctccaggtcatgctggcagaaagcgccgaccatgcccgacgcgtgctgcaaagcattctggcactga

SEQ ID NO: 40823 - DNA, 732 bp, Escherichia coli; identical to SEQ ID NO: 37765

SEQ ID NO: 40824 - DNA, 285 bp, Escherichia coli
  misc_feature (189)..(198): n is a, c, g, or t
atgcttgaggcgagaaattatgatggtgcaccaggattacttcttgcgtatcaaaatggagatattaatacgattcagtctttttttgactcactaataatgttagatatatcaaaggattttatcgaagagttattgactgcaaaacattatgattttacggggttatcattagcgatcagtcatagnnnnnnnnnngtcatagacatgatcatgttgtcaaattatacggaaagttatttaaaaaacttgataccagtccatataaaatgtcaattatcctag

SEQ ID NO: 40825 - DNA, 429 bp, Escherichia coli
gtgaaaaagccgtttcaccttgggataaatattgccgctgaacatcttgcacatcctgattttgttgctgatgttttacatataaaaaatgcaatatctgataaatttaacattgtccttgagattaccgaacgcaattttggcacgggatattgttcccttggccttctgcaaaagttgtctgttgattatcttaaaatagataaaagctttatagacacgctcactacagcggaagacgaaacgcctgttttagatattattattaagctgagtaatcgactcaatttgataacgattgcagaaggtgtcagtacctctcaccaggcggaatatcttattcataataacgtgacattagttcagggatacttatatgcaaaaccaatgaaagcgacagagttttatcaatggtatgtaaacagataa

SEQ ID NO: 40826 - DNA, 438 bp, Escherichia coli
atgcagacgactgtcatccggatactgacgacgggccacttccagggcttcagatcggacgcctttagccgcagccagcgatttggcaaagcgggcgaagccaatccccttatccagtttctgctccacacggatcaccggcgcagaagccaccgcggccacattcccgttaccggcctgtttcaccggctgcgccgtggcggccttaccggcttccagttcacgcaggcgcttcaggtgcgcatccacctgacggatttccgctgcggtgttgtcgtaatgctcttcctcctccacatccagcgtgcgcccttcctctgcggctttggtcatgacctcctcaagggaggctgccagcgctgcacgcttgttttcaaaacttttaatctgttcgccaatattcattatggtcttttccttatgaaaaacggttgttga

SEQ ID NO: 40827 - DNA, 468 bp, Escherichia coli
atggtccggatggtgcattccgcattcgcgggcacggtgacggcagacacctccatcagttcccagcgcagaaaatgcagtccgcctccgtccagaaaggtgtattcatggggacggaagcccacggacagccccctgaccagcccggtcttaatggccgcccagacctcatccagccgggcagccagttgcgacggcatatccggtacgggcttcaccagtgttgccgtgatttccagcccttcgctgacccggcgcaccgtacactgccccaccgggcgggaatggtcatgctgccagagaaacgggatcgcactgccaaactccgcgccctccggctccaggatgtcaccatcccgatccggagaaggcgttgacgcaatcccggtgatcacccgttcatcctcactgaaggatttcaccgtcagcagggaacaggcccgtttaagagtcacatcagcctcctga

SEQ ID NO: 40828 - DNA, 411 bp, Escherichia coli
atgcagacaactgtcatccggatactgacgacgggccacttccagggcttcagatcggacgcctttagccgcagccagcgatttggcaaagcgggcgaagccaatccccttatccagtttctgctccacacggatcaccggcgcagaagccaccgcggccacattcccgttaccggcctgtttcaccggctgcgccgtggcggccttaccggcttccagttcacgcaggcgcttcaggtgcgcatccacctgacggatttccgctgcggtgttgtcgtagtgctcttcctcttccacatccagtgtgcggccttcctctgcggctttgttcatgatctcctcaagggaggctgccagcgccgcacgcttgttttcaaaacttttaatctgttcaccagtattcattgctga

SEQ ID NO: 40829 - DNA, 468 bp, Escherichia coli; identical to SEQ ID NO: 40827

SEQ ID NO: 40830 - DNA, 570 bp, Escherichia coli; identical to SEQ ID NO: 37228

SEQ ID NO: 40831 - DNA, 384 bp, Escherichia coli
gtgttgttagaaagcgataatgttaatgatcctattggcgatgaagtccgctctattcttgatgggcacatcgtacttacccgagaacttgcagaggaaaaccatttccctgcaattgatattggtttaagtgccagtcgtgttatgcataacgttgttacatcggagcatttgcgtgcggcggcagaatgcaaaaagcttattgcaacttataaaaatgttgagctgcttattcgtattggtgagtacacgatggggcaagatcctgaagcagataaggcaataaaaaataggaaattaattcagaactttatacaacaaagcaccaaagatatcagtagttacgaaaaaacgattgaaagcctattcaaagtggttgcctga

SEQ ID NO: 40832 - DNA, 468 bp, Escherichia coli
atggtccggatggtgcattccgcattcgcgggcacggtgacggcagacacctccatcagttcccagcgcagaaaatgcagtccgcctccgtccagaaaggtgtattcatggggacggaagcccacggacagccccctgaccagcccggtcttaatggccgcccagacctcatccagccgggcagccagttgcgacggcatatccggtacgggcttcaccagtgttgccgtgatttccagcccttcgctgacccggcgtaccgtacactgccccaccgggcgggaatggtcatgctgccagagaaacgggatcgcactgccaaactccgcgccctccggctccaggatgtcaccatcccgatccggagaaggcgttgacgcaatcccggtgatcacccgttcatcctcactgaaggatttcaccgtcagcagggaacaggcccgtttaagagtcacatcagcctcctga

SEQ ID NO: 40833 - DNA, 513 bp, Escherichia coli; identical to SEQ ID NO: 37232

SEQ ID NO: 40834 - DNA, 432 bp, Escherichia coli; identical to SEQ ID NO: 24031

SEQ ID NO: 40835 - DNA, 285 bp, Escherichia coli; identical to SEQ ID NO: 37763

SEQ ID NO: 40836 - DNA, 207 bp, Escherichia coli
atggaaaaaatcacaacgggtgtgtcatacaccacgtcagcggtggggacgggatactggttactgcagctgctggacaaagtctctccgtcccagtgggtggcgataggtgtgctggggagtctgctgtttggcctgctgacgtatctgacaaacctttatttcaagattaaagaagataagcgtaaggcggcgcggggagagtaa

SEQ ID NO: 40837 - DNA, 147 bp, Escherichia coli; identical to SEQ ID NO: 23916

SEQ ID NO: 40838 - DNA, 549 bp, Escherichia coli
atgcgccaaagcagcacagcagaatatcgccaggctgtgcggaaggcagggaaatcctgtaaaaaccagtcgcctccatattgtctaggtacaggttctgaccgttgcgccaccagtcatcctcacgctcaaaatccggcatatcaattcccgccagatggtaggcatcccggaacagcgtgtaacagtccgtcaccccgtgctcaaagcgccgtcctgtcagatgtggcacacagcggaatttatgaatttccccccggcagaccagccaccaggacagtgcactttttatctgcagccgccggtcggcctcgctcagccagggcagaccaccgggatgactgtggaccagtgccacaatctccccctgcatctctgcccgcagccagtcttccggtgcaatacgaaaatacgcctccggctctgcagagatattcacacaagggatataccgctccccctccggcgttctcaccacgaagccgcacgactccgctggcgcacaccgccgggcatgcgccagaatcgctgattcagtctgtgtcataa

SEQ ID NO: 40839 - DNA, 222 bp, Escherichia coli
atggcaaaaatccagtatctgcagggcacgcatgatgcccgggccggggatatccgtgatgtggcacagccgtgtgcggaggtgctggttcgcctggggaaggcggagtacatcacagcgcgacgtccggcaggtcagaaaaagaaacgtgatgcggagcatggcgaatgtggaaccttttgcggcgaacccgaaaaaaccagaaatcaggacgtgacgtaa

SEQ ID NO: 40840 - DNA, 222 bp, Escherichia coli; identical to SEQ ID NO: 40839

SEQ ID NO: 40841 - DNA, 1116 bp, Escherichia coli
gtgctgggagagcgtcatgctgccagcaataaacagtcatgggactccagccagtggcgtcaacagtcgcgcttcgatcttacgttaagtcagagccttgcgaattacggcaacctgtttgtgtcaggttcaacacagaactaccgtggcggcaagagccgtgatacacagcttcagttaggttacagcaatagctttagccatggcatcagtatgaacctttccgtcggacgccaaagaatgggcggctataaagacaattctgatgatatgcagacggtaacatccctttcattctcattcccacttggcggcaatggacctcgtgtaccaagtcttagcaacagctggacccattcaactgacggtagctcgcaattacaaagctcgctaaccggaatgcttgatgaagcacagaccaccaactacagcctgaacgtcatgcgcgatcaacaatataagcagacgacgcttagcggaaacatgcaaaaacgtttttcacaaactaccgtcggattgaacgcatcgaagggccaggattactggcaggcttcaggtaacgtacaaggcgcgatggctgtgcatggtggcggcattactttcggaccttatctgggtgaaacgttcgccctggtcgaagctaaaggcgcagaaggtgcaaaagtctataactccagtcagctggaaattaatgacagtggctatgcgcttgttccggcagtaacgccctatcgctacaaccgtatatctctcgatccacaaggaatggatggcgatgccgagttggtcgacagtgaaagacaggtagcaccggttgcgggtgcggcggtgaaagtaattttccgtacccgtcctggtaaagcgttgctgattaaatcccgcatggcagatggttcggaactgccaatgggagccgatgtgctggatgagaataatacagtcgtcggtatagccggtcagggggggcaaatttacctccgcacagaacagacaaaaggccacttgtcagttcgctggggtgaaggtgctaacgatagctgccaattgccctttgatatcagcgggaaggacagcaatagccctatcatccgcctgaatgaaacctgtcagtcttga

SEQ ID NO: 40842 - DNA, 1380 bp, Escherichia coli
atggggaataagtggaaaacatcttttttaacagatcattacatcattagttctggcctttccaaacccgctaaagattttggtacagggtatccattcttatcttttaaagatattttttataattactttctacctgattcactgacgcagttagtacaaagcacagagaaagaaagagtgacttgctcagtaaaacgcggagatgtttttcttacccgtacaagcgaaactatgcatgaattaggcatgagttctgtagctttaaaagattatgcaaatgctactttcaatggtttttgcaaaagattgcgcccaaaagaaaaatctgaattagaaccagaatatgtcggatattatttacgcagccctttatttagacagaatatgcttgcgttttcaacaatgtcaacaagagctagtcttaacaatgaaatgataagtcggctggaaataagttatcctgatcgtaatatacaaaaaaagatagcaaacattttgctatctctggataaaaaaacagcaatattaaaaaccattaaccaaaccctggaagaaatgtcccaaacccttttcaaatcctggtttgtggattttgatccagtgattgataacgctctggatgcaggaaatccaatcccggaggctctgcaatctcgtgccgagttgcgtcaaaaagtacgtaatagtacagattttaaaccgcttccggcggaaatccgctcgcttttcccaagtgaatttgaagaaacggagttgggttgggtgccaaagggatggcaaattaaatcattagatcatattgctaatttccagaatggtttggctttacaaaaatttaggccgaagaatatggaggatgattatttacctgtattaaaaatagcagatctccgagcaggacaaataactaatgacgaacgagcaagaactgatatttctgatagttgtaaggtgtatgacggcgatatgattttctcatggtcggggactttgatgatcgatatttggactggtgggaatgctgcattaaatcagcatttatataaggtcacatcaaaaaaatacccacaatctttttattttatgtggacaatacagcatctttcaagatttcaacatattgcagaggcaaaagcggtaacaatggggcacatcaaaaaaggagatttaagtaactctttctgtctaattcctacttcatcgttgattactaaatatgataatatcgttggaggatatttagcgaagattaaaaatcaaagattgttaaataaccaaatgaccgccctacgcgacaccctgctcccgaaactcatctccggcgagctatccctggacgatattccggatctcaccaccgatacagaagctgcataa

SEQ ID NO: 40843 - DNA, 1248 bp, Escherichia coli
gtgaaaaagttcagacacgatgacgacaaaggttttattctgctcgaaatactggcgggactgatagtgattggtatcgccacgccgctgatttattccgaaatagaaaactggctgaatgaacagctttaccagagtgctgcttcccatgcagatgcctacaataccgcagccagaaattacattgccgataacaatgccactctgcacaacggcagccttccggcaaactttacagccgatgatttgattcgcaagggatacctgaaacagggatttaatcattctccgtttgggcagagttatatcacgggtatccgccgtaaccagactacaggacgtcttgaagccctgacctgctcaacaggggggcagaatatcaaagaagatggtctgcacagtgtggcaggacagcttcccgggctgggtggttatattggtaaaaacggaacagcaaccggcgcattcggcgcctggacagacaaaccgggggattacggactcacctgttcggcaggtcacattgccgtcgtcatgacgggtgatgatctgcaggaaagcgacaggttgtatcgttttcaggtcccggggagaccggagctgaaccagatgcacaccgccatcaacatgggcggaaatgacatcaataacgccggtaacctcaatggtcagaaagccacggtgaaaggcgatataaccagcgaagacggctggcttatcaccagaaacaacaagggggggatgaacacgacgcacggaggcggtttcaccatgactgacagccagtggatacgcgccgtcaataacaaagggatcaccaccggtggtgaaatcaaagggggcgaagtcagcggtggaacgatccggtctgacggtcgtctttccacaggtgagtatttacagctggaaaaaacagccaccgcaggtacttcctgctcaccggacggacttgtaggccgcgacagtaaaggggcaatactttcgtgccaatccggtgtgtggaaaaatgcaggaaaaggcgatattgaaatcgtcaaagtaacagcatcaaaactccgctggcctggtgctactgccacctgcccaatgggtaagaaggttatcgggggtggtgcagaatgcagctctggaattggctttatctggcttgtccgttcaatacctgtaaacaataatgcctggtatggctattgcgatacgacagaacacatcattggaaaaataactgtacatgccatttgccaatga

SEQ ID NO: 40844 - DNA, 141 bp, Escherichia coli
atggagaacgactccctttgccgtctggtttttctgccagccagtgtacctggagcgtcagcaatgctgaaaacccgcatggctggaagccaaattacttcgcaggttctgttgcaacatatgattcgaacaggattgtga

SEQ ID NO: 40845 - DNA, 393 bp, Escherichia coli
atgtttcgaaaaatcaaaattcgcaaaatgactctcaaccgggcgctggacaaatacctgaaaaccgtttccgtccataaaaaagggcatctgcaggaggtttatcgcgtcaatgtgattaaacgtcaccctgtggccgatcgctatatggatgaaatcacgaccgttgatatcgccagttaccgggatcagcgtttggctcaaattaacccacgaacagggcgtcaaatcaccggaaacaccgtccgtcttgaacttgctcttttatcatcattattcaatatcgcccgtgtggaatgggggacatgccgtatgaatcctgttgaactggtccgaaaacccaaaatcagtaatgggcgagatcgtcgcctgacttctggcgaagaacgctga

SEQ ID NO: 40846 - DNA, 291 bp, Escherichia coli
atgaaatgcgaaggcttctggcgggatgtcaccccgccactgaatatttatggtgtccctctgccgttcacgatgatttacctgtttctggctccgtacccgtcaaaaacgaccttctggatatgtaccggcattctggcgttttttgtgctcctgggatataccggctggacggtgagaacgctcagcagacgactactgagtcagttacagggcactgtggcatcggggcgcccgtggtggtacaggcattttgtggaaatcccgcgaaaccaccactggtcagactga

SEQ ID NO: 40847 - DNA, 582 bp, Escherichia coli
atgctttaccctgcgatggattatattgctgttcttattatcctggcttttcttctggttactttatttatctgcctgttctgcatgataaacgaacatataaaaaaagaatctgaaaaacgaaaacaggaattcatcaataaaaaaggatggaatatcgctgatttctcatggttcagatataaccagcaccatgaaaccggtattaatgtgacaatggacaatatcattattgtgatgatatccgtgaacagcaggttgttaaaaaaagaatacagcctgacatctctcacgctagacacgaatgatattgccgaaatttctctgtcagaaaataatattatcactcgtaaactttccctcatccgaccggtatcagatgacagaccggcacaacttccggaatcagaaatcatcaacaccatccggttatgtatccggcaaaaagataaacctgatgatattacctttattctctaccagggaaaactggaccctcgtggaagcaaccatacaataataaaaggtaaggctaatgccattatcctgctgttaaaaatgcttcttattaagaaagcataa

SEQ ID NO: 40848 - DNA, 858 bp, Escherichia coli
atgttcagatttgtgtttttagttttcatgtttcttgtaaatataacaacaccgtctgtggctaaaacgttcactgccttcattcttaccgggcagtccaactcattaggcgcaataaaaggaaattttgccagcccccagaatatgtcaccaattcctgcaatgaagttctggcatcataactttggagaatattgtaccggaacaccttctcagtcatggggatatgtatcaccgcaatatgaatcacaaattgttatgggaccagaatatggattttctcaggaaatacaatcctattattcaaatccggaattgattcatcatatgggcatcattaaagcatccagagacggcggtggtaactcaaactggattaaaggtcatggtgatgcttatgctattgtactgagtacagtagaggatgcattacgacagttacctgcaaaaggatatgataaagtccggattgccggattattatatttacagggcgaatcagataaaggccaggagattgctttatcgtcagtgcggctcttaaatttcataaaaaacataaagtctgacatttcagatataaaaataaaaggtcttgatattgatatcaataacatgattgtacttcttggcgaaaatgcatcatggcatggtattgataaaaaattcaatggagaaacaacgcgggacaatctgtataaaacagcacaacagaacaaagacattatatgggtgagttcccgcgacttaagtaaaatcaccacaggtgacaatatgggcgttcattataatggtgatgctcagttaacacttggtaaacgcttcgccagagcatggattaatgcatatgaaatgtaa

SEQ ID NO: 40849 - DNA, 828 bp, Escherichia coli; identical to SEQ ID NO: 29807

SEQ ID NO: 40850 - DNA, 150 bp, Escherichia coli
atgtatgaaacgtgttgtgataccggtacgctggcaatgtgccagatgtcagcgctggtattgtggcgtcggcccctgtccctggtgctggccccccgtgaatcttcctgtgtctcctccggtcagccagcagtttgtcatcctgactga

SEQ ID NO: 40851 - DNA, 663 bp, Escherichia coli
atgcagcatcaggtggcacggcatcacgggcagttcaggaaatccgggctgcacgcgaacagtgggaacgtgacaacggatttatcagcaacggaaacggcctggaagctgtgggagctcatgggggaggtgtattcgaaccgctggactcagaagaacggggccgcaccttcgaagctctggattgcccagattggtgcgatgactgaacagcaaatccgtctggtgtgccgtcagtgcatggaccgctgccgggcgggtgaaacgtggcccccggacctggctgagtttgttgcgctgatttcggagagtggggcaaatccatttggtcttacggtggatgccgtgatggaagagtaccggcgctggcgcaatgaatcctggcgatacgacgggagtgataaatacccgtggccacagcctgtgctgtaccacatctgcctcgaaatgcgtaccagagggattgagcgccagatgacgcaaggtgagttaaaacgacttgcggaacggcaactgacgaaatgggcaaagcatgttggtaacgggatgagtgttccgccagtgcgacgacaactggaaggggcgaaacacccgcaagggccaacgccaattgaacggctgaaacaggaatacgaacgccggaaggcagctggttttatttga

SEQ ID NO: 40852 - DNA, 249 bp, Escherichia coli; identical to SEQ ID NO: 23611

SEQ ID NO: 40853 - DNA, 168 bp, Escherichia coli; identical to SEQ ID NO: 29866

SEQ ID NO: 40854 - DNA, 309 bp, Escherichia coli; identical to SEQ ID NO: 24051

SEQ ID NO: 40855 - DNA, 156 bp, Escherichia coli; identical to SEQ ID NO: 37815

SEQ ID NO: 40856 - DNA, 468 bp, Escherichia coli; identical to SEQ ID NO: 23852

SEQ ID NO: 40857 - DNA, 453 bp, Escherichia coli; identical to SEQ ID NO: 37816

SEQ ID NO: 40858 - DNA, 1401 bp, Escherichia coli
atgaacagtgaaggaggaaaaccggggaatgtactgaccgttaacggcaactataccggaaacaatggcctgatgacgttcaacgcgacgctgggcggcgataattcacccaccgataagatgaacgtgaaaggcgatacccaagggaacactcgcgttcgggttgataacattggcggcgtcggtgcgcaaacggtcaacggtattgaactcattgaggttggcggtaattctgcaggtaatttcgcgctgaccaccggaactgtcgaagctggggcttacgtctacacgctggctaaagggaaggggaatgacgagaaaaactggtatctgaccagtaaatgggacggcgtaacgccagcggatacacccgatcccatcaataatccccctgttgtggatccggaaggcccatcagtttatcgcccggaggccggaagctatatcagcaacattgccgcagccaactcgctgtttagccatcgcttacacgaccgtctgggtgagccgcaatatacagattcactgcattctcaggattcagcaagcagtatgtggatgcgtcatgtcggggggcacgaacgttccagtgccggagacggccagctaaatactcaggctaaccgctatgtattgcagctaggcggcgatttggcgcagtggagtagcaacgcgcaggatcgctggcatcttggcgtgatggcaggctacgccaatcagcacagtaatactcagagtaatcgtgtgggttataaatcggatgggcgcatcagcggttacagcgctgggctgtacgcgacctggtatcagaacgatgcgaataagaccggcgcttatgttgacagctgggcgctgtataactggtttgataacagcgtcagttccgataaccgttctgctgacgactatgattctcgcggtgtgacggcctctgttgagggtgggtatacctttgaagcgggaacatgtagcggcagcgaagggacgctgaatacctggtacgtccagccacaggcgcaaatcacctggatgggtgtgaaagattctgaccatgcccggaaagacggaacgcgcattgaaacggaaggcgacggaaacgtgcaaacgcgacttggggtgaaaacctacctgaatagccatcaccagcgtgacgatggtaaacagcgtgagttccagccttacattgaagcgaactggatcaacaatagcaaagtctacgccgtgaagatgaatggtcaaaccgtaagccgtgatggtgcgcgaaatctcggtgaagtacgtaccggggttgaggcgaaagtaaataacaaccttagcctgtgggggaatgtcggtgtgcaactaggtgataaaggctatagcgatactcagggcatgctgggagtgaaatatagctggtaa

SEQ ID NO: 40859 - DNA, 435 bp, Escherichia coli
atggctgctagcccccgatctcacaaaatctctatacccaatttatattgcaaattagataagcgaaccggaaaggtatattggcaatacaaacatccactatccggtcgttttcatagcttaggaactgatgagaatgaagcaaaacaagttgctactgaagcaaataccattattgctgaacaacgtacccgacaaatattaagcgtcaatgagcgtctggaaagaatgaaaggcaggcgctcagacattacggtgacagaatggcttgataaatataattctatccaagaggacaggctgcaacataatgaactaagacccaactcctatcggcaaaaaggcaaacccatccgtcttttccgtgagcattgtggaatgcaacacctccaggatttccggggcggttcacctcaaggatattaccgcacttga

SEQ ID NO: 40860 - DNA, 702 bp, Escherichia coli; identical to SEQ ID NO: 37699

SEQ ID NO: 40861 - DNA, 270 bp, Escherichia coli
atgaatattttgagaaagcttatgcagagtctgtgcggttgcggaaagcatgatgactgtgaaaacgggcagtcgcttacagcacaactgcgactgggaccggcagacattctggagtcagatgagaatggcattattccggagcaggacagggtaatcacacaggtggtgatactggatgcagataaaaagcagatacagtgtgtggtaagaccgctgcaaatcctgcgtgctgacgggacgtgggaaaatattggcgggatgaaatag

SEQ ID NO: 40862 - DNA, 174 bp, Escherichia coli
atgattggattggtgtacttcgagagcgctggagagatcagccgcaggattgtactccgccctacccgttgcaattgcgtagcgaaacacttcggagcaacgctgccgcactttgcgcattttctccaacgcaccacgtttctcaattttacgcagaacgttcagcagctctag

SEQ ID NO: 40863 - DNA, 156 bp, Escherichia coli
atggatactatcgatcttggcaacaacgaatctctggtgtacggcgtgtttcccaaccaggacggtacattcaccgcgatgacgtataccaaaagcaaaacgtttaaaaccgaaaatggtgcccgtcgctggctggaaagaaactcaggtgagtga

SEQ ID NO: 40864 - DNA, 153 bp, Escherichia coli
atggatacgctcaatcttggcaacaacgaatctctggtatgtggcgtgttccccaaccaggacggtacgttcaccgcgatgacgtataccaaaagcaaaacgtttaaaactgaagctggcgcgcgtcgctggttagccagaaacactgactga

SEQ ID NO: 40865 - DNA, 369 bp, Escherichia coli
ttgtgcgaatacgttcgtattgccctgcgtcggcatattttaggtcgctatagcgttagcggtacacttctgaacgtttggcttattggctctgatattgaaaatgagctacgagagtcgatcagacaaacgtcatcaggttcgtatctgaatatctcaccggagcgaactgagcagataattggcttcttaaaaaatatcatgaatccaacggggaacggcgtcattctgaccgctttagatatcaggcgctatgtgaagaaaatgattgaaggttcgttcccgtcagtccccgtgctctcttttcaggaggttgggaataatatcgaacttaaagtattaggaactgtaaatgatttcagagcatga

SEQ ID NO: 40866 - DNA, 297 bp, Escherichia coli; identical to SEQ ID NO: 23762

SEQ ID NO: 40867 - DNA, 513 bp, Escherichia coli
atggctgtttgtctcaataatgctcgccggccccagacgaaaacggatttgtgtctcccccgggtcgcccttcggtccctgaggtccggttgcccccaccgggccagccgcacctgtttctcctttcggtccctgtgggcctgccgggcctgccgcaccggtatctccctttggaccctgtggacctgcatttcccgtcagaccggtctctccccgctctcccctgtcacctttcggcccctgcgggcctgccggaccagcatcacctgccggtccccgttcgccggttgccccgacagggccggtgtcaccgcgctctcccttatcacccttcggcccagccggacctgctggccccgtgtcccctttatctcctttcggaccgggaacaccacctcctgctgcagcctcttctgcctttgttttcgcttcatttgccacatccattgccgctttcaccgctttcggggtggcagccttcgtttcatcatcactgtccgttgcgctgcttaa

SEQ ID NO: 40868 - DNA, 159 bp, Escherichia coli
atgctgatatcgccttatctggtctggtttcatggggcagccttaacagttatgccgcatgtcctgatggctggcagcatcattccggtatcgaaacgtcgtaccggtattgcggcggcgagacgtgcagcaaagaaacgcaggagagcaaagcgatga

SEQ ID NO: 40869 - DNA, 792 bp, Escherichia coli
atgaataaacaatacgaactggttgttaaagggataaatatttacccggataagattactgttactgtggcgctggaaactggtgggtatacgtcactgttgttgccaaatgtggtgattgatcttgatcgtgttgaaggtgccccgctggagttttacgaagctgaggcgaaaaagaaggcgaagcagtttttcatggatattgctgccgggttatgtgaagggaacgaaccgttgccggaaaagcgcctctgttcagaagagcggtataccatacaaattaacaatgcatataacacgatacagtcagaaaaagatgatatcgaatcacgcattgaaaaactggagaacagcgtcgttgaactgaataaaaaactgtcggtgcagatcccttccgaaggtgaaaaaaaacgccgtgatgagcagttcgcggcgttttacgattattgccggaaagtgatgagcagaaatctcgcagagtgtttccgtattcaaaaaaacagagagcgctctgcaaatagtgagattctggataattttttaaaggggacgcatctcgccagtgattgtttcattgctcattcttttggtggctttcatgaggccatcaaacatgatgttgagagaagtccaggtatcctctgttccattcccgtaagcatcgaaatagacacaaatacgataaccggtgaactcgttaccgccggagtcggtatattccgtcatgaggggaacgatgccaaaggttcctttacaaaaatcgggccgttctttctgaaggtagagcgatag

SEQ ID NO: 40870 - DNA, 372 bp, Escherichia coli
atggagtttgatgtagtacgttttgccgttctttttggtggtgaagtaccggtctgccatcattgccatcggtacagggcgttcgacaacttcgcgaatggtttcaccagtttcctggtccttgcgctctgcaatcgtccgcatggtatccggtctgtcatcggtgaatacctgccagtaatccttgtcgggattatcctgcaccagtttcaggaaggcgttacccacttcgtttttgcgatggcggatcagcgattcgctcaggtcctgtatcgcctgagtggacggagactgtgcccgggatgcacgccccatggcctgcctgctttcacgtccgccgatggtgaagcccttacctgtacggggcagtga

SEQ ID NO: 40871 - DNA, 513 bp, Escherichia coli
gtggtcgttttaccacaaccggtgaggttaagggccagagtttccagaaaggacaagctccggcaccggaaaacgccgctggtcgccagggggaaacactcgagggtgacatggttcgtcgtggtctgccgtcaccggatgcgcagaacgcgacagcaccggtacgtgaagggctaccggctcctgacattgcgcgtaatgttcgtatgcctcagcctgaatcacttccccgcactgtacgggactcactgcctgagcttgcacagcaggcagaagtacgccgacaggccggaggaaatcgtgacatcccgcagcctgagacaatcgcacctgaatctgaaacaactgtctctactgacagggaagctaccgtgcgcggaggtgaagtcaggggcaaaaaaattgaagactttggtgaagaaattaagggcgcggcaaaacaccgttatgcacagcttgctgaaacactgggtaaaacgctggaagacagggattatgccacgcagccgctga

SEQ ID NO: 40872 - DNA, 210 bp, Escherichia coli
atgtttgtttctgaagtgttaatggaagataaggacaacaaaggatgggttaaaggttgggctgtggtaagaagctcgccctggcatcttgttggggtttttgcgacagaggaagacgcagaaacggaagcaagaaagatgggagataagtacgaggttcactatggctcgcatcgaacaggaagtgatgattttgtctggggggagtaa

SEQ ID NO: 40873 - DNA, 225 bp, Escherichia coli
gtgaaaaaactgatggtgacgattggtccgttcgaaacagaagttagttttcgtgttgttcagggggagagtgtacttgttgaagatgtatttcatggaaaatcaacaggtccttatgtaaaagaatatcttatcgacgccacggatgaaaatattgaggtggtgtacgattccgtcaatcaccctgatttgatcattaaggcaaaattgaagccactttattga

SEQ ID NO: 40874 - DNA, 480 bp, Escherichia coli
ttgattataaaaaaaaacttattatttattttagtttttatcagtgggtttattctcttcactgtctattcttacactgcagaaaaaatgatatataacgaaacatgcactgcaaattgggtaatttttaatgaccagggacgagcaaatcttaccatagactttatgtataacaaaaaaaataaaacaggaactgttgcgttgagtggaacctggcaacaaggtaacagagaaagtaaatcaatacggcgaaatattgaatacacatgggttgaaaactatgacacagcccatttaacatcaaagaaagttaataagtttgagattatggatcaagtcgatgatgatagacttgcagaacttattcctgatttttatgtctttccagaaaaaagtgtaagctataatatactaaagcaaggtaagcatgcttttattttgagcattggtaacagagcaataatgcattgtgcaaggtaa

SEQ ID NO: 40875 - DNA, 396 bp, Escherichia coli
gtgggcaaagctttcccccgggactcccgtgcaccggagcggtggccatcagggaccattaccgtcagggtttatgacgatcagccgtttgaccggcagattgttattccggcggtggcattcagcggcgctaaacatgagagagagcatactgatatttactcctcatgccgtctgatagtgcggaaaaacggtgctgaaatttataaccgtaccgcgctggataatacgctgatttacagtggcgttattgatatgcctgccggtcacggtcacatgacgctggagttttcggtgtcagcatggctggtaaataactggtatcccacagcaagtatcagcgatttgctggttgtggtgatgaagaaagccaccgcaggcatcagtatcagctga

SEQ ID NO: 40876 - DNA, 396 bp, Escherichia coli
gtgggcaaagctttcccccgggactcccgtgcaccggaacggtggccatcagggaccattaccgtcagggtttatgacgatcagccgtttgaccggcagattgttattccggcggtggcattcagcggcgctaaacatgagagagagcatactgatatttactcctcatgccgtctgatagtgcggaaaaacggtgctgaaatttataaccgtaccgcgctggataatacgctgatttacagtggcgttattgatatgcctgccggtcacggtcacatgacgctggagttttcggtgtcagcatggctggtgaataactggtatcccacagcaagtatcagcgatttgctggttgtggtgatgaagaaagccaccgcaggcatcagtatcagctga

SEQ ID NO: 40877 - DNA, 345 bp, Escherichia coli
atgccggagaggcggagacgtccgcgaggaatgccggcatatcagccagtcaggcagaagagagcgctgcaaatgctgacacttcagcaggggatgcatcggagtcagcccggcaggcggcagaaagtgcagccgctgcaaagcagtcagaggaggcgtcctcgtcctcggcctctgcggccgctcaaaaagccagtgagtcattacaaagtgcaacagatgctgagttgtcaaaaaagacggcagaaagtgcagccggtaatgcagccagggatgcaacgaccgcagcagaaaaagcccgggagtcagcagaaagcgcacagtcagcggaacaaagcaggatag

SEQ ID NO: 40878 - DNA, 546 bp, Escherichia coli
atgattggccaccgatgcgccaaagcagcacagcaggatatcgccaggctgtgcggaaggcagggaaatcctgtaaaaaccagtcgccgccatattgtccaggtaaaggttctgaccgttgcgccaccagtcatcctcacgctcaaaatccggcatatcaattcccgccagatggtatgcatcccggaacagcgtgtaacagtccgtcaccccgtgctcaaagagccgtcctgtcagatgtggcacacagcggaatttatgaatttccccccggcagaccagccaccaggacagtgcactttttatctgcagccgccggtcggcctcgctcagccagggcagaccaccgggatgactgtggaccagtgccacaatctccccctgcatctctgcccgcagccagtcttccggtgcaatacgaaaatacgcctccggctctgcagagatattcacacaagggatataccgctccccctccggcgttctcaccacgaagccgcacgactccgcaggcgcacaccgccgggcatgcgccagaatcgctga

SEQ ID NO: 40879 - DNA, 513 bp, Escherichia coli
atgtaccgcgtactcaaaaaagacgcgctgatggtcagcttctacggctggaaccgtgtcgatcgctttatggccgcctggaaaaatgcgggattcagcgtggttggtcacctggtcttcaccaaaaactacacatcgaaggccgcatatgtgggctatcgccacgaatgcgcctacatcctggcaaaaggtcgtccacatctgccacaaaacccgctacccgacgtgctgggctggaaatattcgggcaaccgccatcacccgacggaaaagcccgttaccagcctgcaaccactgattgagagcttcacacacccgaacgcgattgtgctggacccgtttgcaggcagcggctcaacctgcatcgccgccctccagtccggacgccggtatatcggtatcgagctgcttgagcagtatcaccgtgccgggcagcaacgccttgccgccgtgcagcgggccatgcagcagggggccgcgaatgataactggtttgaaccggaggctgcgtaa

SEQ ID NO: 40880 - DNA, 144 bp, Escherichia coli
atggcggcgcaacagaaagcgcagaacaagcagaatatcggtacgggcattggtacgggggcggctattggcgcatccgttggtggtcctgttggcgctgttgctggtgcagtaattggcggcattgctggttctttgttttaa

SEQ ID NO: 40881 - DNA, 366 bp, Escherichia coli
atgaatgcgaaccagagtgaccaggtaaccgggcagattgacacaaccacacgggggcaggtatcgcaggcagataagtatgttgccgggctacaggatgttgctgctctcggttctggtcagaaggcggatgcgttacagagttttaactctctggcagacagcagtctggcaaaagctaaatcggatgcacaggcggcgtttacgaaacagcaggggcgagcctctcttgttggcgctggtctgggtgcggcaggtgcatatgcgatgcataaggctggcggtagcggaggaagtggcggtgctaaaacacctggcaccggcgctaatgccattcagcatcaggctcagaactggagactgtaa

SEQ ID NO: 40882 - DNA, 195 bp, Escherichia coli
atggcgagatacggggtaaaccgcccggataatcccgacagtaatacgctggggttacgtaatgccctggcaattgctggcgcgaaaaatggtatccgtgaagccgaacaggatcgccagatgaatattctgacgggggcttctgcaccggcaagacagaaactgagtgttggcggccaactggtggcagcgtaa

SEQ ID NO: 40883 - DNA, 774 bp, Escherichia coli
atgaaattacctaaaagactctattatccgttacctgaagcggcagaaaagttaggctgtgcaataaaagatctttatcattacgcatatataggtgctcttaatatttctgtatatataccaaaaattgatgctaaaaaattcaatttttcattatgtcattttatcaatggttgtaatgaggaagaattaataaaatatcctttcaatgatgaatctgctgtttttggaagtaattttacagttggtttaactggtgacactgaatttttagatagtgccattattggtcctgtagggaattctatcaaatgttattatgttagcagcttatcagggttttattatactccggcatatgtttttgctgatgtcgaatttagcatgagacaatatataaaatgttctcatcttacgaataagtatggtgatgataatctcatgtatgttttttgtaagggtggttatgaatttgatgttaactatttgtgtgtgatggctagtgatttagataatataaaaaatacgggagacttcccgaagataacagaagatagcccaaaagcatcgtcaaaaaggaatgaggttatttactctttaattaaacttattccagaaatgggtgatgtagacctggacacggaatcattacctaaaatagcagatttaattgattctatagctgcatccagagggatagaatttccaaaaacacattggcagacatggcaaaagtatttggggcgtgaatctcaacaaaaacgtaaaaagtga

SEQ ID NO: 40884 - DNA, 204 bp, Escherichia coli
atgagaaatcataccacacacccgcaagggcgggactcgcacaacctgaataaatacatctggcgttttctggccctgagtgccggagaatctcaaatcatccacgtaaccgcctggacggaacgcgaagcgcgtagccgttgcccgtcaggttgtgttgctgtatttgtcgcccgtattcgtcagggggtgtgccgtgcttaa

SEQ ID NO: 40885 - DNA, 243 bp, Escherichia coli
atgaacaataacaaacgcgtaatttgcgaattgaatgaactcacacaaagcgcaatatcttacaacaatgccgtaagtgagattattaacgtctggtttgaatcgctgacaaattgcgagcgtgacgagtcaacgacaagattaacctttgccatttctgaattactgaatatttccaccagcaaaatagagagcatatcagagaagattaacggcttatcaggtcacgctatcggagaataa

SEQ ID NO: 40886 - DNA, 393 bp, Escherichia coli; identical to SEQ ID NO: 37408

SEQ ID NO: 40887 - DNA, 366 bp, Escherichia coli; identical to SEQ ID NO: 37406

SEQ ID NO: 40888 - DNA, 513 bp, Escherichia coli
atgaagaaaaataacttgccgtatattcctcttgatgaagagtatagcttgaattttgctatgcttgccattgctatatctatattatctcatagcaaaaaaggagtgttatcattagatattaataaaatacaaatttttatgtatctgataaaaaacccatcaaaaattgattatgctcttacagtttcggggaaaaagcctgcttgtgtcgagtcccagttaacttatacaataaagagtttttcaacaaatgtagatatcttattcgacaattccaaagtgaaatatcttataaaaattatgtcattgcggggattgctctcagctgagaaaaaaaataatgagagtgttaaattatttttatctgaaaaaggtaaggaatttgctagctcattgactgatggatattttaaagaaataaaacgactatccgaagcattgttaccgctacaagcattgcctacctctaagttaaactctgttataaatcaagtcttcaaggagaaatga

SEQ ID NO: 40889 - DNA, 456 bp, Escherichia coli
atgtcactaaccagacggaggtttacacagattcttgcgtcgacgttgttcctgcatcatctgccttcttttgcacaatcagtcaaattctgggcctcactgacgcttcccgaagcccaaaacattacacgcatcgtcagcgcaggtgcgcccgccgatttgctattgctggctgtcgcgccagaaaaaatggtcggtttttcctcttttgattttgcccgtcaggcattaattccattgtcagagcacattcgccagttacccaggctgggacgactcgccgggcgcgccagcacactctcgctggaagggcttatggcgttacatcccgatttggtcgttgattgcggcaatacggatgaaacctggatctcccaggcacggcaggttagcgaacagacacaaataccctggttattgcttaacggaaattggcgcaatcagcagaacagttaa

SEQ ID NO: 40890 - DNA, 480 bp, Escherichia coli
atgttcacgattaaaacagatgatctcacccatccagcagtgcaagcattagtggcttaccatatttccggcatgctgcagcagtctccccctgaaagcagtcatgctttagacgtgcaaaaattacgtaacccgacagtgacattctggtcagtatgggaaggcgaacaactcgcaggaattggtgcgctgaagttgctggatgataaacatggcgaactgaaatcaatgcggaccgcgccaaattatttacgtcggggtgtcgccagtctgattttacgccacattttgcaggtcgcccatgacagatgccttcatcgcctgagtttagaaacgggtacacaggctggatttacggcctgccatcaactttatttgaagcatggtttcgttgattgcgaaccgtttgccgattatcaacttgatccacacagtcgatttttgtcattgacgctatgcgaagataatgagttgctttga

SEQ ID NO: 40891 - DNA, 234 bp, Escherichia coli
atgaaaaatatcgttcctgattaccgccttgatatggtgggtgaaccctgcccttatccggcagtcgcaacccttgaggcgatgccgcagttaaaaaaaggggaaatcctggaagtggtgagcgactgtccgcagtcgatcaataatattccactggatgcgcgtaatcacggctatacggtgctggatattcagcaagacgggccgaccattcgttatttaattcagaagtaa

SEQ ID NO: 40892 - DNA, 1053 bp, Escherichia coli; identical to SEQ ID NO: 23847

SEQ ID NO: 40893 - DNA, 561 bp, Escherichia coli
  misc_feature (521)..(530): n is a, c, g, or t
atgttaattaataaaagcaacggatttaacgctagcgcagtttggggtagtggaagttataatgaaaataaatcttctaaacacatggagctactagctcatagtattgtaaaattaatttgtaaggaagctgcatcagagacgtatcgcggtgctcttgaaattttacaaaaaataatgtctgaatgtatatatcaagaaggcaacgcctttgtcattatgggagctggggaacaattaaaacgtattaaatatgatgttgatgaaaataacttaaaggtattcaacgtacactttgataataatgaagtgttagttactgatggtgagcctgacgtagtatgtttaagcaagcaggtctgggaaaatcttctcattaaattaaaaccggagatcaaggaaaatgtggcttctgaagttcataaatcagcgaataaaggtgagattgagcaattagttgaatggtctaaaagaaatgaacaaacccttttcgataatataataaaaagtgattttcatgnnnnnnnnnncatgttggttcacttaagccaggtagtatga

SEQ ID NO: 40894 - DNA, 147 bp, Escherichia coli
atgccatggacccttacagggattcgctatgaaatatcgcagcgaaaatatattgttatgaatcccgccgattatgataaatattccgatatggttaaaaagcatgtaatagatggtgaggaattcataattaaatattatatgtaa

SEQ ID NO: 40895 - DNA, 480 bp, Escherichia coli; identical to SEQ ID NO: 40890

SEQ ID NO: 40896 - DNA, 669 bp, Escherichia coli
atgtgtggacgctttgcccaatcccaaacgcgtgaagattaccttgcgcttctcgcggaagatattgaacgcgatattccctatgatcccgaacccattggcagatacaacgtcgcgccgggaaccaaagtcctactgctcagtgaacgtgatgaacaccttcatctggatccggttttctggggatatgctcccggatggtgggataaaccgccgctgattaacgcccgcgtagaaactgcggcaaccagtcgtatgtttaaaccgctctggcaacatggtcgggcaatctgttttgccgatggctggtttgagtggaaaaaagaaggcgacaaaaagcagccttattttatctatcgtgctgatggacaacctgtttttatggcagcgataggcagcacaccgttcgagcgcggtgacgaagccgaaggatttttgattgtcactgcagcagcagaccagggtctggtagatattcatgaccgccgcccgctggttctgtcgccagaagctgcgcgggaatggatgcggcaagagattagcggtaaagaagcctcagaaatcgcggccagtggctgtgttccagcaaaccagttctcctggcacccggtatcgcgcgcggtgggtaatgttaaaaaccagggtgcggagttaattcaacctgtttga

SEQ ID NO: 40897 - DNA, 234 bp, Escherichia coli; identical to SEQ ID NO: 40891

SEQ ID NO: 40898 - DNA, 1206 bp, Escherichia coli
atgtcatggcagcaattcaaacacgcctggttgattaaattctgggcgcccatccccgcggtcatcgcggcgggtattctctccacttactattttggcatcactggcaccttttgggctgtcacgggtgaatttacccgttggggcggtcagctcctgcagctgttcggcgtccatgctgaagagtggggttattttaaaattatccatctggaaggatcgccattaacccgcatcgacgggatgatgatcctcggtatgtttggcggctgctttgccgcagcgctgtgggccaacaatgtcaaactacgcatgccgcgtagccgtatccgcattatgcaggccattattggcggcattatcgccggttttggcgcgcgtctggcaatgggctgtaacctggcggcattctttaccggtattcctcagttctcgctgcatgcctggttctttgccatcgccactgccattggttcatggtttggcgcgcgctttaccctgctgcccatcttccgtattcccgtgaaaatgcagaaagttgctgccgcctcaccgctgacgcaaaaaccggatcaggcgcggcgtcgttttcgtctcgggatgctggtctttttcggcatgctgggctgggcgctgctcacagcgatgaaccaacccaaactggggctggcaatgctgtttggcgtcggctttggtttactgattgaacgtgcgcaaatctgctttacttcggcgttccgcgatatgtggatcaccggacgtacccatatggcgaaagcaatcattattggtatggcggtgagtgccatcgggatcttcagttacgtacagttaggcgttgaacccaaaatcatgtgggcgggaccaaacgcggtaattggtggtttactgtttggttttggcatcgtgctggctggcggctgcgaaaccggctggatgtaccgcgcggtagaaggccaggtgcactactggtgggtcggtctgggcaatgtgatcggctcaacgattctggcgtattactgggatgatttcgctccggcgctggccaccgactgggacaaaatcaacttgctgaaaacctttggtccgatggggggcctgctggtgacatatttgctgttgtttgctgcgctgatgttgattatcggctgggaaaaacgcttcttccgccgtgcggcaccgcagactgctaaggagatcgcatga

SEQ ID NO: 40899 - DNA, 414 bp, Escherichia coli
atgaaaaaactcgcaattgcaggcgcgctcatgttgctggcgggctgtgccgaagtcgaaaactataacaatgtcgtgaaaacccccgcgccggactggctggcgggctactggcagaccaaagggccgcaacgtgcgctggtcagcccggaagcgataggcagcctgattgtcactaaagagggcgataccctagattgccgtcagtggcagcgggtgattgctgtgccgggcaagttgacattgatgtctgatgatctcactaacgttaccgtaaaacgtgagctgtacgaggttgagcgtgacggtaacaccattgagtacgatggtatgacgatggagcgtgtggatcgcccgacggcagagtgtgccgctgcgctggataaagcgccgttaccgacgccattgccgtaa

SEQ ID NO: 40900 - DNA, 1488 bp, Escherichia coli
atgcgtaatcccacgctgttacaatgttttcactggtattacccggaaggcggtaagctctggcctgaattggccgagcgcgccgacggttttaatgatattggtatcaatatggtctggttgccgcccgcctataaaggcgcatcgggcgggtattcggtcggctacgactcctatgatttatttgatttaggtgagtttgatcagaaaggcagcatccctactaaatatggcgataaagtacaactgctggccgccattgacgccctgaaacgtaatgacattgcggtgctgttggacgtggtagtcaaccacaaaatgggcgcggatgaaaaagaagctattcgcgtgcagcgcgttaatgctgatgaccgtacgcaaattgatgaagaaatcattgaatgcgaaggctggacgcgttacaccttccccgctcgtgccgggcaatactcacagtttatctgggatttcaaatgttttagcggtatcgaccatatcgaaaaccccaatgaagatggcatttttaaaattgttaacgactacaccggcgaaggctggaacgatcaggttgatgatgaactcggtaatttcgattatctgatgggcgagaatatcgattttcgcaatcatgccgtgacggaagagattaaatactgggcgcgctgggtgatggaacaaacgcaatgcgacggttttcgtcttgatgcggtcaaacatattccagcctggttttataaagagtggatcgaacacgtacaggaagttgcgccaaagccgctgtttattgtggcggagtactggtcgcatgaagttgataagctgcaaacgtatattgatcaggtggaaggcaaaaccatgctgtttgatgcgccgctgcagatgaaattccatgaagcatcgcgcatgggacgcaactacgacatgacgcagattttcactgggacgctggtggaagccgatccttttcacgccgtaaccctcgttgccaaccacgacacccaaccgttgcaagccctcgaagcaccggtcgaaccgtggtttaaaccgctggcgtatgctctaattttgttgcgggaaaatggcgttccttcggtgttctatccggacctctacggtgcgcattacgaagatgtcggtggtgacgggcaaacctatccgatagatatgccaataatcgaacagcttgatgagttaattctcgcccgtcagcgtttcgcccacggtgtacagacgttatttttcgaccatccgaactgcattgcctttagccgcagtggcaccgacgaatatcccggctgcgtggtggtcatgtcgaacggagatgatggcgaaaaaaccattcatttaggagagaattacggcaataaaacctggcgtgattttcttgggaaccggcaagagagtgtagtaaccgacgaaaacggcgaagcgaccttcttttgcaacggcggcagcgttagcgtgtgggttatcgaagaggtgctttaa

SEQ ID NO: 40901 - DNA, 366 bp, Escherichia coli
atgaaccatgcaccgcatttatatttcgcctggcaacaactcgtcgaaaaaagccagctcatgttacgcctggcaacggaagaacaatgggacgaactcatcgccagcgaaatggcgtatgttaatgcggtgcaggagattgcacatttgactgaagaggttgacccgtccaccacgatgcaggagcagctccgcccgatgctgcgcctgattctcgacaacgaaagcaaggtaaagcagttattacagattcggatggatgaactggcgaaactggtcggtcagtcatcggtgcaaaaatcggtgttgagtgcctatggcgatcagggcggctttgtgctggctccgcaggataacctcttttga

SEQ ID NO: 40902 - DNA, 411 bp, Escherichia coli
atgtacgcggcaaaaggcacccaagcctatgcacaaattggcgtcgaaagcgccgtaatgagcgccagccagcagcagctggtcaccatgctatttgatggagtgctgagcgcactggttagagcgcgcctgtttatgcaggacaacaatcagcaaggcaaaggcgtctctttgtcaaaagcgatcaacatcattgagaacggactgcgggtgagtcttgatgaagagagcaaagacgaactaacccaaaacttgattgctctttatagctatatggtcaggcgtttgctgcaagccaatttacgcaacgatgtctccgcagtcgaagaagtggaaacattaatgcgcaatattgccgatgcctggaaagagtcgttactctccccttctttgattcaggacccagtctga

SEQ ID NO: 40903 - DNA, 573 bp, Escherichia coli
gtgaatgcctataactcgctaatagataccttcagcagcctgaccaaatacaccgccgtagatgcgggagctgatagccagagttctagcaatggcgcactgctcggcgactccacgctgcggacgattcagacgcagttgaagtcgatgctgagtaataccgtcagttcttccagctataaaacgttggcgcagattggtatcacgaccgatcccagcgatggcaaactggaactggatgccgacaaactcaccgctgcactgaaaaaagatgccagcggcgtaggtgcattgattgttggcgatggtaaaaaaaccggcatcacgaccaccatcggcagcaacctgaccagttggctttcgacaacgggcattattaaagccgctaccgatggcgttagtaagaccctgaataaattaactaaagactacaacgccgccagcgatcgcattgacgcgcaggtcgcgcgctacaaagaacaatttacccaactggacgttttaatgacctcgttaaacagcacaagcagctacttaacgcagcagttcgaaaacaacagtaattccaagtaa

SEQ ID NO: 40904 - DNA, 2373 bp, Escherichia coli
atgaagcgagttcttattcctggcgtcattttatgtggcgctgatgtggcgcaggccgtcgatgacaaaaacatgtacatgcatttttttgaagagatgacggtctatgctcctgtccctgtacccgtaaacggcaacacgcattacaccagtgaaagcatcgagcgtttaccgaccgggaatggcaatatcagcgatctgctgagaaccaaccctgcggtacgcatggattcaacgcaaagtacctcgttgaaccagggagatattcgcccggagaaaatctctattcacggtgcgtcgccctatcagaatgcctatttgattgacggtattagtgccactaataacctgaacccagcgaatgagtccgatgccagtagtgcaaccaatattagcgggatgtcacaggggtattatcttgatgtcagcttactggacaatgtgacgctttatgacagttttgtgccggttgaattcggtcgcttcaatggcggggtaattgatgcaaagttcaaacgcttcaacgctgatgatagcagcgtgaaactgggttatcgcactacgcgttcggactggttaacatcgcatatcaatgagaataacaagagcgcatttaatcaaggctcttcaggaagtacttattactccccagattttaaaaagaacttttataccttgtcgtttaatcaggaactcgctgataactttggcgttaccgccggtttatcgcgccgccagtctgatatcacccgcgcggattatgtttcgaatgacggcattgtcgccggtcgggcacagtataaaaacgttatcgatactgcattgagcaaatttacctggtttgccagcgaccgctttacccacgatttaaccttaaaatataccggctccagccgtgattataataccagcaccttcccgcagtctgatcgcgaaatgggtaataaatcctatggtatggcatgggatatggatacgcagctcgcatgggccaaactacgtaccaccgttggttgggatcatattagtgattatacccgtcacgatcatgacatctggtacaccgaactttcatgtacatatggtgatattacagggcgttgcacccgtggcggattaggacacatttcccaggctgtagataattacaccttcaaaacacgcctggactggcaaaaattcgccgtgggtaatgtttcgcatcaaccctacttcggcgcggaatacatctattccgatgcgtggactgaacgccataaccagtctgaatcctatgtgattaatgctgccggaaagaaaactaaccataccatttaccataaaggtaaaggcagcctgggaattgacaactacacactgtatatggcggatcgcattagctggcgtaatgtgtcattaatgcccggcgtgcggtatgactatgacaactatctgtcaaaccacaatatctccccgcgctttatgacggaatgggatatttttgctgatcaaacctcaatgattacagcaggttataaccgttactatggcgggaatattcttgatatgggattacgtgatatccgcaatagctggacggaatcggtatcaggtaataaaaccctgacgcgttatcaggatttgaaaacgccttataacgatgaactggcaatgggattgcagcaaaaaatcggtaagaacgttattgcgcgcgcaaactatgtttaccgtgaagcgcatgatcaaatcagcaaaagcagtcgtaccgacagcgcgactaaaaccaccattactgaatataacaacgacggcaaaaccaaaacgcattcgttcaacctcagttttgaactggccgaacccctgcatatcagccaggtagatattaacccgcaaattgtctttagctatatcaagagcaagggcaacttgtcgttaaacaatggttatgaggagagcaataccggtgataaccaggtggtttataacggtaatcttgtctcttacgatagcgttccagtggcagattttaataacccattaaagatctccttaaacatggatttcacgcatcaaccgagcgggttggtgtgggcgaatacgctggcctggcaagaagcgcgtaaagctcgcattatcctgggtaagacaaatgcgcaatacatcagcgaatattcagattacaagcagtatgttgacgaaaaactggatagcagcctgacctgggacacccgcttgtcctggacgccacaatttctgaaacaacaaaacctgacgatcagtgccgatattctcaatgtactggatagcaaaaccgcggttgatacaacgaataccggtgtggcgacctacgccagtggccgtactttctggcttgatgtcagcatgaaattttaa

SEQ ID NO: 40905 - DNA, 279 bp, Escherichia coli
gtgggggcaaccggacctcagggaccgaagggcgacccgggggagacgcaaatacggttccgtctggggccgggaaacattattgagacaaacagccatggctggttcccggatacagatggcgcactcatcaccggactgacctttcttgaccccaaagatgccacacgggttcagggtttttttcagcatttgcaggtcaggtttggtgacgggccgtggcaggatgttaaggggctggatgaagtgggcagtgatacaggcagaacaggagaatga

SEQ ID NO: 40906 - DNA, 270 bp, Escherichia coli
atgaacatattaaaaaaaattatgcagcgtctgtgcggttgcggaaagcatgatgaccgtgaaaacggggagtcacttacagcacagctgcgactgggaccggcagacattctggagtccgatgagaatggtattatcccggagcaggacagggtaatcacgcaggtggtgatactggatgcggataaaaagcagatacagtgcgtggtaagaccgctgcaaatcctgcgtgctgacgggacgtgggaaaatattggcgggatgaaatag

SEQ ID NO: 40907 - DNA, 183 bp, Escherichia coli; identical to SEQ ID NO: 37977

SEQ ID NO: 40908 - DNA, 750 bp, Escherichia coli
atgcagttttcctattttttcccggaaaaattccagatacccttcaccatcattgctgggctgcccgctgacttccacaaacgcagatttccccaccaggttgacgctgcgcacgtaaaaccagaaatccgtccccggcttaatccggcttccctggacagtccactgactgccggtccccagataacgggcagaggtttccacctgagatgtatctgcgatttttgtctccgaaaaccagaactcaaactgtaccgtcgggtcatacaccgcaagacgcgggaccgctgttatctgaaaatagcccggtgtcagctcaatcgtggcgggtaccgcaggtgcattaatcctgaacgtggtggtggccggttccccctgctggccataactgttaatcgccctgaccgtcagggtgtattcccccggcggcagaccactggaacgatgctctgtatccgcagtgatggcggtggtcaccagacggctgccttctccgcttccgctggtcaggcgcagactgaagcgcacgcccttcaccacccgcggcgtgtcccatttcgcctgtgccagatactgaccgtcagccgcgctcacctccaccgtcaggtgctgcacagccggcgggatgacgctgttcagcgaaccggacagtggctcaaagctggccccgttatccaccgccgtgatggcaaaggtgccgtccgtgttttcccggacggagacacagcggaacaggcgacggcgcagtga

SEQ ID NO: 40909 - DNA, 564 bp, Escherichia coli
atgtacctggtgagtgatccgctggggttgcagggaggggagcagacttatcggtatgtgccgaatccttgtgggtatatcgatcctttggggctggctatatgtcagttagcccgctggacgaaatgggggagtgagcaaagcaacatatctgatgttttgaactcattagggaatagagcacttaaatatgctaatggtgattggataaaatcagaggctgcattcaataaatacataaacatgataaataaaagactagaattaacaggtagtaaatttagagttgagattcaaccagccataaaaaatggagagcgagttcctgcgacaacgaatggaccatttaaagtaaatggtaagtggacatccggcactcattatacaggtggttccaaacgtctagatgccggtattattgatatcacatctcctacaaaccaatatggattacatccagttattgaaggatttgatataacacttaataaaacaaaaccatcagcagtggatatatattcagatgtgtttggtgggattgatattaacgactttcggttataa

SEQ ID NO: 40910 - DNA, 147 bp, Escherichia coli; identical to SEQ ID NO: 29828

SEQ ID NO: 40911 - DNA, 810 bp, Escherichia coli
gtggatgaggcttttctgtaccgggagtaccgtaaagcccgggaggctggtgaggaagcatttcgtggcttcatgtcaaaacatgccaatgtggaaattggtcttgccctgcgttctgaccgctgggcgggtgcggatttctgggagcagcagggcaggcgcgtcagcctggacgatatcctgcagcgcgctgatgtggtgacggtggggattgacggcgggggcctggatgatctgctgggaatgtacgtgattggccgtgacagggaaacccgcgaatggctgggctggggccatgcctgggcgcatgaaaccgcggtggtccgacggaagagcgaggcgtcccggtttcaggatcttgttgcctgtggagatatgaccattgtccggcgtgtcggggatgacacggcggaagtggcggaatatgtgcgtcgcattcatgaggctgagttactggaccatatcggtattgacccgtcaggggtggggcagattctggattcactggcggaagccgggatccccgacggaattgtggtggggataagccagggctggaaactgggcggggccattaaaaccaccgagcgcaaactggctgaaggggtgctggtgcatggtgaccagcccctgatggcctggtgtgtcggcaatgcccgggtggagcctaaaggtaacgccattcttatcaccaaacaggccagtggacggggaaaaattgacccgctgatggcgctgttcaatgcggtctccctgatgtcccttaacccggaaccgaaaaagaaagaatatgcggtttttttcatataa

SEQ ID NO: 40912 - DNA, 663 bp, Escherichia coli
ttgtcagacgatgactggcagcgactggctaaggtgaaggatctgacgccgggcgagatgacggcagaaccctacgatgataactacctggatgatgaagacgcggactggaccgcgaccgggcaggggcagaaatctgcaggtgataccagttttacgctggcctggaaaccgggagaggaaggccagaaagggcttataggctggtttgaaagcggcgatgtccgggcctataaaatccgttttccgaatggcacggtggatgtgtttcgtggctgggtcagcagtatcggtaaggccgtgacggcgaaagaagtgatcacccgcacggtgaaagtcactaacgtgggtaaaccttctgtagcggaagaacgcagcaaaattacgccggtcagtgcgattaaggtgacgccgacatccggtacggtggcaaaagggaaaacaaccaccctgacggtttcttttgagccggaaagtgcaacagacaagacgttcagagcggtttccgccgatccgtcgaaagccaccattagtgtgaaagatatgacaattacggtaaacggcgtggcgacaggtaaggtgcagatccctgtggtgagcggaaatggtcagttcgccgcagtggctgaagtcaccgttactgaagcgggcgctgcagggtaa

SEQ ID NO: 40913 - DNA, 375 bp, Escherichia coli
gtgcgccagcacacctggtcatccggtaccaacggcgtggtggctgcaacgttctcactgcgtctgaaaggcaaaccggtgtcctttgtggtaccgctggcgtttgtgaaaaatctggataagacacttaccgtgaataccggtgcgctgctgacaatgtcagtcagtgccaacgggggaacgccgccgtataaatacgcctggaagaaggatggtcagccggttgacgggcagacgacagacaccttcagtaagccaggtgcgcagtccgctgatgcggggaaatatacctgtgtggtgaccgattcggcagagaaagcacagagtgtgacgtctgttgaatgcaccgtgacagtgagcgcagccgccggataa

SEQ ID NO: 40914 - DNA, 375 bp, Escherichia coli
gtgcgtcagcacacctggtcatccggtaccaacggcgtggtggctgcaacgttttcacttcgcctgaagggtaaaccggtgtcctatgtggtaccgctggcgtttgtgaaaaatctggagaagacacttaccgtgaataccggtgcgctgctgacaatgtcagtcagtgtcaacgggggaacgccgccttataaacacgcctggaagaaggatggtcagccggtagagggacagactactgacactttcagtaaagccaatacgcagtcaggtgataagggggcttatacctgcgaggtaacggattctgcagaacagccgcagagcattacctctgatgcgtgtacagtaacggttaatggtgcgggcggataa

SEQ ID NO: 40915 - DNA, 603 bp, Escherichia coli; identical to SEQ ID NO: 37717

SEQ ID NO: 40916 - DNA, 162 bp, Escherichia coli
atgtttaagtatgcagagatgttgatggcggaagaaaatgttagatttcccagaataattataaagaaataccgaacattacaaggtaaagtcgtatggctatggatattgccatttgttattgaatggttaattgtgtgtactttgggtgtaaacagttag

SEQ ID NO: 40917 - DNA, 249 bp, Escherichia coli
atgcagcgtctgtgcggttgcggaaagcatgatgaccgtgaaaacggggagttacttacagcacagctgcgactgggaccggcagacattctggagtccgatgagaatggtattatcccggagcaggacagggtaatcacgcaggtggtgatactggatgcggataaaaagcagatacagtgcgtggtaagaccgctgcaaatcctgcgtgctgacgggacgtgggaaaatattggcgggatgaaatag

SEQ ID NO: 40918 - DNA, 429 bp, Escherichia coli
atgcataaaaacatgtttcattgttttcatgtttttttattaaaactatgctcaattgagagtattcctctcccaaatgccgattacgctttctttgatgacgaaatgccatttacattaactgatgaacagatcgaaaatatttcttttttaaacgcatatcacaaagaaaagaaaggaaacaacgacattgttacatttgatttcatgagcgctgatcaccactataattttagcacaaccatagctttaacaaatgatagcttccatatatcttcaataaacaaccataactcacaggttatattcgatgaaaacatccatttacatccctatgaattaccagaatcatcacaatggtgttatcagttaataaaaaacatgatttctttacattgcagatataataacaatttcaagataaactaa

SEQ ID NO: 40919 - DNA, 777 bp, Escherichia coli; identical to SEQ ID NO: 23638

SEQ ID NO: 40920 - DNA, 555 bp, Escherichia coli
gtgaaacagtgctacccgaacacggcgattgtggggctgcaggtggatgcggagcagtttggcggtcagcagatgacggtgaactaccatatccgcggtcgcatcatccaggtgccgtcaaactatgacccggaaaaacgcacgtacagcggcatctgggacggcagcctgaaaccggcatacagcaacaacccggcctggtgcctgtgggacatgctgactcacccgcgctacggcatgggaaaacgcctgggggcggcggatgtggacaagtgggcgctgtatgccattgcgcagtactgcgaccagacggtcccggatggtttcgggggcacagagccgcggatgactttcaatgcgtacctgtcacaacagcgtaaggcgtgggacgttctcagtgatttctgctcggcgatgcgctgtatgccggtatggaacgggcagacgctgacgtttgtgcaggaccgtccgtcagatgtggtgtggcctacaccagcagtgatgtggtggtggatgataacggcgtggggtttcgctacagcttcagcgccctga

SEQ ID NO: 40921 - DNA, 309 bp, Escherichia coli; identical to SEQ ID NO: 37795

SEQ ID NO: 40922 - DNA, 183 bp, Escherichia coli; identical to SEQ ID NO: 29889

SEQ ID NO: 40923 - DNA, 183 bp, Escherichia coli
atgaagcatcctcacgataatatccgggtaggtgcgatcactttcgtctactccgttacaaagcgaggctgggtatttcccggcctttctgttatcagaaatcccctgaaagcacagcggctggctgaggagataaataataaacggggagctgtatgcacaaagcatctcccgttgagttaa

SEQ ID NO: 40924 - DNA, 399 bp, Escherichia coli; identical to SEQ ID NO: 38324

SEQ ID NO: 40925 - DNA, 540 bp, Escherichia coli
atggcgcagaggcggctaggtcagatcgacatgagcaccggagaggtgctcgaagatggcttcgtggcgtatatcgctccgaagcggaaaaacgggttcggtacgaggtggatggctatggctcaagacgctgcaatgatgttcgctcagagtgaccttggcgcggacgacttccgcgtcctgatgagcctcatggccaagctcgatttcgagaacctgctggtgctcaatcaggccgagatggcccgcgagttgaagatgcaacggcagaacgttcagcgaagcgtgaagcggctgatcggcatgggtgcgctgttggaaggcccgcgcattggcatcagccggtcgtaccgcttcaacccgcaattcggctggaagggcagcgcccggaaccacgtgattgcgctggaccaggagcgcaagcggcggatggccgccgccggcatttccggggtgatcgacgggggcaccaaagaggccgaggtcccggccgagcgcgacccgaacacgctggacatgttcgaggacctgccccgttga

SEQ ID NO: 40926 - DNA, 816 bp, Escherichia coli
atggggcgggtgcgtgagctgctgccggagaagcgccgcaaggacgcggtgctggcggttgagtacgtgatgacggccagcccggaatggtgggccaaggccacgccccagcagcaggcggcgttcttcgaccaggcgcagggctggctggcggccaagtacggcgcggaccgcatcgtgacggccagcatccaccgcgacgaggccaccccgcacctgtcggccttcgtcgtgccgctgacgcaggacggcaggctgtcggccaaggagttcatcggcggccgcgacaagatgcgggccgaccagaccagctttgccgaggcggtgcgggatctcggccttgagcgcggcatcgagggcagccgcgccacccatcagcgggtcaggagctactacggcgccatcgagcgccagcccggccatgccaccatcacgccgcaggcgctggagccgcgggtgctgcgcaaggggctgttctcaaaggacgttgagacgccggaggctgtcgccgcccgcctgacggcggcggtccgggaagggtacgggccgactgtcgcagcggccgcaggagcgcgtcaggagcgcgagaaggcccgacaggcacaggagacggcccggagcctgcgcgaccgcctgaagcccgttctggacgctctggggccgctcaaccgcgatatgcaggccaaggccgcccagatcatcaaggccgtgggcgagaagctgctggccgaacagcgcgaggcgacacgccagcggcaggccgaacggctgcgcagtcgcggccgggagcgcgacgacggcgggctgtctcgctga

SEQ ID NO: 40927 - DNA, 648 bp, Escherichia coli
ttgttgatcgtcgccaaccagtacggccttaatccgtggacgaaagaaatttacgccttccctgataagcagaacggcatcgttccggtggtgggcgttgatggctggtcccgcatcatcaatgaaaaccagcagtttgatggcatggactttgagcaggacaatgaatcctgtacatgccggatttaccgcaaagaccgtaatcatccgatctgcgttaccgagtggatggatgaatgccgccgcgaaccattcaaaacccgcgaaggcagagaaatcaccggcccgtggcagtcgcatcccaaacggatgttacggcataaagccatgattcagtgtgcccgtctggccttcggatttgctggtatctatgacaaggatgaagccgagcgcattgtcgaaaatactgcatacactgcagaacgccagccggaacgcgacatcactccggttaacgatgaaaccatgcaggagattaacactctgctgatcgccctggataaaacatgggatgacgacttattgccgctctgttcccagatatttcgccgcgacattcgcgcatcgtcagaactgacacaggccgaagcagtgaaagttcttggattcctgaaacagaaagcctctgagcagaaggtggctgcatga

SEQ ID NO: 40928 - DNA, 408 bp, Escherichia coli
gtgccgcgactggccggagccggaaagggcggactgcagattgtgctgggggcagcagccatcgtgggctctttcttcaccgccggcgcaacgatggcgttgtggggcgcagccctgagtgccggagggctgactgccaccacgatgctgttctcactgggtgccagcatgatactgggcggtgtggcccagatgctggcaccgaaggcaaaaacaccggagtacagggcgacggataacggtaaacagaacacgtatttttcgtcactggataacatgattgcccaggggaacccgatgccggtgccttatggtgaaatgctggttggttcacgacggatatcccaggacatcagcacccgtgatgagggcggagacgggaaagtggtggttatcgggcggggatga

SEQ ID NO: 40929 - DNA, 408 bp, Escherichia coli
gtgccgcgactggccggagccggaaagggtggactgcagattgtgctgggggcggcagccatcgtgggctctttcttcacggccggggcatcaatggcgttatggggttcagccctggcagccggtggtttttctgccaccacgatgctgttttcactgggggccagcatgatactgggcggtgtggcccagatgctggcaccgaaggcaaaaacaccggattaccgcgcaacggataacggtaaacagaacacgtatttttcgtcactggataacatgattgcccaggggaacccgatgccggtgccttatggtgaaatgctggttggttcacgacggatatcccaggacatcagcacccgtgatgagggcggagacgggaaagtggtggttatcgggcggggatga

SEQ ID NO: 40930 - DNA, 180 bp, Escherichia coli; identical to SEQ ID NO: 23969

SEQ ID NO: 40931 - DNA, 309 bp, Escherichia coli; identical to SEQ ID NO: 37795

SEQ ID NO: 40932 - DNA, 504 bp, Escherichia coli
gtgaatgcgaactcagggacgctcaacaacgtcacgattaatgagaactgtcagattaaggggaaactgtcagccaaccagattgaaggcgatattgtcaaaacggtcagcaagtctttcccccgcacgagcacttatgccagtggcaccatcacggtaagaatcagtgatgatcagaagtttgaccggcaggtcatgataccgccagtgttattccgcggtggtaagcatgagaatttcaacagtaataaccaacagtcatactggtattcaacctgccggttaagagtgacccgcaatggtcaggagatttttaatcagtccacgacggatgctcagggcgtattttcctcagttatagatatgcctgccggacaggggacgctgacactgacattcaccgtatcttcatcaggagcgaataactggacaccaacaaccagtatcagcgatctgctggttgtggtgatgaaaaaatccacagcaggtatcagtatcagctga

SEQ ID NO: 40933 - DNA, 216 bp, Escherichia coli
atgtaccagatggaaaaaatcacaacaggtgtgtcatacaccacgtcagcggtagggacgggatactggttactgcaactgctggacaaagtctctccgtcccagtgggtggcaataggtgtactggggagtctgctgtttggcctgctgacgtatctgactaacctgtatttcaaaatcagggaggaccgccgtaagacggcgcggggagactaa

SEQ ID NO: 40934 - DNA, 1500 bp, Escherichia coli
atgattaattttgacgggatcggtaatgaccgccgtataccgctgattgaggttgagtttaataactccatggctgtcaccggcactccggcacagcgtcagtgtgtgctgctgtttggtcaggcgagaatgaaagagaatgccgtggacggtgccggtgttctggatgttccggtcaggatcacccgtgcgtctcaggcaacagaattctgggggcgcggctccatgattgccctgatggtggcggaatttatcgccatcaatcctgatgctgaactgtatgccattgctcaggggagcggcaccggtcaggctcaggcatgtctcatgaatataattggcaccgcctctcaggatggtgttctgcacatttatatcggcggtcggcgttatctgctggctgtcacgaaagggcagaagggtaaggagcttattgacgctctggtctctgttattaatgccgatgctgatgcgcccttcagtgcttatgcaggtcaggtagcagataacgccagcggactcaagggaagtatgggaattaatgcccgttttaccggtgaatgttccgtacatgatatccgtgttaattatcatgacggagaaaccacaccgggtggactgaccattgaacttgggtatcccaaaacaaaagccactaacccggatatcacccgaagcgtggcgggtatgggcgatcgccagtacaactatgtcgtcatgccctataaggatgatgcaaacctgaaaatcatcagtgatgagcttctgaaacgctggggaccggccaaaatgtctgacggtgtgctgtggatggcgcataccggcacgtttggtgaggtgcaggcattcggggcaaaacgcaatgattttctggcgacctgcacattcattcccaaagcccctgaaccggattacctctgggcagcggcggtctgcgccacctgtgcgccgtctctgggggcagatcctgcgcgtccgcttcagacgctggcgcttccgtcacgcatggccccggccccggccgatcgtctgacgcgtgaagagcgtaacagtctgctgtggggagggattgccacggtcagtgtggctgccggtgatgtggttcagatcgaacgtcaggtgaccatgtatcgccagaacgtgtacggcgaaagtgatcccagctatctggatgtggaaaccatctacaccctctcctggctgcgttattccctgcgtacttttatcacacaacgttttccgcgccataaactggctgatgacgggacgcccgttcgtgccggtcagaatatcgtgacgccggagatcatgaagcttcagttaatttcgctgggtgaagagtgggtggaactcgggctggtcgaaaatctggacacctttaaaaagaatctgcttgtggagcgtaatgcgtcagatcgaaaccgtcttgacgtgttatgcacgccggatctggttaaccagttccgcttcctggcagcacagatccgtttcattttgtga

SEQ ID NO: 40935 - DNA, 297 bp, Escherichia coli; identical to SEQ ID NO: 23762

SEQ ID NO: 40936 - DNA, 399 bp, Escherichia coli; identical to SEQ ID NO: 38324

SEQ ID NO: 40937 - DNA, 228 bp, Escherichia coli
atgccgatggacaatttagcgaaggaaaagggattgttcgcgactggcttgcgggtgttgagtggcggtcacgtaatatctggctcgaggcagagtacgctgaacgcgttttcaatcatgagcataaacccggcgcgcgcctgtctggctggtatgattttaatgataactggcgtattggttcgcaactggaacgcctctctcaccgcgttccattacgggcaatga

SEQ ID NO: 40938 - DNA, 342 bp, Escherichia coli
gtggctgagataaaaacgctgcatctggtcccgcgtgaagggatgcaggtgagtgagaagccgtcggtggtgagggtgcggtttggtgacggttatgaacagcgccgccccacagggctgaatcctcaactgaagacgtttcaggcggtgttccgggtgacggatgagtcaacccggcgctggctggatgaatttttatcctggcatggtggttaccgtgcctttttgtggcgaccgccgaaacataaccggacggtgagggtggtgtgccgggagtggagcgtcacggataacgcccggtacagtgatttcagttgtacgattgagcaggtggtgaactga

SEQ ID NO: 40939 - DNA, 330 bp, Escherichia coli
atgaaaacctttcgctggaaagtgaagccggatatggaggtgaactcgcagccatcggtgcgtgaagtgcgttttggtgacgggtactcacagcgtatggcggcagggctgaatgctgacctgaaaacataccgtgtgacgctttccgtgacccgggaggaggcccggcatctggaagcgttcctggcagagcacggtggctggaaggcgtttctgtggacaccgccttatgcctggcggcagataaaggtgacctgtgccgcctggtcatcacgggttcgcatgctgcgggttgaattcagtgccgagtttaagcaggtggtgaactga

SEQ ID NO: 40940 - DNA, 330 bp, Escherichia coli; identical to SEQ ID NO: 38055

SEQ ID NO: 40941 - DNA, 792 bp, Escherichia coli
atggcctgcgggagtgtatgtgctggtcagttcgtatgcgttattgccgaagctgcgcaccgtctcgcggtgcagcctgtcgcgcgtgaactccaccagcggcgtcccgcccagcttcatccccgcaagataaccgctgccgtaggtcagccactccacccgcggcaggctgtccggcgtgacgcggtttgccagaccctgttcgttgtatgcgtgctctgtctcatgctgccacagcagttcccccgtctccgggttatgcaccgtctggcgctccccggccaggcggcccttatcatcataaccgtaatgcaccgccacctgatggccttcgctcaggtggctgatttctgtcagccagccgtgctcgtcgtactgccactgctctgccggttcgccgttcaccgtgcggtgagtgaggcggtccgattcgtcgtagtgccagagggtgacaagcccctcatcttcactctgcgtgagttttccggtcaggtcatagtggtaacgttgcgtccgcccgtcaaagccgcgctgctgtaccagccggtcaagcgcatcgtaggtaaactcactccggctgccgttctcgttggtcagcgtggtgatgcgtccggcaaggtcgtattccatactgcgcgtcagcccgccctgcgtggtgctgaccgcttttccccacgcatcgtactgtgtctcgctccggttgccgtccggggtgataacggcagtcaggtcgcctgcggcgttgtactcataccgcgtttcatggccctgtgcgtctttcaccgagattaa

SEQ ID NO: 40942 - DNA, 1260 bp, Escherichia coli
gtgtcgcaagataacaactttagccaggggccggtcccgcagtcggcgcggaaaggggtattggcattgacgttcgtcatgctgggattaaccttcttttccgccagtatgtggaccggcggcactctcggaaccggtcttagctatcatgatttcttcctcgcagttctcatcggtaatcttctcctcggtatttacacttcatttctcggttacattggcgcaaaaaccggcctgaccactcatcttcttgctcgcttctcgtttggtgttaaaggctcatggctgccttcactgctgctgggcggcacccaggttggctggtttggcgtcggtgtggcgatgtttgctattccggtgggcaaggcaaccgggctggatattaatttgctgattgccgtttccggtttactgatgaccgtcaccgtcttctttggcatttcggcgctgacggttctttcgttgattgcggttccggctatcgcctgtcttggcggttattccgtgtggctggccgttaacggcatgggcggcctggacgccttaaaagcggtcgttcccgcacaaccgttagatttcaatgtcgcgctggcgctggttgtggggtcatttatcagtgcgggcacgctcaccgctgactttgtccgctttggtcgcaatgccaaactggcggtgctggtggcgatggtggcctttttcctcggcaactcgttgatgtttattttcggtgcagcgggcgctgcggcactggggatggcggatatctctgatgtgatgattgctcagggcctgctgttgcctgcgattgtggtgctggggctaaatatctggaccaccaacgataacgcgctctatgcgtcgggtttaggtttcgccaacattaccgggatgtcgagcaaaaccctttcggtaatcaacggtattatcggtacggtctgtgcattatggctgtataacaattttgtcggctggttgaccttcctttcggcagctattcctccagtgggtggcgtgatcattgccgactatctgatgaaccgtcgccgctatgagcactttgcgaccacgcgtatgatgagtgtcaattgggtggcgattctggcggtcgccctggggattgctgcaggccactggttaccgggaattgttccggtcaacgcggtattaggtggcgcgctgagctatctgatccttaacccgattttgaatcgtaaaacgacagcagcaatgacgcatgtggaggctaacagtgtcgaataa

SEQ ID NO: 40943 - DNA, 1284 bp, Escherichia coli
gtgtcgaataacgctttacaaacaattattaacgcccggttgccaggcaaagaggggctgtggcagattcatctgcaggacggaaaaatcagcgccattgatgcgcaatccggcgtgatgcccataactgaaaacagcctggatgccgaacaaggtttagttataccgccgtttgtggagccacatattcacctggacaccacgcaaaccgccggacaaccgaactggaatcagtccggcacgctgtttgaaggcattgaacgctgggccgagcgcaaagcgttattaacccatgacgatgtgaaacaacgcgcatggcaaacgctgaaatggcagattgccaacggcattcagcatgtgcgtacccatgtcgatgtttcggatgcaacgctaactgcgctgaaagcaatgctggaagtgaagctggaagtcgcgccgtggattgatctgcaaatcgtcgccttccctcaggaagggattttgtcgtatcccaacggtgaagcgttgctggaagaggcgttacgcttaggggcagatgtagtgggggcgattccgcattttgaatttacccgtgaatacggcgtggagtcgctgcataaaaccttcgccctggcgcaaaaatacgaccgtctcatcgacgttcactgtgatgagatcgatgacgagcagtcgcgctttgtcgaaaccgttgctgccctggcgcaccgtgaaggcatgggcgcgcgagtcaccgccagccacaccacggcaatgcactcttataacggggcgtatacctcacgtctgttccgcttgctgaaaatgtccggtattaactttgtcgccaacccgctggtcaatattcatctgcaaggacgattcgatacgtatccaaaacgtcgcggcatcacgcgcgttaaagagatgctggagtccggcattaacgtctgctttggtcacgatgatgtcttcgatccgtggtatccgctgggaacggcgaatatgctgcaagtgctgcatatggggctgcatgtttgccagctgatgggctatgggcagattaacgatggcctgaatttaatcacccaccacagcgccaggacgttgaatttgcaggattacagcattgccgccggaaacagcgccaacctgattatcctgccggctgaaaatggatttgatgcgctgcgccgtcaggttccggtacgttattcggtacgtggcggcaaggtgattgccagcacacaaccggcacaaaccaccgtatatctggagcagccggaagccatcgattacaaacggtga

SEQ ID NO: 40944 - DNA, 900 bp, Escherichia coli
atgctctctcgacatatcaattattttcttgccgtggctgaacatggcagcttcacccgtgccgccagtgcgttgcacgtctctcagcctgcgctttcccagcagattcgccagttagaggagagtttaggcgtgccgctgtttgaccgtagcgggcgaacgattcatctcactgatgcaggagaagtctggcgacagtacgccagccgggcgttacaggaactgggagcgggtaaacgggcgattcatgatgttgccgatctgacgagaggatcgctgcgtatcgccgtcacccccacctttacgagctactttatcggccccttaatggcggatttctatgcgcgctaccccggcatcacgctccagctacaggaaatgtcgcaggagaaaatcgaagatctgctttgtcgcgacgagctggacgttgggattgccttcgcgcctgtgcatttgccggagctggaggcaattcctttactgacagaaagtttagcgttagtcgtggcgcaacatcatccgctggctgcctgtgaacaggtggcgttgagtcgcttgcatgatgaaaaactggtcctgctcagcgcggaatttgccaccagagagcagattgaccactactgcgagaaagcggggctgcatccacaggtggtcattgaggcgaactcaattagcgcggttctggagctgattcgccgcacttccctttccacattgttaccagcagcgattgccacacaacatgacgggcttaaagcgattcctcttgccccgccactactggagagaacggcggttttgttgcggcggaaaaatagctggcagacagccgccgcgaaggcatttttgcacatggcgttggaggaatgtgcggatgttggcgagaatgaatcgcggtaa

SEQ ID NO: 40945 - DNA, 660 bp, Escherichia coli
gtgaaagagattattgatggattccttaaattccagcgcgaggcatttccgaagcgggaagccttatttaaacagttggcgacacagcaaagcccgcgcacactttttatctcctgctccgacagccgtctggtccctgagctggtgacgcaacgtgagcctggcgatcttttcgttattcgcaatgcgggcaatatcgtcccttcctacgggccggaacccggtggcgtttctgcttcggtggagtatgccgtcgctgcgcttcgggtatctgacattgtgatttgcggtcattccaactgtggcgcgatgaccgccattgccagctgtcagtgcatggaccatatgcctgccgtctcccactggctgcgttatgccgattcagcccgcgtcgttaatgaggcgcgcccgcattccgatttaccgtcaaaagctgcggcgatggtacgtgaaaacgtcattgctcagttggctaatttgcaaactcatccatcggtgcgcctggcgctcgaagaggggcggatcgccctgcacggctgggtctacgacattgaaagcggcagcatcgcagcgtttgacggcgcaacccgccagtttgtgccactggcagctaatcctcgcgtttgtgccataccgctacgccaaccgaccgcagcgtaa

SEQ ID NO: 40946 - DNA, 471 bp, Escherichia coli
atgattcagtcgcaaattaaccgcaatattcgtcttgatcttgccgatgccattttgctcagcaaagctaaaaaagatctctcatttgccgagattgccgacggcaccgggctggcagaagcctttgtgaccgcggctttgctgggtcagcaggcgcttcctgccgacgccgcccgccaggtcggggcgaagctggatctcgacgaagacgccattctactgttacagatgatcccactgcgtggctgcattgatgaccgtattccaaccgacccaacgatgtatcgtttctatgaaatgttgcaggtgtacggcacaaccctgaaagcgttggttcatgagaaatttggcgatggcattatcagcgcgattaacttcaaactcgacgttaagaaagtggcggacccggaaggtggcgaacgtgcggtcatcaccttagatggtaaatatctgccgaccaaaccgttctga

SEQ ID NO: 40947 - DNA, 1182 bp, Escherichia coli
atgcgtaaccatcaaaagacgttcacgatgctgctggttctggtgctgattggtcttaatatgcgaccactgctcacctccgtcgggccactgctaccgcaattgcgccaggcaagcggaatgagctttagcgtggctgccctgttgaccgctctgccggtggttaccatgggcgggctggcgctggccggaagctggcttcatcagcatgtcagcgaacgtcgcagcgtcgccatcagtttgttactgattgccgtcggtgcattgatgcgtgagctttaccctcaaagtgcgctgctgcttagcagcgcactgctcggtggggtggggatcggcatcattcaggcggtgatgccttcggtgattaaacggcggtttcagcagcgcacgccactggtgatggggctgtggtccgcggctctgatgggcggcggtgggcttggtgccgccctgacaccctggttagttcaacatagcgaaacctggtatcaaacactcgcctggtgggcgctgcctgccgttgttgcgctctttgcctggtggtggcaaagcacccgcgaggtcgcctcttcccacaagacaacaaccattccggttcgcgtggttttcactcctcgcgcgtggacgctgggtgtttacttcggtctgattaacggtggttacgccagcctgattgcctggttacccgccttctatattgagattggtgccagcgcgcagtacagcggttccttgctggcattgatgacgcttgggcaagccgcaggagctttgctgatgcctgctatggctcgccatcaggatcggcgcaaactgttaatgctggcgctggcgttacaactggtgggtttctgcggctttatctggctgccgctgcaattgccggtattgtgggcgatggtgtgtggtttaggtctgggcggcgcatttccgctctgtttgctgctggcgctcgatcactctgtgcaaccggctattgctggcaagctggtggcgtttatgcagggaatcggttttatcatcgccgggcttgccccgtggttttctggcgtgctgcgtagtatcagcggcaattacttgatggactgggcgtttcatgcgctgtgcgtcgtagggctgatgattataaccctgcgttttgcaccagcacgttttccgcagctgtgggtcaaagaggcatga

SEQ ID NO: 40948 - DNA, 612 bp, Escherichia coli
atgaacatgtcgatgacagaaagaataaaagcaggcaagctatttaccgatatgtgcgaaggcttacctgaaaaaagacttcgtagaaaaacgttaatgtatgagtttaatcactcgcatccatcagaagttgataaaagagaaagcctgattaaagaaatgtttgccacggtaggggaaaacgcctgggtagaaccccccgtctatttctcttacggttccaacatccatataggccgcaatttttatgcaaatttcaatttaaccattgtcgatgactacacggtaacaatcggtgataacgtattgattgcacccaacgttactctttccgttacgggacaccctgtacaccatgaattgagaaaaaacggtgagatgtactcttttccgataacgattggcaataacgtctggatcggaagtcatgtggttattaatccaggcgtcaccattggggataattctgttattggcgcgggtagtatcgtcacaaaagacattccaccaaacgtcgtggcggctggcgttccttgtcgggttattcgcgaaataaacgaccgggataagcaatattatttcagagattacaaagttgaatcgtcagtttaa

SEQ ID NO: 40949 - DNA, 954 bp, Escherichia coli; identical to SEQ ID NO: 23546

SEQ ID NO: 40950 - DNA, 777 bp, Escherichia coli; identical to SEQ ID NO: 23547

SEQ ID NO: 40951 - DNA, 948 bp, Escherichia coli
atgattttttattgtgcgctcagtatagaaagggtgttttcggctacaatcaaaacatgcccgaatgtgcaccaggtgcacaacgttgttttaactatagaaatgtcaattaatatgcagaacaatgagcagacggaatacaaaaccgtgcgcggcttaacccgcggtctaatgttattaaatatgttaaataaacttgacggcggtgccagcgtcgggctgctggcggaactcagcggcctgcatcgcaccactgtgcggcgactgctggagacgctgcaggaagagggatatgtccggcgtagtccctccgatgatagttttcgtctgaccatcaaagtgcggcaattaagcgaaggatttcgtgacgaacagtggatttctgcactggcggccccactgctgggcgatctgttgcgcgaagtggtatggccgacagatgtgtccacgctggatgttgatgcaatggtggtacgcgaaaccactcaccgtttcagccgcttatcctttcaccgggcaatggtcgggcggcgtttaccgcttctgaaaaccgcctcgggcctgacctggctggccttttgcccggaacaagaacgcaaggaattaatcgagatgttagcctcccgccccggtgatgactatcaactggcacgagaaccgttaaagctggaagccattctggcgcgcgcgcgcaaagagggttacggacagaactaccgcggctgggatcaggaggagaagatcgcctctatcgccgtaccgctgcgcagtgaacaacgggtgattggctgtctgaatctggtgtatatggcgagcgcaatgaccatcgaacaggcagcggaaaagcatcttccggcactacaacgggtagcaaaacagatcgaagaaggggttgaatcgcaggctattctggtggccggacggcgaagcggcgtgcatttacgctag

SEQ ID NO: 40952 - DNA, 1665 bp, Escherichia coli
atggcaatacaacaccctgacatccagcctgctgttaaccatagcgttcaggtggcgatcgctggtgccggtccggtcgggctgatgatggcgaactatctcggccagatgggcattgacgtgctggtggtggagaaactcgataagttgatcgactacccgcgtgcgattggtattgatgacgaggcgctgcgcaccatgcagtcggtcggcctggtcgataatgttctgccgcatactacgccgtggcacgcgatgcgttttctcaccccgaagggccgctgttttgctgatattcagccaatgaccgatgaatttggctggccgcgccgtaacgcctttattcagccgcaggtcgatgcggtgatgctggaaggggtgtcgcgttttccgaatgtgcgctgcttgttttcccgcgagctggaggccttcagtcagcaagatgacgaagtgaccttgcacctgaaaacggcagaagggctgcgggaaatagtcaaagcccagtggctggtggcctgtgatggtggggcaagttttgtccgtcgcaccctgaatgtgccgtttgaaggtaaaactgcgccaaatcagtggattgtggtagatatcgccaacgatccgttaagtacgccgcatatctatttgtgttgcgatccggtgcgcccgtatgtttctgccgcgctacctcatgcggtacgtcgctttgaatttatggtgatgccgggagaaaccgaagaacagctgcgtgagccgcaaaatatgcgcaagctgttaagcaaagtgctgcctaatccggacaatgttgaattgattcgccagcgtgtctacacccacaacgcgcgactggcgcaacgtttccgtattgatcgcgtactgctggcgggcgatgccgcgcacatcatgccggtatggcaggggcagggctataacagtggtatgcgcgacgcctttaacctcgcatggaaactggcgttggttatccaggggaaagcccgcgatgcgctgctcgatacctatcaacaagaacgtcgcgatcacgccaaagcgatgattgacctgtccgtgacggcgggcaacgtgctggctccgccgaaacgctggcagggtacgttacgtgacggcgtttcctggctgctgaattatctgccgccagtaaaacgctacttcctcgaaatgcgcttcaagccgatgccgcaatattacggcggtgcgctggtgcgtgagggcgaagcgaagcactctccggtcggcaagatgtttattcagccgaaagtcacgctggaaaacggcgacgtgacgctgctcgataacgcgatcggcgcgaacttcgcggtaattggctggggatgcaatccactgtgggggatgagcgacgagcaaatccagcagtggcgcgcgttgagcacacgcttcattcaggtggtgccggaagtgcaaattcataccgcacaggataaccacgacggcgtactacgcgtgggggatacgcaaggtcgcctgcgtagctggttcgcgcaacacaatgcttcgctggtggtgatgcgcccggatcgctttgttgccgccaccgccattccgcaaacactgggcaagaccctgaataaactggcgtcggtgatgacgctgacccgccctgatgccgacgtttctgtcgaaaaggtagcctga

SEQ ID NO: 40953 - DNA, 945 bp, Escherichia coli
atgcacgcttatcttcattgtctttcccactcgccgctggtggggtatgtcgacccggcacaagaggtactcgatgaggtcaatggcgtgattgccagcgcccgcgagcgtattgcggctttctcccctgaactggtggtgctgtttgcgccagatcactacaacggctttttctatgacgtgatgccaccgttctgtttaggcgttggagcgacggcaattggtgatttcggcagtgcggcaggagagctgcccgtgcctgtggagctggcggaggcctgtgcgcatgccgtcatgaagagcgggatcgatcttgccgtttcttactgtatgcaggtggaccacgggttcgcccagccgctggagttcctgctcggtgggctggataaggtgccagttctgcctgtgttcatcaacggtgtcgccacgccgctgcccggtttccagcgtacccgcatgttgggtgaagccattggacgtttcaccagcactctcaataaacgcgtgctgttcctaggttccggtgggctttcccatcagccgccggtgcccgaactggcgaaagccgatgcccatatgcgcgaccgcctgttggggagcgggaaagatttacccgccagtgagcgcgaattgcgtcagcaacgggtgattagcgccgctgagaagtttgttgaggatcagagaactctgcatccgctcaacccgatttgggataaccagttcatgactttgctggagcagggacgcatacaggaactggatgccgtcagtaacgaagagctttccgccattgccggaaagtcgacacatgaaatcaaaacctgggtcgccgcttttgccgctatttctgcatttggcaactggcgtagcgaagggcgttattaccgcccaatcccggagtggattgccggatttggctcgttaagcgccagaacagagaactga

SEQ ID NO: 40954 - DNA, 867 bp, Escherichia coli
atgagttatcagccacaaaccgaagccgccaccagccgttttctgaatgtagaagaagcgggtaaaacgctgcgcatccattttaatgactgcggacaaggcgacgaaaccgttgtcctgctgcatggttccggcccgggtgctactggctgggcgaacttcagccgcaatatcgatccgctggtagaggcgggctatcgggtgatcctgctggattgtccgggttggggcaagagcgattcgatcgttaatagtggttcgcgatcggatcttaatgcacgaatcctgaaaagcgtggtggatcaactggatatcgccaaaatccacctgctgggcaactcgatgggtggccatagttctgtggcgttcacccttaactggccggagcgcgtcggcaaactggtgctgatgggcggcggtacgggcggcatgagtttgtttacgccgatgccaaccgaaggtattaagcgactgaatcagctttatcgtcagccgactatcgaaaacctgaagctgatgatggatatcttcgtttttgataccagcgatttgaccgacgccctgtttgaagcgcgcctgaataatatgctgtcgcgccgcgatcacctggaaaacttcgttaagagcctggaagctaatccgaaacagttcccggattttggcccacgtctggcggaaatcaaagcgcaaaccctgattgtctgggggcgcaacgaccgctttgtgccgatggatgcgggtctgcgtctgctgtccggcattgccggttctgaactgcatatcttccgcgactgtgggcattgggcgcagtgggaacatgccgacgctttcaatcaactggtgctgaatttcctcgcacgtgcttaa

SEQ ID NO: 40955 - DNA, 810 bp, Escherichia coli
atgacgaagcatactcttgagcaactggcggcggatttacgccgcgccgcagagcagggcgaagcgattgcgccgctgcgcgatctgattggtatcgataacgctgaagcggcctacgccattcagcacataaatgtgcaatatgacgttgcgcaggggcgtcgcgtggtggggcgtaaagtgggcctgacacatccgaaagtgcagcaacaactgggcgttgatcaaccggatttcgggacattatttgccgacatgtgttatggcgataacgaaatcattcctttttcccgtgttctgcaaccccgcattgaagcggagatcgcactggtgttgaaccgcgatttacccgcaactgatatcaccttcgacgaattgtataacgccattgaatgggtacttccggcgctggaggtggtgggtagccgcattcgcgactggtcgattcagtttgtcgataccgtggcagataacgcttcctgcggggtgtatgtcatcggcggtccggcgcaacgtccggcggggttagacctgaaaaactgcgccatgaagatgacgcgtaataacgaagaggtttccagcgggcgcggcagcgaatgcctgggacatccgcttaatgccgccgtctggctggcacgcaaaatggccagtctgggtgaaccgctgcgcgccggagatatcattcttaccggggcattaggtccgatggtggcagtgaatgcgggcgatcgttttgaagcccatattgaaggcataggttcagttgctgcggcattttcaagcgcagccccaaaaggaagtctgtcatga

SEQ ID NO: 40956 - DNA, 951 bp, Escherichia coli
atgagtaagcgtaaagtcgccattatcggttctggcaacattggcaccgatctgatgattaaaattttgcgtcacgatcagcatctggagatggcggtgatggtcggcattgatcctcagtccgacggtctggcgcgtgccagacgtatgggcgtcgccaccacccatgaaggggtgatcgggctgatgaacatgcctgaatttgctgatatcgacattgtatttgatgcgaccagcgccggtgctcatgtgaaaaacgatgcggctttgcgcgaagcgaaaccggatattcgcttaattgacctgacgcctgctgccatcggcccttactgcgtgccggtggttaacctcgaggagaacgtcgatcaactgaacgtcaacatggtcacctgcggcggccaggccaccattccaatggtggcggcagtttcacgcgtggtgcgtgttcattacgccgaaattatcgcttctatcgccagtaaatctgccggacctggcacgcgtgccaatatcgatgaatttacggaaaccacttcgcgagccattgaagtggtgggcggcgcggcaaaagggaaggcgattatcgtgcttaacccagcagagccaccgttgatgatgcgtgacacggtgtatgtattgagcgacgaagcttcacaagatgatatcgaagcctcaatcaatgaaatggctgaggcggtgcaggcttacgtaccgggatatcgcctgaaacagcgcgtgcagtttgaagttatcccgcaggataaaccggttaatttgccgggcgtagggcagttctccgggctgaaaacggcggtctggctggaagtcgaaggcgcagcgcattatctgcctgcctatgcgggcaacctcgacattatgacttccagtgcgctggcgacagcagaaaaaatggcccagtcactggcgcgcaaggcaggagaagcggcatga

SEQ ID NO: 40957 - DNA, 1014 bp, Escherichia coli
atgaacggtaaaaaactttatatctcggacgtcacgttgcgtgacggtatgcacgccattcgtcatcagtattcgctggaaaacgttcgccagattgccaaagcactggacgatgcccgcgtggattcgattgaagtggcccacggcgacggtttgcaggggtccagctttaactatggtttcggcgcacatagcgaccttgaatggattgaagcagcggcggatgtggtgaagcacgccaaaatcgcgacgttgttgctgccaggaatcggcactattcacgatctgaaaaatgcctggcaggctggcgcgcgggtggttcgtgtggctacgcactgtaccgaagctgatgtttccgcccagcatattcagtatgcccgcgagctcggaatggacaccgttggttttctgatgatgagccatatgaccacgccggagaatctcgcaaagcaggcaaagctgatggaaggctacggtgcgacctgtatttatgtggtggattctggcggtgcgatgaacatgagcgatatccgtgaccgtttccgcgccctgaaagcagtgctgaaaccagaaacgcaaaccggcatgcacgctcaccataacctgagtcttggcgtggcgaactctatcgcggcggtggaagagggctgcgaccgaatcgacgccagcctcgcgggaatgggagcgggcgcaggtaacgcgccgctggaagtatttattgccgccgtggataaactgggttggcagcatggggccgatctctatgcgttaatggatgctgctgacgacctggtgcgtccgttgcaggatcgaccggtacgagtcgatcgcgaaacgctggcgctgggatacgctggtgtttactccagcttcctgcgtcactgtgaaacggcggcggcgcgttatggcttaagcgcggtggatattctcgttgagctgggcaaacgccggatggttggcggccaggaggatatgatcgtcgacgtggcgctggatctgcgcaacaacaaataa

SEQ ID NO: 40958 - DNA, 1212 bp, Escherichia coli
atgtcgactcgtaccccttcatcatcttcatcccgcctgatgctgaccatcgggctttgttttttggtcgctctgatggaagggctggatcttcaggcggctggcattgcggcgggtggcatcgcccaggctttcgcactcgataaaatgcaaatgggctggatattcagcgccggaatactcggtttactacccggcgcgttggttggcggaatgctggcggaccgttatggtcgcaagcgcattttgattggctcagttgcgctgtttggtttgttctcgctggcaacggcgattgcctgggatttcccctcactggtctttgcgcggctgatgaccggtgtcgggctgggggcggcgttgccgaatcttatcgccctgacgtctgaagccgcgggtccacgttttcgtgggacggcagtgagcctgatgtattgcggtgttcccattggcgcggcgctggcggcgacactgggtttcgcgggggcaaacttagcatggcaaacggtgttttgggtaggtggtgtggtgccgttgattctggtgccgctattaatgcgctggctgccggagtcggcggttttcgctggcgaaaaacaggctgcgccaccactgcgtgcgttatttgcgccagaaacggcaaccgcgacgctgctgctgtggctgtgttatttcttcactctgctggtggtttacatgttgatcaactggctaccgctgcttttggtggagcaaggattccagccatcgcaggcggcaggggtgatgtttgcactgcaaatgggtgcggcgagcgggacgttaatgttgggcgcattgatggataagctgcgtccagtaaccatgtcgctactgatttatagcggcatgttagcttcgctgctggcgcttggaacggtgtcgtcatttaacggtatgttgctggcgggatttgtcgcggggttgtttgcgacaggtgggcaaagcgttttgtatgccctggcaccgttgttttacagttcgcagatccgcgcaacaggtgtgggaacagccgtggcggtagggcgtctgggggctatgagcggtccgttactggccgggaaaatgctggcattaggcactggcacggtcggcgtaatggccgcttctgcaccgggtattcttgttgctgggttggcggtgtttattttgatgagtcggagattaagaatgcagccgtgtgccgatgcctga

SEQ ID NO: 40959 - DNA, 540 bp, Escherichia coli
atggcaaaacttaccttacaagagcagttgctcaaagcaggattagtcaccagcaaaaaagcggcgaaggtcgagagaacggcgaaaaaatcgcgcgttcaggcgcgtgaagctcgggcggcggtagaagaaaataaaaaggcacagcttgagcgtgataaacagcttagcgaacagcaaaaacaagcggcgttggcgaaagaatataaagctcaggtgaagcagcttattgaaatgaaccggatcaccattgccaatggcgatattggttttaacttcactgatggcaatctgattaagaagatttttgtcgataagctcacacaggcgcagttgattaatggtcgtctggcgattgcccgcttgttggtcgataacaatagcgaaggtgaatacgccattattcccgccagcgttgccgataaaattgctcagcgtgatgccagcagtattgtgttgcacagcgcgctcagtgccgaagagcaggatgaagacaacccgtatgccgacttcaaagtgcctgatgatttgatgtggtaa

SEQ ID NO: 40960 - DNA, 834 bp, Escherichia coli
atggaactcattgaaaaacatgccagctttggcggctggcaaaatgtgtatcggcattattccgcatcactgaaatgtgaaatgaatgtcggcgtctatctcccaccaaaagctgcaggtgaaaaattaccggtgctgtactggctttcgggcctgacctgcaatgagcagaatttcattactaaatcgggggtgcagcgttacgcggctgagcacaacattattgttgttgcgccggacaccagtccgcgaggcagtcatgtcgcagatgccgaccgttacgatctcgggcaaggtgccgggttttacctgaacgcgacgcaagcgccgtggaatgaacattacaaaatgtatgactatatccgcaacgagctgccggatttagtgatgaatcattttccggcaacggccaaaaagtctatctctggtcattctatgggcggactgggcgcgctggtgctggcgttacgtaacccagatgaatatgtcagcgtctcggcgttttcgcccattgtctccccatcgcaagtaccgtggggacagcaagcctttgccgcatatcttggtgaaaataaagaggcctggttggattaccatccggtgagtcttatttcacaaggtcaacgcgttgcggaaatcatggttgatcaggggttgagtgatgatttttacgcggaacagctgcggactcaaaatcttgaaaagatctgccaggagatgaatatcaaaacgttaatccgttatcacgagggttacgaccacagctattattttgtctccagttttattggcgagcatattgcctaccacgccaataaactgaatatgcgttga

SEQ ID NO: 40961 - DNA, 1110 bp, Escherichia coli
atgaaatcacgtgctgccgttgcatttgctcccggtaaaccgctggaaatcgttgaaattgacgttgcaccaccgaaaaaaggtgaagtgctgattaaagtcacccataccggcgtttgccataccgacgcatttaccctctccggcgatgacccggaaggtgtattcccggtggttctcggtcacgaaggggctggcgttgtggttgaagtcggtgaaggcgtaaccagcgtcaaaccaggcgaccatgtgatcccgctttacaccgcagagtgcggcgagtgtgagttctgtcgttctggcaaaactaacctctgtgttgcggttcgcgaaacccagggtaaaggcctgatgccagacggcaccacccgtttttcttacaatgggcagccgctttatcactacatggggtgttctacattcagtgaatacaccgtagtcgcggaagtgtctctggcaaaaattaatccagaagcaaaccatgaacacgtctgcctgctgggctgtggcgtgaccaccggtattggcgcggtacacaacacagctaaagtccagccaggggattctgttgctgtgtttggtcttggcgcgattggtctggcagtggttcagggcgcgcgtcaggcgaaagcgggacggattatcgctatcgataccaacccgaagaaattcgatctggcgcgtcgcttcggtgccaccgactgcattaacccgaatgactacgacaaaccgattaaagatgtcctgctggatatcaacaaatggggtatcgaccatacctttgaatgcatcggtaatgtcaacgtgatgcgtgcggcgctggaaagtgcgcaccgcggctggggtcagtcggtgatcatcggggtcgcgggttccggtcaggaaatctccacccgtccattccagttggtcactggtcgcgtatggaaaggttccgcgtttggcggcgtgaaaggtcgttcccagttaccgggtatggttgaagatgcgatgaaaggtgatatcgatctggaaccgtttgtcacgcataccatgagcctggatgaaattaatgacgccttcgacctgatgcatgaaggcaaatccattcgaaccgtaattcgttactga

SEQ ID NO: 40962 - DNA, 276 bp, Escherichia coli
atgcccagtactccggaagagaagaaaaaggtccttactcgagttcgtcgtattcgagggcagattgatgctctggaacggtcgctggagggtgatgccgaatgccgtgccatactccaacagatcgctgccgttcggggcgcggctaatgggctgatggcagaagtgcttgaaagccatatccgggaaacgtttgaccgaaatgactgctacagccgcgaagtcagccaatccgttgacgacactattgaactggttcgtgcctatcttaaatag

SEQ ID NO: 40963 - DNA, 1047 bp, Escherichia coli
atgagtcagaaaaattttgtggaactgcgcaacgtcactaaacgattcggcagtaatacggttatcgacaatatcaatctcaccatcccacaagggcaaatggtgacgctgcttggcccttccggctgcggcaaaaccaccattttgcgtctggttgccgggctggaaaaaccgagtgaagggcaaatctttattgatggcgaagatgtcacgcatcgttccattcagcagcgcgatatctgcatggtgtttcagtcatacgctctgttcccgcatatgtcgctgggcgaaaacgtcggctacgggttaaagatgctcggcgtgtcgcgtagcgaagtaaagcagcgggtgaaagaggcgctggcaatggtggatctggaagggttcgaggaccgctatgtcgaccagatttccggtggtcagcaacagcgcgtggcgctggcccgcgcgttgatcctcaaaccaaaggtgctgctgtttgatgagccgttaagtaacctcgatgccaacctgcgccgcagcatgcgcgataagatccgcgagctgcaaaagcagtttaatatcacgtcgctctacgtgactcacgatcaaagtgaggccttcgcggtttccgacactgtgctggtgatgaataaaggtcacatcatgcagattggctcaccgcaggatctctatcgtcagccagcctcccgctttatggcaagttttatgggcgacgccaacctgttcccggcgaactttagcgaagagtatgtcgatatctacggttatcgcctgccgcgcgcggcgcatttcccggtgcaaggtagcggcaccgtcggcgttcgcccggaagccatcaccttaagcaatcacggcgaagagagtcagcgttgtgttattcgccatgtcgcctacatggggccgcagtacgaagtgaccgtagagtggcatggacaggagattttattacaagtaaacgccacccgtttacagcccgatattggtgagcactattacctcgaaatccatccttacgggatgtttgttttagcggatgcggcataa

SEQ ID NO: 40964 - DNA, 2079 bp, Escherichia coli
atgtcacagacacttgcactccatcccgtgaaaaagcgggatgcgattttcctttgggttttgctgggctggctggcatttgtcctgttgccgagctggagcctcgattatggcctgctggaatccacgagtgatgagatcctcggggcgtacggctggtcgcattttaatatcagctggctgtggtatttactcccgagcctgttgctggtccgcccgtttcgtcaggccacgcgcgaacagcgtagtcgtcattatttcgatgccggctgggcattgctctgtatggcgtttatcgtcatcagcgccaccgtggctggacgcggtttaggctacgccgccatcgtgctgtttgtcgaactaggcgcgattatgacgctggccttaacccgcctcgaatggctgggcggcgaccgcttcgtgatcggctcactgattgcgattgtggcgctgattggcatttttatcgtctggccgagcatcgccatttttatcccgatgttcaccaacgacgcgggagagctcgccccgctggcgtttatgaccgtgctctcgcaggcacatattgttcaggtgatcgtcaactctatcgtcttgtcgatagcggtggggataggctgtgctttcttcggcctggtgctggcgatttataccacgcgcatcgctaaacgcagcgccattattggtcgcatcttttccattttgcccatcgttacgccaccgtttgtggtcggcttaggcgtgacgctcatgatggggcgttccggctatgttacggaatttatggtggagtggtttgggctgaccaacaccaactggctgtacggttttaccgggatctggctggcacaggttctggcattcacgccaatggcatttatgatcctcgacggggccattaaaaccattcatccctcgctggaagaggcctcctacaccctgcgcgccagccgctggcaaacctttaacggcgtgtttgtgccgttgttgaagcccgcgctcgccaatgcctttttaatcgtcgtggtacagtcactggctgatttcagtaacccgctggtacttggcggtaacttcgacgtactggcgacgcaaatttacttctatattaccggctcgcagctggattatcaggccgccagcacccttggcgctttcctgctgctgttctcgctgctggtgttctgcatacagtatatgtggattggtaaacgctcttacgtcacggtttccggcaaatcctaccgtggcgacgtccagccgcttccggtcaccctggtgtggagcgtggtcgccatacttgcgatatggattgcctttaacgccctgctctacggcagcattttctacggcagcttcacggtgaactggggcgtggactacaccctgacgctggataactttatcaagctatttggtcagggaatgagcgacggcgcgtggccttcactgctggataccctgctctacgccgggattgccgctcccattaccgctatctttggcctgctcatcgcctgggtggtggtgcgtcaacaattcaaaggcaaaaagaccatcgagttcaccaccatgctgtgctttgccgtaccgggtacggtggcgggcgtttcgtatattcttgcctttaacagcgctccggtttatctcaccggaacggcggcaattgtgattatctcgatggtgatgcgtaacgttccggtgggtattcgcgccgggattgcaggcctggggcagatcgacaaatcgctggatgaagcctcactcagcctgcgcgcgggttccttgcgaaccataacccacattttactgccgctgctgcgtccggccattctctcggccctgatctacagctttgtgcgggccatcacgacggtcagcgccatcgtctttctcgtcacgccggacacccgcgtggcaaccgcctacattcttaaccgcgttgaagacggcgaatatggcgtagccatcgcctatggttcgattctgatcgtggtgatgctggcgattattttcctctttgactggctgatcggagaagcacgtatctcccgttctaaagccaaaaaccaggcgtaa

SEQ ID NO: 40965 - DNA, 1032 bp, Escherichia coli
atgaaaatgacctttacctctactctgattgcttctgccgttgcgctggcgactttaacgggtgccgcgcaggcaaaaggccggctggtggtctattgcagcgccaccaatgaaatgtgtgaggccgaaaccaaagcgtttggcgagaaatatgatgtaaaaacctcgtttatccgcaacggttccggaagcaccctggcaaaagtcgatgctgaaaagaaaaacccccaggctgacgtctggtacggcggcactttagacccgcaatcgcaggctggcgagatgggcctgctacaggcgtataaatcccctaaccttgagcagatcatggagaaattccgcgatccggcaaaagtgaaagggaatctgtcctctgccgtttatgtggggatcctcggttttggcgtaaacaccgatcgtctgaaagagaaaaacctgccggtgccgaagtgctggaaagatctcaccaaaccggaatataaaggcgaaattcaaattgccgatccgcaaagttccggtactgcctacaccgccctggctacttttgcgcagctgtggggggaagatcaggcctttgattatctaaaacaactgaacgccaacgtctctcagtacaccaaatcaggcatagccccggcacgtaacgccgcccgtggcgaaacggcgattggtattggcttcctgcatgactactcgctggaaaaagaacagggcgcgccgctggagttgatttccccgtgtgaaggtacgggctacgaaattggcggcgtcagcattctgaaaggcgcgcgcaacctcgacaacgccaaactgtttgtggactgggtattatcaaaagaagctcaggaactggcgtggaagaaagggaagtcttatcagatcctgactaataccaccgccgaaacgtcgccaaattcgctgaagctcgacgacctgaaattaatcaactacgacatggataaatatggttccacggatgttcgtaaggcattgattaataaatgggtcagcgaagtgaagatgggtaaataa

SEQ ID NO: 40966 - DNA, 1305 bp, Escherichia coli; identical to SEQ ID NO: 23548

SEQ ID NO: 40967 - DNA, 1542 bp, Escherichia coli
atgtcgcgcaatcttcgtcattgggtgattttgctgtttattgtgctagcctggggaaccggctggctgatgctgtggacgctcagcttttatctgaccaataacggtcaacaggcggtgttgtttctcccgcagggagtttatctcgcccttgttattttgctctctcgccgctactggcctgcgttggtgctcccccctttgctgatgatgttctggctccatagtgaacagctattgaacggttatctcatgctggcaacgccggttattagcctgtttcctgccctccttgcgcaaaacttctggcaccgttttccactttactggcagcgtctgacgttgctgttagccactgtcacggcagcttcattgttgaataccgccctgctctccccttttatgtcaggcccaataatgctaccgggtttgacctcatttaccggcggcgtattactgacgccgtttgtctatcttatctttgagtttctgcgccagcagcatcgctaccagctcctgggactcgatacgcataatccccccttgcgtacctctttaatcatctggtgtagcctgttttttattattggtatcggcactcagatggtgctgtcacctgaaattgaacgtctgctgttgatcgtggtctttttgcccaatgtggtgatggcgtggaaatttggctggcaaggtggcgtactctccgggcttttgggcagcatgatgatcaccatcgcccgccagattggcgtgggctttagtaacctggtggagctggagattttcctcgcgacccaggccttgctgggaattggcctgggcattgccatcagtcgccagcaacatctggcgctaaacctgcaccattaccgacaacggctggaggccgagctggcagcgcggcgggcattggcggaaaagctgatccacaccgaggaggacacgcgaaaaaacctggcgcgagagctgcacgacgaaatcggtcagaacatcaccgccattcagatccagtcgcaactggtgaagcgggcgcgtgatccggcgcaaattcaatccgcagccagccaaatcaatgagctcgcccgccgcattcatctctccacccgccaattgctgcgccagttgcggcctcccgcgcttgatgaactgacatttcgcgaagcgttgctgcatctgattaatgaatttgcctttagtgaacgcggcattcattgccagtttgcctatcaactgaactccacaccagaaaacgaaacggtgcgctttaccttgtatcggttattgcaggagttgctcaataacatctgtaaacacgccgaagccagcgaagtgacgattatcctgcgccagcagggagaggtattgcatctggaagtcagcgacaacggtgtggggatcgccagcgggaaaatggctggatttggcattcaggggatgcgtgagcgcgtcagcgccctgggcggcgacttaacgctcgaaaaacagcacggcacgcgggtaattgttaacttgcccacatttttgcaacaaatcgccggataa

SEQ ID NO: 40968 - DNA, 630 bp, Escherichia coli
atgattcgggtagtgctggtggatgaccatgttgtggtgcgctctggcttcgcacaattactctctctggaagacgatctggaggtcattggtcagtacagtagtgccgcgcaggcatggtcggcattaatccgtgatgacgtcaatgttgccgtcattgatattgccatgccggacgaaaacggcctcagtttgcttaagcgcctgcgtgcacaaaaaccgcaatttcgcgccattattcttagcatttatgacgcgccaacctttgtgcaaagcgcgctggatgccggtgccagcgggtatttaaccaaacgctgtgggccggaagagttagtacaggcggtgcgctcggtcgggctgggcgggcattatctctgtgccgatgcgattcgggctttacgcggcggcgggcaacccgcccaggcgctggaaattctcaccccacgagaacgtgaagtgtttgagttactggtcaaaggagacagcgttaaagagatcgcctttaaactcgaactcagtcataaaacggtacatgtgcatcgcgccaatgtgctgggaaaactgaactgccatagcaccattgaactggtacattttgcgctcgaccaccatctgctggcggggcattaa

SEQ ID NO: 40969 - DNA, 963 bp, Escherichia coli
atggcaatttcatcgcgtaacactcttcttgccgcactggcattcatcgcttttcaggcgcaggcggtgaacgtcaccgtggcgtatcaaacctcagccgaaccggcgaaagtggctcaggccgataacacctttgctaaagaaagtggagcaactgtggactggcgcaagtttgacagcggagccagcatcgtgcgggcgctggcttctggcgacgtgcaaatcggcaaccttggttccagcccgttagcggttgcagccagccaacaggtgccgattgaagtcttcttgctggcgtcaaaactgggtaactccgaagcgctggtggtaaagaaaactatcagcaaaccggaagatctgattggcaaacgcatcgccgtaccgtttatctccaccacccactacagcctgctggcggcgctgaaacactggggcattaaacccgggcaagtggagattgtgaacctgcagccgcccgcgattatcgctgcctggcagcggggagatattgatggtgcttatgtctgggcaccggcggttaacgccctggaaaaagacggcaaggtgttgaccgattctgaacaggtcgggcagtggggcgcgccaacgctggacgtttgggtggtgcgcaaagattttgccgagaaacatcctgaggtcgtgaaagcgttctctaaaagcgccatcgatgctcagcaaccgtacattgctaacccagacgtgtggctgaaacagccggaaaacatcagcaaactggcgcgtttaagcggcgtgcctgaaggtgacgttccggggctggtgaaggggaatacctatctgacgccgcagcaacaaacggcagaactgaccggaccggtgaacaaagcgatcatcgacaccgcgcagtttttgaaagagcagggcaaggtcccggctgtagcgaatgattacagccagtacgttacctcgcgcttcgtgcaataa

SEQ ID NO: 40970 - DNA, 768 bp, Escherichia coli
atgctgcaaatctctcatctttacgccgattatggcggcaaaccggtactggaagatatcaacctgacgctggaaagcggcgagctactggtggtgctggggccgtccggctgcggtaaaaccaccctgctgaatttgattgccggttttgtgccttatcagcatggcagcattcaactggcgggtaagcgtattgaggggccgggagcagagcgtggcgtagtttttcagaatgaagggctactaccgtggcgcaatgtacaggacaacgtggcgttcggcctgcaattggcaggtatagagaaaatgcagcgactggaaatcgcgcaccagatgctgaaaaaagtggggctggaaggcgcagaaaaacgctacatctggcagctttccggtggtcaacgtcagcgggtggggattgcccgcgcgctggcggcgaatccccagctgttattactcgacgaaccgtttggtgcgctggacgccttcacccgcgaccagatgcaaaccctgctgctgaaactctggcaggagacgggcaagcaggtgctgttgattacccacgatatagaagaagcggtgtttatggcgactgaactggttctgctttcacccggccctggccgcgtgctggagcggctgccgctcaactttgctcgccgctttgttgcgggagagtcgagccgcagcatcaagtccgatccacaattcatcgccatgcgcgaatatgttttaagccgcgtatttgagcaacgggaggcgttctcatga

SEQ ID NO: 40971 - DNA, 828 bp, Escherichia coli
atgagtgtgctcattaatgaaaaactgcattcgcggcggctgaaatggcgctggccgctctcgcgtcaggtgaccttaagcattggcacgttagcggttttactcactgtatggtggacggtggcggcgctgcaactgattagcccgctgtttttgccgccgccgcaacaagtactggcaaaactgctcaccattgccggaccgcagggatttatggacgccacgctgtggcagcatctggcagccagcctgacgcgcattgtgctggcgctactcgcggcggtgttgatcggcattccggtcgggatcgccatggggctaagcccgacggtgcgcggcattctggatccgataatcgagctttatcgtccggtgccgccgctggcttatttgccgctgatggtgatctggtttggtattggtgaaacctcgaagatcttactgatctatttagcgatttttgcaccggtggcgatgtcggcgctggcgggggtgaaaagcgcgcagcaggttcgcattcgtgctgcccagtcgctgggtgccagccgtgcgcaggtgctgtggtttgtcattttgcccggcgcgctgccggaaatcctcaccggattacgtattggtctgggtgtgggctggtctacgctggtggcggcggagctgattgccgcgacgcgcggtttaggatttatggttcagtcagcgggtgaatttctcgcgactgacgtggtgctggcggggatcgcggtgattgcgattatcgcctttcttttagaactgggtctgcgcgcgttacagcgccgcctgacgccctggcatggagaagtacaatga

SEQ ID NO: 40972 - DNA, 852 bp, Escherichia coli
atgagtgaacgtctgagcattaccccgctggggccgtatatcggagcacaaatttcgggtgccgacctgacgcgcccgttaagcgataatcagtttgaacaactttaccatgcggtactgcgccatcaggtggtgtttctgcgcgatcaagccattacgccgcagcagcaacgcgcgctggcccagcgttttggcgaactgcatattcaccctgtttaccctcatgccgaaggggttgacgagatcatcgtgctggatacccataacgataatccgccagataacgacaactggcataccgatgtgacatttattgaaacgccacccgcaggggcgattctggcagcgaaagagttaccttcgaccggcggcgatacgctctggaccagcggtattgcggcctatgaggcgctctctgttcccttccgccagctgctgagcgggctgcgtgcggagcatgattttcgtaaatcgttcccggaatacaaataccgcaaaaccgaagaggaacatcaacgctggcgcgaggcggttgcgaaaaatccgccgttgctacatccggtggtgcgaacgcatccggtgagcggtaaacaggcgctgtttgtgaatgaaggctttactacgcgaattgttgatgtcagcgagaaagagagcgaagccttgttaggctttttattcgcccatatcactaaaccggagtttcaggtgcgctggcgctggcaaccgaatgatattgcgatttgggataaccgtgtgactcagcactatgccaatgccgattacctgccacagcggcggattatgcatcgggcgacgattcttggggataaaccgttttatcgggcggggtaa

SEQ ID NO: 40973 - DNA, 975 bp, Escherichia coli
atgacagacttaatccaacgccctcgtcgcctgcgcaaatctcctgcgctgcgcgctatgtttgaagagacaacacttagccttaacgacctggtgttgccgatctttgttgaagaagaaattgacgactacaaagccgttgaagccatgcctggcgtgatgcgcattccagagaaacatctggcacgcgaaattgaacgcatcgccaacgccggtattcgttccgtgatgactttcggcatctctcaccataccgatgaaaccggcagcgatgcctggcgggaagatggactggtagcgcgtatgtcgcgcatctgcaagcagacggtgccagaaatgattgtcatgtcagacacctgcttctgtgaatacacttctcacggtcactgcggtgtgctgtgcgagcatggcgtcgacaacgacgcgactctggaaaatttaggcaagcaagccgtggttgcagctgctgcaggtgcagacttcatcgccccttccgccgcgatggatggccaggtacaggcgattcgccaggcgctggacgctgctggctttaaagatacggcgattatgtcgtattcgaccaagttcgcctcctccttttatggtccgttccgtgaagctgccggaagcgcattaaaaggcgaccgcaaaagctatcagatgaacccaatgaaccgtcgtgaggcgattcgtgagtcactgctggatgaagcccagggcgcagactgcctgatggttaaacctgctggagcgtacctcgacatcgtgcgtgagctgcgtgaacgtactgaattgccgattggcgcgtatcaggtgagcggtgagtatgcgatgattaagttcgccgcgctggcgggtgctatagatgaagagaaagtcgtgctcgaaagcttaggttcgattaagcgtgcgggtgcggatctgattttcagctactttgcgctggatttggctgagaagaagattctgcgttaa

SEQ ID NO: 40974 - DNA, 2943 bp, Escherichia coli
atgcactcctggaaaaagaaacttatagtatcacaattagcattggcttgcactctggctatcacctctcaggctaatgcagcgaccaacgatatttctggtcaaacttacaatactttccatcactacaacgacgccacctatgctgatgacgtttactatgatggttatgtaggctggaacaactatgccgctgatagctattacaacggcgatatctacccggtcattaataacgctaccgttaacggcgtgatttctacctactatctggacgacggtatttctaccaataccaacgccaatagtctgacaatcaaaaacagcactattcacggtatgattacctctgagtgcatgactactgattgtgctgatgaccgtgctactggttatgtttatgatcgtctgacactgagcgttgataattcaacgatcgatgacaactacgagcattatacttacaacggtacctataataatgccgctgacactcatgttgtagatgtttacgatatgggtactgctattacactggatcaggaagttgatctgtccatcactaataactctcatgtagcaggtattacgctgactcagggttatgagtgggaagatattgacgacaacacagtcagcactggcgtaaacagcagcgaagtgtttaataacactattactgttaaagattctactgtgacctctggttcatggactgatgaaggtactactggttggtttggccatactggtaatgccagcaactatagcaacacgctgactgcagacgatgttgcaattgccgcaatcgcaaatccgtatgctgataatgcgatgcagactacagtaactttagacaactcaacactgatgggtgatgttgttttctccagtaatttcgatgaaaacttcttcccgcaaggtgctaacagctatcgcgatgctgatggtgatgtagataccaacggttgggatggcacagaccgtatggatgtgactctgaacaacggcagcaagtgggttggcgctgcaatgtctgttcatatggttgatgaagatggtgatggttcttacgacggatatgctgttggtactgaagcaactgcaactctgctcgatattgcagctaacagcctgtggccttcatcaactgtcggtgttgataacatcaatactcaatatgacgaaaatggccatatcgtaggaaacgaagtttaccagagcggtttgtttaatgtgactttgaacggtggttcagagtgggatacaacaaaatcttctctgattgatactttaagtattaacagcggttcccaagttaatgttgcagactctcgtctgatctctgacactgtctctctgactggcggttctaacctgaacatcggtgaagacggtcatgtagcgactaataccctgaccatcgacaatagtaccgttaaaatgtctgatgatgtttctgcgggctggggtttagaagatgctgcactgtacgcaaataccatcaccgtaactaacgacggtctgttggatattaacgttgatcagttcgatgctaacccgttccaggccgataccctgaatctgaccagtaccactgatactaacggcaacattcacgctggtgtattcgatatccatagcagtgattacgtaatggataccgatctggtcaacgatcgtaccaacgatactaccaagtcaaactacggttatggcttaatcgcaatgaactctgatggtcacctgactattaacggtaacggcgataacgacaacactgcttctatcgaagctggtcagaacgaagttgataacaacggtgaccatgttgcagccgcgaccggtaactacaaagttcgtatcgacaacgctactggtgctggttctatcgctgactacaacggcaacgagctgatctacgtcaacgacaaaaacagcaacgcgaccttctctgctgctaacaaagctgacctgggtgcatacacctatcaggctgaacagcgcggtaacaccgttgttctgcaacagatggagttgaccgactacgctaacatggcgctgagcatcccatctgcgaacaccaatatctggaacctggaacaagacaccgttggtactcgtttgaccaactctcgtcatggcctggctgataacggcggcgcatgggtaagctacttcggtggtaacttcaacggcgacaacggcaccatcaactatgatcaggatgttaacggcatcatggtcggtgttgataccaaaattgacggtaacaacgctaagtggatcgtcggtgcggctgcaggcttcgctaaaggtgacatgaatgaccgttctggtcaggtggatcaagacagccagactgcctacatctactcttctgctcacttcgcgaacaacgtctttgttgatggtagcttgagctactctcacttcaacaacgacctgtctgcaaccatgagcaacggtacttacgttgacggtagcaccaactccgacgcttggggcttcggtttgaaagccggttacgacttcaaactgggtgatgctggttacgtgactccttacggcagcatttctggtctgttccagtctggtgatgactaccagctgagcaacgacatgaaagttgacggtcagtcttacgacagcatgcgttatgaactgggtgtagatgcaggttataccttcacctacagcgaagatcaggctctgactccgtacttcaaactggcttacgtctacgacgactctaacaacgataacgatgtgaacggtgattccatcgataacggtactgaagggtctgcggtacgtgttggtctgggtactcagttcagcttcaccaagaacttcagcgcctataccgatgctaactacctcggtggtggtgacgtagatcaagactggtccgcgaacgtgggtgttaaatatacctggtaa

SEQ ID NO: 40975 - DNA, 624 bp, Escherichia coli
atgttatctgtagttaaacctcttcaggaatttggtaagctcgataaatgtttgtccagatacggtacgcgcttcgagtttaataatgaaaagcaagttatattttccagtgatgtcaataacgaagatactttcgttattttagagggagttatctctctgcgtagagaagaaaacgtacttatcggtattacccaggctccttatattatggggctggctgatggtttaatgaaaaacgatataccatacaaattaatatcagaaggaaattgtacgggatatcatctaccagccaaacaaaccattacgcttattgaacaaaatcaactctggcgagacgctttttactggttagcctggcaaaatagaattctggaattacgcgacgtgcagctcattgggcataattcctacgaacaaatccgcgcaacattattatcaatgattgactggaatgaagaattgcgatcacgtattggtgtgatgaattatatccatcaacgtacacgcatatcgcgttctgtcgtcgcagaagttctcgctgctttgcgtaaaggcggctatatcgaaatgaataaaggcaaactggtcgctatcaaccgtttgccttcagagtattaa

SEQ ID NO: 40976 - DNA, 1158 bp, Escherichia coli
ttgaaacgtagtctgcttttttctgccgtgctgtgtgcggcgtcattgacctccgtccatgcggcgcagccgatcactgaaccggagtttgcctctgatattgtcgatcgttatgccgatcatattttttacggcagcggtgccacggggatggcgctggttgttatcgacggtaaccagcgcgtctttcgcagttatggcgaaacgcgacctggtaataacgttcgcccgcagctggattcggtcgtgcgtattgcttccctcaccaagctaatgaccagtgagatgctggtgaaattgctcgaccaggggaccgtgaagttaaacgatccgctaagtaaatatgctccgccaggcgcacgcgtgccaacctacaatgggacgcccattacgctggtcaatctggcaacccataccagcgccctgccccgtgaacagcccggtggcgcggcacatcgtccggtgtttgtctggccaacgcgcgagcaacgctggaaatacctttctacggcgaagctgaaagccgcgccaggcagtcaggcggcgtactctaaccttgcgttcgacctgctggcagatgcactggcgaatgcgtccggcaagccttatacccagttgtttgaagagcagattacccgtccattggggatgaaagacaccacctacactccctcaccggatcagtgccgccgtttaatggttgctgagcgcggtgccagtccgtgcaataacacgctggcggcaattggcagcggcggcgtctattccacgcctggcgatatgatgcgctggatgcagcagtatttgtcatctgatttttatcagcgcagtaaccaggcagatcgcatgcagacgttgatttatcagcgcgcgcagtttacgaaagtgattggcatggatgtccccggcaaagcggatgcgcttggtttaggctgggtatatatggccccgaaagagggtcgtccggggattattcagaagacaggtggtggtggcggtttcattacctatatggcgatgatcccgcagaagaatattggcgcgtttgtggtggtcactcgttcgccgttgacgcgctttaaaaatatgagcgatggcatcaatgatctggtgaccgagctaagcgggaataaaccgttggttatccccgcatcctga

SEQ ID NO: 40977 - DNA, 1221 bp, Escherichia coli
atgtttaagtcttttttcccaaagccgggaacgttttttctctcggcctttgtttgggcattgattgccgttatcttctggcaagccggtgggggggactgggtggcgcgtatcaccggcgcttccgggcagatcccgattagcgccgcgcgtttctggtcgttggatttcctgattttttacgcttactacattgtttgcgtaggactttttgcattgttctggtttatctacagcccgcaccgttggcaatactggtcaatactcggtactgcactgatcatcttcgtcacctggtttttggtggaagttggggttgccgtcaacgcctggtatgcaccgttctatgatctgattcaaaccgcgctaagttcgccgcataaagtcactatcgaacaattttaccgcgaagtgggcgtctttctggggattgcgctgatcgcggtagtgatcagtgtgctgaataacttctttgtcagtcactacgtgttccgctggcgtacggcgatgaacgaatattacatggcgaactggcaacaactgcgtcatatcgaaggcgccgcacagcgtgtgcaggaagacaccatgcgttttgcttcaacgctggagaatatgggtgtcagttttatcaacgccatcatgacgttgatcgccttcctgccggtgttggtaacgctctccgcgcatgtgccggagctgccgattatcgggcacattccgtatggtctggtgattgccgctatcgtctggtcgctgatggggaccggattgctggcagtggtagggatcaaactgccggggctggagtttaaaaaccagcgtgtagaggctgcctaccgtaaagagctggtttatggtgaagacgatgccacgcgcgcgacgccgccaacggtacgcgagctgtttagcgccgtacggaaaaactatttccgcctctattttcactatatgtatttcaacatcgctcgcattctctatttgcaggtcgataacgttttcggtttgttcttgctgtttccgtcaattgttgccggtacgattacgctcggcctgatgacgcagattaccaacgtttttggtcaggttcgcggtgctttccagtacctgattaactcatggaccacactggttgagttgatgtctatctacaaacgtctgcgcagctttgaacatgagctggatggtgacaaaattcaggaagtaacccataccttgagctaa

SEQ ID NO: 40978 - DNA, 1095 bp, Escherichia coli
atgtcgcgagtcaatcatctgtcttcgctttcatttttggcggttctggttttagcggggtgtagcagtcaggcgccacagccgttgaaaaagggcgaaaaagcgatagatgtggctagcgtggtgcggcagaagatgcctgcgagcgtgaaagaccgcgatgcctgggcgaaagatctcgccaccacctttgaaagtcaggggctggcaccgacgctggaaaacgtctgctcggtgctggcggtggcgcagcaggagtcaaattatcaggcagatccggccgttccgggcttaagcaagatcgcctggcaagagattgaccgtcgtgctgaacggatgcacattcctgcttttctggttcatactgcgctaaaaatcaaatcgccaaacggcaaaagttatagcgaacggttagattcggtgcgtacagaaaagcaattgagcgggatttttgacgatctgatcagcatggtgccaatggggcagacgttgtttggttcgcttaatccggtgcgcaccggtgggccgatgcaggtcagcattgcttttgccgaacagcataccaaagggtatccgtggaaaatggacggtacagtccgtcaggaagtctttagtcgccgcggcgggttgtggtttggtacttaccatttactgaattatcccgccagttatagcgcaccgatataccgttttgctgattttaacgctggctggtacgccagccgtaatgccgcgtttcagaacgcggtcagtaaggccagcggcgtgaagctggcactggacggtgatttaattcgttacgacagtaaagaacccgggaaaaccgaactggcaacgcgcaaactggcggcaaaactggggatgagcgacagcgaaattcgtcgtcagctagagaaaggtgacagcttctcttttgaggagacggcgctgtacaagaaagtttatcaacttgccgaagcgaaaacgggtaaatcactcccccgcgaaatgttgcctggcattcaactggaaagcccgaaaatcacccgcaacctgactacggcctggtttgcgaagcgcgtagacgaacggcgggcgcgttgtatgaaacagtga

SEQ ID NO: 40979 - DNA, 309 bp, Escherichia coli
atggctgatttcaccctgtcaaaatcgctgtttagcggaaaatatcgcaatgcctcttcaacgcctggcaacattgcctatgcgttgtttgtgctgttttgcttttgggctggggcgcaattgctgaacctgttagtgcatgcgcccggcgtctatgagcgtttaatgcaggtccaggaaacaggtcgcccacgggtggaaattggtttaggtgtcggcaccattttcgggctgatcccgtttttagtaggctgcctcatttttgcagtggtggcgctatggctgcactggcgacatcgccgccagtaa

SEQ ID NO: 40980 - DNA, 213 bp, Escherichia coli; identical to SEQ ID NO: 82

SEQ ID NO: 40981 - DNA, 1095 bp, Escherichia coli
atggaaaaactgcgggtaggaatcgtttttggtggtaaatcagcggaacatgaagtgtctctgcaatcggcaaaaaacattgtcgatgccattgataaaagtcgcttcgacgttgtgctgctgggcattgataaacaagggcaatggcacgtcagcgatgccagcaattatctgctaaatgcagacgatcctgcccatattgcgttgcgcccttcggcgaccagcctcgcccaggtgccaggtaaacatgagcatcagcttatcgacgcgcaaaacggtcagccgttgccgacggtggatgtcattttcccgattgtccacggtacgctgggcgaagatggttccttgcagggaatgctgcgggtcgccaatttaccgtttgtaggttctgatgttctggcttcagcagcctgtatggataaagatgtcaccaaacgtctgctacgcgatgccgggctgaacattgcgccatttattaccctgacgcgcgctaatcgtcacaacatcagttttgccgaagtggagtctaaactggggttaccactgtttgtaaaaccggctaatcagggctcttctgttggtgtcagcaaagtaaccagtgaagaacaatacgcaattgccgtcgatctggcgttcgagttcgatcataaagtgatcgttgagcaagggatcaaaggtcgtgagatcgaatgcgcagttctgggcaacgacaatccgcaagccagcacctgtggcgagatcgtactcaccagcgatttctatgcctacgacaccaagtacattgacgaagatggcgcgaaagtggtagttccggcagccattgcgccagaaatcaacgataagatccgggcgattgccgttcaggcttatcagacgttgggatgcgcaggcatggcgcgtgtagacgtgtttttaaccccagagaacgaagtggtgatcaacgagatcaacacactgcctggcttcaccaacatcagtatgtatccgaagctgtggcaagccagcggtctgggttacaccgatctgatcacacgtttgattgagctggcgctggagcgtcacgctgcggataacgcattgaaaaccacaatgtaa

SEQ ID NO: 40982 - DNA, 261 bp, Escherichia coli
atgaaaaatctcattgctgagttgttatttaagcttgcccaaaaagaagaagagtcgaaagaactgtgtgcgcaggtagaagctttggagattatcgtcactgcaatgcttcgcaatatggcgcaaaatgaccaacagcggttgattgatcaggtagagggggcgctgtacgaggtaaagcccgatgccagcattcctgacgacgatacggagctgctgcgcgattacgtaaagaagttattgaagcatcctcgtcagtaa

SEQ ID NO: 40983 - DNA, 1416 bp, Escherichia coli
gtgaaacaaagcactattgcactggcactcttaccgttactgtttacccctgtgacaaaagcccggacaccagaaatgcctgttctggaaaaccgggctgctcagggcgatattactgcacccggcggtgctcgccgcttaacggctgatcagaccgccgctctgcgtgattctcttagcgataaacctgcaaaaaatattattttgctgattggcgatgggatgggggattcggaaattactgccgcacgtaattatgccgaaggtgcgggcggcttttttaaaggtatcgatgccttaccgcttaccgggcaatacactcactatgcgctgaataaaaaaaccggaaaaccggactacgtcaccgactcggctgcatcagcaaccgcctggtcaaccggtgtcaaaacctataacggcgcgctgggcgtcgatattcacgaaaaagatcacccaacgattctggaaatggcaaaagccgcaggtctggcgaccggtaacgtttctaccgcagagttgcaggatgccacgcccgccgcgctggtggcgcatgtgacctcgcgcaaatgctacggtccgagcgcgaccagtgaaaaatgtccgggtaacgctctggaaaaaggcggaaaaggatcgattaccgaacagctgcttaacgctcgtgccgacgttacgcttggcggcggcgcaaaaacctttgctgaaacggcaaccgctggtgaatggcagggaaaaacgctgcgtgaacaggcacaggcgcgtggttatcagttggtgagcgatgctgcctcactgaattcggtgacggaagcgaatcagcaaaaacccctgcttggcctgtttgctgacggcaatatgccagtgcgctggctaggaccgaaagcaacgtaccacggtaatatcgataagcccgcagtcacctgtacgcctaatccgcaacgtaatgacagtgtaccgaccctggcacagatgaccgacaaagccattgaattgttgagtaaaaatgagaaaggctttttcctgcaagttgaaggtgcgtcaatcgataaacaggatcatgctgcgaatccttgtgggcaaattggcgagacggtcgatctcgatgaagccgtacaacgggcgctggaattcgccaaaaaggatggtaacacgctggtcatagtcaccgctgatcacgcccacgccagccagattgttgcgccggataccaaagctccgggcctcactcaggcgctaaataccaaagatggcgcagtgatggtgatgagttacgggaactccgaagaggattcacaagaacataccggcagtcagttgcgtattgcggcgtatggcccgcatgccgccaatgtcgttggactgaccgaccagaccgatctcttctacaccatgaaagccgctctggggctgaaataa

SEQ ID NO: 40984 - DNA, 321 bp, Escherichia coli
atgaaaattacattactggttaccttgcttttcggtctggtttttttaaccaccgtcggcgctgccgagagaaccttaaccccacaacaacagcgtatgacctcctgtaatcagcaggcgacggcacaggcgttgaaaggggatgctcgtaagacctacatgagtgattgcctgaagaacagcaagtctgcgcctggtgaaaaaagtttgacgccacagcagcaaaagatgcgcgaatgtaataatcaagcaacgcaacaatcactgaaaggtgatgatcgtaataagtttatgagcgcctgcctcaagaaagccgcctga

SEQ ID NO: 40985 - DNA, 1116 bp, Escherichia coli
atgttcccaaaaataatgaatgatgaaaactttttcaaaaaagcggcggcgcacggggaggaacctcctttaactcctcaaaacgaacatcagcggtccgggctgcgcttcgcccgtcgcgtcagactaccccgtgcggttggcctggctggcatgttcttaccgattgcttcaacgctggtttcacacccgccgccgggctggtggtggctggtgttggtcggctgggcgttcgtctggccgcatttagcctggcagatagcgagcagggccgtcgatccgcttagccgggaaatttacaacttaaaaaccgatgcagtattagcgggaatgtgggtaggcgtaatgggcgtaaacgtgctgccttccaccgcgatgttgatgattatgtgtctgaatttgatgggggcaggcggcccccgtctgtttgtcgcgggtctggtgttgatggtggtttcctgccttgtcaccctcgagctgacgggcattaccgtgtcgttcaatagtgcgccgctggaatggtggctctcccttcccattattgtcatttatcctctgctgtttggctgggtcagctaccagacggcaaccaaactggcggaacataaacgcaggttgcaggtcatgagtacccgcgacggcatgacgggcgtgtataaccgacgtcattgggaaactatgttacgcaatgaatttgataactgtcggcggcataatcgcgatgcaacgttactgattatcgatatcgaccatttcaagagcatcaacgatacctggggccatgatgtgggcgatgaagcgattgtggcgcttacccgacagttacaaattaccctgcgcggtagcgatgtgattggtcggtttggcggcgatgagtttgcggtaatcatgtccggtacgccagctgagagcgccattaccgccatgttacgggtgcatgaagggctaaatacattacgtttgccgaatacgccacaggtaaatttacggattagtgtgggggttgcgccgctgaacccacaaatgagtcactatcgcgagtggttgaaatcggcagatttggcgctctacaaagcaaagaaagccggacgtaaccgcaccgaagtggcggcctga

SEQ ID NO: 40986 - DNA, 810 bp, Escherichia coli
atggaaaagaaaatcggttttattggctgcggcaatatgggaaaagccattctcggcggtctgattgccagcggtcaggtgcttccagggcaaatctgggtatataccccctccccggataaagtcgccgccctgcatgacaagttcggcatcaacgccgcagaatcggcgcaagaagtggcgcaaatcgccgacatcatttttgccgccgttaaacctggcatcatgattaaagtgcttagcgaaatcacctccagcctcaataaagactctctggtcgtttctattgctgcaggtgtcacgctcgaccagcttgcccgcgcgctgggccatgaccggaaaattatccgcgccatgccgaacactcccgcgctggttaatgccgggatgacctccgtaacgccaaacgcgctggtaaccccagaagataccgctgatgtgctgaatattttccgctgctttggcgaagcggaagtaattgctgagccgatgatccacccggtggtcggtgtgagcggttcttcgccagcctacgtctttatgtttatcgaagcgatggccgacgccgccgtgctgggcgggatgccacgcgcccaggcgtataaatttgccgctcaggcggtaatgggttccgcaaaaatggtgctggaaacgggagaacatccgggggcactgaaagatatggtctgctcaccgggaggcaccaccattgaagcggtacgcgtactggaagagaaaggcttccgtgccgcagtgatcgaagcgatgacgaagtgtatggaaaaatcagaaaaactcagcaaatcctga

SEQ ID NO: 40987 - DNA, 459 bp, Escherichia coli
atgacaatttgggtggatgccgacgcgtgtcccaatgtaattaaagagattttgtatcgcgcggcggaacgtatgcagatgccgctggtactggtagcaaaccagagtttacgcgtgccgccatcgcgatttattcgtacgctgcgcgtcgcggcaggtttcgacgttgccgataacgaaattgtccggcagtgtgaagcgggagatttggtgatcaccgcagatatacctttggctgctgaagccatcgagaaaggcgctgcggcgcttaatccgcgcggtgaacgttacacgccagcgaccattcgtgagcgcctgacgatgcgcgattttatggataccttacgtgccagtgggatccagaccggcggaccagatagcctttcacaacgtgaccgccaggcctttgccgcggagctggagaagtggtggctggaagtgcaacgtagtcgtggctaa

SEQ ID NO: 40988 - DNA, 525 bp, Escherichia coli
atgacacaacctctttttctgatcgggcctcggggctgtggtaaaacaacggtcggaatggcccttgccgattcgcttaaccgtcggtttgtcgataccgatcagtggttgcaatcacagctcaatatgacggtcgcggagatcgtcgaaagggaagagtgggcgggatttcgcgccagagaaacggcggcgctggaagcggtaactgcgccatccaccgttatcgctacaggcggcggcattattctgacggaatttaatcgtcacttcatgcaaaataacgggatcgtggtttatttgtgtgcgccagtatcagtcctggttaaccgactgcaagctgcaccggaagaagatttacggccaaccttaacgggaaaaccgctgagcgaagaagttcaggaagtgctggaagaacgcgatgcgctatatcgcgaagttgcgcatattatcatcgacgcaacaaacgaacccagccaggtgatttctgaaattcgcagcgccctggcgcagacgatcaattgttga

SEQ ID NO: 40989 - DNA, 192 bp, Escherichia coli
atgccaacgaaaccgccttatcctcgtgaagcatatatagtgacaattgaaaaaggaaagccaggacagacggtaacctggtaccaactcagagccgatcatcctaaaccagactcgttgatcagtgaacatccgaccgctcaggaagcgatggatgcgaaaaaacgctatgaggaccctgacaaagagtga

SEQ ID NO: 40990 - DNA, 678 bp, Escherichia coli
atgagtgcgtcgttggcgattctaaccatcggcattgtacctatgcaggaagttttgccgctcctgacagaatacattgacgaagataatatttcccatcatagcctgctggggaagttaagccgcgaagaagtgatggcggagtacgcgccagaagcaggcgaagacacaattctcacattattaaatgacaaccatctggcccatgtttcgcgtcgcaaagtagagcgtgacctgcaaggtgtggttgaagtgctcgataatcagggctacgacgtcattatattaatgagtacggcaaacattagtagtatgactgcgcgtaatacgatctttcttgagccgtcgaggatattgccaccgctggtttcctctattgttgaagatcatcaggtgggggttatcgtaccggttgaggagttgctgaccgttcaggcgcaaaaatggcaaattttgcagaaaccgcctgtattttcattgggtaaccccattcatgattcagaacaaaaaatcattgatgccgggaaagaattactggcgaaaggcgcagatgtcatcatgctggattgtttgggatttaaccagcgtcatcgcgatttactgcaaaaacagctcgatgttcctgtcttgctctctaacgtattgattgcacggctggctgcggaattactggtgtaa

SEQ ID NO: 40991 - DNA, 285 bp, Escherichia coli
atgcttcaaagtaatgagtacttttccggcaaagtgaaatcgatcggcttttccagcagcagcactggtcgcgccagcgtgggtgttatggttgaaggcgaatacaccttcagcaccgctgagccggaagagatgacggtaatcagtggcgcgctgaatgtgttactgcctgacgcgaccgactggcaagtgtatgaagccggttcggtgtttaatgttcccggtcacagtgagtttcatctgcaagttgccgaacccacctcttatctgtgccgctatctgtaa

SEQ ID NO: 40992 - DNA, 2280 bp, Escherichia coli; identical to SEQ ID NO: 23549

SEQ ID NO: 40993 - DNA, 450 bp, Escherichia coli; identical to SEQ ID NO: 23550

SEQ ID NO: 40994 - DNA, 978 bp, Escherichia coli
atgcaaggccgccgacaattcgttatcatgcccgctaaatttaacgacaaggccgtggaaattatcatgctgtggttcaaaaatttaatggtttaccgtcttagccgcgagatttcgctgcgtgcagaagagatggaaaaacagctagcctcgatggcatttaccccatgcggcagccaggacatggcgaagatgggctgggttcctccgatgggatcgcacagcgatgcgttaacgcacgttgccaatggtcaaattgttatctgcgcgcgcaaagaagaaaaaatcctaccgtctccggtgattaaacaggcgctggaagcgaaaatcgccaaactggaagcggaacaggcgcgtaagctgaagaaaaccgaaaaagattcgctgaaagacgaagtgctgcactctctgttgccgcgtgctttcagccgttttagccagacaatgatgtggatcgacacggttaacggtttgattatggtggactgcgccagtgccaaaaaagcggaagatacgctggcactgctgcgtaaaagcctggggtcgttaccggttgtaccattgagcatggcaaacccgattgaactgacgctgaccgaatgggtacgttccggtagtgcggcacagggcttccagctgcttgatgaagccgagctgaaatcgttgctggaagatggcggagtgatccgcgcgaagaaacaagatctgaccagcgaagagatcaccaatcacattgaagccggaaaagtggtgactaaactggcgctcgactggcagcagcgcattcagtttgtgatgtgcgacgatggttcgctcaagcgtctgaagttctgcgacgagctgcgcgatcaaaacgaagatatcgaccgtgaagatttcgcccagcgttttgatgccgatttcatcctgatgactggtgaactggcagcgttaattcaaaacctgattgaaggattaggtggcgaagcacaacgttaa

SEQ ID NO: 40995 - DNA, 909 bp, Escherichia coli; identical to SEQ ID NO: 23551

SEQ ID NO: 40996 - DNA, 1269 bp, Escherichia coli
ttggccttgctggtcgttatcctgcaagctatcactttattggctacggtgattggtagccgttctggtagttgtgatggtggtatgaaaaaagtcattttatctttggctctgggcacgtttggtttggggatggccgaatttggcattatgggcgtgctcacggagctggcgcataacgtaggaatttcgattcctgctgccgggcatatgatctcgtattatgcgctgggggtggtggtcggtgcgccaataatcgcactcttttccagccgctactcactcaaacatatcttgttgtttctggtggcgttgtgcgtcattggcaacgccatgttcacgctctcttcgtcgtacctgatgcttgccattggtcgcctggtttccggctttccgcatggcgcattttttggcgtcggagcgatcgtgttatcaaaaattatcaaacccggaaaagtcaccgccgccgtggcggggatggtttccgggatgacagtcgccaatttgctgggcattccgctgggaacgtatttaagtcaggaatttagctggcgttacacctttttattgatcgctgtttttaatattgcggtgatggcatcggtctatttttgggtgccggatattcgcgacgaggcgaaaggaaagctgcgcgaacaatttcactttttgcgcagcccggccccgtggttaattttcgccgccaccatgtttggcaacgcaggtgtgtttgcctggttcagctacgtaaagccatacatgatgtttatttccggtttttcggaaacggcgatgacctttattatgatgttagttgggctagggatggtgctgggaaatatgctaagtggcaggatttcaggacgttattcaccactgcgcattgcagcagtgactgactttataattgtactggcactgctgatgctctttttctgcggcggcatgaaaacaacgtcgcttatttttgcttttatttgttgcgcgggattatttgccctttcagcacctctgcaaatattgttactgcaaaatgccaaaggcggagagttattaggtgccgcaggtgggcaaatagcgtttaacctcggtagcgccgtcggcgcatattgcggaggtatgatgctgacgctggggctggcatataattacgtggcgctgcctgccgccctgctttcgtttgctgcgatgtcatcgttgctgctgtatggtcgctataagcgccagcaagcggcggatagtccggtgctggcgaaaccactggggtag

SEQ ID NO: 40997 - DNA, 3144 bp, Escherichia coli
atgaaaattctcagcctgcgcctgaaaaacctgaactcattaaaaggcgaatggaagattgatttcacccgcgagccgttcgccagcaacgggctgtttgccattaccggcccgaccggtgcggggaaaaccaccctgctggacgccatttgtctggcgctgtatcacgaaactccgcgtctctctaacgtttcacaatcgcaaaatgatctcatgacccgcgataccgctgaatgtctggcggaggtggagtttgaagtgaaaggtgaagcgtatcgcgcgttctggagccagaatcgggcgcgtaaccaacccgacggtaatttgcaggtgccacgcgtagagctggcgcgctgcgccgacggcaaaattctcgccgacaaagtgaaagataagctggaactgacagcgacgttaaccgggctggattacgggcgcttcacccgttcgatgctgctttcgcaggggcaatttgctgccttcctgaatgccaaacccaaagaacgcgcggaattgctcgaggagttaaccggcactgaaatctacgggcaaatctcggcgatggtttttgagcagcacaaatcggcccgcacagagctggagaagctgcaagcgcaggccagcggcgtcgcgttgctcacgccggaacaagtgcaatcgctgacagcgagtttgcaggtacttactgacgaagaaaaacagttacttaccgcgcagcagcaagaacaacaatcactaaactggttaacgcgtctggacgaattgcagcaagaagccagccgccgtcagcaggccttgcaacaggcgttagccgaagaagaaaaagcgcaacctcaactggcggcgctcagtctggcacaaccggcacgaaatcttcgtccgcactgggaacgcatcgcagaacacagcgcggcgctggcgcatactcgccagcagattgaagaagtaaatactcgcttacagaacacaatggcgcttcgcgcgagcattcgccaccacgcggcgaagcagtcagcagaattacagcagcagcaacaaagcctgaatacctggttacaggaacacgaccgcttccgtcagtggaacaacgaactggcgggttggcgtgcgcagttctcccaacaaaccagcgatcgcgagcatctgcggcaatggcagcaacagttaacccatgctgagcaaaaacttaatgcgcttgcggcgatcacgttgatgttaaccgccgatgaagttgctaccgccctggcgcaacatgctgagcaacgcccactgcgtcagcgcctggtcgcgctgcatgggcagattgttccccaacaaaaacgtctggcgcagttaatggtcactatccagaatgtcactctggaacagacgcaacgtaatgccgcacttaacgaaatgcgccagcgttataaagaaaagacgcagcaacttgccgatgtgaaaaccatttgcgagcaggaagcgcgcatcaaaacgctggaagctcaacgtgcacagttacaggcgggtcagccttgtccactttgtggttccaccagccatccggcggtcgaggcgtatcaggcgctggagcctggcgttaatcagtctcgattactggcgctggaaaacgaagttaaaaagctcggcgaagaaggtgcggcgctgcgcgggcaactggatgcattaacgaagcagcttcagcgcgatgaaaacgaagcgcaaagcctccgacaagatgagcaagcacttactcaacaatggcaagccgtcacggccagcctcaatatcaccttgcagccacaggacgatattcaaccgtggctggatgcacaagatgagcacgaacgccagctgcggttactcagccaacgacatgaattacaagggcagattgccgcgcataatcagcaaattatccagtatcaacagcaaattgaacaacgccagcagcagctcttaacggcattggcgggttatgcactgacattgccacaggaagatgaagaagagagctggttggcgacacgtcagcaagaagcgcagagctggcagcaacgccagaacgaattaaccgcgctgcaaaaccgtattcagcagctgacgccgattctggaaacgttgccgcaaagtgatgatctcccgcacagcgaagaaactgtggcgctggataactggcggcaggttcatgaacaatgtctcgcattacacagccagcagcagacgttacagcaacaggatgttctggcggcgcaaagtctgcaaaaagcccaggcgcagtttgacaccgcgctacaggccagcgtctttgacgatcagcaggcgttccttgcggcgctaatggatgaacaaacactaacgcagctggaacagctcaagcagaatctggaaaaccagcgccgtcaggcgcaaacgctggtcactcagacagcagaaacgctggcacagcatcaacaacaccgacctgacgggttggctctcactgtgacggtggagcagattcagcaagagttagcgcaaactcaccaaaagttgcgtgaaaacaccacgagtcaaggcgagattcgccagcagctgaagcaggatgcagataaccgtcagcaacaacaaaccttactgcagcaaattgctcaaatgacgcagcaggttgaggactggggatatctgaattcgctaataggttccaaagagggcgataaattccgcaagtttgcccaggggctgacgctggataatttagtccatctcgctaatcagcaacttacccggctgcacgggcgctatctgttacagcgcaaagccagcgaggcgctggaagtcgaggttgttgatacctggcaggcagatgcggtacgcgatacccgtaccctttccggcggcgaaagtttcctcgttagtctggcgctggcgctggcgctttcggatctggtcagccataaaacacgtattgactcgctgttccttgatgaaggttttggcacgctggatagcgaaacgctggataccgcccttgatgcgctggatgccctgaacgccagtggcaaaaccatcggtgtgattagccacgttgaagcgatgaaagagcgtattcctgtgcagatcaaagtgaagaagatcaacggcctgggctacagcaaactggaaagtacgtttgcagtgaaataa

SEQ ID NO: 40998 - DNA, 1203 bp, Escherichia coli
atgcgcatccttcacacctcagactggcatctcggccagaacttctacagtaaaagccgcgaagctgaacatcaggcttttcttgactggctgctggagacagcacaaacccatcaggtggatgcgattattgttgccggtgatgttttcgataccggctcgccgcccagttacgcccgcacgttatacaaccgttttgttgtcaatttacagcaaactggctgtcatctggtggtactggcaggaaaccatgactcggtcgccacgctgaatgaatcgcgcgatatcatggcgttcctcaatactaccgtggtcgccagcgccggacatgcgccgcaaatcttgcctcgtcgcgacgggacgccaggcgcagtgctgtgccccattccgtttttacgtccgcgtgacattattaccagccaggcggggcttaacggtattgaaaaacagcagcatttactggcagcgattaccgattattaccaacaacactatgccgatgcctgcaaactgcgcggcgatcagcctctgcccatcatcgccacgggacatttaacgaccgtgggggccagtaaaagtgacgccgtgcgtgacatttatattggcacgctggacgcgtttccggcacaaaactttccaccagccgactacatcgcgctcgggcatattcaccgcgcacagattattggcggcatggaacatgttcgctattgcggctcccccattccactgagttttgatgaatgcggtaagagtaaatatgtccatctggtgacattttcaaacggcaaattagagagcgtggaaaacctgaacgtaccggtaacgcaacccatggcagtgctgaaaggcgatctggcgtcgattaccgcacagctggaacagtggcgcgatgtatcgcaggagccacctgtctggctggatatcgaaatcactactgatgagtatctgcatgatattcagcgcaaaatccaggcattaaccgaatcattgcctgttgaagtattgctggtacgtcggagtcgtgaacagcgcgagcgtgtgttagccagccaacagcgtgaaaccctcagcgaactcagcgtcgaagaggtgttcaatcgccgtctggcactggaagaactggatgaatcgcagcagcaacgtctgcagcatcttttcaccacgacgttgcataccctcgccggagaacacgaagcatga

SEQ ID NO: 40999 - DNA, 690 bp, Escherichia coli
atggcgagacgtattctggtcgtagaagatgaagctccaattcgcgaaatggtctgcttcgtgctcgaacaaaatggctttcagccggtcgaagcggaagattatgacagtgctgtgaatcaactgaatgaaccctggccggatttaattctccttgactggatgttacctggcggctccggtatccagttcatcaaacacctcaagcgcgagtcgatgacccgggatattccagtggtgatgttgaccgccagaggggaagaagaagatcgcgtgcgcggccttgaaaccggcgcggatgactatatcaccaagccgttttcgccgaaggagctggtggcgcgaatcaaagcggtaatgcgccgtatttcgccaatggcggtggaagaggtgattgagatgcagggattaagtctcgacccgacatctcaccgagtgatggcgggcgaagagccgctggagatggggccgacagaatttaaactgctgcacttttttatgacgcatcctgagcgcgtgtacagccgcgagcagctgttaaaccacgtctggggaactaacgtgtatgtggaagaccgcacggtcgatgtccacattcgtcgcctgcgtaaagcactggagcccggcgggcatgaccgcatggtgcagaccgtgcgcggtacaggatatcgtttttcaacccgcttttaa

SEQ ID NO: 41000 - DNA, 1296 bp, Escherichia coli
gtgctggaacggctgtcgtggaaaaggctggtgctggagctgctactttgctgcctcccggctttcatcctgggtgcattttttggttacctgccctggtttttgctggcatcggtaacaggactgcttatctggcatttctggaatttattgcgcctttcatggtggctgtgggtggatcgcagtatgaccccgccaccggggcgtggtagctgggaaccgctactatacggcttacaccagatgcagctgcgaaataaaaaacgccgccgtgaactgggcaatctgattaaacgctttcgtagcggcgcggagtcgctgcccgacgcggtggtgctgaccacggaagagggcggtattttctggtgtaacggtctggcgcaacagattcttggtttgcgctggccggaagataacgggcagaacatccttaacctgctgcgttacccggagtttacgcaatatttgaaaacgcgtgatttttctcgcccgctcaatctggtgctcaacaccgggcggcatctggaaattcgcgtcatgccttatacccacaaacagttgctgatggtggcgcgtgatgtcacgcaaatgcatcaactggaaggggcgcggcgtaacttttttgccaacgtgagccatgagttacgtacgccattgaccgtgttacagggttacctggagatgatggatgagcagccgctggaaggcgcggtacgcgaaaaagcgttgcacaccatgcgcgagcagacccagcggatggaagggctggtgaagcagttgctaacgctgtcgaaaattgaagccgcaccgacgcaattgctcaatgaaaaggttgatgtgccgatgatgctgcgcgttgttgagcgcgaggctcagactctgagtcagaaaaaacagacatttaccttcgagatagataacggcctcaaggtgtctggcaacgaagatcagctacgcagtgtgatttcgaacctggtctataacgccgtgaatcatacgccggaaggcacgcatatcaccgtacgctggcagcgagtgccgcacggtgccgaatttagcgttgaagataacggaccgggcattgcaccggagcatattccgcgcctgaccgagcgtttttatcgcgttgataaagcgcgttcccggcaaaccggcggtagcggattagggttagcgatcgtgaaacatgcggtgaatcatcacgaaagtcgcctgaatattgagagtacagtaggaaaaggaacacgtttcagttttgttatcccggaacgtttaattgtcaaaaacagcgattaa

SEQ ID NO: 41001 - DNA, 1320 bp, Escherichia coli
atgacccatcaattaagatcgcgcgatatcatcgctctgggctttatgacatttgcgttgttcgtcggcgcaggtaacattattttccctccaatggtcggcttacaggcaggcgaacacgtctggactgcggcattcggcttcctcattactgccgttggcctgccggtattaacggtagtggcgctggcaaaagttggcggcggtgttgacagcctcagcacgccaatcggtaaagtcgctggcgtactgctggcaacggtttgttacctggcggtggggccgcttttcgctacgccgcgtacagctaccgtttcttttgaagtggggattgcgccgctgacgggtgattccgcgctgccgctgtttatctacagcctggtctatttcgctatcgttattctggtttcgctctatccgggcaagctgctggataccgtgggcaacttccttgcgccgctgaaaattatcgcgctggtcatcctgtctgttgccgcgattgtctggccggcgggttctatcagcacggcgactgaggcttatcaaaacgctgcgttttctaacggcttcgtcaacggctatctgaccatggatacgctgggcgcaatggtgtttggtatcgttattgttaacgcggcgcgttctcgtggcgttaccgaagcgcgcctactgacccgttataccgtctgggctggcctgatggcgggtgttggtctgactctgctgtacctggcgctgttccgtctgggttcagacagcgcgtcgctggtcgatcagtctgcaaacggcgctgctattctgcatgcttacgttcagcacacctttggcggcggcggtagcttcctgctggcggcgttaatcttcatcgcctgcctggtaacggcagttggcctgacctgtgcttgtgcagaattctttgcccagtacgtaccgctctcttatcgtacgctggtgtttatcctcggcggcttctcgatggtggtttctaacctcggcttaagccagctgatccagatctccgtaccggtgctgaccgctatttatccgccgtgtatcgcactggttgtattaagttttacacgctcatggtggcataattcgtcccgcgtgattgctccgccgatgtttatcagcctgctttttggtattctcgacgggatcaaagcatctgcattcagcgatatcttaccgtcctgggcgcagcgtttaccgctggccgaacaaggtctggcgtggttaatgccaacagtggtgatggtggttctggccattatctgggatcgcgcggcaggtcgtcaggtgacctccagcgctcactaa

SEQ ID NO: 41002 - DNA, 1374 bp, Escherichia coli
atggaaagtaagaacaagctaaagcgtgggctaagtacccgccacatacgctttatggcactgggttcagcaattggcaccgggctgttttacggttcggcagacgccatcaaaatggccggtccgagcgtgttgttggcctatattatcggtggtatcgcggcgtatatcattatgcgtgcgctgggggaaatgtcggtacataacccggccgccagctctttctcgcgttatgcgcaggaaaacctcggcccgctggcaggttacattaccggctggacctactgctttgaaatccttattgtcgccatcgccgatgtgaccgcttttggtatctatatgggtgtctggttcccgacggtgccgcactggatttgggtactgagcgtggtgctgatcatttgcgccgtaaacctgatgagcgtgaaggtattcggtgagctggaattctggttctcgttctttaaagtcgccaccatcatcatcatgattgtcgccggtttcggcatcatcatctgggggattggcaacggcgggcaaccgaccggtattcataacctgtggagcaacggcggcttcttcagtaacggctggcttggcatggtaatgtcgttgcaaatggtgatgtttgcttacggtgggatcgaaattatcgggattaccgccggtgaagcgaaagatcctgagaaatcgataccgcgtgcgattaactccgtgccgatgcgtattctggtgttctacgtcggtacgctgttcgtcattatgtctatctacccgtggaatcaggttggcactgccggtagcccgttcgtgctgacgttccagcatatgggcattacctttgccgccagcattcttaactttgttgtgctgactgcttcgctgtcggcaattaacagtgatgtatttggcgtaggccgtatgctccacggtatggcagagcagggcagcgcgccgaaaattttcagcaaaacgtcgcgtcgcggtattccgtgggttacggtgctggtgatgactaccgcgctgctgtttgcggtgtatctgaactacatcatgccggaaaacgtcttcctggtgatcgcttcgctggcaaccttcgccacggtgtgggtgtggattatgatcctgctgtcgcaaattgccttccgtcgccgtttgccgccagaagaagttaaggcgctgaaatttaaagtgccgggtggggtagcaacgaccatcggcgggctgattttcctgctctttattatcgggttgattggttatcacccggatacgcgtatctcgctgtatgtcggtttcgcgtggattgttgtgctgttgattggctggatgtttaagcgtcgccacgatcgtcagctggctgaaaaccaataa

SEQ ID NO: 41003 - DNA, 1818 bp, Escherichia coli
atgatgttaaatgcatggcacctgccggtgcccccatttgttaaacaaagcaaagatcaactgctcattacactgtggctgacgggcgaagacccaccgcagcgcattatgctgcgtacagaacacgataacgaagaaatgtcagtaccaatgcataagcagcgcagtcagccgcagccaggcgtcaccgcatggcgtgcggcgattgatctctccagcggacaaccccggcggcgttacagtttcaaactgctgtggcacgatcgccagcgttggtttacaccgcagggcttcagccgaatgccgccggcacgactggagcagtttgccgtcgatgtaccggatatcggcccacaatgggctgcggatcagattttttatcagatcttccctgatcgttttgcgcgtagtcttcctcgtgaagctgaacaggatcatgtctattaccatcatgcagccggacaagagatcatcttgcgtgactgggatgaaccggtcacggcgcaggcgggcggatcaacgttctatggcggcgatctggacgggataagcgaaaaactgccgtatctgaaaaagcttggcgtgacggcgctgtatctcaatccggtgtttaaagctcccagcgtacataaatacgataccgaggattatcgccatgtcgatccgcagtttggcggtgatggggcgttgctgcgcttacgccacaatacgcagcagctgggaatgcggctggtgctggatggcgtgtttaaccacagtggcgattcccatgcctggtttgacaggcacaatcgtggcacggggggtgcttgtcacaaccccgaatcgccctggcgcgactggtactcgtttagtgatgatggcacggcgctcgactggcttggctatgccagcttgccgaagctggattatcagtcggaaagtctggtgaatgaaatttatcgcggggaagacagtattgtccgccactggctgaaagcgccgtggaatatggacggctggcggctggatgtggtgcatatgctgggggaagcgggtggggcgcgcaataatttgcagcacgttgctgggatcaccgaagcggcgaaagaaacccagccggaagcgtatatagttggagagcattttggcgatgcacggcaatggttacaggccgatgtggaagatgccgccatgaactatcgcggcttcacattcccgttgtggggatttcttgccaataccgacatctcttacgatccgcagcaaattgacgctcaaacctgtatggcctggatggataattaccgcgcagggctttctcatcaacagcaattacgtatgtttaatcagctcgacagccacgatactgcgcgatttaaaacgctgctcggtcgggaggttgcgcgcctgcccctggcagtggtctggctgttcacctggcctggtgtaccgtgcatttattacggtgatgaagtgggactggatggcaaaaatgatccgttttgccgtaagccgttcccctggcaggtggaaaaacaggatatggcgttattcgcgttgtaccagcgaatgattgcgctgcgtaagaaaagtcaggcgctgcgtcgtggcggctgtcaggtgctgtatgcggaagataacgtggtggtatttgtccgcgtgctgaatcagcagcgtgtactggtggcaattaaccgtggcgaagcctgtgaagtggtgctacccgcgtcaccgtttcttaatgtcgtgcaatggcaacgcaaagaaggccatgggcaactgacagacgggattctggctttgcctgccatttcggctacggtgtggatgaactaa

SEQ ID NO: 41004 - DNA, 1446 bp, Escherichia coli
atgacaatttcaaattcgaatttattgaaaccgtttattactggtactgagttgccaccttttaaagaggatgtcttttctaaaacagaagaacaatttaaaaaaagcacctatggcaaatcgcttttcatttccggaaatgaaaacttagtaaacatttcagcggaaaaaatcgatgaaataaaaaatagcaaaaatttcttttcaaacattgtaaatataataattttactcattaagcatcctgataaaattctgcccattcttcatggttgtcctgtagagtcgatcgaagtcattaagaatgcgaaacgaacgggacaatggtcatatgagatgactgataagaacgggcagagtattgaagtgtcctatattttcactgataccatagatgataaatctgatggaaaattatgcttaaaaatctgtaactcctgcaaccaaaatgattctagtacacatgaatataaaatagatcatcaacagttgaaaaatcacataaggcaacttgaggagtgggcccttcttgaaaagttttatgataacaacgcttattattctaaacgtacaaaacaattagagaagaaaattgccgatgcggggtttataacaaggaaggttaaagccgagaactttaatgtaaaagagtttaaagacgatatagcctcgatgctttgtgaacagccccccatgcgtacacaccagatttcttcatccggatacgtatctgccgataaactgcacaaactctataagacaaatttggaagacgcgcagagagatctgaaaacaacaccggttgacatcgatggtgttagtctaaaatcaataactcgggaaaaaattgcggaagaaattgcgaaaaaaactgcggaaataattgcgaaacaaaatgcgaagagcattgaggagaagaatattgaaaaaaacaagaaacaaacaaattctgaggataattttgtcttaaaattctcaccggaagaaatcaatgagatgctcctggattacagcgatgaagaacaaaaaaaattaagaccttttttcactagtgatcacatctattgtttgtttgatgcttttagtcagggtttgcataatgttgctcgtaatggcagtccacggtatgcaggtttactacgtcaaatagcatccaagtctgcgatattacaagattttgatcaacaattgttctggcgcacgtttacaggaggggtcctccatcgacatatctctgtgaagagcgagccagaaaagacagatgtatggcgattcagtagccaatttgattttccacatataaatgaaaacggagagttgtccagaacggtactcatgttcgagggggttgctgaaagcaactttaaagatatcgccaatcattccagcgaatgtttttcttaccgttgttatgccgccccgctggatgcgaatgctaaaaaatag

SEQ ID NO: 41005 - DNA, 582 bp, Escherichia coli
atgaattttttagctcacctgcatttagcccatctcgcggaaagctcgctttccggcaatttgctggctgatttcgtacgcggaaatcctgaagaaagttttccgcccgacgtcgtggctggcattcatatgcatcgacgtatcgacgtattgactgacaatctgccggaagtccgcgaagcacgggagtggtttcgtagtgaaactcgccgcgttgcgcctattacgctggatgtcatgtgggatcactttctttcccgtcactggtcgcagctgtcgccggactttccgctacaggaatttgtttgttatgcccgcgagcaagtgatgacaattttgccggactcaccgccacgctttatcaacctgaacaactacttatggtcagagcagtggctggtgcgctatcgcgatatggatttcatccagaacgtgttaaacggcatggcaagccgtcgcccacgtctggatgccctgcgtgactcctggtacgatttagacgcccattatgccgccctcgaaacccgcttctggcagttttatccacggatgatggcgcaggcgtcacgcaaggcgctctga

SEQ ID NO: 41006 - DNA, 1071 bp, Escherichia coli
atgcgcgttaccgatttctcctttgaattgcccgaatccctgattgcccactatccgatgcctgaacgcagtagctgtcgtttactgtcgctggacgggccgacgggcgcgctgacgcacggtactttcaccgatttactcgataagctcaaccccggcgatcttctggtttttaataatacccgggtgatcccggcgcgcctgtttgggcgtaaagccagcggcggcaagattgaagtgctggttgaacggatgctcgacgacaaacgcattcttgcgcatattcgcgcctcgaaagcgccaaaacctggcgcagaactgctgctgggcgatgacgaaagtattaacgcaacaatgaccgcgcgccacggcgcactgtttgaagtcgaatttaatgatgaacgctcggtgctggatattctcaacagcatcggccatatgccgctgccgccgtatatcgaccgtccggacgaagacgctgaccgcgaactttatcaaaccgtttatagcgaaaaaccgggcgcggttgcagccccgaccgctggtctgcattttgacgaacctttgctggaaaaattacgcgccaaaggcgtggagatggcgttcgtcaccctgcacgttggtgcgggcaccttccagccggtacgcgtcgacaccattgaagatcacatcatgcactcggaatacgctgaagtaccgcaggatgtggtagacgcggtactggcggcgaaagcgcgcggtaaccgggtgattgcggttggcaccacctcagtacgttcgctggaaagcgcggctcaggcggcgaaaaacgatctcatcgaaccgttctttgacgatacccaaatctttatctatccgggcttccagtacaaagtggtcgatgcgctggtgacaaacttccaccttccggaatcgacgctgattatgctggtttcggcctttgccggttatcaacacacaatgaatgcctataaagcggcggtagaagagaaatatcgcttttttagttacggtgatgcgatgtttatcacgtacaatccgcaggcaattaatgagcgcgtcggggagtaa

SEQ ID NO: 41007 - DNA, 1128 bp, Escherichia coli
atgaaatttgaactggacaccaccgacggtcgcgcacgccgtggccgcctggtctttgatcgtggcgtagtggaaacgccttgttttatgcctgttggcacctacggcaccgtaaaagggatgacgccggaagaagttgaagccactggcgcgcaaattatcctcggcaacaccttccacctgtggctgcgcccgggccaggaaatcatgaaactgcacggcgatctgcacgattttatgcagtggaagggaccgatcctcaccgactccggcggcttccaagtcttcagccttggcgatattcgtaaaatcaccgaacagggcgtgcacttccgtaacccgatcaacggcgacccgattttcctcgacccggaaaagtcgatggagattcagtacgatcttggttcggatatcgtcatgatctttgatgagtgtacgccgtatcctgctgactgggattacgcaaaacgctccatggagatgtctctgcgttgggcgaagcgtagccgtgagcgttttgacagtctcggaaacaaaaatgcgctgtttggtatcattcagggcagcgtttacgaagatttacgtgatatttctgttaaaggtctggtagatatcggttttgatggctacgctgtcggcggtctggctgtgggtgagccgaaagcagatatgcaccgcattctggagcatgtatgcccgcaaattccggcagacaaaccgcgttacctgatgggcgttggtaaaccagaagacctggttgaaggcgtacgtcgtggtatcgatatgtttgactgcgtaatgccaacccgcaacgcccgaaatggtcatttgttcgtgaccgatggcgtggtgaaaatccgcaatgcgaagtataagagcgatactggcccactcgatcctgagtgtgattgctacacctgtcgcaattattcacgcgcttacttgcatcatcttgaccgttgcaacgaaatattaggcgcgcgactcaataccattcataaccttcgttactaccagcgtttgatggcgggtttacgcaaggctattgaagagggtaaattagagagcttcgtaactgatttttaccagcgtcaggggcgagaagtaccacctttgaacgttgattaa

SEQ ID NO: 41008 - DNA, 333 bp, Escherichia coli
atgagcttttttatttctgatgcggtagcggcaacgggtgcaccggcgcaaggtagcccgatgtctttgattttgatgctggtggtattcggtctgattttctatttcatgatcctgcgtccacagcagaagcgcaccaaagaacacaaaaagctgatggactccattgccaaaggtgatgaagttctgacgaacggtggcctggttggtcgcgtaaccaaagtagcggaaaacggctacattgctatcgcgctgaatgacaccactgaagtagttattaaacgtgacttcgtagctgccgtcctgccgaaaggcaccatgaaggcgctgtaa

SEQ ID NO: 41009 - DNA, 1815 bp, Escherichia coli
atgctgatcgtggtgattgtcatcggtctgctgtatgcgcttcccaacctgtttggtgaggatccggctgttcagatcactggtgcgcgcggagtcgccgccagtgagcaaacgctgatccaggtccagaaaacgttacaagaagaaaaaataactgctaagtctgtggcactggaagagggcgctattcttgcgcgcttcgactccactgacacccagctgcgcgctcgtgaagcattaatgggcgttatgggtgacaaatacgtcgtggcgcttaaccttgccccggcaacgccgcgctggctggcagctattcacgctgagccgatgaagctcggccttgacctgcgtggcggcgttcacttcctgatggaagtggatatggacaccgcgcttggcaaactccaggaacaaaatatcgatagcctgcgcagcgacctgcgcgaaaaaggcatcccgtataccaccgttcgtaaagaaaataactacggcctgagcatcactttccgcgatgctaaagctcgtgatgaagccattgcgtatctgagcaagcgtcatccggacctggtgattagcagtcagggcagcaaccagctgcgtgcggtaatgagcgatgctcgtctgagtgaagcgcgtgaatatgcggtgcagcagaacatcaatatcctgcgtaaccgtgtaaaccaacttggcgtggcggagccggtggttcagcgtcagggtgctgaccgtatcgttgttgaactgccaggtattcaggacactgcgcgtgcgaaagagattctgggtgcgacggcaacgctggaattccgtctggtaaacaccaacgttgatcaggccgctgcggcatccggtcgcgtaccgggcgactctgaagtgaaacagacccgcgaaggtcagccggttgtgctgtacaaacgcgtaattcttaccggtgaccatatcaccgactccacttccagccaggacgaatacaaccagccgcaggttaacatctcgctcgatagcgctggtggcaacattatgtctaacttcaccaaggacaacatcggcaaaccgatggcaaccctgtttgtggagtacaaagacagcggtaagaaagatgcaaatggtcgtgcggttctggtgaaacaggaagaggtgattaacatcgccaacatccagtctcgtctgggtaacagcttccgtatcaccggcatcaacaacccgaacgaagcccgtcagctgtcactgctgctgcgtgccggtgcgttgatcgcgccgattcagattgttgaagaacgtacaattggcccgaccctgggtatgcagaacattgagcaggggctggaggcttgccttgccggtctgctggtttctattctgttcatgatcatcttctataagaagtttggtctgattgcgaccagtgctctgattgccaacttgatcttgatcgtcggtattatgtcgctgttgccaggcgcaacactgagtatgccaggtatcgcgggtatcgtcttaacccttgcggtagcggtcgatgcgaacgtactgatcaacgaacgtattaaagaagagttgagcaacggacgtactgttcaacaggcaattgatgaaggttatcgtggcgcattcagttctatcttcgatgcgaacatcaccacgctgattaaagtcatcatcctgtacgcagtgggtaccggggcaattaaagggttcgcgattactaccggtatcggtgtggcgacgtcgatgtttaccgcgattgtcggtacgcgtgccatcgtaaacctgctatatggcggcaagcgcgtcaagaagctgtcaatctga

SEQ ID NO: 41010 - DNA, 972 bp, Escherichia coli
gtggcacaggaatatactgttgaacaactaaaccacggccgtaaagtctatgactttatgcgctgggactactgggcttttggcatctctggtctgctgttaatcgctgctatcgttattatgggcgtgcgcggctttaactgggggctggatttcaccggtggtacggttatcgaaattacgctcgaaaaaccggctgaaattgacgtaatgcgtgatgcattgcaaaaagccggttttgaagagccgatgctgcaaaactttggtagcagccacgacatcatggtccgtatgccgcctgctgaaggcgaaaccggcggtcaggtgctgggcagccaggttctgaaggtgattaacgaatccaccaatcagaatgcagcagtgaagcgtattgagttcgtcggtccgagcgtgggggcagaccttgcgcaaaccggtgcgatggcgttgatggcagcgctgctgtctatcctcgtgtacgtaggtttccgctttgagtggcgactggcggcaggggtggttattgcgctggcgcacgacgttatcattacgctgggtattttgtcgttattccatatcgagattgacctgaccattgtggcatcgttgatgtcggttatcggttactcgcttaacgacagtatcgtggtatcggaccgaattcgtgaaaacttccgcaagatccgtcgcggtacgccttacgaaatctttaacgtgtccttgacccagacgctgcaccgtaccttgatcacatccggtactaccttgatggttatcctgatgctgtatctcttcggtggtccggtactggaaggcttctcgctgaccatgcttatcggtgtttccatcggtactgcatcttccatctatgtggcatctgcgttggctctgaaactgggtatgaagcgcgaacacatgttgcagcagaaagtggaaaaagaaggggcggatcagccgtcaattctgccgtaa

SEQ ID NO: 41011 - DNA, 243 bp, Escherichia coli
atgcgcaaaattacctcagtaagcgttggcgaacaattagatagttttattacccggatggtccagtctggtcgttatggctcggccagtgaagtaatgcgttcggcacttcgtctattggaacaacaagaatccagggatgaagctgtcagaaatgctgttattgaaggtcttgagagcggtgaaagttcgatgacgcttcgtgatatcgcagcagaaaggaagcaaaaacatcgtgtataa

SEQ ID NO: 41012 - DNA, 282 bp, Escherichia coli
gtgtataagcttagcggaaaagctgttgaagatttcagagggatctatgactacacgctgggaaagtttggtgatgagcaggcggatcgctataccgactctctcggcacttttctggatacactctctcaaatgcccgagatagggcaagactatgatgcgattccagaggtaaagaagatcgcatttaggtttcacactgtttattacgttataagagtcgatgacattctcattgcgcgcattcttcatcagttgatggaacctcgccgtcactggtaa

SEQ ID NO: 41013 - DNA, 348 bp, Escherichia coli
atggctatcatcccaaaaaactatgcgcggttagaaagcggctatcgcgaaaaagcattaaaaatctatccgtgggtctgcggtcgctgttcccgcgagtttgtttattccaacctgcgtgaacttaccgttcaccacattgatcacgaccataccaataacccggaagatggcagtaactgggaattgctttgtctctattgccacgatcatgagcattcgaaatataccgaagcggatcagtatggtacgaccgttatcgcaggggaagatgcgcagaaagatgtcggtgaagcgaagtacaacccattcgctgacctgaaagcgatgatgaacaagaagaagtga

SEQ ID NO: 41014 - DNA, 885 bp, Escherichia coli; identical to SEQ ID NO: 23552

SEQ ID NO: 41015 - DNA, 540 bp, Escherichia coli
atgaatattaacgtttttcgactgatcctgctgggaagcctattcagccttagcgcctgtgtgcagcaaagtgaagtgcgacagatgaaacacagcgtcagcacgctgaaccaggagatgacgcaactcaatcaagaaacagtcaaaatcactcagcaaaacaggctgaatgcaaaatccagcagtggggtttaccttctgcctggagcgaaaacaccggcaagactggaaagccagatcggtactttacgtatgtcgctggtgaatattacgcctgatacagatggcaccaccctgacactacgtattcagggtgagtcgaatgatcccttgcccgcattcagcggaactgttgaatatgggcaaattcagggaacaatagacaactttcaggaaatcaatgtacagaatcaattgattaatgcccctgccagcgtcctcgcccccagcgatgttgatattccgttacagttaaaggggatttctgtggatcagttaggctttgtacgtatccacgacattcaacctgttatgcagtaa

SEQ ID NO: 41016 - DNA, 450 bp, Escherichia coli
atgcattgcccattctgtttcgccgtggacactaaggtaattgactctcgtctcgtgggcgagggttcatccgtacgccgccgtcggcagtgtctggtgtgtaatgaacgtttcaccacctttgaagtggcggagctggttatgccgcgtgttgtaaaaagcaacgacgtgcgtgaaccgtttaatgaagaaaaattacgtagcggaatgctgcgggcgctggaaaaacgtccggtgagttccgatgacgtcgaaatggcaatcaatcatattaaatcgcagctgcgcgccaccggtgagcgcgaagtgccgagcaagatgattggcaatctggtgatggagcaattgaaaaagctcgataaagtcgcctatatccgttttgcctctgtctaccgcagtttcgaagatatcaaagaatttggcgaagagatcgcgcgcctggaggactaa

SEQ ID NO: 41017 - DNA, 1104 bp, Escherichia coli
gtgcaggacgagtattacatggcgcgggcgctaaagctggcgcaacgaggacgttttaccacccaccccaacccgaatgtcgggtgcgtcattgtcaaagatggcgaaattgtcggtgaaggttaccaccaacgagcgggtgaaccacatgccgaagtacacgcgttgcgtatggcgggtgaaaaagccaaaggtgcgaccgcctatgtcacactcgaaccctgtagccatcatggtcgtacgccaccgtgctgtgacgcactcatcgccgctggcgtagcgcgcgtggtcgctgcgatgcaggacccgaacccgcaggtcgctgggcgtggactttaccgtctgcaacaggctggcattgacgtcagccacggcctgatgatgagtgaagccgagcaattgaataaaggctttctcaagcggatgcgcaccggctttccttatattcagttaaaacttggcgcatcgcttgatggccgcacggcgatggcgagcggcgaaagccagtggatcacttcgcctcaggcgcggcgcgacgtacaacgactgcgcgcacaaagtcatgccattttaaccagcagcgctacggtgctggcggatgatcctgccttaacggtgcgttggtctgaactggatgtacaaactcaggcgctctacccgcaacatcatctccgccagccggtacgtattgtgattgatagccaaaatcgcgtgacgccggaacatcacattgtgcagcagcccggcgaaacctggttcgcgcgtacgcaggaagattctcgtgagtggccggaaacggtgcgtaccttgctgattccagagcataaaggtcatctggatctggttgtactgatgatgcaactgggtaaacagcagattaacagcatctgggtggaagcggggccaacgctcgctggcgcattgctgcaggcggggttagtcgatgagctgattgtctatatcgcacctaaactattaggcagcgacgcccgtggattatgcacactgccagggcttgagaaattagctgacgccccccaatttaaattcaaagagatacgtcatgtaggcccggatgtttgcctgcatttagtgggtgcatga

SEQ ID NO: 41018 - DNA, 471 bp, Escherichia coli
atgaacattattgaagctaacgttgctaccccggacgctcgcgtcgccatcaccatcgcgcgtttcaacaactttatcaatgacagcctgctggaaggtgcaattgatgcactgaaacgtatcggtcaggtaaaagatgaaaacattaccgttgtttgggtgcctggtgcctatgagctgccgctggcggcgggtgcactggctaaaaccggtaaatacgacgcggtgattgcgctgggtacggttattcgtggtggcactgcccattttgaatatgtcgctggtggtgcaagcaacggcctggcgcatgttgcccaggacagcgaaattccggttgcttttggggttctgaccactgaaagcattgaacaagcgatcgaacgtgctggcaccaaagctggcaacaaaggtgcagaagctgcactgaccgcgcttgaaatgattaatgtattgaaagccatcaaggcctga

SEQ ID NO: 41019 - DNA, 420 bp, Escherichia coli
gtgaaacctgctgctcgtcgccgcgctcgtgagtgtgccgtccaggcgctctactcctggcagttgtcccagaacgacatcgctgatgttgaataccagttcctggctgaacaggatgtaaaagacgttgacgtcctgtacttccgtgagctgctggccggggtggcgactaataccgcatacctcgacggactgatgaagccatacctgtcccgcctgctggaagaactgggacaggtagaaaaagcagtactgcgcattgcgctgtacgaactgtctaaacgtagcgatgtgccatacaaagtggccattaacgaagcgatcgaactggcgaaatcgttcggcgcagaagacagccataagttcgtcaacggcgtactcgataaagcagcacctgtgattcgccctaacaaaaagtaa

SEQ ID NO: 41020 - DNA, 978 bp, Escherichia coli
atggcatgtggcgagttctccctgattgcccgttattttgaccgtgtaagaagttctcgtcttgatgtcgaactgggcatcggcgacgattgcgctcttctcaatatccccgagaaacagaccctggcgatcagcactgatacgctggtggcgggcaaccatttcctccctgatatcgatcctgctgatctggcttataaagcactggcggtgaacctaagcgatctggcagcgatgggggccgatccggcctggctgacgctggcattaaccttaccggacgtagacgaagcgtggcttgagtccttcagcgacagtttgtttgatcttctcaattattacgatatgcaactcattggcggcgataccacgcgtgggccattatcaatgacgttgggtatccacggctttgttccgatgggacgagccttaacgcgctctggggcgaaaccgggtgactggatctatgtgaccggtacaccgggcgatagcgccgccgggctggcgattttgcaaaaccgtttgcaggttgccgatgctaaagatgcggactacttgatcaaacgtcatctccgtccatcgccgcgtattttacaggggcaggcactgcgcgatctggcaaattcagctatcgatctctctgacggtctgatttccgatctcgggcatatcgtgaaagccagcgactgcggcgcacgtattgacctggcattgctgccgttttctgatgcgctttctcgccatgttgtaccggaacaggcgctgcgctgggcgctctctggcggtgaagattacgagttgtgtttcacggtgccggaactgaaccgtggcgcgctggatgtggctctcggtcatctgggcgtaccgtttacctgtatcgggcaaatgaccgccgatatcgaagggctttgttttattcgtgacggcgaacctgtcacgttagactggaaaggatatgaccattttgccacgccataa

SEQ ID NO: 41021 - DNA, 516 bp, Escherichia coli
atgaccattttgccacgccataaagatgtcgcgaaaagtcgcctgaagatgagtaatccgtggcatctgcttgctgtcggattcggaagtggattaagcccaatcgttcctggcacgatgggatcgctggcggcgattccgttctggtatctgatgacctttttgccctggcagctctactcgctggtggtgatgttggggatctgtatcggcgtctatctttgtcatcaaacggcgaaagacatgggggtgcacgatcacggtagcatcgtatgggatgagtttattggcatgtggatcaccctgatggcgctgccgaccaatgactggcagtgggtcgccgccgggtttgtgattttccgtattctggatatgtggaagccgtggccgatccgctggtttgatcgcaatgtacatggcggcatggggatcatgatcgatgatattgtcgccggggtgatttccgcaggcatcctgtactttatcggtcatcactggccgctgggtattctttaa

SEQ ID NO: 41022 - DNA, 1572 bp, Escherichia coli
atgatgaaaaccatcaccaaacaaccgatcctgtttactgatgtaccggttgcagatttaagaaactcaatgaagcaagatttaaatcaaaatcttattgaaaggctgtggaacaaaattcgtgatttttttctggacagtgataaacaaaaggcatttaaatcgattcataaatacatcaatacattgtcagttctaaattataattcagcgttaactccagatcccaactttaatatagatgcaacgtcagatttagactcatatttaaagctggattttgatcgcctctcgcccaaacaaaaacagaccacgctttgttgtttctggaataaaattgcatcctcattgccagagccatacaacagtaccatcaaacataacattattttttataaagacggagaaaatctgatgatacgtggaactatctctattgttaacgaggtagtaaagacttattcactcccaatagaaaaggatgacaatggatattacgatttcagcggtctatatctagcacacagcaatatttccggtaaagatcccaataaagatcccgatatagatttcggtatagatatgggaaactgtaactgctcaaatgtcaacttcgaacatacttatttttatggcgtcaagtttacaaatgcgaattgtacaaatgcgaattttaacaattgtagatttaagaaatgcgacctgacaaatatgaattgcactggcgcaattcttgataatgcgatgatatatggtaaagaaaaagaacctgagatgcaatatccagaagcagatcaaataatacaaaggataacttatcagaaatcagatgggaatgaaacgaaagggatgattctaactaactgctcctgtgtgaaaaccactttcaattgggcagatttatcagaaagtgattgccaaaatgtggactttagcgaggctaatctttcaaacactattcttcctgacatcgtcaggatgaaaggcacgaaactttaccgtaccgacctttttaatccgatattaaaaacagaagcagaatcaacagaagaaaaagacattagcccattagcaaaaattattcttgactatattgaatcagataaaaaccctgagtcattaaactttgaagaaaaatcaacagttattaaaataaaacaagatatcgataattttattttctacaatcagcatttaaagaaaatattcaatcgcgcaatgaatcttcaagaaaaaataagcaggaaaaagtataatgaattttttaaatatatacaagcagaagccaaacaatatttcaaagaccagtataaactaacaaaaaatgattatttgaagaaagtacctttaactgcacaattaattgcaaaatacaaaatggatgatcaattggaccaacttttggttacccgtgaaattcaagatgaaataaaatcaaagattcaagacaaaatagatgaactttctaaaaatttattcaacactatgaccgaaaccattgagaataattttgatgatatttttcgtcaacagtcagagaatatgagcaattattatgagttcgtcgactga

SEQ ID NO: 41023 - DNA, 975 bp, Escherichia coli
atgcaatacaaccccttaggaaaaaccgaccttcgcgtttcccgactttgcctcggctgtatgacctttggcgagccagatcgtggtaatcacgcatggacactgccggaagagagcagccgtcccatcattaaacgcgcactggaaggcggcataaatttctttgataccgccaatagctattccgatggcagcagcgaagagatcgtcggtcgcgcactgcgggatttctcccgtcgtgaagacgtggtcgttgccaccaaagtgttccatcgcgttggtgatttaccggaaggattatcccgtgcacaaattttgcgctctatcgacgacagcctgcgacgtctcggcatggattatgtcgatatcctgcaaattcatcgctgggattacaacacgccgatcgaagagacgctggaagccctcaacgacgtggtaaaagccgggaaagcgcgttatatcggcgcgtcatccatgcacgcttcgcagtttgctcaggcactggaactacaaaaacagcacggctgggcgcagtttgtcagtatgcaggatcactacaatctgatttatcgcgaagaagagcgcgagatgctgccgctgtgttatcaggaaggcgtggcggtcattccgtggagtccgctggcgcgggggcgactgacgcgtccgtggggagaaactaccgcacgactggtgtctgatgaggtggggaaaaatctctataaagaaagcgatgaaaatgacgcgcagatcgcagagcggttaacgggcgtcagtgaagaactcggtgcaacacgagcacaagttgcgctggcctggttgttgagtaaaccgggcattgccgcaccgattatcggaacttcgcgggaagaacagcttgatgagctgctgaacgcggtggatatcactttgaagccggaacagattgctgaactggaaacaccgtataaaccgcatccggtcgtaggatttaagtaa

SEQ ID NO: 41024 - DNA, 1863 bp, Escherichia coli
atgagttttgatattgccaaatacccgaccctggcactggtcgactccacccaggagctacgactgttgccaaaagagagtttaccgaaactctgcgacgaactgcgccgctatttactcgacagcgtgagccgttccagcgggcacttcgcctccgggctgggcacggtcgaactgaccgtggcgctgcactatgtctataacaccccgtttgaccaattgatttgggatgtggggcatcaggcttatccgcataaaattttgaccggacgccgcgacaaaatcggcaccatccgtcagaaaggcggtctacacccgttcccgtggcgcggcgaaagcgaatatgacgtattaagcgtcgggcattcatcaacctccatcagtgccggaattggtattgcggttgctgccgagaaagaaggcaaaaatcgccgcaccgtctgtgtgattggcgacggcgcgattaccgcaggcatggcgtttgaagcgatgaatcacgcgggcgatattcgtcctgatatgctggtggtcctcaacgacaatgaaatgtcgatttccgaaaatgttggcgcgcttaacaaccatctggcgcagctgctttccggtaagctttactcttcactgcgcgaaggcgggaaaaaagttttctctggcgttccgccaattaaagagctgctcaaacgtaccgaagaacatattaaaggcatggtggtgcctggcacgttgtttgaagagctgggctttaactacatcggcccggttgacggtcacgatgtgctggggcttatcaccacgctgaagaacatgcgcgacctgaaaggcccgcagttcctgcatatcatgaccaaaaaaggtcgtggttatgaaccggcagaaaaagacccaatcaccttccacgccgtgcctaaatttgatccctccagcggttgtttgccgaaaagtagcggtggtttaccaagctattcaaaaatctttggcgactggttgtgcgaaacggcagcgaaagataacaaactgatggcgattactccggcgatgcgtgaaggttccggcatggtcgagttttcacgtaaattcccggatcgctattttgatgtagcgattgccgagcaacacgcggtgacctttgccgccggtctggcgattggtggctacaaaccgatcgtggcaatttactccaccttcctgcaacgcgcctatgatcaggtgctgcatgacgtggcaattcaaaaactcccggtcctgttcgccatcgaccgcgcgggcattgttggtgctgacggtcaaacccaccagggcgcttttgatctctcttacctgcgctgcataccggaaatggtcattatgaccccgagcgatgaaaacgaatgtcgccagatgctctataccggctatcactataacgatggcccgtcagcggtgcgctacccgcgtggcaacgcggtcggcgtggaactgacgccgctggaaaaactaccaattggcaaaggcattgtgaagcgtcgtggcgagaaactggcgatccttaactttggtacgctgatgccagaagcggcgaaagtcgccgaatcgctgaacgccacgctggtcgatatgcgttttgtgaaaccgcttgatgaaacgttaattctggaaatggccgccagtcatgaagcactggttaccgtagaagaaaacgccattatgggcggtgcaggcagcggagtgaacgaagtgctgatggcccatcgtaaaccagtacccgtgctgaacattggcctgccggacttctttattccgcaaggaactcaggaagaaatgcgcgccgaactcggcctcgatgccgccggtatggaagccaaaatcaaggcctggctggcataa

SEQ ID NO: 41025 - DNA, 900 bp, Escherichia coli
atggactttccgcagcaactcgaagcctgcgttaagcaggccaaccaggcgctgagccgttttatcgccccactgccctttcagaacactcccgtggtcgaaaccatgcagtatggcgcattattaggtggtaagcgcctgcgacctttcctggtttatgccaccggtcatatgttcggcgttagcacaaacacgctggacgcacccgctgccgccgtagagtgtatccacgcttactcattaattcatgatgatttaccggcgatggatgatgacgatctgcgtcgcggcttgccgacctgccatgtgaagtttggcgaagcgaacgcgattctcgctggcgacgctttacaaacgctggcgttctcgattttaagcgatgctgatatgccagaagtgtcggatcgcgacagaatttcgatgatttctgaactggcgagcgccagcggtattgccggaatgtgtggtggtcaggcgttggatttagacgcggaaggcaaacacgtacctctggacgcgcttgagcgtattcatcgtcataaaacaggcgcattaattcgcgccgccgttcgccttggtgcattaagcgccggagataaaggacgtcgtgctctaccagtactcgacaagtacgcagagagcatcggccttgccttccaggttcaggatgacatcctggatgtggtgggagatactgcaacgttgggaaaacgtcagggtgccgaccagcagcttggcaaaagtacctaccctgcactcctgggtcttgagcaagcccggaagaaagcccaggatctgatcgacgatgcccgccagtcgctgaaacaactggctgaacagtcgatcgatacttcggcactggaagcgctagcggactacatcatccagcgtaataaataa

SEQ ID NO: 41026 - DNA, 243 bp, Escherichia coli
atgccgaagaaaaatgaggcgcccgccagctttgaaaaggcgctgagcgagctggaacagattgtaacccgtctggaaagtggcgacctgccgctggaagaggcgctgaacgagttcgaacgcggcgtgcagctggcacgtcaggggcaggccaaattacaacaagccgaacagcgcgtacaaattctgctgtctgacaacgaagacgcctctctaaccccttttacaccggacaatgagtaa

SEQ ID NO: 41027 - DNA, 1449 bp, Escherichia coli
atgaagtttatcattaaattgttcccggaaatcaccatcaaaagccaatctgtgcgcttgcgctttataaaaatccttaccgggaacattcgtaacgttttaaagcactatgatgagacgctcgctgtcgtccgccactgggataacatcgaagttcgcgcgaaagatgaaaaccagcgtctgactattcgcgacgccctgacccgtattcctggtatccaccatattctcgaagtcgaagacgtgccgtttaccgacatgcacgatattttcgagaaagcgttggttcagtatcgcgatcagctggatggcaaaaccttctgcgtacgcgtgaagcgccgtggcaaacatgattttagctcgattgatgtggaacgttacgtcggcggcggtttaaatcagcatattgaatccgcgcgcgtgaagctgaccaatccggatgtgactgtccatctggaagtggaagacgatcgtctcctgctgattaaaggccgctacgaaggtattggcggtttcccgatcggcacccaggaagatgtgctgtcgctcatttccggtggtttcgactccggtgtttccagttatatgttgatgcgtcgcggctgccgcgtgcattactgcttctttaacctcggcggcgcagcgcatgaaattggcgtgcgtcaggtggcacattatctgtggaaccgctttggcagctcccaccgcgtgcgttttgtcgctattaatttcgagccggtagtcggggaaattctcgagaaaatcgacgacggtcagatgggcgttatcctcaaacgtatgatggtgcgtgccgcgtctaaagtggctgaacgttacggcgtacaggcgctggtcaccggcgaagcgctcggccaggtgtccagtcagacgctgaccaacctgcgcctgattgataacgtctctgatacgctgatcctgcgtccgctgatctcttacgacaaagagcacatcatcaacctggctcgccagattggcaccgaagactttgcccgtactatgccggaatactgcggtgtgatctccaaaagcccgacggtgaaagcggttaagtcgaagattgaagcggaagaagagaaattcgacttcagcattctcgataaagtggttgaagaagcgaataacgttgatatccgcgaaatcgcccagcagaccgggcaggaagtggtggaagtggaaaccgtcaatgacttcggcccgaacgacgtgattctcgatatccgttctgtcgatgaacaggaagataagccactgaaagtcgaagggattgatgtggtttcactgccgttctacaagttgagcaccaaatttggcgatctcgaccagaacagaacctggctactgtggtgtgagcgcggggtaatgagccgcctgcaggcgctctatctacgcgaacagggctttaagaatgtgaaggtgtatcgtccgtaa

SEQ ID NO: 41028 - DNA, 492 bp, Escherichia coli
atgccatctttcgatattgtctctgaagttgatcttcaggaagcacgtaacgcggtcgataacgcgagccgcgaagtggagtcccgttttgacttccgtaacgttgaagcctcatttgagctgaacgacgccagcaaaaccatcaaagtgttgagcgagtccgacttccaggtcaatcagttgctggatattctgcgtgccaagctgctgaagcgcggcattgaaggcagttcactggatgtaccggaaaatatcgttcatagcggtaaaacctggtttgtggaagcgaaactgaaacagggcattgagagcgccactcagaaaaaaatcgtcaagatgatcaaagacagcaaactgaaagtgcaggcgcaaattcagggcgatgagatccgtgtgacgggcaaatctcgtgatgatttacaggctgtcatggcgatggtgcgcggtggcgatctcggtcagccgttccagttcaaaaacttccgcgattaa

SEQ ID NO: 41029 - DNA, 1365 bp, Escherichia coli
atgaacgattataaaatgacgccaggtgagcggcgcgcgacctggggtttagggaccgtattctcgttgcgcatgctgggcatgttcatggttctgccggttctgaccacgtacggcatggctctgcaaggtgccagcgaagcattaatcggtattgccattggtatttatggtctgactcaggccgtttttcagattccgtttggcctgctttccgaccgcattggtcgcaaaccattaattgtcggtgggctggcagtgtttgccgccggtagcgttatcgctgcgctctctgactccatctggggaattattctgggtcgggcgctacaaggctccggtgcgattgccgctgccgttatggcgctgctttccgatctcacgcgcgaacaaaaccgcaccaaagcaatggcgtttatcggcgtgagctttggcattacctttgccattgcgatggtgcttggcccgatcatcactcacaaacttgggctgcacgcgctgttctggatgatcgctattctggcaacgaccggcattgcgttgaccatttgggttgtgcccaacagtagcactcacgtacttaatcgtgagtccggaatggtgaaaggcagtttcagtaaggtgctggcggaaccgcggctgctgaaactcaactttggcattatgtgtctgcatattttgctgatgtcgacgtttgttgccctgcccggacaactggctgatgcggggttcccggcggctgaacactggaaggtctatctggcgacaatgctaatcgcctttggctcggtcgtgcctttcattatctacgctgaagttaagcgcaaaatgaagcaagtctttgtcttctgcgtcgggttgatcgtggttgcggaaattgtgttgaggaacgcgcaaacgcagttctggcaactggtggtcggcgtgcagcttttctttgtggcgtttaatttgatggaagccctcctgccctcacttatcagtaaagagtcgccagcaggttacaaaggtacggcgatgggtgtttactccaccagccagtttcttggcgtggcgattggcggttcgctgggcggctggattgacggcatgtttgacggtcagggggtatttctcgctggcgcaatgctggccgcagtgtggctggcagtcgccagtaccatgaaagaaccgccgtatgtcagcagtttgcgcattgaaatcccggcgaacattgccgcaaacgaggcgttaaaagtgcgtttgctggaaactgaaggcatcaaagaagtgttgattgcagaagaagaacattcagcttatgtgaaaatcgacagcaaagtgacgaatcgctttgatgttgaacaggcaattcgccaggcataa

SEQ ID NO: 41030 - DNA, 891 bp, Escherichia coli
atgatgtttaagcaatacctgcaagtaacgaaaccaggcatcatctttggcaacctgatctcggtgattgggggattcctgctggcctcaaagggcagcattgattatcccctgtttatctacacgctggttggggtgtcactggttgtggcgtcgggttgtgtgtttaacaactacatcgacagggatatcgacagaaagatggaaaggacgaagaatcgggtgctggttaaaggcctgatctctcctgctgtctcgctggtgtacgccaccttgctgggtattgctggctttatgctgctgtggtttggcgcgaatccgctggcctgctggctgggggtgatgggctttgtggtttatgtcggcgtttatagcctgtacatgaaacgccactccgtctacggcacattgattggttcgctctccggcgctgcgccgccggtgattggctactgtgcagtaaccggcgagttcgatagcggcgcagcgatcctgctggctatcttcagcctgtggcagatgcctcactcctatgccatcgccattttccgctttaaggattaccaggcggcaaacattccggtattgccagtggtaaaaggcatttcggtggcgaagaatcacatcacgctgtatatcatcgcctttgccgttgccacgctgatgctctctcttggcggttacgctggatataaatatctggtggtcgccgcggcggttagcgtctggtggttaggtatggctctgcgcggttataaagttgctgatgacagaatctgggcgcgcaagctgttcggcttctctatcatcgccatcactgccctctcggtgatgatgtccgttgattttatggtgccggactcgcatacgctgctggctgctgtgtggtaa

SEQ ID NO: 41031 - DNA, 330 bp, Escherichia coli
atgagtcattctaccgatcacagcggcgcgtcccatggcagcgtaaaaacctacatgacaggctttatcctgtcgatcattctgacggtgattccgttctggatggtgatgacaggggctgcctctccggccgtaattctgggaacaatcctggcaatggcagtggtacaggttctggtgcatctggtgtgcttcctgcacatgaataccaaatcagatgaaggctggaacatgacggcgtttgtcttcaccgtgctaatcatcgctatcctagttgtaggctccatctggattatgtggaacctcaactacaacatgatgatgcactaa

SEQ ID NO: 41032 - DNA, 615 bp, Escherichia coli
atggcaactgatactttgacgcacgcgactgtccacgcgcacgaacacgggcaccacgatgcaggcggaaccaaaatcttcggattttggatctacctgatgagcgactgcattctgttctctatcttgtttgctacctatgccgttctggtgaacggcaccgcaggcggcccgacaggtaaggacattttcgaactgccgttcgttctggttgaaactttcttgctgttgttcagctccatcacctacggcatggcggctatcgccatgtacaaaaacaacaaaagccaggttatctcctggctggcgttgacctggttgtttggcgccggatttatcgggatggaaatctacgaattccatcacctgattgttaacggcatgggtccggatcgcagcggcttcctgtcagcgttctttgcgctggtcggcacgcacggtctgcacgtcacttccggtcttatctggatggcggtgctgatggtacaaatcgctcgtcgcggcctgaccagcactaaccgtacccgcatcatgtgcctgagcctgttctggcacttcctggatgtggtttggatctgtgtgttcactgttgtttatctgatgggggcgatgtaa

SEQ ID NO: 41033 - DNA, 1992 bp, Escherichia coli
atgttcggaaaattatcacttgatgcagtcccgttccatgaacctatcgtcatggttacgatcgctggcattattttgggaggtctggcgctcgttggcctgatcacttacttcggtaagtggacctacctgtggaaagagtggctgacctccgtcgaccataaacgcctcggtatcatgtatatcatcgtggcgattgtgatgttgctgcgtggttttgctgacgccattatgatgcgtagccagcaggctcttgcctcggcgggcgaagcgggcttcctgccacctcaccactacgatcagatcttcaccgcgcacggcgtgattatgatcttcttcgtggcgatgcctttcgttatcggtctgatgaacttggtggttccgctgcagatcggcgcgcgtgacgttgcgttcccgttcctcaacaacttaagcttctggtttaccgttgttggtgtgattctggttaacgtttctctcggcgtgggcgaatttgcgcagaccggctggctggcctatccaccgctatcgggaatagagtacagtccgggagtcggtgtcgattactggatatggagtctccagctatccggtataggtacgacgcttaccggtatcaacttcttcgttaccattctgaagatgcgcgcaccgggcatgaccatgttcaagatgccagtatttacctgggcatcactgtgcgcgaacgtactgattattgcttccttcccaattctgacggttaccgtcgcgttgttgaccctggatcgctatctgggcacccatttctttaccaacgatatgggtggcaacatgatgatgtacatcaacctgatttgggcctggggccacccggaagtttacatcctgatcctgcctgttttcggtgtgttctccgaaattgcggcaaccttctcgcgtaaacgtctgtttggttatacctcgctggtatgggcaaccgtctgtatcaccgtgctgtcgttcatcgtttggctgcaccacttctttacgatgggtgcgggcgcgaacgtaaacgccttctttggtatcaccacaatgattatcgccatcccgaccggggtgaagatcttcaactggctgttcaccatgtatcagggccgcatcgtgttccattctgcgatgctgtggactatcggttttatcgtcaccttctcggtgggcggtatgactggcgtgctgctggcagtaccgggcgcggacttcgttctacataacagcctgttcctgattgcgcacttccataacgtgatcatcggcggcgtggtcttcggctgcttcgcagggatgacctactggtggcctaaagcgttcggtttcaaactgaacgaaacctggggtaaacgcgcgttttggttctggatcatcggcttcttcgttgcctttatgccactgtacgcgctgggcttcatgggcatgacccgtcgtttgagccagcagattgacccgcagttccacaccatgctgatgattgcagccagcggtgcagtactgattgcgctaggtattctctgcctcgttattcagatgtacgtttctattcgtgaccgcgaccagaaccgtgacctgactggcgacccgtggggtggccgtacgctggagtgggcaacctcttccccgcctccgttctataactttgccgttgtgccgcacgttcacgagcgtgatgcattctgggaaatgaaagagaaaggcgaagcgtataaaaagcctgaccactatgaagaaattcatatgccgaaaaacagcggtgcaggtatcgtcattgcggctttctccaccatcttcggtttcgccatgatctggcatatctggtggctggcgattgttggcttcgcaggcatgatcatcacctggatcgtgaaaagcttcgacgaggacgtggattactacgtgccggtggcagaaatcgaaaaactggaaaaccagcatttcgatgagattactaaggcagggctgaaaaatggcaactga

SEQ ID NO: 41034 - DNA, 948 bp, Escherichia coli
atgagactcaggaaatacaataaaagtttgggatggttgtcattatttgcaggcactgtattgctcagtggctgtaattctgcgctgttagatcccaaaggacagattggtctggagcaacgttcactgatactgacggcatttggcctgatgttgattgtcgttattcccgcaatcttgatggctgttggtttcgcctggaagtaccgtgcgagcaataaagatgctaagtacagcccgaactggtcacactccaataaagtggaagctgtggtctggacggtacctatcttaatcatcatcttccttgcggtactgacctggaaaaccactcacgctcttgagcctagcaagccgctggcacacgacgagaagcccattaccatcgaagtggtttccatggactggaaatggttcttcatctacccggaacagggctttgctaccgtgaatgaaatcgctttcccggcgaacactccggtgtacttcaaagtgacctccaactccgtgatgaactccttcttcattccgcgtctgggtagccagatttatgccatggccggtatgcagactcgcctgcatctgatcgccaacgaacccggcacttatgacggtatctccgccagctacagcggcccgggcttctcaggcatgaagttcaaagctattgcaacaccggatcgcgccgcattcgaccagtgggtcgcaaaagcgaaacagtcgccgaactccatgtctgacatggcagcgttcgaaaaactggccgcgcctagcgaatacaaccaggtggaatatttctccaacgtgaaaccaaacttgtttgccgatgtaattaacaagtttatggctcacggtaagagcatggacatgacccagccagaaggtgagcacagcgcacacgaaggtatggaaggcatggacatgagccacgcggaatccgcccattaa

SEQ ID NO: 41035 - DNA, 1476 bp, Escherichia coli
atgtccagtcaatatttacgtatttttcaacagccgcgttcagccatattgctgatcctgggttttgcttccgggctaccgctcgccctgacatccggcaccttacaggcctggatgacggtcgagaatatcgatctcaaaaccattggtttcttctctctggtaggccaggcttacgtttttaaattcctctggtcaccgctgatggaccgctacacgcccccattttttgggcggcggcgcggttggctgctcgccacgcaaatcctgttattagtcgccattgcggcgatgggttttctcgaaccaggcacccaactccgctggatggcggcgctggcggtggtgatcgctttttgctctgcctcccaggatattgtcttcgatgcgtggaaaaccgatgtgctcccggcagaagaacgtggtgcgggcgcggcaatcagcgttctgggttaccgtttagggatgctggtttccggcggcctagccctgtggctggcagataaatggctgggctggcagggcatgtactggttgatggcggcgctgttgatcccctgtattatcgcgacgttgcttgcaccagaaccaaccgacaccattcctgtgcccaaaacgctggaacaagcggttgttgcacctctgcgagatttctttggtcgcaataatgcctggcttattttgcttcttatcgtgctgtataagctgggcgacgcattcgccatgagcctgacaaccacgtttttgattcgcggcgtcgggtttgatgcgggtgaagtaggcgtggtaaacaaaacgcttggcttactagcgaccattgttggcgcattgtacggtgggattttgatgcagcgcctgtcactgttccgggcactgctgattttcggcattttacaaggtgcgtctaacgctggttactggctgctgtcgattactgataagcatctctacagcatgggcgcagccgtctttttcgaaaacctctgtggcgggatgggcacatcagcctttgtcgcgctgttaatgacgctatgtaataagtcattttccgctactcaatttgccctgctctcagcgctttctgctgtagggcgagtttatgtcggccccgtggcgggttggtttgttgaagcacacggctggtcgacattctatctattctccgtcgccgctgccgtaccagggcttattttgctgctggtttgccgccagacgcttgaatatacacgagtaaatgacaactttatctcccgtaccgcatatccggcaggttatgcctttgccatgtggacactggcggcgggcgtcagcctgttggccgtgtggttactgctattgacgatggacgcgctggatttgacgcacttctctttcctgcctgctctgctggaagtcggggttttagtcgccctttctggcgtcgtgcttggtggtttgctggattatctggcgctacgaaaaacgcatctgacgtaa

SEQ ID NO: 41036 - DNA, 579 bp, Escherichia coli
atgttcaaaaaaatcctcttcccgttagttgctctgtttatgcttgcaggatgcgcaagaccgccaacaactattgaagtttccccgacgattacactgccacagcaggatccaagcctgatgggcgtcaccgtaagcattaatggtgccgatcagcgtaccgatcaggcgctggcaaaagtcacccgcgataatcaaatcgttaccctgaccgcctcccgcgatctgcgtttcctgctgcaagaagtgctggaaaaacagatgaccgcgcgtggttacatggttggtccgaatggcccggttaatctgcaaatcatcgttagccagctgtatgctgacgtgtcccagggcaacgtgcgctacaacatcgctaccaaagcggatatcgccatcatcgctaccgcgcagaatggcaacaaaatgaccaaaaactatcgtgccagctacaacgttgaaggtgcgttccaggcctccaacaaaaatatcgccgatgcggttaacagtgtgctgaccgataccatcgctgatatgtctcaggacaccagcattcacgaattcatcaagcagaacgcgcgttaa

SEQ ID NO: 41037 - DNA, 315 bp, Escherichia coli; identical to SEQ ID NO: 138
